United States Patent Application Publication US 2006/0134663 A1 - sequence listing, part 104

SEQ ID NO: 318690 - DNA, 1096 bp, Homo Sapiens
  misc_feature (46)..(46): n is a, c, g, or t
  misc_feature (505)..(505): n is a, c, g, or t
  misc_feature (672)..(672): n is a, c, g, or t
  misc_feature (699)..(699): n is a, c, g, or t
  misc_feature (751)..(792): n is a, c, g, or t
  misc_feature (810)..(810): n is a, c, g, or t
  misc_feature (825)..(825): n is a, c, g, or t
  misc_feature (856)..(856): n is a, c, g, or t
  misc_feature (875)..(875): n is a, c, g, or t
  misc_feature (883)..(883): n is a, c, g, or t
  misc_feature (936)..(936): n is a, c, g, or t
  misc_feature (976)..(976): n is a, c, g, or t
  misc_feature (989)..(989): n is a, c, g, or t
  misc_feature (993)..(993): n is a, c, g, or t
  misc_feature (996)..(996): n is a, c, g, or t
  misc_feature (1009)..(1009): n is a, c, g, or t
  misc_feature (1015)..(1015): n is a, c, g, or t
  misc_feature (1022)..(1022): n is a, c, g, or t
  misc_feature (1029)..(1029): n is a, c, g, or t
  misc_feature (1036)..(1036): n is a, c, g, or t
  misc_feature (1044)..(1044): n is a, c, g, or t
  misc_feature (1049)..(1049): n is a, c, g, or t
  misc_feature (1058)..(1059): n is a, c, g, or t
  misc_feature (1064)..(1064): n is a, c, g, or t
  misc_feature (1069)..(1069): n is a, c, g, or t
  misc_feature (1074)..(1075): n is a, c, g, or t
  misc_feature (1077)..(1077): n is a, c, g, or t
  misc_feature (1082)..(1082): n is a, c, g, or t
  misc_feature (1089)..(1089): n is a, c, g, or t
gcgaaaacagataggagctttactcaaaatcacaaagacactattntttcattgagaaccagtgtgagagtaggaaaattggcaaatggccagttgcccccagcagccctgaagaaatcaggtaaattccgctccagagacggcagagctggtggcgccattcttcagggcagcacagcctttttctgctacacctcactcggccagggcaaagtttgtagactgcagccgctcagtctcctggcagatgttctgctccactgtgtcacactcggctaggaatgcctgaaccttttttaccaagcctttccttttcaatctactgtctttgaaattttctggcaggatcagtgtgtcaatctcctccaagatcttcataaactgctctattgtggcttttactctcctatcaagtttgcagagagcttcagcttgcaaatccttgggcagaaaaccctgctggattccagtaagctctttattcaactcttccagctggtcagcnatcttctccacagacttctccaaatgtttcaacttctttagttcaacctcttcctgtggactgtgctttttcccaattaacatgacccggcaaccatcttgtattccaagtgctgacaacggtgtttccatttccttcagagattttcctagcgagggaagactgcncatgagcgtcatcgaaaatggtgaganttctgccatcatcataagacttcaaatctgacacctgttcaggtgtttgagnnnnnnnnnnnnnnnnnnnnnnnnnnnnnnnnnnnnnnnnnngaaccttaaatatgagtntctgaaaagactgtngaacccctatgacctcttcaacaacctgggncagggcttggacaactggntcactgcngccctgctgggagggaacatgaaggtcgttcttttcattgctgttggttacanttacggtgagcccagctgccgccatttcctcctggtcacntctcgctccgggncgantcncgtccgggtcacncctggntcgattnactttcncctgggncgctcccnatctnggtgctctnnatcanggcgntcccnntnagggnaatcccntccgggt

SEQ ID NO: 318691 - DNA, 867 bp, Homo Sapiens
  misc_feature (37)..(37): n is a, c, g, or t
  misc_feature (587)..(587): n is a, c, g, or t
atttttttcattgagaacccagtgtgagagtaggganaatttggcaaatgggccagttgcccccccaggcagcccctgaaagaaatcaggtaaaattcccgctcccagaagacggcagagctggtggcgccattcttcagggcagcacagcctttttctgctacacctcacttcggccagggcaaagtttgtagactgcagccgctcagtctcctggcagatgttctgctccactgtgtcacactcggctaggaatgcctgaaccttttttaccaagcctttccttttcaatctactgtctttgaaattttctggcaggatcagtgtgtcaatctcctccaagatcttcataaactgctctattgtggcttttactctcctatcaagtttgcagagagcttcagcttgcaaatccttgggcagaaaaccctgctggattccagtaagctctttattcaactcttccagctggtcagctatcttctccacagacttctccaaatgtttcaacttctttagttcaacctcttcctgtggactgttctttttcccaattaacatgaccgggcaaaccatcttgtattccnaagtgctgaacaacggtgtttcccatttccttacagagattttcccttaaatatgagtttctgaaaagactgtggaacccctatgacctcttcaacaacctgggcccaggtcttggacaactggttcactgctgccctgctgggaggtaacatgaaggtcgtgcttctcattgctgtgggtgacagtcacggtgagcccagctgccgccatttcctccctggtcacctcctcgcctcgggtcgactcctcgtcccgggtcacctcctggctccgattcat

SEQ ID NO: 318692 - DNA, 2059 bp, Homo Sapiens
  misc_feature (389)..(389): n is a, c, g, or t
  misc_feature (1521)..(1521): n is a, c, g, or t
  misc_feature (1875)..(1875): n is a, c, g, or t
caaatcaatctctttactggacaggcatacctctcatatgtatattattcgaatatactaacacatgaaagatcacatcaccttgtttacggatacatttaatatcccttactcttcccgactttcaaaacataatagtatacaaaatataaaatatcttaaatatttataaaaatcacaagaaaaaaatagaacgtatgaaaatatttttatctgagttctccctcattgttgagaggcagcttagtttgccttgagttcataactgttgagtgggtaggagtatgccctgcctaatactattctgtcccggagaagtttaaataaaacatagtagttgcagaagaggatgagagccatggaaagtgtgtggttccacttctccgacncgcagcaaggaatagagctgatagaagacgacactgccctcaataaggatgagcagatttaacagccttaatggtcgatgaaataagaaataaaagcgggcatgagatacatctgaaggcactgccacgttgtaaggccccatggctctatataaacatctgctgtgccgcaccagcaccccttgaggccatattgtattttctgaccaaatgtgctgtggagcattgctgtaggacccatgttccaacttctgccacttgcccaggtgagcagctgatttatgtagcaaatcacagtatttggatggcaacagttgcgtggtgagcatgacaaaagcattgatccacaccataatgaggtgctcacatgaccagcgcatgtcatagtactgggtactcttcacaaaacacagggggagaaatgcaacatagtaggcactgaagagggagttgaagagaacctccttgattctgtggttgaaatctgctttcagacattctacttcattgcgaatgaggtctggagataggggacaactgtgggtggggatgggtgtggcattattaaactgttcttttagcgactccagcaacaaggagagaaagtctttggatttggccaagcctcccacagtcgaggcactttcctctactgcctcgtgctgaaccacatagttgtagtctgtgagaagaagatgtgctctactatcttgatgaaaacagcaaagaggaacataaacaccaaacgggtagccaaggaaaaggagattgaggactgaatggcttcgaaagagattgacgagggtccaacaaagtacccatccacacaaagtgagtagtaccaagcgagctgatatcagaaccatgtagtgaatcattgatgctgcacctgccttagtagcctctgagatgagagcccatacaagcctcctcgcaagcatcactgtgatgaatgctgccagatgatattcaatgagatgaaaattcagtgatgtacaagaagcaggatgattgtaaggataccaccacactgttttataaatgttgatgtactggatgaaaagagcaaccaacaggtagatgaaaaaaagggattcaaagagtaggcttccattcccaggcaagtcaggantttgggcatgacgaacaggacctggggtgattaaggctgtgataggtgggactggaaggccaatagcactaccattcctgtttctcaagcctgttccattgccacagcctccaccaaccaaagtctgcaaagaaggtaaagctgaacggcttagctgttgccgactagggcccctccttcctccgggcatgtccaggaaccagtctgcttccagtgccacctgtagttgcaacccaggttaatggttgtcaaccagtttcaactgcatggaagagtcccagccggtggggcggggtccctagaaagcggcgacaactttacagactggaccccaggtaagggaactccctcccngcgttggaacgctgcaaaccagctgcttggacgcaggcagcccccgcctagagaatcaagaaaaggtgtccaggcttcgggctgccagactcagacccagactccgacgcagttccagtgccagagctaaagctagagccagagcctgatacttcagcacccatccctagcctccatcccggga

SEQ ID NO: 318693 - DNA, 961 bp, Homo Sapiens
  misc_feature (176)..(236): n is a, c, g, or t
  misc_feature (906)..(906): n is a, c, g, or t
  misc_feature (911)..(911): n is a, c, g, or t
  misc_feature (918)..(918): n is a, c, g, or t
  misc_feature (950)..(950): n is a, c, g, or t
ttccatggctctcatcctcatctgcaactactatgttttatttaaacttctccgggacagaatagtattaggcagggcatactcctacccactcaacagttatgaactcaaggcaaactaagctgcctctcaacaatgagggagaactcagataaaaattttcatacgttctattnnnnnnnnnnnnnnnnnnnnnnnnnnnnnnnnnnnnnnnnnnnnnnnnnnnnnnnnnnnnngaaagtcgggaagagtaagggatattaaatgtatccgtaaacaaggtgatgtgatctttcatgtgttagtatattcgaataatatacatatgagaggtatgcctgtccagtaaagagattgatttgtttgtatggctctggaataactcattcagtttatgaacacatctcatgtattacttgacacagtacctttggtatgtctgcttttctttcaatcctcattatctttagccctcagctggccagtacttattgctaaagaaagggagatcaatggagttgcctaccagcacccattctcttttagttcagctggctaatagtattggaatacattgggaaaagagtgggttaaagtcctaggtggggttctctttgttgcctaccaggagaaagcagtaggcttcctttctaagatacggactcagctggtctattttaccctgtgacatttaaatatacttttgaataagctactatcctgaggctgagggttttgctgccacttttcctgtgtttccacttctgcttccaaagattttcctcttagttgtttgaaataatactttgccagacaggaagtctttagactggcccacattccatggaaggaggatggatgtggcgggctgggatcagtaggggaggaaggctggaggtgcccaantgccntgtgggngcttaggagtttggggggagggttttgaaaanttcccaagtta

SEQ ID NO: 318694 - DNA, 1479 bp, Homo Sapiens
taattacaccggctctataaataattttaccatctatgaataattgttcttttgctagcatagaaaggagacaggtgatgagtgaagtggaatgaaaaaattaaggggactcaagcctttggcactgaaaccatcttccctctgtgggcccctgaggatactgtttattgctgaaagtgctgcttgcccagggttcccagccccttctctccacaaaccctgttgacagggcagccatgggaagcctctcgccttttaccttctgatataggaaaactgaatcaaagcccttgagaaaattggtgaagtagcagaaaacttcaattttcaaatattcattgctttcatattggccaatttgcacatgtggaggagttttacagcagactccctttgattaaatctccatctctgcactcatctagctgttcgacttctttgaaattcatctccaaatttttgcctcatctgcaaattgggcaaaatacctagatgtgtgtttcttcttcaaggaagttttcagcagctgatagtaaccttcttctgtcatctgggttttcaatatttaattcaatgaggtgactctcttttatatcttttaaatcttctagagtctcataaccattgagcaaaagtgttgaggtgtattcctgcagatgaatcctctctaggaactcctgcagagtcttggattttttgctgttattcttccggtttgcctttattttcttgggaggctgcttcctctttctgagatgacatccaccataaaatgaatttgaagtttcccactttattgttcaacattcctgtccacatccccattggtgttttgcaaataatgtctatgatgtctcctttcttgattttgagggagtcagtgtcatagggacttggcgtgaaatccgtatgcactctggcacggccacagaatggtcctgaataggggccatcgtcatccagtcgaaagctgtcccggttacttgtaccatctgaacagcttgttatgccacttgatgagctctgtccactgtagagactatccatggagtcactggctttgagggacaccttctctgtgtgggtcccaatcacagggtcactgtttctatatgggtgggcattctctccatcttcctcatccttttcctcagaaagggctttgatgtactttttacccacttttttcttcattgtccatgaaatagctctcatttttttacccaaaccgcctccattatttgaagttttactttgttctccacttccatttgtgggatctccttcatgtgcctcagttgaatcatctggttttgataaagaattattccgaaaacgatcgaaattcccaaaactgctgcttcgctttggtttttgatgtttctccttctctgaaacattggatggctttctcttgagcattttgaattctgactactcctagtgagtgcactttctgctgttacagaaacaactccc

SEQ ID NO: 318695 - DNA, 1455 bp, Homo Sapiens
  misc_feature (141)..(256): n is a, c, g, or t
  misc_feature (1292)..(1292): n is a, c, g, or t
  misc_feature (1422)..(1422): n is a, c, g, or t
caggccccggagtagcagcggggaggccgggagcccgcgggccggagccgcccggccgaggcgtgggggctagcggggccggcccatccgtgggggcgacttgagcgttgagggcgcgcggggaggcgagccaccatgttnnnnnnnnnnnnnnnnnnnnnnnnnnnnnnnnnnnnnnnnnnnnnnnnnnnnnnnnnnnnnnnnnnnnnnnnnnnnnnnnnnnnnnnnnnnnnnnnnnnnnnnnnnnnnnnnnnnntgctccagcagtccccaccacaggccccgttgcccatggctgtcagccgggggctccccccgcagcagccacagcagccgcttctgaatctccagggcaccaactcagcctccctcctcaacggctccatgctgcagagagctttgcttttacagcagttgcaaggactggaccagtttgcaatgccaccagccacgtatgacactgccggtctcaccatgcccacagcaacactgggtaacctccgaggctatggcatggcatccccaggcctcgcagcccccagcctcacacccccacaactggccactccaaatttgcaacagttctttccccaggccactcgccagtccttgctgggacctcctcctgttggggtccccatgaacccttcccagttcaacctttcaggacggaacccccagaaacaggcccggacctcctcctctaccacccccaatcgaaaggattcttcttctcagacaatgcctgtggaagacaagtcagaccccccagaggggtctgaggaagccgcagagccccggatggacacaccagaagaccaagatttaccgccctgcccagaggacatcgccaaggaaaaacgcactccagcacctgagcctgagccttgtgaggcgtccgagctgccagcaaagagattgaggagctcagaagagcccacagagaaggaacctccagggcagttacaggtgaaggcccagccgcaggcccggatgacagtaccgaaacagacacagacaccagacctgctgcctgaggccctggaagcccaagtgctgccacgattccagccacgggtcctgcaggtccaggcccaggtgcagtcacagactcagccgcggataccatccacagacacccaggtgcagccaaagctgcagaagcaggcgcaaacacagacctctccagagcacttagtgctgcaacagaagcaggtgcagccacagctgcagcaggaggcagagccacaggagcaggtgcagccacaggtacagccacaggcacattcacnagggcccaaggcaggtgcagtttgagcaggaggcagagccgcttaagcaggtgcagccacaggtgcagccccaggacacattcacagcccccaaagcaggtgcagctgcagtttgaaaaacaaggtcaancccagaaatatcacagggtcccacacaggccag

SEQ ID NO: 318696 - DNA, 1851 bp, Homo Sapiens
tttcagacacagacatcagtggcttttttactccctgaagtcctctgtttctccacagaatatttacaaacagggaaggggtggaggccacttccgccaccaaataaggggctagggaggggggcagtgctaagacacgcctctgcgcagggagagttcctgaggagggcccagtgtgaccacagtgccctcaggggcccaggtggttccagacggctcaggccaggtcggcggtgggtgagcccagctgcttggaggccaggaggaggcgtgtggctgcactctcagactccgcctgcagccgccggttgttgtgtctcaggctccgcacctcctcctccagggccgccctgtccgccttctccttctgcaggtcctcctgcagcttcctgagcatggactccaagtgagagaccttcttctgagaggttcccaggctctggctcagcatcagatttttgagttcccttagggtctccactctctgggatgggctgtccctctcgggacagcgagctccagaatggtgttgcaagtagaggcaatctccgagatggcctgccactcgtcctccagggtcccactgcctgcctccgacatgatcctgctgatggagttccgcagagacaaggtacgtggcagaaaggaggccctcagctccggcgccgggttgcccttgtcctcagagccactgggactgcctggcctgtcctgggtcaggggtgtctcactgtcagcactgggtactgatggcttggctgtggtggccaggaggaggtccggggtggtgttgggcaggactggggcctcatccgacagagagctgcgtggtgacagcgagttctggctgtgcaggaactcagtcctctcctcggccagatccccaggccctggaggactgccaccatcttgcaggcacaggtgcagcagctgctttgtggtgggcagcagggtcaccccctggacctcatcctgcacaggatctggggccccccgccggctaggctcctgcagcgacagcgtgtacagctccgaaaaactcctgcggggccggccgctctcgtcggggggcaggacggtgacgcagaccttgggcgccgagcgcaggagctgggcagcggcctcgggccggaggctgggcagcgtctggccgcacacgcgcaggaggcgcgccccgggccgcagccccgccgtctcggcgaatgtgaagcgctccacgtgcgtgacgaatccctcggcgtccacctcgaagcccaggcggccttgaccgtcgcggggcagcgccagctcgcgggtctcgcagccacggctcaccagctgcaggcgcgccaccacctcgcccacggcttggccgggggacccgtcgaagcgcagcgtgatcgcctccccgcggccgtggtacaggtccagctgctgctcggagaaggtccaggccagcacgtcgcgacaggggcatttgaacactacgcggggcgtcgcgcggggccaccagcaccagaatcttcggccgagatgcccagcaggcagggcacctcgatgccttcggggccgctcgcctgagccccggcggcgacccgcgccccgggcgccgcgcgcactccccacaccagtgagcccgctgcctgcagctcggcgcctgggccccgaggggccgcccggcgcctcccacccagggagggcaggccgaagcgtgaagccgagtccagcgacgtagtggtcacctcgttggtggccaggtcttgcaggtactgctggcgggtgcgcgtggccatggcgtggaactggcgcgcgtggccggccgccatgcgacgcgtgggtcgacgatatcccgacattccgggacctgtacca

SEQ ID NO: 318697 - DNA, 1151 bp, Homo Sapiens
  misc_feature (153)..(153): n is a, c, g, or t
  misc_feature (198)..(198): n is a, c, g, or t
  misc_feature (201)..(201): n is a, c, g, or t
  misc_feature (352)..(362): n is a, c, g, or t
  misc_feature (391)..(416): n is a, c, g, or t
  misc_feature (470)..(483): n is a, c, g, or t
  misc_feature (497)..(506): n is a, c, g, or t
  misc_feature (581)..(597): n is a, c, g, or t
  misc_feature (609)..(609): n is a, c, g, or t
  misc_feature (618)..(633): n is a, c, g, or t
  misc_feature (646)..(646): n is a, c, g, or t
  misc_feature (649)..(649): n is a, c, g, or t
  misc_feature (651)..(829): n is a, c, g, or t
ctcttgttgttattgataacgagggggccacccccgcagtgaggcaggctcccgtctgtgctgcgcctccctcccgcttttttcggcggcgcggcggggccgaatagtttttctttgtttagcagggcgccacccagcgccttgcgggtctcnccgccgcgggcgggacccccccagacgctatcccgatcccccgcnccnctggggggcgcgccgcgcatctcccccggggcagggaggcgttctattggtggatcgagccccacccgcgtcctccttctcggagcggtcggcgcggcgggggcggcgcgcgatattattgttcatccgcgggccgcttcgggtcgccgtnnnnnnnnnnnggggtggaggggccgccaccacggagagnnnnnnnnnnnnnnnnnnnnnnnnnnttcagaggcttgttcttcggacgccccctctttggttgtgccccggtccgccgnnnnnnnnnnnnnnggtgggggagtagnnnnnnnnnngtctttgcccgcgccgggcgttttccttggggcgcccgtcgtgtgtcgcctttctttcttctccgtggggggggnnnnnnnnnnnnnnnnnggtgtttggagnattcttttnnnnnnnnnnnnnnnncggccccttctcnccncnnnnnnnnnnnnnnnnnnnnnnnnnnnnnnnnnnnnnnnnnnnnnnnnnnnnnnnnnnnnnnnnnnnnnnnnnnnnnnnnnnnnnnnnnnnnnnnnnnnnnnnnnnnnnnnnnnnnnnnnnnnnnnnnnnnnnnnnnnnnnnnnnnnnnnnnnnnnnnnnnnnnnnnnnnnnnnnnnnnttatttggcaaaaaaacttctgaatttaataaagaaatggcaacaactggtacgtacagtaattcaaaatcttttcactaagcaccaaataggatagttctcaatcttctcaagaacctctttgaaagaacgcctaaaacctaatcagtttatttaggtttttagtcaagaaatacaaagctgccaatcagagtttgtaattaccatgagtgaccagtttagtaaccttgtaggttctaccacatgatcttttaaaagctttgtttaacctatacgttgtaactgaggggatttgttgatgtcaggctggtaatcagagatc

SEQ ID NO: 318698 - DNA, 1669 bp, Homo Sapiens
tataacaggaaattaattttatttttaaatccaaggggccagaacaaatgagacacctacccttggaggacaaactcaagtggccaaggttgggggaggggatgacagcaaggggctgggcaggaacgcgtccaaacacagcagatggagaggacgacctcttcactccggcgcactccatcaaatacccattctccggagccaggtagccgtcgccgccctcagactccatgtacatgtctcggctgtcgttgcccagaccctccagcccgttgtcctggccaccgcccccacctcgggcctcatccctgccccgctcactgccccgctccccccgtttgtgctcgcggtcacggtcacggtcacgatcccggtcccggcgccgctcgcgctcgctccggtggctccgccgtcgctcccggtcacgatcccggcccttttcctctggaccgtcagggccgtcaggcccgagctcccctggaggcccatcatcagggggcgcgtcacccgcctcggagggctccgccatgtcgccaccgccgccacgcagctcctccttgcgctcccgctcccgccgggcccgctcccgactccggctgcttcgccgcttccggtcccggtccttgtccttgctccgctccctggagcgcctccgctcctccttgtcgcgactccgtgagcgcctccgccggtcccgggagcgggagcgtcgccgttctcgctccttgtctcgctcccggctccgctctctgcgctcccgctcacggtcccggtcccggtccctgtgcggaagcggggaggggccgggcctctcatcgtagcgggaggtgtcatcgcggcctgaatgccggatgttcacatcagcccctcctcttctggtaccaccgaggcctcctcctagccgccggggcctccagcccttcacggttcggcccctctccacgtccacaaggaccctcctgccatcaatcttcttgccatctgcgtgtttgtaagcggagtgcatgtctcgctcgtgttcgtactcgatgaaggcatagccacggggctttcctgaccgcttactgtagaccatgtgtattcttttgataggtccgtacacctcaaactctctccggagcttggattctgttgtgtcataattcactctcgccacgaagagagtcttgaaggcatccccctgagcattgggatcattgtgagggtcccacattttaagctctgtctccacttcttgctgtcgccgctcaatcttttcccgtcttttcctctccatgcgctcctctcgggtttcagcacgagttggaggaggggcatctcgagggtcctcaaactctcgaatgtacggcgcaatgccacaataaggttgattgtggtgtttttcatgtggcagtttctccaggggtggcaggtatggaatagggtcacggggggcaaagagggccagaaggttgggcggcaggaactgggtcatcttgccaagtcgcgtagcgccctcctcgctctggcgtctgtccggaggctcgcggcggctgcggcagcccctcagcaacaacaactcctgcttcggcttccactccgggggcgtccacgtccgtctgattccgtcgcccgctaagcgagcgcaccaggccgctgctcagccacccgcgcggcctccgatagcccc

SEQ ID NO: 318699 - DNA, 1083 bp, Homo Sapiens
agagttgaggaccctcgagatgcccctcctccaactcgtgctgaaacccgagaggagcgcatggagaggaaaagacgggaaaagattgagcggcgacagcaagaagtggagacagagcttaaaatgtgggacccctcacaatgatccccaatgctcagggggatgccttcaagactctcttcgtggcgagagtgaattatgacacaacagaatccaagctccggagagagtttgaggtgtacggacctatcaaaagaatacacatggtctacagtaagcggtcaggaaagccccgttgctatgccttcatcgagtacgaacacgagcgagacatgcactccgcttacaaacacgcagatggcaagaagattgatggcaggagggtccttgtggacgtggagaggggccgaaccgtgaagggctggaggccccggcggctaggaggaggcctcggtggtaccagaagaggaggggctgatgtgaacatccggcattcaggccgcgatgacacctcccgctacgatgagagggaccgggaccgggaccgtgagcgggagcgcagagagcggagccgggagcgagacaaggagcgagaacggcgacgctcccgctcccgggaaccggcggactgcgctcacggagtcgcgacaaggacggatgcgggaggcgctccaggtagcggatagcatggacaaggaccggggaccggaagccggcgaacgcagccggagtcgggagcgggcccggcgggagcgggagcgcaaggaggagctgcgtggcggcggtggcgacatggcggagccctccgaggcgggtgacgcgccccctgatgatgggcctccaggggagctcgggcctgacggccctgacggtccagaggaaaagggccgggatcgtgaccgggagcgacggcggagccaccggagcgagcgcgagcggcgccgggaaccgggatcgtgacccgtggaccgtgacccgcgagcacaaaacgggggggaagcgggggccattggagccgggggcaagggaatgaaaggcccccaaggtggggggggccgggtgggcccaagggacaaccggggt

SEQ ID NO: 318700 - DNA, 1668 bp, Homo Sapiens
  misc_feature (164)..(164): n is a, c, g, or t
  misc_feature (936)..(936): n is a, c, g, or t
  misc_feature (953)..(953): n is a, c, g, or t
  misc_feature (959)..(959): n is a, c, g, or t
  misc_feature (977)..(977): n is a, c, g, or t
  misc_feature (983)..(984): n is a, c, g, or t
  misc_feature (990)..(990): n is a, c, g, or t
  misc_feature (993)..(993): n is a, c, g, or t
  misc_feature (1001)..(1001): n is a, c, g, or t
  misc_feature (1005)..(1005): n is a, c, g, or t
  misc_feature (1008)..(1009): n is a, c, g, or t
  misc_feature (1021)..(1021): n is a, c, g, or t
  misc_feature (1042)..(1042): n is a, c, g, or t
  misc_feature (1061)..(1061): n is a, c, g, or t
  misc_feature (1065)..(1065): n is a, c, g, or t
  misc_feature (1068)..(1069): n is a, c, g, or t
  misc_feature (1103)..(1103): n is a, c, g, or t
  misc_feature (1105)..(1106): n is a, c, g, or t
  misc_feature (1109)..(1109): n is a, c, g, or t
  misc_feature (1126)..(1126): n is a, c, g, or t
  misc_feature (1149)..(1149): n is a, c, g, or t
  misc_feature (1154)..(1156): n is a, c, g, or t
  misc_feature (1158)..(1158): n is a, c, g, or t
  misc_feature (1165)..(1166): n is a, c, g, or t
  misc_feature (1170)..(1170): n is a, c, g, or t
  misc_feature (1175)..(1176): n is a, c, g, or t
  misc_feature (1178)..(1178): n is a, c, g, or t
  misc_feature (1188)..(1188): n is a, c, g, or t
  misc_feature (1190)..(1191): n is a, c, g, or t
  misc_feature (1194)..(1197): n is a, c, g, or t
  misc_feature (1200)..(1200): n is a, c, g, or t
  misc_feature (1202)..(1202): n is a, c, g, or t
  misc_feature (1208)..(1208): n is a, c, g, or t
  misc_feature (1231)..(1231): n is a, c, g, or t
  misc_feature (1234)..(1234): n is a, c, g, or t
  misc_feature (1245)..(1245): n is a, c, g, or t
  misc_feature (1249)..(1249): n is a, c, g, or t
  misc_feature (1255)..(1256): n is a, c, g, or t
  misc_feature (1260)..(1262): n is a, c, g, or t
  misc_feature (1265)..(1265): n is a, c, g, or t
  misc_feature (1273)..(1273): n is a, c, g, or t
  misc_feature (1285)..(1285): n is a, c, g, or t
  misc_feature (1294)..(1296): n is a, c, g, or t
  misc_feature (1299)..(1301): n is a, c, g, or t
  misc_feature (1304)..(1305): n is a, c, g, or t
  misc_feature (1360)..(1363): n is a, c, g, or t
  misc_feature (1368)..(1369): n is a, c, g, or t
  misc_feature (1373)..(1374): n is a, c, g, or t
  misc_feature (1380)..(1380): n is a, c, g, or t
  misc_feature (1382)..(1383): n is a, c, g, or t
  misc_feature (1385)..(1385): n is a, c, g, or t
  misc_feature (1388)..(1388): n is a, c, g, or t
  misc_feature (1423)..(1423): n is a, c, g, or t
  misc_feature (1425)..(1427): n is a, c, g, or t
  misc_feature (1434)..(1434): n is a, c, g, or t
  misc_feature (1437)..(1437): n is a, c, g, or t
  misc_feature (1442)..(1443): n is a, c, g, or t
  misc_feature (1454)..(1454): n is a, c, g, or t
  misc_feature (1456)..(1456): n is a, c, g, or t
  misc_feature (1464)..(1464): n is a, c, g, or t
  misc_feature (1472)..(1473): n is a, c, g, or t
  misc_feature (1476)..(1476): n is a, c, g, or t
  misc_feature (1481)..(1481): n is a, c, g, or t
  misc_feature (1483)..(1483): n is a, c, g, or t
  misc_feature (1488)..(1488): n is a, c, g, or t
  misc_feature (1490)..(1490): n is a, c, g, or t
  misc_feature (1497)..(1497): n is a, c, g, or t
  misc_feature (1504)..(1504): n is a, c, g, or t
  misc_feature (1582)..(1582): n is a, c, g, or t
aacaaaagcaccaagggttctaaataacaatccttccaggcttgaattagggggaacaggcagacccaaaaagattccccattctctgcaaaaacgccctttcttaccaaatcaagctgttgggctgggtgctgctcattcacctgccccaggcaccctgaccnccagcctcccaaatggcaggtaaattcgaccagtgggaaaaagactggtgagacctggagtgtctcggggtcaccgctctgtgacgggaggaagcagagaaaagtgtttcggatcagccgggcaggagagatagtggagcagcctcctgtgccttacttggttaatttggaagtagctcccgtcatcttcaatgcgaatcttggccacgccacttcccgcccttttttccactttgacaggcttgatgcactcctagagcaggaagagacctcaagtcagcccctgtgagtgggcgcaggttccctgggaggccaggcctcaaggatggctgcccagccgcacagcctgaaggctctgccaggagccatgcactcagggactgaggctggtaccaccgtcttcttcctgccccactgctctcacccagggatcgggttcccaacatcctgcggcactgaagttcccagtgtgcaggaaggccagtgctaacagcgcctgcaaactacccacctgcggagacaccaccaacactgaccttcacccttcacgtgaacagggggcgtgtccaccacagagaccagagttgcactgcccatcgagaggacgtgtgcttggatctgtttggagacacacctcctgctcagtgcccgggaaacaagtggatttctctctcttctccttgagaaccctggcagcccagaaagccgcctcccagctcatccctgccggaagcgctcccagcagcccgcctctcgccctgctcagctctgnccccgcggggctgttgnacatgnacaggcaggtgcacccanaaaagnncgcctncancctcccgngttnaanngtagctgtccgncccaccagggcgacgttaagnacagctctactgaggagcnactncgnngcgtctagcgggccgcccctactgccctcaaatnanntgnggtccccaccgcacccntttatccagatccaaaccctctnccttnnngntcctganncctnacaanncntcctccccancnnaannnnaanancccccnccccgggccccgccgccctccanctncgacccagggntcgngttagnnttannnatntgtggganccgcctctgctncctcctctnnnttnnncannccggcgcgagcccgcgaccactggaccctcccacgcagcccgcccggacaccatnnnncacannaccnngttggngnncnccnccctccctggcctcagtttccttgttggtaagaancnnncctcacntcnctgannccccgcccccncntccatagncctccctnnccnccccncnacccncnctcccgngacttcngatctcattcctcacggggaggaagtggggcgcagagcaatttccctccgcgcgacagggcaccgagcgcagcctcgnccccgcccgcccaggccggcccacctgagacggcccgatgaagtcatccaggtccgtcagctgcagcgccccgctgaagggcgacg

SEQ ID NO: 318701 - DNA, 1128 bp, Homo Sapiens
  misc_feature (27)..(27): n is a, c, g, or t
  misc_feature (39)..(39): n is a, c, g, or t
  misc_feature (601)..(601): n is a, c, g, or t
  misc_feature (670)..(670): n is a, c, g, or t
  misc_feature (904)..(904): n is a, c, g, or t
  misc_feature (981)..(981): n is a, c, g, or t
  misc_feature (997)..(997): n is a, c, g, or t
  misc_feature (1024)..(1024): n is a, c, g, or t
  misc_feature (1031)..(1031): n is a, c, g, or t
  misc_feature (1036)..(1036): n is a, c, g, or t
  misc_feature (1046)..(1047): n is a, c, g, or t
  misc_feature (1050)..(1050): n is a, c, g, or t
  misc_feature (1055)..(1055): n is a, c, g, or t
  misc_feature (1070)..(1071): n is a, c, g, or t
  misc_feature (1073)..(1073): n is a, c, g, or t
  misc_feature (1084)..(1085): n is a, c, g, or t
  misc_feature (1096)..(1096): n is a, c, g, or t
  misc_feature (1104)..(1104): n is a, c, g, or t
  misc_feature (1111)..(1111): n is a, c, g, or t
  misc_feature (1116)..(1116): n is a, c, g, or t
tgcgggcgctgggccgcgagggcgganttgggagcgganccaggccgtgccgcgcggcgccatgaagggcaaggaggagaaggagggcggcgcacggctgggcgctggcggcggaagccccgagaagagcccgagcgcgcaggagctcaaggagcagggcaatcgtctgttcgtgggccgaaagtacccggaggcggcggcctgctacggccgcgcgatcccagagcgcagaagctgggacgggccgtgggtcagagtgggcacgctgagcctacgccctcatgcggctggcccggccttggtccctagacccggaacccgctggtggccgtgtattacaccaaccgggccttgtgctacctgaagatgcagcagcacgagcaggccctggccgactgccggcgcgccctggagctggacgggcagtctgtgaaggcgcacttcttcctggggcagtgccagctggagatggagagctatgatgaggccatcgccaatctgcagcgagcttacagcctggccaaggagcagcggctgaacttcggggacgacatccccagcgctcttcgaatcgcgaagaagaagcgctggaacagcattngaggagcggcgcatccaccaggagagcgagctgcactcctacctctccaggctcattgccgcggagtgnagaggggagctggaagagtgccagcgaaaccacgagggtgatgaggacgacagccacgtccgggcccagcaggcctgcattgaggccaagcacgacaagtacatggcggacatggacgagcttttttctcaggtggatgagaagaggaagaagcgagacatccccgactacctgtgtggcaagatcagctttgagctgatgcgggaccgtgcatcacgcccagtggcatcaccntacgacggcaagacatcgaggagcactgcagcgtgtgggttattttgacccgtgacccggagcccctgacccagganagctcatccccaattngctatgaaggaggtattgacgcattcnctctganatggntgggtggagnntantgagntcctgcctacctggnncntgtccaggggnncctgggagaancccggccntataatnattgntgtctggcaccc

SEQ ID NO: 318702 - DNA, 1080 bp, Homo Sapiens
ctgggccgggcccgagcggatcgcgggctcgggctgcggggctccggctgcgggcgctgggccgcgaggcgcggagcttgggagcggagcccaggccgtgccgcgcggcgccatgaagggcaaggaggagaaggagggcggcgcacggctgggcgctggcggcggaagccccgagaagagcccgagcgcgcaggagctcaaggagcagggcaatcgtctgttcgtgggccgaaagtacccggaggcggcggcctgctacggccgcgcgatcacccggaacccgctggtggccgtgtattacaccaaccgggccttgtgctacctgaagatgcagcagcacgagcaggccctggccgactgccggcgcgccctggagctggacgggcagtctgtgaaggcgcacttcttcctggggcagtgccagctggagatggagagctatgatgaggccatcgccaatctgcagcgagcttacagcctggccaaggagcagcggctgaacttcgggaggacgacatccccagcgctcttcgaatcgcgaagaagaagcgctggaacagcattggggagcggcgcatccaccagggagagcgagctgcactcctaacctctccaggctcattgccgcggagcgtgacagggagctggaagagtgccagcgaaaccccagggtgatgaggaccgacgccaccttccgggcccagccaggctgcattgaaggccagcacgacaagtatatgccggacctggaccagcttttttccccggcggatgaaaagaggaagaagccacactccccgactacccgtgggggcaagaatcacctcttaactgatgcgggaacccctgcatcacgccccatggccattcacttaaaaccgcaaagggcattcgagtaccccccggcatggggaaagccttgcggctctggttacaaaaggtcactttggcattgctacttgactcacccttgaccgcgcctttgccctatttgttgtacagataacaccgtcagacgctaatactgttcctccctcagacgccagagacatcccctgagcaccggcgtgcacgacctct

SEQ ID NO: 318703 - DNA, 1796 bp, Homo Sapiens
  misc_feature (50)..(50): n is a, c, g, or t
  misc_feature (317)..(317): n is a, c, g, or t
agagtggtccggctgagcaccgccaacacctactcctaccacaaagtgancttgcccttccaggagtatgtggagcagctgctgcacccccaggaccccacctccctgggcaatgacaccctgtacttcttcggggacaacaacttcaccgagtgggcctctctctttcggcactactccccacccccatttggcctgctgggaaccgctccagcttacagctttggaatcgcaggagctggctcgggggtgcccttccactggcatggacccgggtactcagaagtgatctacggtcgtaagcgctggttcctttnacccacctgagaagacgccagagttccaccccaacaagaccacgctggcctggctccgggacacatacccagccctgccaccgtctgcacggcccctggagtgtaccatccgggctggtgaggtgctgtacttccccgaccgctggtggcatgctacgctcaaccttgacaccagcgtcttcatctccaccttcctcggctagccaaaacagctggcaggactgccggtcacacaccagcacgtcccacctcgtgctcacggattttattacacagatagtggcggcaatggcctcagcccagcccaccctcacctgcttttccagcccacaaagggggacgatcacggcccagcaaaagcgatgctgagaggggaaacagtccagagtccaacagcagaacttgggggaagcggtcggggtggccaggaacataaactatgtataggggccgggggcttctgcccagggctcccctggaccaggacgccaggtagggcagggaacctcagtagtcctccacccagccattctcagagatgaatgcgtcaataacctccttcatagccaagttggggatgagctgttcctgggtcaggggggctcggggtcacggggtcaaaatgacccacacgctgcaggtgctcctcgatgtccttgcggtcgtaggtgatgccactgggcgtgatgcacggctcccgcatcagctcaaagctgatcttgccacacaggtagtcggggatgtctcgcttcttcctcttctcatccacctgagaaaaaagctcgtccatgtccgccatgtacttgtcgtgcttggcctcaatgcaggcctgctgggcccggacgtggctgtcgtcctcatcaccctcgtggtttcgctggcactcttccagctccctctcacgctccgcggcaatgagcctggagaggtaggagtgcagctcgctctcctggtggatgcgccgctcctcaatgctgttccagcgcttcttcttcgcgattcgaagagcgctggggatgtcgtccccgaagttcagccgctgctccttggccaggctgtaagctcgctgcagattggcgatggcctcatcatagctctccatctccagctggcactgccccaggaagaagtgcgccttcacagactgcccgtccagctccagggcgcgccggcagtcggccagggcctgctcgtgctgctgcatcttcaggtagcacaaggcccggttggtgtaatacacggccaccagcgggttccgggtgatcgcgcggccgtagcaggccgccgcctccgggtactttcggcccacgaacagacgattgccctgctccttgagctcctgcgcgctcgggctcttctcggggcttccgccgccagcgcccagccgtgcgccgccctccttctcctccttgcccttcatggcgccgcgcggcacggcctgggcctcgtgcggaattcgccacccaggcctcgctcctt

SEQ ID NO: 318704 - DNA, 464 bp, Homo Sapiens
  misc_feature (75)..(75): n is a, c, g, or t
  misc_feature (437)..(437): n is a, c, g, or t
tttttttttatcgaaggctttactggcaagcaggaaatgtggggaagtgtggatgttagcgctgagattggggtntggtcagacatctggccaggtccatctctgaccggctcctggtcaacccccagggagctggaagagtgccagcgaaaccacgagggtgatgaggacgacagccacgtccgggcccagcaggcctgcattgaggccaagcacgtgagggtgccccccacccacatgtgggtctgtgtgtgtgcacgtgggcttgggagcatccccgccttgtgttgggtctgtgccccatgggaggaggggaggtggggtgtcttcccccaagcacagcactcaactcttcacaggacaagtacatggcggacatggacgagcttttttctcaggtggatgagaagaggaaggtgagtgtgtgtcgcttgctncgatggctgggaggtgctcgtgcagtg

SEQ ID NO: 318705 - DNA, 1832 bp, Homo Sapiens
  misc_feature (64)..(69): n is a, c, g, or t
  misc_feature (73)..(73): n is a, c, g, or t
  misc_feature (77)..(80): n is a, c, g, or t
  misc_feature (83)..(83): n is a, c, g, or t
  misc_feature (86)..(86): n is a, c, g, or t
  misc_feature (1055)..(1055): n is a, c, g, or t
  misc_feature (1164)..(1164): n is a, c, g, or t
  misc_feature (1430)..(1430): n is a, c, g, or t
cgcgcccaaaacgaattggtctaagaaaagctttttcgaggggccgaggcgggccgaccagggnnnnnntttntttnnnnttnttnttttttgattttaaaacatttttattataaaatacaaataaaaacattgagaaaagacaaagtcatccattttctgcctcctatcccactataaccagttagtaatttgatttactttgttatctttttatcatatgcttggtctgttatttcagccatgattacacccacttatacacttttccgtcttgcaatttttacttaaggtaatattttcatgtttttaataatattcattactaatttttaataagtacattatgtatcatttgtatatatctgtttattgactatttcctagacccagggatgacaaactatggcaccacatttgtaaacaaagttttactggaacaaagccacgcccgtattgtttatgtattgtctatggctgcttttgtgcttcatacagcagtgttgacaagttatgacagagacagtaggtttaaaaacctaaaatagttactttctggccctttatagaaaaagtttgccaatctttaccccaaactttaaagtggtttataatttgggctactaaaagtaatgtcacttggaacatctttgtgcatataattttttatactttgtacaatttgagagacattaacaaaagtggaataactgggtctaattaatgaagacatttttacggttgattctctcccacactgttgtaatattcaagctatgatatgtgataagaatgaaaaggatagcccagaactcttgtaggtaacatgtgtctggtccctgttacttaagacacgttagttacttaagacacactctggatgaacatattttgagttttgatttaaagttaaccaaaaaagagaaataacagtaacttcaatgggaagaccattgaaagaaatcttttactttttactggagaggaaaaagtacaacagaagtgggtgacaaggtacatataaaatgccattctacggtcgctgcagtggccanaaggcactggggagagctgagtaagagaaagaaatggcagtctcaacaatgagctggcagtggcagcaagaaacaaagagacaactttgagtgtgggatgacaaaagcngaacacaggtcccacccatctgaatacatcctaggcataaacctgtatataactgtaattaaactgtctctagataacaaagttttaaagaaatcaccctatattttttaagaaggagaaagtcttctacctggggaagttttactcttcagaatgaaaaccttatggaatggggaagtcaaccctcactatgtacgtcaaccctatttctgagataaaagatgaagcagtctgatgggtctcaaatccaatcttgtatgaataanacaagcatcaggaaacatggatgtcatcttctaagagaaatattctgttatggctgagggaagcagtgatgggggtaggcaccacagtctgtaacccctccccttctatctcagtaccaacaaggcagatgagctggagttctggtaatcctacacagtttacttcatgccagcttttgctttccatgaggtccaggtaaaccaagaacgctacataaacgtgggtggcatctcctatatctaattccatcatttctagatacttagggtgagtgcccatccaggcgtcctcaggggcccacgaaggagctccaccgccgtcgccaaagccgcgaacaccgtccggacccaggccgctgcagccgggggtcggctcggaatcgccgcgctcctccatgccgg

SEQ ID NO: 318706 - DNA, 915 bp, Homo Sapiens
  misc_feature (46)..(108): n is a, c, g, or t
aattttagaagcgaaaaatgggaaaaagcggttagatgatggaaannnnnnnnnnnnnnnnnnnnnnnnnnnnnnnnnnnnnnnnnnnnnnnnnnnnnnnnnnnnnnncaggaatgggggaaaggcgggggaaatgggccagcagttctgcccatatacgttggtgtaaaccggcatgcgagtgtggtgtttgtgataagaaagttatgggcgaacgatatttgcaagcaatatagtgcttccatcggagaaggctttattctgaaaggaagtttatgggttgggactagctaagtcagccctgactacctctgagataaaagacgagcagctcgctgaggagcctcacatccaatctttcagaactgaagtcagcaccaagaagggcagatgtcatcttctaagagaaatattctgagggtctggcagcataaatccatcggtaagtttataatagactattgtggaatctgactccactatggccaaagtaaaagacatcggcaaatctggatcaccttgcaactttcgagatgccttcaagatctcccttatcctgttatggctgagggaagcagtgatgggggtaggcaccacagtctgtaacccctccccttctatctcagtaccaacaaggcagatgagctggagttctggtaatcctacacagtttacttcatgccagcttttgctttccatgaggtccaggtaaaccaagaacgctacataaacttgggtggcatctcctatatctaattccatcatttctagatacttagggtgagtgcccatccaggcgtcctcaggggcccacgaaggagctccaccgccgtcgccaaagccgcgaacaccgcccggacccaggccgctgcagccgggggtcggctcggaatcgccgcgctcctccatgccccc

SEQ ID NO: 318707 - DNA, 362 bp, Homo Sapiens
aaacactcatatttaacttattcctcaaatagccaagagtaaagctatgaaccctgtatcccaaatttcattaaaagtattacatcactatgtttaatgtttcctactgctttactcgggaaaggaacttagaccaaaatcacctgctcacctgttatggctgagggaagcagtgatgggggtaggcaccacagtctgtaacccctccccttctatctcagtaccaacaaggcagatgagctggagttctggtaatcctacacagtttacttcatgccagcttttgctttccatgaggtccaggtaaaccaagaacgctacataaacttgggtggcatctcctatatctaattccatcattt

SEQ ID NO: 318708 - DNA, 1248 bp, Homo Sapiens
  misc_feature (159)..(181): n is a, c, g, or t
  misc_feature (183)..(185): n is a, c, g, or t
  misc_feature (187)..(190): n is a, c, g, or t
  misc_feature (195)..(199): n is a, c, g, or t
  misc_feature (203)..(270): n is a, c, g, or t
  misc_feature (272)..(272): n is a, c, g, or t
ccccctattttccttgggccccggggttgttccctttgggaaaaaccaggattgtgccccatgtttcctttttcccctcttgggggggccgcgccggccaaaacgaaagtggttttaaaaaaatttttttggaggggcccaaggccgcccccaccaatnnnnnnnnnnnnnnnnnnnnnnntnnntnnnnaaaannnnncccnnnnnnnnnnnnnnnnnnnnnnnnnnnnnnnnnnnnnnnnnnnnnnnnnnnnnnnnnnnnnnnnnnnntntttcagaagtaaaagatttttattgttctatagacacttctgaaaagagatctaattgagaaaatatacaaagcatttaagagtttcatccccagagactgactgaaggcgttacagccctcctctccaaggctcagggctgagaacggttagcatatcgaatgatcagtaaaaacatgcaaaagtgagaaggaaagggaaaaaggtgcattcccctaagctgagggggatggaatttcagaacagaggaggcagggtggacaagtaccaggtggctctccctttccctctgtgttatctttcaaaacagttccaagcttggagaaagcaatgagctccacctactcagcagaacccacggctcgtcccccgtggacgtgactgagcagtgaccttgcctgccccgttcctcagccgcccatcccactgccttgactgaggggaccctgcttgtgctcctggggggcaggactgggggtcctagctccttgcttctttggttccactcagagaacagttgtgcttgacggactcatccccactccccaaactccaagctcctgctggtgggctgaaggcactgacagagtccctgggacacccccaggtagccaccttctcttgtgctctggtgggtccctccctgggcacatcgtcccatcctcagctcaagccccaggtctaggaatagggacagtgaagaaagtgtaccctccaagaaaaagcttctgaggacttttctaattgtgcagatacttctgaagcccatgccgccccgcccccacagccccatccccttgcccagggcctcacatgcccggctcccccaaccggtccttccccttgggctgccggtgcagctgtggggcccaggctttggcaggcccagcttcaagacagtgggacacagaaaacactttgcagcatcgcctctccctccgccacacccaggtcagcagagatgggcccccaccga

SEQ ID NO: 318709 - DNA, 909 bp, Homo Sapiens
  misc_feature (69)..(80): n is a, c, g, or t
  misc_feature (638)..(638): n is a, c, g, or t
  misc_feature (690)..(690): n is a, c, g, or t
  misc_feature (748)..(748): n is a, c, g, or t
  misc_feature (821)..(821): n is a, c, g, or t
  misc_feature (853)..(853): n is a, c, g, or t
aggctttggtagatggctgggtctcccaaaacataagcaaggactgaaatccaaattaaaattactgtnnnnnnnnnnnntaatttttgacacttaaatgaaagcttggttgttttagagaaattcaggcaataatctatacaagctgtcaggaaaactggataatgcaaaaagccataagtaaaggaaataatttgagtaaataggcagatgtggtatttagtgaacctaatgcttaaaagtacaaaatccctgaaatacaatataatggaaatgtttaccaaaagtaaaagatcaacgaatgctagtgaaatgcaaaaatattccataaaattttgacaggtgttttttcttctcattcctagtgtaaggatatttaataatattttcccaagtatgatcaagaatagcagatagttaacatctaggggctggtttgtttgacgtaactggtactgaaaagagcagttctctgaagagagagcagtcatatttttagttaaatttcaagaagacctgctgaaatacacatgataaaacactgcttcattttctgtcctctccagtgggtcttccttgactgatgatcttcctatttaatttcacttttactgccttcaattatgttatttttggtnccttgcatttcattttgatataccaatatgctatgtgagtaagctcggaganatttgcgcaagtgtaggacgaagcgagagcggttccttccagccgaacctgcctccgnaggcccggtccgtgcgttcgtctccggactgcagggggcggccctgccaccacctcgaggccacccgaggatngatggctgtcggtccgcaaggttgaggccccnacacctgcagcgcccgtgcccaggtgaccgcccgagggaggggcgagggcccagct

SEQ ID NO: 318710 - DNA, 1018 bp, Homo Sapiens
tgggtggcgaattcggcacgagggcgtctgtgcgaccgtccgtcccgagcgcgcagccgcggcaggccaggtcagagcagcccaccatgggatggggagggggtggaggctgcaccccgcgcccacccatccaccagcagccgccggagcgccgcgtggtcaccgttgtctttctcggcctcctgctggacctcctggccttcacgctgctgctgcccctgctgcccgggctgttggagagccacggccgtgcccacgaccccctctatggctcctggcagggcggggtggactggtttgccaccgccatcgggatgccagtggagaagaggtacaacagtgtcctgttcggaggtctcattggctcggcattctctgtcctgcagtttctgtgtgcgccactcactggggccacctctgactgcttggggaggcgcccggtgatgctgctgtgcctgatgggtgtggccacctcatatgcagtctgggccacctctcggagctttgcggccttcctggcctccaggctgattgggggcatcagcaaagggaacgtcagcctctccacggccatcgttgctgacctgggctcgcctctggcccgcagtcaaggcatggcggtcattggggtggctcttctcactgggcttcaccctgggccctatgctcggagcctccctgcccctggaaatggcaccctggtttgccctgctcttcccagcctccgacctgctggtcctcttctgcttcctgccagagacgctgccccctggacaaaacggccgccctctatcgcccctgggcttccgtgatgccgcttgaatctgctcaaccccctgggccctgctgcccctttctccggctgtccgctcgagagccaggaacccccccctcctggaaaaccggcgctccacccagccctgcccccgccccgtgggccctaaaccttactttcccgcctgaccgcccttccctagggtacctccgggaccctggcgaagtaacccccccttgtcac

SEQ ID NO: 318711 - DNA, 1155 bp, Homo Sapiens
  misc_feature (508)..(508): n is a, c, g, or t
  misc_feature (1013)..(1013): n is a, c, g, or t
taggaatatatatttttaaaaggattcaataatctttttaaagcaaaatcaaagtatggctacaggaggagaggaaatatccaaattgtaatcaatgcagattgtttacttaaggccttatatttgtacctgtataaataccatatcacagcacaaaaacataccccatctggctctcttaaggtacatgataaatcagactaatgcacattcatcaaagtggcatcatctcaggatatgtgcatatttgacgtgggtatgaattcagggtttccttgggtctctttcaaggactctcctttctcgtcggtatttctatttccttattttccttctgtttatgaagaactgttatttttatatttaatgcccaattttcactacttgttcatgtcagttctctgaaatgttactgcctatgaaccgtgacatgtactctttataacagaaccagaagttaaaagatgtagacatcacacaaatcaatgattattttaaaaatagaaancaatgataaaaattcagttgccaacttagaggattttatacattatgaagtgttctattttccttccagggtctgaaatttatttctcaagaaaacagattttatttctaaagcctttactatctttggctagaaacaggaaaaaccagttttctctttgaacaaaattgtcccaggagaacaacacaaatgctttttccaaattagagccataagtcttccttaaatgtcctagtgtgacaataaggatacaacagccatcttttaaatgtcatgaaggctattgttaagacggtgtttttggccgttttgcagatggtccatcgaagttagttctgttatcaatgttattttcatcttctgcatcatcttcatcatcaccgtccaagtcctcgtctggagccgccgccacccggtgctgcacttccccctgtaccagagggtcgaataattccgttaccatgtccttcatctgggccacgccagacaacaggccctggaaagnggtgccgtcacccggcgcctcacaggacaaccgcagcttctgcggcttcccttcctgcccgacgtactctcccagcagctccatggtgaccgctaagcttccagaacacgacaccgggaagcgccacccggaggcggaaccc

SEQ ID NO: 318712 - DNA, 1036 bp, Homo Sapiens
  misc_feature (66)..(67): n is a, c, g, or t
  misc_feature (715)..(715): n is a, c, g, or t
  misc_feature (842)..(842): n is a, c, g, or t
  misc_feature (881)..(881): n is a, c, g, or t
  misc_feature (919)..(919): n is a, c, g, or t
  misc_feature (922)..(922): n is a, c, g, or t
  misc_feature (938)..(938): n is a, c, g, or t
ttcgtttatttccccctgcccttacatactgcccctggttgtcaaaaaagcagggctgggtaccgnngtccggaactacgaggatcggcatgcggagaaggtaaattctcgccccgagttgaggcgcgggtttggtggcgcgtttcagcgaagtcgcacgtgaaggatagcagtggcctgagaaagacccagtcatggcagcctccagcatcagttcaccatgggggaaagcatgtgttcaaagccattctgatggtcctagtggcccttatcctcctccactcagcattggcccagtcccgtcgagactttgcaccaccaggccaacagaagagagaagccccagttgatgtcttgacccagataggtcgatctgtgcgagggacactggatgcctggattgggccagagaccatgcacctggtgtcagagtcttcgtcccaagtgttgtgggccatctcatcagccatttctgtggccttctttgctctgtctgggatcgccgcacagctgctgaatgccttgggactagctggtgattacctcgcccagggcctgaagctcagccctggccaggtccagaccttcctgctgtggggagcaggggccctggtcgtctactggctgctgtctctgctcctcggcttggtcttggccttgctggggcggatcctgtggggcctgaagcttgtcatcttcctggccggcttcgtgngccctgatgaggtcggtgcctgacccttccacccgggccctgctactcctggcctttctgatcctctacgcccttctgagccggctcactggctcccgagcctcttgggggccaactcgaggccaanggtgcgagggctggaacgccaggttggagggagctgcgnctggcgccagaggcgaggcggccaaggggggccgccantgngggaaggaggaatgancccggatgccccacacaccggccagtggtcataccaaaagagctgaacctgctttcgggggcccatgcagcccctccctggccaggcccccctggccc

SEQ ID NO: 318713 - DNA, 1018 bp, Homo Sapiens
  misc_feature (4)..(4): n is a, c, g, or t
  misc_feature (17)..(17): n is a, c, g, or t
  misc_feature (23)..(23): n is a, c, g, or t
  misc_feature (36)..(36): n is a, c, g, or t
  misc_feature (47)..(47): n is a, c, g, or t
  misc_feature (50)..(50): n is a, c, g, or t
aaantctggaaaaaacngccttntttttattcaccntctctcgaaanaanactcgttaccaactcttcataacctgtgtccataaagagctgagccaggaagtcatcagtaaaaaaatatgatcttgtcccatcttgtctaacataaaagttttctccaagtttgctgctggctttaaacctaagcatggcatgatcatacagtccgtagtcacgaaacaagacacttttgcctggttttaataccttgtaaatgttttgtaagacaaggtgcatcttatcaggatgaacagctgacagcacaaatatcaacataacaacatccacagactctggcggtacatgatccagaagatcatctttagtcagatcacactggaataccttgcatctttctgtatcatataaaggattttgcttaacatattcaatggctcttggagaaaaatcacaggcataggcaaagatattcggatcttcttctaaaagtgggaataaacagtttccaaccccacagccagcttcaagcattgttaacttttgatcttcaaactctctacatgatcttagctcctcaaactctctggtggtccagtgtctgtctttgaagaaattagtgctatttcttttgtaaaagagatcccaatttttctgagcctcttgttccaatttctgctgtttaaaatcagacaccaaagttgtggtctcttttcagtttctcctcttcttcagaggtgagaatccttgcctgcagccctttcctttgcaaagaagccatctctgaaactgacggtaacacttaacacagctgaagattctccatcaccaaataatatgaatccacgctaatggatcagatacatttcctgaggtgagtttcacgcctcaaacagcacagggggcccacagccagccccactgggcctcggaggcagaatacgggaagaaccgcgaaacaaccctaaaccaattctgaggaccacgaattcggattctccgggagttcttttgccatggca

SEQ ID NO: 318714 - DNA, 1391 bp, Homo Sapiens
  misc_feature (47)..(47): n is a, c, g, or t
  misc_feature (1313)..(1313): n is a, c, g, or t
  misc_feature (1386)..(1386): n is a, c, g, or t
taatctttattggtggcctgggaggggtgactggccagaaggcagcntaggccgggcctagacccccatgggggtggcaggggctccggcgggctaggatgcacctggcacccagaagtgccgcgggggcactggctcctcaggggcccgagcgggcggggagcagtctcctacttgtgccgggcctcggtcaccctctgcaggcagtactgcgcggcgggcagcgacaggaccaggctcgcggtgcggcggcccatccagtacaggctgtagcccagcaggccgaagaaggcggccttcacggccaaccgagacactctgccggagacggacggcgggggcacggtcatgatctcctggatgttgaggtcggtgctccagttcttctcgatgccaggcacgtggcccatgcccacgacgcccacgaccacggaggggacgcacttcctgggctcggcgtcagaggcccgaggcagctcgagtcgccgcgcggcctggcgcagcatgtaggttaggtagacgtcgcgctccgagacgatggtgcggtgcaggtctgggaactcgccaatcatctcggccatcatctgctccagtaggtccttctgcttgcagcgttccacgtcatccttgctgatggggtctgacaggaagcacaggccccaagccagcctgaccttctgccagaaggagagcgctgcgatggccctcttgaaggtgacggggatgggtcggtcacccaggtggaacttgcagaaaggcaccttgctggcctccttgaaggcctccctgaactcgccacctggggccatgcccagctgctcggtgatgtgtgcagacaccttcagcagcagcatctgcatcagccccgacatgagcccgttctgcctcacggcctgctgcagcttctccaggctgagctcctgggcctcccgcagcagcgtgctctcgtccatcttcagcatggacacacgatattggcagagctccacgaccaccacgtcaggctgcacctcccggatggtcttcacaacgtccctcttgctgtcgtcgctgaagtgggctgtccccaccacgtacaccctgctcccgtcctcagccaccaactgggtcacagtgcgcggcatgttgggccgctgacgccgccgcttcagcttcatctccaggagcaggttgaaggcgtccacgtcggacaggttctgggggtctccatgaagcaccctgggcaccggctctgaagcctctgacggcacatcaggttccacgttggcctggtgcggtggctgctgctcctccccgttcatggctgggcggcnggcttcctgcccctgttgggagccgaggcgaggcagcggcgctcctcagccggcctccatgcggcgcgggccntcaac

SEQ ID NO: 318715 - DNA, 1335 bp, Homo Sapiens
ctctcccagttagggacgggccccttttcggagatcaaaatgccattccagggcctacagtgaagggggggtgaaggaattagggaataagggggttgtaagaagtgttgggagaggaagaaccacagggctggctcagggccaggatctgtgacggggcagggcctctgtcaacatttacccagtccatccccagagagggctgcaaaaggggacggcgatagaaaagtagatggaatactttgggatgggggacaacttacatgcaagaaaaggagggaactgaacggagaagttacatccaaagggaagggagtgaatagcacaaataaatatcctggcaagagggcaggccagctgtgagggtgtgactactgatgatgcttcaaaggaagaggaagcagcaatattttaggactgggtaccagcagagaaggcagggaggagggagcgggggatcaggctggagggcgcgagttcaccatgaggctgaggaacgattctctctcgtggggtccaagactagcccaggaaacagggagtcgcagggggactggagaggagacctgggccagcgggaggcagtgttctccagagggtcagatgcgtctctgattcaggccagaatacaggtcccgctggcctttccggatgggctcatagtctgggttgggaacaggtggtggcctctccttgttttgtcccctttgcctgccgccagcacccgctcctcgtgtcacaggcttggccttggcctttctattcttgctccagtagtaaaccagcagcagcaagcccccagtgatgcagatgtccactatgacaattgtggccaccgacatcacatccatctccatgcagttctcacacactcttgccctcaggtagagataaaagttcgcatcttctggtttgcttcctctggggtagcagacataataaccactttgctccaattctgaaaattccttcagtgacaggtgatcctcatcactgcctatgtttttatcatcctcatcaccgcctatgtttttatcattgtgttgccatagtatttcagatccaggatactgagggcatgtcaatattactgtggttccagagatggagactttatatggtgtctgtgtaataccacccatttcttcattaccatcttgcccccaaacgccaactgataagaggcagaggcccagaactctccagtgagtgcccgactgcatctttgtttcatgggactgttactttactaagatggcggaggccagcagacttactacttcattttctgaagcaggcacctgaggctgggaggggaggagggtttctgatccc

SEQ ID NO: 318716 - DNA, 1681 bp, Homo Sapiens
tccaatgaatcaacatactttattagacccactaagtgccaggggaggggcctgtgctctagagccaggttacagggctcacccgtagattcagtctggtctctccccatcatgcctctcacttccagtctgggcttctaataggagggccccgacttcttccctcccagtcattctctcgaatggagaatctttcctcattccagggacaccaaggctcaggaaggggcctatccatcatcagtagagccagacaagctctcccatcggacgtcctgtggctgggcccagaaatgggtgccgctgcctgtgggactgcccttccgggaggaccagggtgtcttcagtgctcttggcctgcacgtggaggagagtaggcagatgtctggtgctctttaagctcaaaggcatcatggccctctcggaagcagcgggcacagaagaggtccccatcgcagccagcgcagcgtagggtggcatcctcattgcagatgcagcaccaggggagctcctcttcctcagcctcaggcctggggtccacatcctgggctttcagggatctcaggctctgctccgcggggttgcgtccagggtgcgagaagcctgcttctgcagggatgttaaagccacttgcctcatccagggcagcttcttcagtgagctgctgcaggactctttggatggctgtctcctcatcctcgtcgtcatcactgtctgggaggcgatagtcctggagggtcactctctcggggtcctgtccccgcagcatggctagtcgcttggccagggccagaatccgttcctgcctcgtgttctcctcccgcaactcaagtgctgcctcagccagcagtctgctcttctcctcctccaaggaccagttggcctgcctcttggaattagtgctccctgggccaccctggttgagatcattctggagagaggcagctgggcctcctcctttccagctttcatcgatagccacctcagctgccagctgcgttagcagatcctgtgtctgctgggcttgggtcctggtgtccggtgtgtgatgtgccggctggggggtttgagaaggtagaactctgccctgcaacgctgcaagtcgtgcctccatttcctgggtggaagggatggaaccctgacgttcatcctttagggcagccagccgtgcctctatctctgcctgtgaggggactaacttgggcttgttctcctggcggagtcgtgctaggcgctcagcaatcatctggtcttgtcgtgtcagtccctggctctgggaagtgctgggcttttgcttggcttccaaggctgccacacgcttcttatagttctgaggtggtgaccacttggaggcattggcagaagaccctctggtcaggacctcatggcattgcttgcagactttctgttgggtgttcccagtccgaggcactgctgcactgaagcttaggcagcctgaacagaaggccctgccacaattcttacagccgtactccttcttgaagagggtgaacttgacagcgcagccgtagcacctactctccatggtggctcccagcaccgcagggtctgcagagctgagatcacgccggccaagtcctgggccccttggaccctcaccccagctccgcccttcccttccctgccctgccccgccccacacgcccactggcactgtccc

SEQ ID NO: 318717 - DNA, 1093 bp, Homo Sapiens
ttttggtatttctggatggtttaatcatgaatggcggtaggcagtgtaagaaaaaagttcctagagcatgataaaccttggtttctggcacaggataaacctttcatttcatggtgtacatttcacaatattaaaaaaaccccagcctggttttcatgattaaagccgtggggaaaggacaatgtttccagggagcaacgactcgcaagcacacccctggggctgtgcggtggccgtcggcggggccagcttcaaagtccaacccacaaggcacaggttttcaaatctttacctctgtgtacaagaacgtacatgaactttaaaaacgtgtgtttcctcgtctgtgtttaacaccctaacgatgatcagtttgggggagacgtacccctccctaatcacaggtaggaccacttcccaaatcaatgaaacgaccgtcctcttttgtgtcttgacttcaggtgtccggccgaacgacggagtcttttcctttcttgtcgatgcagtttctcagcctcctgttgcttcttctgctgttcagacctctttaacgtgaatgtcaattgtttgctgccaacggtggtgtcggatacactcaatgtcccattttttgcttcaattttcaaacgatcttcaagggttttgttcatcagtttctgctttgtggcagaatctttgaagcttctaaattcttctcctgctttgatctcataaaactggggctttaggactgtctgctggtcctccttgagtcgttcctgccgcttcactttttcctcctgctggaggagtctgcgttgcttcctgacctcttcaacccaggctttttcatcatctgaactctccgaactttctgcatcacttggttttccttccggctcttcctcctcttctttttcacgaagttcttgttgctctaagagtcttagtttcttcttccttttttcactaatttttgaaacaagtggattcagaagcctaaattcttcactctcttcatctacttggaagtcagggttctcaaacataactttaaatcgatcatcggtgagaatattaggaagactcttaactttctttttccatgtagatttct

SEQ ID NO: 318718 - DNA, 436 bp, Homo Sapiens
  misc_feature (12)..(12): n is a, c, g, or t
aacctttaaccncggtgtaacaagaacgtaacatgaaactttaaaaaacgtgtgtttcccctcgtctgtgtttaaacacccctaacgatggaatcagtttgggggagacgtacccctccctaatcacaggtaggaccacttccccaaatcaatgaaacgaccgtcctcttttgtgtcttgacttcaggtgtccggccgaacgacggagtcttttcctttcttgtcgatgcagtttctcagcctcctgttgcttcttctgctgttcagacctctttaacgtgaatgtcaattgtttgctgccaacggtggtgtcggatacactcaatgtcccattttttgcttcaattttcaaacgatcttcaagggttttgttcatcagtttctgctttgtggcagaatctttgaagcttctaaattcttctcctgctttgatctc

SEQ ID NO: 318719 - DNA, 1490 bp, Homo Sapiens
  misc_feature (714)..(714): n is a, c, g, or t
  misc_feature (735)..(735): n is a, c, g, or t
  misc_feature (758)..(758): n is a, c, g, or t
  misc_feature (843)..(843): n is a, c, g, or t
  misc_feature (845)..(845): n is a, c, g, or t
  misc_feature (851)..(851): n is a, c, g, or t
  misc_feature (854)..(854): n is a, c, g, or t
ttttccagatcaggaagttttattgctgacatgcaggaagagtccccatgtagtacaaaaatatgtctttatacaaacttttttgtgactttttccgtttctttacaataggacttctctcagtgtgtgacacccagtgagggctgacccatcctcctctcctttgcttcaccaggaatgtcatcagacacatggcttgaccttggaagggcccagtctgtctgacagggctttgcagacccggcggctattgctttgaaaaggaggagaaagaccacgcacgggcagcagcctggagggacccggtgggctgctgagagggggctccgctgccgacgggccctggcccagcttcaggccctcacaggaggacagtcaagggctgggagccctaggccggactgcatttccgctcccgcaggagactttctatgaaataaatatagaaaagagggcatcccccagccccacagcacaagaccctggccctcagcgctggacagctgagacagacgcaggctcgctgctcagggggagtaagtactgggctccagtaggctcccacaggcccactgaggcagaggcatgagtcgcccaagtgctggatggggcatggggagaaaggggcgtgggcagccctgctactgctggcaagaggtggcccattttttccagagggggaaactgaggcacaaggaggtttgggaacttgcncaaggtcactcacagtgagtnagccttttagggggaaagaaaanagatcacactctgggaaacacagtcacctccccactggggagcagggccaggcaggaggggcctcagggcccatgactgcctggngnggacantcngcctctctgaggacatatggggggtaggcctctggggaagggtctttgcttggcatcaggcagggccaagtccagtaagggcaaggggagggggcattctggtgagaacagcatttctggcaagacgggcatccacttcaaaatctcggctcaaaagggcagcagggctgttctcaagccaggcaggcagggtcccccaatccctacaattctcctgagtccctcaccaccatggaggacccttgctagggtctaccgggagagtcaccacatctattatgaggcaagggcactgggatatgttcccaccatcccctaaacacaagagtaggctaggggagcgtgcaggcagcccccgctcacggccaggcctgcagcccaacccatgggccccttcgcactgggagtccacgtgagctcagtaccacggggaaggatagagaagggaacaggttaacgcgcgtgtacagcacctcagagaagccactgagacgggagagaaagagccaggtctagaaaggcctcccatcaccggcagcagagagggactggtgggctgaaaggggacagggactggcaggaggggcttccctgcctgggggtgaggagggagctcacgtgtgggctgtggattcc

SEQ ID NO: 318720 - DNA, 894 bp, Homo Sapiens
  misc_feature (332)..(332): n is a, c, g, or t
  misc_feature (436)..(449): n is a, c, g, or t
  misc_feature (456)..(456): n is a, c, g, or t
  misc_feature (477)..(720): n is a, c, g, or t
  misc_feature (722)..(722): n is a, c, g, or t
  misc_feature (726)..(726): n is a, c, g, or t
  misc_feature (738)..(738): n is a, c, g, or t
  misc_feature (742)..(742): n is a, c, g, or t
  misc_feature (750)..(750): n is a, c, g, or t
  misc_feature (752)..(752): n is a, c, g, or t
  misc_feature (754)..(754): n is a, c, g, or t
  misc_feature (764)..(764): n is a, c, g, or t
  misc_feature (769)..(770): n is a, c, g, or t
  misc_feature (787)..(787): n is a, c, g, or t
  misc_feature (799)..(799): n is a, c, g, or t
  misc_feature (804)..(804): n is a, c, g, or t
  misc_feature (806)..(806): n is a, c, g, or t
  misc_feature (810)..(810): n is a, c, g, or t
  misc_feature (820)..(820): n is a, c, g, or t
  misc_feature (824)..(826): n is a, c, g, or t
  misc_feature (828)..(828): n is a, c, g, or t
  misc_feature (834)..(835): n is a, c, g, or t
  misc_feature (843)..(843): n is a, c, g, or t
  misc_feature (855)..(855): n is a, c, g, or t
  misc_feature (862)..(862): n is a, c, g, or t
  misc_feature (876)..(876): n is a, c, g, or t
  misc_feature (879)..(879): n is a, c, g, or t
  misc_feature (881)..(881): n is a, c, g, or t
  misc_feature (887)..(887): n is a, c, g, or t
aattgggaaagttttaataagcattcaaatgtactttacattgataattgcaatattgaattttgtaaaactttaaatattttccttaaaaaaggttagtgatttttttattatttttgggaaatgtggcgatccaacgattatagcattaatgcaaccattccaggtccctaaggttgagttaacattaatatgtaagtaagtgttcgcatttcatgtctacaataaggtagattgtgaacttcccgtatctctgaattttagcaaaaattccatgagataatttacagtaatgtcaaatttctggagtgcaaactcatactctacatttnggatcacttttttggctttgagttacctgacttggagaatacaaggcaatttttctttcctaaatccttggaaaaatatttttgcagtaagtcttgtgtctccnnnnnnnnnnnnnngagaaanagtctcaccctgtcacccagnnnnnnnnnnnnnnnnnnnnnnnnnnnnnnnnnnnnnnnnnnnnnnnnnnnnnnnnnnnnnnnnnnnnnnnnnnnnnnnnnnnnnnnnnnnnnnnnnnnnnnnnnnnnnnnnnnnnnnnnnnnnnnnnnnnnnnnnnnnnnnnnnnnnnnnnnnnnnnnnnnnnnnnnnnnnnnnnnnnnnnnnnnnnnnnnnnnnnnnnnnnnnnnnnnnnnnnnnnnnnnnnnnnnnnnnnnnnnnnnnnnntnaccnaccacgcccggncgtntatgtgtntncnttactgtaantgggnngttttaaaaaaggttantagctttgtgtntggtntnccanagttgtatanaatnnnanaaaaannataatatntgcaaggaaaanggttttnaatggctgcggganccngnataaanatgcttt

SEQ ID NO: 318721 - DNA, 772 bp, Homo Sapiens
ttttttgggccaaaatttcattttattaaatcatactgtcaaggaaattcaaaggaagaaactttaggggattcttccaaaggctgtgtaattttccaaatgattttgcctctggttgcaaaagcctgttcagtccttcaatccttttttagtcgtttagcttttgcaatgttttcttggcgtttttgcttcttcttttgctccttctccctggcctcaatcatcttggccaatttccaagacagtacagcacttgctaggaacagtggagtaagggccaaaataacggttgtaaggaagccataggggtcctttgcagcccattccacaacatactcagcccaagcctttatatcaaacatcttcacagcagtcttatgaaaactggggcttatgcttgagtagtgatcccttaactttgtcctggtgttattagtgacccaatcacgacttcagatgacccttggtagtctgtcttcttgagttctactgtacacatctgagagacggtttaaattctgtacaattggcctatcggggctgcagacccacggaggccacgttcactcctgcccgtcggccttggcaagcgcgggccccttgtcgcgcagagcggagggtcctgggagatcctgggttggcccagccacaccttgcgccgccgccgtttctgctggacaccaggagaaaaccacggcagctgcagccaccaacttcccctacatagccccacgggatcggatcccactccccactcaccgccagaccggaa

SEQ ID NO: 318722 - DNA, 1028 bp, Homo Sapiens
  misc_feature (9)..(11): n is a, c, g, or t
  misc_feature (19)..(19): n is a, c, g, or t
  misc_feature (25)..(26): n is a, c, g, or t
  misc_feature (48)..(48): n is a, c, g, or t
  misc_feature (53)..(53): n is a, c, g, or t
  misc_feature (56)..(56): n is a, c, g, or t
  misc_feature (61)..(61): n is a, c, g, or t
  misc_feature (73)..(74): n is a, c, g, or t
  misc_feature (78)..(78): n is a, c, g, or t
  misc_feature (87)..(87): n is a, c, g, or t
  misc_feature (91)..(91): n is a, c, g, or t
  misc_feature (95)..(95): n is a, c, g, or t
  misc_feature (115)..(115): n is a, c, g, or t
  misc_feature (130)..(130): n is a, c, g, or t
  misc_feature (138)..(138): n is a, c, g, or t
  misc_feature (143)..(143): n is a, c, g, or t
  misc_feature (159)..(159): n is a, c, g, or t
  misc_feature (162)..(162): n is a, c, g, or t
  misc_feature (172)..(172): n is a, c, g, or t
  misc_feature (183)..(183): n is a, c, g, or t
  misc_feature (185)..(185): n is a, c, g, or t
  misc_feature (188)..(188): n is a, c, g, or t
  misc_feature (200)..(200): n is a, c, g, or t
  misc_feature (212)..(212): n is a, c, g, or t
  misc_feature (216)..(216): n is a, c, g, or t
  misc_feature (257)..(257): n is a, c, g, or t
  misc_feature (272)..(272): n is a, c, g, or t
ggaccgctnnncgagcagncccggnnaccttcacactcctcataggcncgaanccncgatntgacaggaaggnnggcncaattgagnccancccntgaaaagacccggggtcctncttctcgaacgctgncacaatanagtgnagagacccgggtagcnctntgccctcccntctcatcagtntnacntgatcacgtccntggggtgccacngccnaggccaggcctccagaacagccccggccaccagcacgcacnggacatctggccggntgtggccagcggggctgagccactcgcagaggaccgcgtaggaaaggaagtaggtggcaaaggagtggccgtcccgtaagaccagggccgagctgcccttgtagaggccgcacagcccctcctcacgggctaccgtggccaggcagtgcagtggcccgcggtacttgggctctgggcaggctgggggcacaggacacatggggggcacagccaacggccccgaggccgaaagccgccgctgctgcttctgcgcctgtgtctgcgtctgcaagcggactttggccacctcagtgggcgacgtcaggaacacgcggacgaggccggaggcgcatcccgagagcgtgatgtcggccttggtgggcttggcgtcagggttgcgtaccggagccggcagatgtgcgccaggcagtggcggtaggtgccaaaagacacggaagataccatgggacaccgtgcacacgggcagcgagaggccccggtagaagccccacacgcgctctcggtgatacgtatcccggacgcagtgcccgctgcctgtgtactttggctccgtctggatcctgacctgcaggagaattgggcttcaggcacgagcggctccaggcctagggcaaggccagcaggcccttcaccgtgtccagggggtagcccacagcaacaccgcagacgcctccgatggctccagcgacaaaatccatgaacaaggtgtggcggggaggccctgggtctgcctgcctgagaggggtttggtgccac

SEQ ID NO: 318723 - DNA, 1718 bp, Homo Sapiens
catcctcagaaacattttattgacaacagttcccaacagagtctttggggtctttaagtggcaggtgcagcgtccacaggcagagtgagggctcctgaggaacctcaccccaaattccctaaccggccgaggacggccaccccaggcccctctcaggtgggcatggcagtcccggcagcaccccctctgagcagcctgctgtggggaagaagccgggccgggagccctcagtcgtggtgccagcccagctcatgctccccgccccgaggcccccagcctgtgggaagcccctgcctgtaagggacagctcgtgaagacacaggaacagtggtgggggtgagggtctaggaatggggcagagggtggctgagcacacacctgactccctggaggggtgcttcaaagacatgggaggcgagggccatggggaggctgggatgaacaaccgactccatgcaactcaacgctctcatcaaagaggcccactcctccctggctcctgccaccctaggccaaccctggctgatggctggcgggcccctcgacctgaggtcagtagctgggcagggcgagctcaggcctcggccgacaacactgcagggaggctcctcattctcctgggcaatggccctgtggggtcccgaacccagccacactaccccttgcctcctccagccactacgacctccagcagctgctggtgggtgggccgctgggcgtggggaccggctatgtgagcagaccccgggcgagcctcagcactgcctcataggcgacgaagaccaccatgttgacagggaaggcgcggcagcaattgagtaccagccccttgaaaaggacccggggtccctcctctcgaacgctggtcaccatacagtgcaggagaccccggtagcgcctctggccctgcccgtctgcctgcagtctcgacttgatcacgtccatgggggtggccacagcccaggccaggactcctgcacagcccccggccaccagcacgcccgggacatctggccggctgtggccagcggggctgagccactcgcagaggaccgcgtaggaaaggaagtaggtggcaaaggagtggccgtcccgtaagaccagggccgagctgcccttgtagaggccgcacagcccctcctcacgggctaccgtggccaggcagtgcagtggcccgcggtacttgggctctgggcaggctgggggcacaggacacatggggggcacagccaacggccccgaggccgaaagccgccgctgctgcttctgcgcctgtgtctgcgtctgcaagcggactttggccacctcagtgggcgacgtcaggaacacgcggacgaggccggaggcgcatcccgagagcgtgatgtcggccttggtgggcttggcgtcagggttgccgtaccggagccggcagatgtgcgccaggcagtggcggtaggtgccaaaagacacggaagataccagggacaccgtgcacacgggcagcgagaggccccggtagaagccccacacgcgctctcggtgatacgtatcccggacgcagtgccagatgcctgtgtactttggctccgtctggatcctgaccttcaccgtgtccagggggtagcccacagcaacaccgcagacgcctccgatggctccagcgacaaaatccatgaacaaggtgtggcggggaggccctgggtctgcctgcctgagagggctttggtgccaccagg

SEQ ID NO: 318724 - DNA, 421 bp, Homo Sapiens
  misc_feature (82)..(82): n is a, c, g, or t
  misc_feature (135)..(135): n is a, c, g, or t
aaggcttcctgaggaaacctcaacccccaaattcccctcaacccgcgaggaacggccacccccaggcccctctcaggtgggncatggcagtcccggcagcaccccctctgaagcagcctgctgtggggaagaagnccggccggaagccctcagtcgtggtgccagcccagctcatgctccccgccccgaggcccccagcctgtgggaagcccctgcctgtaagggacagctcgtgaagacacaggaacagtggtgggggtgagggtctaggaatggggcagagggtggctgagcacacacctgactccctggaggggtgcttcaaagacatgggaggcgagggccatggggaggctgggatgaacaaccgactccatgcaactcaacgctctcatcaaagaggcccactcctccctggcta

SEQ ID NO: 318725 - DNA, 397 bp, Homo Sapiens
  misc_feature (135)..(135): n is a, c, g, or t
  misc_feature (276)..(276): n is a, c, g, or t
  misc_feature (293)..(293): n is a, c, g, or t
actcagaaacattttattgacaacagttcccaacagagtctttggggtctttaagtggcaggtgcagcgtccacaggcagagtgagggctcctgaggaacctcaccccaaattccctaaccggccgaggacgcanccccaggcccctctcaggtgggcatggcagtcccggcagcaccccctctgagcagcctgctgtggggaagaagccgggccggaagccttcagtcgtggtgccagcccagctcatgctccccgccccgaggcccccagcctntgggaagcccctgcctntaagggacagctcgtgaagacacaggaacagtggttgggggtgagggttctagggaattggggcagagggttggctttagcacacaccttatttccctgggagg

SEQ ID NO: 318726 - DNA, 2218 bp, Homo Sapiens
  misc_feature (47)..(56): n is a, c, g, or t
tattctagggagaagaggtgtgaggggggtgggaaaagttttattgnnnnnnnnnntgtacaaataagttcttggattgatagcaacaaaggctcatgttcccccttccctccctatctttgaagaactaaaaaaggaagaaacaaaacaaaaagttcatccccacaacgccagacacgatgcttcttgaccagagtctgcccagaagcccctcctgggagctccttctcaatccgcctcactgcggccaggtcattctgggggtgcctggtcccaggggctgcagcacctagttttatagttgggagaggttgggatagagctggggaggcagctgaggtgttttagtgtcagaagagggctggctgacccccctagctcaatttggtctcacaggtgagaaggtacctggctataaatatgaatactgattgaggcaggcttgatctgggactttcagggcaggcagaatgactatggcccaggtcccacaggatgtggagtttccgggctcagcatcatggtatctggggcccatgtccaagtggagtgaattctagctgggaaggtccgctcaggcacacgggaaccccggtctgtttttccacccccaccccatggagtatccaaggctggtacctcacctcccccccaaccccaatagcacccatgtgtctcaggagcctttggatgcctcctgccatcctgtgtgcaccctgaggccctataactcgtctcgcatcttgtcacccttaggccggaccaggcgcccaatgaatagcagggagccgctttgggtgtcccgcactaggaagatgaaggggtggtcggcgtagaacagcttggggctgcgcagctcctcgcgcccgtagatgtcctggtcaaaggggttgccatctgtgtccaactcaaaggcggtggcgtggaacacgctggccaggtacaggtccttcttgcctgacatgcgtgacaagtcggccttgttcttgtcaatggcctcagtcaggcccagcccagccaggtgtttctgcaggtcatgggtcacctccaccacacccttgggcaaggagatggcaacagccttcttctgcatcttccccatccagatcttcagctgctctttggttagcagcttttcaaggcgctcgagaggctccacgtgatggggcatgaggatgatgaggctggagagcttgtgggccaggggcatctccacgatttgcagcttttccttctcgtcgtcgtagtagttgtagaggcctgtccggtgcatcatcatgacacccacggtataggaccgagtcaccatgaagccacggttgtccaccatcttgtggtggaatttctcatcccagtgtggcttgaagaacatggcgttgactagcagggcgccgtccgtgcgctccacgtccttggtgacctcgggcagcttgccgtcggtggtctgcgcggcccactcgttgatggactgcagcgcgctgcgcttgtcgcggaagttgatcttggagtgctcgcagttgtagtgctgcttgctgctgcgcacgaagtcatcagcgaagctcactgagctgggtccgtacagtcggctgcccagcttccaggtcacgttgcgcgccgtggagttgctgagtgagcgcagcagctcgcccaggccggcgtgcacctcctcgtcgcgcagctgctcggcgctcagcactgccttggcctgcgacgccgtggtcgccttgccgcccagcgacacgagccctagcgacgaggccaccaccacgggtgacaccaggatgttctccactgcctggtccttggccatggcctggtacaagctgaaggccaggccggcgctgcgctcggcaagcgtggccgccttggggctcaacttctccgcagtgccaggagctgctgcggctgcaggtttcttcacctcggcggccagggccgcctccaggaggcagaaggcgctgagaagcaggagggagcgcatggccaggaagtggtttgcgtgcaccacggtgggcctgggtcgggctgggctagcgccgggacgtgactctcgctctcgagccgcgacacgattctactcttagcccgctcccctgctcccgggatctatatatggcagtccccaccccctcctgcccgtcccgagaaacttctggaaagttggaaacgcttccggagggcgccccagctccgccaaaaaaagccaaagacctccctc

SEQ ID NO: 318727 - DNA, 2469 bp, Homo Sapiens
  misc_feature (174)..(187): n is a, c, g, or t
  misc_feature (661)..(661): n is a, c, g, or t
  misc_feature (686)..(686): n is a, c, g, or t
  misc_feature (780)..(780): n is a, c, g, or t
  misc_feature (794)..(794): n is a, c, g, or t
  misc_feature (1842)..(1842): n is a, c, g, or t
atttggggggaggaaatccacaacgcacctaggtcactggacccagggatcttcgctagggaaaaccaggctattgacccatgtttcaccttaccttactggggccccggcgccgcccaaacggaatgggtttaggaaaggcttatcggaggggccgagggcggccgaccatgnnnnnnnnnnnnnngtgggggcgggttttttgactgtgtttatttgaaccaccagatctgttccaataaagagctctccagaccctgcctcaccttacagggaagggcttagagtcagggaagaggggcctgttgctcctgtccctgaaaaaggaggtcaagatggagcccgggcttcctggtgaccattcagactcctcccactgcttgtccctgtggaggacacaggacgggctgccccatctcaggtttggggtgggatcgctcacagtcacccccggaacagccccaactgagggtggggggcctggccctggacacctcatgtctctgggccgggaagccacgatccctcatccatcaggcctgctgccgctctccaccccagcgggggatggacatctgtgctccctcgcagtacactgcggacccaggaggtcccctgcatgacattcctctccttggcctcaggccagcaggcggctgtnctctgccagagcagaggactttctnaccccatcccagatccgggcagcgtagtggaaccagttcttctcggtgaggatcgtgtgtgacagctgtggccgggccatggacatcacttggntccggattttgttnaccaaggactggaaactggggtggccacgatacccaggcagcagggagaagagtgggctggaaccaggtcctgctcttggtgggttttcactctctgctttcactgtccatgaagggtaccaggaataagttgacctcagagtccaggaagtcaggtggaagccccgggaagacattgcattgtaacatggacagagttcccttgtaacgcaggtgggagtgggccatgagctggtcaatcatcaggtgcatctgccgcagcttccgaggacagaagtcctctcggcgagctttgttctgcaagaagactaggtgggggtagtactcggtgccttcatcggagcccgatgagctgctggactcgtggctgggggatggggtggagggcttcaccatctctgctgtctgcaggaacctgtagagactgaggtctgtgaaccagtcctggacaacaatcaccacatggcagaccgtgaaaaggaaggcagcaatctggagtgactgcatttcaacgtaagtgtggggaaggttgtactctggaggcagtttgcggtcattattgatgagatggtctaggatagaagggctcaggatgggctgtgtgtccaggaaaacaatccgttcttgggtaataaagaagtcgatgccactggtctggttgccccctcgttccttcatttcagcgctctgggcccggaaaacataagtcctctggtcctcctctggagtgttggctgacaacaatgacatgaccatggacttgcctgtcccctggaggcccaggacaccaaccaccaacacatcagtctgatccaacaggtactcgatggcactgtcacaccaattcatctggtcatccaccaacttgatgctgtgcttcatgcgctctgggggcagtagtttggcctgacccacgacagggtccatggctgctggtgcggcagtgcccatgccccggttctggatctggtacacaggctgtgtgggtctctgcccctccttctcccccttgggtggcgcaggggctgcagggggtgttggggcgtgnccctcaggggtagaggcacttgtcacggcacagggccccttcccctccttcccgtggcttcatgagaacgatgggcttctccagaggggctggagcaggcggggcagcaggggctgttggaggtgggtggctgttttgaccgctctgctggaggttttgagaggatgatgggggttttctgcatgacggaagtgcttgtctcttcgctggcatcccttctctctctttgccatggtgcaatgtagtccctctcccgaccaccaggcccagagagattctgggggccaccagagccaggctccttccaccgtcgccgccgctctatcccatagagtccaggctgactgtgtccagactcagacatggttacctaacgcggctgctgattggttctcggggcgcggtgtgcgctctcccgtgacgggagtcgggtgggggcggggaggctgacccaagccacccgcctgcaaatggcgtctgggggccaggaacgtgggaaggagagaaaatgggcactccccactccgaaaccggcctcggcgtccgggttgcagcccctaaggaaagctgggccgaaggaagaagaggaggaggatgtaacgcgggcccgagctgagatcagatccc

SEQ ID NO: 318728 - DNA, 2010 bp, Homo Sapiens
ttttggttacttttagaattttattgacttttttcttcataactttaaaacaaaaacagcgcatgaaaaccagtgtcttattccaaagtctcaactcagctgattgccaggtgaacatcaccatcttactcctctgaataactagacacaaattacatagcaagttcgagtttctgcccacccaagacacagccagtaatcagtcacaaacacagacacagccaactccaggggctccagctttctgcccatcttctctcagcagttcctcccatctgctaagatgcgccttcctggtggctctctctcaaggtgggtcaaggctgaacaagacagaaaagcacagtctaggtccaccatcacctcccactggccaccagttggccagccaggaaatcatttctgtacatcttttgtctcccccttttatctccctctctcttctccaaaacttgttgctatctatcactttcatgtaacaatggacttagtgtccattaaactgcctgagaagtggtttgagcctgacatattttcctgagctaaaaaaggaaaagtacctctgtggccttcttgccattaagatcaagtaaaaaagggactagcactactgaaaagggtcacgctagaaaagccttagaatcctctctccaccccgtgaaggtttctctagctgtagctcttaagggtacaagacggcaaatattctggggtgaaggaggtataatggggaaacacatttattttccccttttaaacttccctgctgccccagtctttgccttcttcttagtggatcccttgggttctggctccttgcgcttagctgaagagagtgagccggtcaccttgaagaaatcatccaggcggccctgggtgctgccttggcggctcttactcagcctcttgaccccactgcggattcgctcctcagagaactgcttttcaccacacatgaacttgatcagctcttcttcatttggctcgctccacttcagctccacagactctgggtccagcacctcaggttccaagaagagctggtgagcctccttgtggagccaattttctggcacagggtacttgttggggtcaagtcgccgcacgatctcctcgatgctcttgtgcttctggatgaggtccacagcccgcttgggcccaataccccggatactctcacagtagtcactgcctagcaggatgcacagatccacaaactgttcctggttcaggcccagctcctgcagaatccggctcaggtggaattcctggattggcagctttttggcttcactggcagtcaggtgtcgcattagcacagggctgccgaaggtgaggcagtccatgtcctcggtagccgcagcatagactttgccagccttcaccagggcagcacagctggcctctgcctcactgggtgcatcaagataagggatgcccatgaggctcagcagatgtttgcactcatcattgtgctgcttagtgaccttcaccagccgcttagtgaatttttccacctcctgctcggccccagcagcctgagcctgctgcagctgcttctctgcctcagcccgccgcttactgcgtttggccagctcgcctgacttgagctgtggcggcttgccatcaaagacatacacgggcttgatgccgttctccatcatgcgaatggtgcggtagaacatgcccatcaggtggctggtggtctcaccctcctcattctgcagcacatccccaccctggcgaacagcaatcaggaactgataaatgctcatagaggcatcaatggccaccttacggccaaagtagctcttgatgtcattctcccggatggcactgggggccacatcagcaattagtttggccaggccttgaattcccatggcaacacagaggagggatgactggcctttgggacacgcggcctcggcggctaaagcttggttcggggttgccccgggcaggcggtcctaagctcgctctcccttctcagcttagcggcgggtggcc

SEQ ID NO: 318729 - DNA, 2351 bp, Homo Sapiens
  misc_feature (123)..(123): n is a, c, g, or t
  misc_feature (125)..(125): n is a, c, g, or t
  misc_feature (190)..(190): n is a, c, g, or t
  misc_feature (233)..(233): n is a, c, g, or t
  misc_feature (250)..(250): n is a, c, g, or t
  misc_feature (278)..(278): n is a, c, g, or t
  misc_feature (280)..(280): n is a, c, g, or t
  misc_feature (347)..(347): n is a, c, g, or t
  misc_feature (355)..(355): n is a, c, g, or t
  misc_feature (365)..(365): n is a, c, g, or t
  misc_feature (381)..(381): n is a, c, g, or t
  misc_feature (387)..(387): n is a, c, g, or t
  misc_feature (870)..(870): n is a, c, g, or t
  misc_feature (882)..(882): n is a, c, g, or t
  misc_feature (2225)..(2225): n is a, c, g, or t
  misc_feature (2317)..(2318): n is a, c, g, or t
  misc_feature (2320)..(2320): n is a, c, g, or t
  misc_feature (2349)..(2349): n is a, c, g, or t
tcccgggatccccgacgggcgggcgcactgcgcggggcccaccggccgcagacctgcgtggccgtccagggcgtcgccatgtcctcggtgtttggaaaaccccgcgcgggcagcgggcctcanancgcgcccctcgaggtcaacctggccatcctggggcgccgcggggctggcaagtctgaggacaccnacagctccgaagagactgtggaccaccagcctgtccacctganggtcatggacactgcanacctggacacccccaggaactgcgagcncnacctgaactgggcccatgccttcctggtggtgtacagcgtcgacagccgccaaaactttgatagcancagcagcnacctggagcngcttgccttgcacgcnaagganacacagcgcacatccctgccctgctgctgggcaacaagctggacatggctcagtacaggcaagtcaccaaggcagagggtgtggctttggcaggcaggtttgggtgcctgtttttcgaggtctctgcctgtctggactttgagcacgtgcagcatgtcttccacgaggcagtgcgagaggcacggcgggagctggagaagagccccctgacccggcccctcttcatctccgaggagagggccctgccccaccaggccccgctcactgcgcggcatgggctggccagctgcaccttcaacacgctctccaccatcaacctgaaggagatgcccactgtggcccaggccaagctggtcaccgtgaagtcatcccgggcccagagcaagcgcaaggcgcctaccctgactctcctgaagggcttcaagatcttctgaggccccttccccagtaagcctaggctcgggtggctggacaggactgcangcaggacagggnactgggcttctcaccaccagcctttccgtctgatggacagcagaccccgcctccagcaccaagcagtgtccctacactcaattcactgtgtgagctggagtggcaggcagggatgctgcttctgttccctccaggccttggtcttcatggtaaccaccgcgtctgtggccgtagagggaaacagccactgtgacaacccagagacctggggtcagccttaagtaggaagaaattgcagtgtctatcctgctgccatcagcccttcctgctccagctacagttgggccagctgtggccttagtggatggtctgggtggatggctctgtcaatgtcaggcccgagaacagcctgcggaatgacagcctggggtccttgtgccacctggtggacgggaaaggcagggcggctgcagtttcagaggccagagcctggccctcctgtcatctgctgacttcacagaaggcccaggctacaaaccccacagtttatccaaggaaaatctagttaaaataatccaatggacagaagccccaggaaggggtatttccaacacttggcgtctcaatgaggataaaagggagggactgtaggttgtccagcataaggagccccagagttctttcaccagcagacagattctccatgtgttttcccactgttaaggactctgtccaaagaacctcagcatcagctccctcaagcttaatgatccaggctgcagaagaaagttgtcactccagtgagttaccccgggctccagggagcccacagcagcatcagacccatccaggggctacaggggctgcccccctgcaggtagaaacacagtatacccgtttgtcatctggtttggcaggacccaggaccctcagcaatgagtctgagtgttcaaagcccactttagaacctaaagcattttgggttaataaagcaaaatttggcttatgttatttggtggtgtcaccgcagcttataccaagacaccatggctcagacatgggatcaggacacacctttgagatcccactgttagcaagaaaaggctgtccaaggcaggcagtgtggtagttgtctgattttgtttaccacacgccaggtcccagggaagtctggcacagactcttagcagacaagcagggaaaagagagggtcctggtgggtggaaggattgggaaggggattctgggcctggaagcctgctccttcccctctcagcagtctcaggactactgttggattgcaaacagcatctctgacccagtcttcggactcattctgtaaatggaggagctgaggtcagaggggggctgtgaacaactcaagaccacatgcttgcagtccnacaggcttcccgacccacaggccagctacggattttgcacttttgctccaggccacttgtgtgtgtatgtgtgttgtaccactgccatctgnncnaactatgcaataccacctgctcccttccngg

SEQ ID NO: 318730 - DNA, 1547 bp, Homo Sapiens
  misc_feature (104)..(115): n is a, c, g, or t
  misc_feature (935)..(944): n is a, c, g, or t
  misc_feature (1105)..(1141): n is a, c, g, or t
ttttgggtttcttctttataaacacaagtacatgaggtttatttgaaattccaatttattacaagttcaccctttaatggggcccttcctctttgaagacaatnnnnnnnnnnnncaacaacaaacaattcaggtgtcactgaagtgggaacacaggattctcactatgaacaagaacagactggatgtaggaggcaggggaagctggcggtggtggggttatgaagctgtgatgtcagtgccaactccatgcctatagaagggacggtaaactacccagcagccctggagcaatcctcgtcgtccttgggcaggaggacggaggaagcagaggccacattccgcagtttaaaattaagaggcttgattctcatgttctaggagctgcagtccccttggtggactttaaataggtacagaagagcttgggtgctcaaaatttccaaattcaaaggtgataaaaaagaaaaaccctgttttgtacttttatcaaaatccatcataaaagggaaagaagactacaaagttttgcctaaatataacaactagagctagatttgttgtgggggaaggggctctcagagcttctctgccgctctctcctcccaccccccaccgacactgaccactggaatcttcaggttcttgaggagttccaaggctgaggtcagaacgggcatgggaggcagcagacacagcactgccctgctccccctccaatgttgctgcttgcctcaatgagcctccaacccaactgctctagaggagagtggatgggctgaaggagaagccagggaagttagagcaaacacattatcatagaaactgtactgtacatgtgctaaagcaagatgtcaggagtatcttacaagatgttctttatacaatatcactgctgaaacaagcaacttttaataactagaaaagtcaatttnnnnnnnnnnttaaacatttaaattcttcctgcttttcttctgctcccctaagagcttgactggtatgtgggtgggctgggctccaacacccctctggccagatccatcaaagtaaaggttatatgcatgattataagcaggactccagtctctaagtgaagtgccttagnnnnnnnnnnnnnnnnnnnnnnnnnnnnnnnnnnnnngggggggtgggaggagctgtcacaaagaaggggagattcaggaatggctccaggacacgtccctttactctgccaagatcaactcaaaagaccacaactgtttcatgatgctggtgaatacacaattctgtatggcactcactgatactgtcacctgagaggaagacgggggaagagacagagtatgggcttaaagaaacaagactgtataataaatacagattaaaaaagaaaaatcgccaccatctcccctgttggcctgattaccccgatcctgctatgtaacacagcaatccctcccctggagaccagaggggcttggcactgtggtggaagccagagcgagcaggcccttaggaaagaaggcaggaacaggaactggcttcaccagaaaagctagaccccc

SEQ ID NO: 318731 - DNA, 1065 bp, Homo Sapiens
  misc_feature (15)..(16): n is a, c, g, or t
  misc_feature (29)..(29): n is a, c, g, or t
  misc_feature (41)..(41): n is a, c, g, or t
  misc_feature (48)..(48): n is a, c, g, or t
  misc_feature (60)..(61): n is a, c, g, or t
  misc_feature (63)..(63): n is a, c, g, or t
  misc_feature (81)..(81): n is a, c, g, or t
  misc_feature (88)..(88): n is a, c, g, or t
  misc_feature (93)..(93): n is a, c, g, or t
  misc_feature (102)..(102): n is a, c, g, or t
  misc_feature (112)..(112): n is a, c, g, or t
  misc_feature (150)..(150): n is a, c, g, or t
  misc_feature (234)..(234): n is a, c, g, or t
  misc_feature (238)..(238): n is a, c, g, or t
  misc_feature (247)..(247): n is a, c, g, or t
  misc_feature (262)..(262): n is a, c, g, or t
  misc_feature (581)..(581): n is a, c, g, or t
ggtgagggaaaatgnnggcccccccagcnaatggggaaggntttcctntggaattggcannantcttgaaccggcatccantcaaganacatntgcgggttnttcccagctnctccatctctaacaggctgtaaggccatggccagctgnaggtcctcatcctcagagaggtcgctgtccaaggggcatgaggcaggggtctgctggacctgagtgcccccagacctggaagtnactnacggctgcngctcgcgacggctcngctccaagcccagtgccaggtcatctgggacaccattgattgtgactgacttcagctgcccatcctcctccacttccacccgctcctgcccgttctccatgattctgcgtgtggtgatgcggcgtccttggacaaaggtggtagatgtagaaacagagcgaaaagcaccagccccaggactgaagtagaaagatgaggaggagaaatcggagtgcccagggaagtaggaagagaaggtaaagaaggggcctgagtgtcgggaaccccggttctgaagctctgagaaggggcccaggtcatcaaagagctctgcaaaagngtctccactcccaaagaattcccggaagacctcctcggggctgcggaaggtgaaggtgaagccaggcccaccactgccagcttctgcccgagatgggccagttcctgtccctgtcagcccttcccggccatagcggtcgtaaatctcccgcttgtgcttgtcagacagcacttcatatgcctcggccacctccttaaatttcttctcagcaaactctttattatctgggtttttgtctgggtgccactggagagccttgcgccgatacgccttcttgatgtcatcagcggacgcacttcgcggcacgtctaggatctcgtagtaggatgccatggcaactggtcagtcgtcaggcgggcctccttggggctcctccgccaggagtcccggcctcctgcggcgccccgcccctgccccccgccgggaaccgtctggcacccgcagcccggctcgcggctgctgcgtaggacgcgcccggcccagc

SEQ ID NO: 318732 - DNA, 996 bp, Homo Sapiens
  misc_feature (42)..(42): n is a, c, g, or t
aaaggaggtggttcttctctcccttcaggatttcccattccnatcagtggatgatctggagttctcggccgctgggaacggggcccatttcctggatgaagtcctgggggttcggtggttaaaactgggccatggaatctctctgggttttccagctgggttgatggcctcaatggttttcatggatcttggcatcaggggagggcgatctccctgctgattggtggtagaggccagaaaattgctccatttgggccttcagtggggtggtccacttccacatcgatgtcgtaacaggctgtcttcttctggtcgttagggtcgacactaaatgacatggttgatgacaatggggtctggatgctgcagcaaccctgccagcttcatgggaatctcggagaaacggagtcggccacaactgaagatctggcggaagtaacggttgcagttgatgtactcccgctcgtgcccatcctgcagctggttgtgcttgatgtaaagccacagggcctgcatgatggcggccctcgtctgcgtgtgcactcccagcagccttgccaatcgggggtccaatttgtactggggaggctgatgatccagcatgagcaggagggtgcacttgacgttgaggtctccaggccgttttacttggaagccatctgtctcctgggtggtgggcatccggtgccactccaccaggtgattgtcaggcccgtacagctccttgtccagctcaatgacgaggctcttaaagaatgaagaaaacttcctcttctgtttgctaggatcatccagcagttttccttccactcggagttcccaggaagccaccttgtcccctgctggggttcccccaggggtccctgcagttcctgcactatcgccttccgccttgctgggactgaacgtattggaaatgtagatccgaagctttcgcttttgtgtcagaggctttttgatggcctcctgcctcgtgccgaattcgccacccaggcc

SEQ ID NO: 318733 - DNA, 1252 bp, Homo Sapiens
acaaggatttcaaggaaggagtgattcaagtcctaatagacaaaaggatttatttggaaatttccaaacctgccagaagtggcactcgccaagccctaggcccaccctcctcaccaagctccaaagggcaacaccagtcctcccagcctccccattcaccttaccctggcctccacatgcacataccccatacctcaggccatgctagagaactggagtgtcccctccccggcccaagccgctggagaggcagccctctggcatcccgggagatgatggcggccagagccgcttgcatagattgaggaaagaaaagaaggaggcacctaacaggctccctgaaaacccccaactttacccctgtacaaaaaaagtggctcccacatagaaaacttgctcccaaaatagtgcaaatacccaaaggaaaggaaaaaaaccagcagcaaggctgggcttgtaggaatggcaaagaactttggtttagaaaggctaggaagagtctgggctgcacctcctcttcctagcccagctccccagagccagctctgaccctcgccccagggggagtctgtaaacatgcaaacccagcagcctttggttcggaaatgtcttacaatgtcaaagcacagcctccagcagtcctacttgggcctgcctgcaggggggcagaggaggcatctgctgaacccaattaaagccaatgcaaaaagtataaggctttggggaccaagcaacaaggaatcctatcactacatttataaaactaaagctggagagtagagggtgacagcagacactcctcaccccagcctacgtgtctgcggccccagcaaggacccagagggtggtctccctccaggctccagggctgggaagaaagatccctgagcagttaggtcaggcgaattcccagcacctgttccagttcctgccttcgctgctgcaccttggcaaagatgtgcctgcctactgcttcctgggcccagggctggtggtagaaagcagctcgtctctcctcctcaggatttccaatcacatcagtgatgatcttgaggtctcggcgctgggaacggagccattcctggatgaagtcctgggggtcggtgctaaaactgagcatgaaatctctctgggtcttcagctggttgatggactcaatggtctcatggatcttgacatcaagggaggcgatctcctgctgatcctcgtgccgaattcgccacccaggcctcgctacttaggacctatgagg

SEQ ID NO: 318734 - DNA, 1079 bp, Homo Sapiens
  misc_feature (7)..(7): n is a, c, g, or t
  misc_feature (381)..(381): n is a, c, g, or t
  misc_feature (973)..(973): n is a, c, g, or t
  misc_feature (993)..(994): n is a, c, g, or t
  misc_feature (1002)..(1002): n is a, c, g, or t
  misc_feature (1012)..(1012): n is a, c, g, or t
  misc_feature (1015)..(1016): n is a, c, g, or t
  misc_feature (1018)..(1018): n is a, c, g, or t
  misc_feature (1021)..(1021): n is a, c, g, or t
  misc_feature (1027)..(1027): n is a, c, g, or t
  misc_feature (1071)..(1072): n is a, c, g, or t
taaaacncattattcagtgtacaattaacaaagaaatcagttttctactctactgtacttaggatgcttcaaaaacatcaggtgaaatgatctatgctttaagagccagaaaactcaggcctcagcaactaaaacagagaattccaaaattgtaattacaaatcagatggtaagcctaatttcatgcccctaatattcagatttgtggacactgcaagaggaaatatcatttgcttccaaatatctggcttgaatattgctgcagttaaaggatctcgctaaggttaaacaacaaacccaaaccacttagagcttcacagtttagctgctttagcaagtgaagaggtagtcggtattcaggatgctgtggggatgcaaatnatttgattttgcggcatggctgtccctttttcactatgcccctcactctgaacaagctcatgctttcactcaatcaaaacctacttatcacagccattctccaggttccgaacctccgtatggcagatcaaagtccataatcatttctatttataaatgtcaaaatagtcattaagattatctgaggacatcacttccataggtaatttaaaggatttcttttcaggtagagcagcacttaaagcacataccttctccagtctttctgggtcaaagaataatgagcagagtccaccctgcgtttggtggtctttggtcttatgatttggggaggcaccatggatgaacagctttaaatgtaaaggtcaatgtaaacagaaattttggagttttatcttgtgcctggtatagcagcagactcccatgatgaatttcaagttaaatactgttacctaaaatgtgctgtacctcagaaaacggaattccatgtgaaaaactgtagcatacaggtatatacgagaaagcttatgttcttgcattgagaagacgttccttttccccactttattacctgaagaggagcatattcttnatcagtggagagactggcanngggcccanctctgtcaantgnnanggnataaangtggcagctatcccaacttcagtccctacttcccacactagttnntgcctct

SEQ ID NO: 318735 - DNA, 976 bp, Homo Sapiens
tattcaagcaaaaaatgtttttccttgtgttttgtacaaaaagggggtgggaggtagttccgtgtgctggtggtgacggcatccacggggctagaagtgggcggtgacgcggtccgtctccagcaagtcgtccaggattatgtctggtgtggtgccgatcttcttggctagctcgctgcgctccatggtgctcaggtacaggtagcggttgagcagctccccatccagcacgttgcgcacggcattctggagggtgcggcggtccacgtgcagcatccggaaggcgcgggggttgaggccggcgtggtgtggcagcatggtggtcagcgcgttctgcagcatcagcagccgccggtaggtcttctcctgcatgggcagcagcagcccgatgccgccgtccagggtggcaaaccacgtgatgtgcttattctcccacacgaccgactttttgctgagcccttcagtggccccccggcacggggtcctccagaacgtgttcacgtgggcacccacgtggaagtctgcccgacgcagcaggcgcatgcccccgaaactctccttggcttcgggcaggtacatgtacaccatgaggttgcggtcgcggtcagacaccagaaaacccagctgggcattgtccaccatgaagtccacgctgtacacctccaggggcttggcatcccgcgacaccaggttcagcgtcttgctttcctcctggtagcgcagcagcgaaatgctcttcatgacgtcggctgccaggatgaagttcttgacgctgatcatctggtgtatgtagagctgcgtgtcgatgaaggccatgcccgtcagctcgctggcccgcaggctccacaggaaaatcttctggccgatggccgacaccaggtggccattgcagtggcacagggcggtcacgggccccttctgctccttctcgtaaaggactttgaacttgttcttggtcaagggctggccaggctcg

SEQ ID NO: 318736 - DNA, 1508 bp, Homo Sapiens
  misc_feature (431)..(439): n is a, c, g, or t
aaatttcaaaggcaatttaaaactggggggaaatacatttttaaaattttggggttgaagttcactacactatgagactaatttcgtatgtggcaagttgcaactctccaaaggtgtgaataaacatcagaaagcccaaagtgaagagccagtacatcaacatgcatgatcaggaatcctatgaaagtcacaaggcattgggatttggtgatttacattaacctcctcctggtagaagatagtgtttcatgatgaatgcagactgtgctcactgctcatgagacacacacatcactactgctgaggtcccactttgtgataatttagaaatcatccaaatttaactccagaaaatataaatctggaatatgaatgtgaagacagacagtacaaacagcagttgagtgaaacctgcctgtaacgatctttannnnnnnnncctttaaggctacagaaaatctgttcataaacaaggcaattaattctcataataaaaataaccccttacaaatagccaaggtgtccagtcagattccatagtgagtttattttgtatcacattttattccacttgtgtacttttttgtgagtctgctgggttaggatcaattctttctggaaatattagcttctcacaaactgcttcctttattggtaaatactgggatatttcattaggttccgtgaagagggaaggtggaacatgcatcaaactagaaattttgctttctcgtgacgtatattctcgtaacatgtaggtcttgtcagcctcatggtaaagtctcgtgtcattcattctgataagcaccccatcaattctcaagaaaaaccgcaacagcaggaaaaagctagaaggcattactctaatcttcacactcaggcttgaaactccatgatcatgaagttcatcctcaaaaaggagaacttcttcaaaaaacttaatctgttctctggctttcaatttttctgtatctatatgatctgttgtaggtacaacctttaacttaagagattctccaagtaaggttcccttataatctgttgtataggtccaatcatatggtttaataacctctttggagtgttcaccctccgtcctgctttcttgccactcttcagcacaggccactttaagcattccttggtagttgtttacacatcttaacgcatctgtagcattgaactcaattccaaagccagacccatgctggattcttaaaacgttgtctccaaacatcatttcagggagagatggcatatgtaattcatcggctaatttctccacatccgccgacttcatgatgtgggtcttggacgccgtcagcttccagggcccgaagcagaaatcccggtggctgctctggaagccgtggatcatcatggctgaggcaggacccgcagaggccacaaggaataagctgaagcagcggcggcggcgaacaccggttcctccgcctccctccggcccagcctcctaggcttccgagccgttaccatgcccgatcccg

SEQ ID NO: 318737 - DNA, 1506 bp, Homo Sapiens
  misc_feature (191)..(192): n is a, c, g, or t
  misc_feature (252)..(253): n is a, c, g, or t
  misc_feature (933)..(933): n is a, c, g, or t
  misc_feature (976)..(976): n is a, c, g, or t
  misc_feature (979)..(979): n is a, c, g, or t
  misc_feature (981)..(981): n is a, c, g, or t
  misc_feature (989)..(990): n is a, c, g, or t
  misc_feature (1039)..(1039): n is a, c, g, or t
  misc_feature (1055)..(1056): n is a, c, g, or t
  misc_feature (1145)..(1145): n is a, c, g, or t
  misc_feature (1165)..(1165): n is a, c, g, or t
  misc_feature (1229)..(1229): n is a, c, g, or t
  misc_feature (1242)..(1242): n is a, c, g, or t
  misc_feature (1286)..(1286): n is a, c, g, or t
  misc_feature (1289)..(1289): n is a, c, g, or t
  misc_feature (1291)..(1291): n is a, c, g, or t
  misc_feature (1294)..(1294): n is a, c, g, or t
  misc_feature (1378)..(1378): n is a, c, g, or t
  misc_feature (1409)..(1409): n is a, c, g, or t
  misc_feature (1413)..(1413): n is a, c, g, or t
  misc_feature (1473)..(1473): n is a, c, g, or t
taaagtcagtagcatttaacctttgaaatttctctgactcatgcctccagtttgaatatgggggacttagtttgaaactgaaagttaagtataatctttaggctttgattgccacatctcaagaccctacttatgatcatgactataatttttacccgatttatatgaagtaacatatagtgaaaatgaannccagtggacttcagatgagatcaaaggatctaatctctaaggacttttttaaagtgcctnntgccttttatccagatggggctttgatcgtgtaatgctataaatgcagaacatcatgatcctatagattctgtattttaatttggtaaatctatcccttagtctttcagaaatgataattattcagaacgtataactcaagtgttcaggtcaaggctatacatatttatatgctgtttaatatttaaaagttgactgcctgtccccaggcactgatcttagtttctgcacatgaacaggctgccattgtcaaattcagttcattataaacttcctgtgtataagactgtcctccctgtcattgggatgactgttaagtgcacagcctcactgagaggcttcccgcctgtggcacaggaatcacttagtgctgtcacaggttgggtgctttattgtccaaaagtcatggacccactgggattggggaagagagagaagggttaattatcagccactcttaagcagctacagatctcattctgcttggcctcatacaactttccttgtcattctcatttagagctggttgaggaggagctgagatttatcagggagcattaaggagatgttaagagaattattattgtaagtggaagtaataggtttactcccatgaaagcagacacctcactctgtttttcagaagtgtccttatcatgagtgtcttactttggacgtaantgactttcaagtgaatgctgcccctagggctcagaagttccantcncncctgtttnnctcatttggagatgaagaccataagtccagatgagtgcaaaagaaggcncaggttatggccaatnncattttttaattctaaaagcattagcacttttacctggaaggagggagacaaaaacattttgatgagaagaataattatcattaacctncatatttttggggaaaaaangagttttcttgccatcaatatcttttcatacttgcccagagctcatctcctccttctgctgcancctgggtggtcancatgactttttgtctggatggctggtaggtggcacaccctgaanttntncangaaccatagtaaaagcatttcaggggaagatagtctaatgacactggagtctatctgtgtatcctcaaagggagaactgggcanctggcagataattccatcatcaaatctgtantgancctactgcaaaataagaattttctttagaaggctggtctgtggacatcattaaacagganaaatttccacatggagaaatttcctgaaagaaa

SEQ ID NO: 318738 - DNA, 1771 bp, Homo Sapiens
tttttccgtctagaatccgctttattatggcacctggtgggtctggtgggatctgagggaggaagaggctgcagtcttgctgggcagcccctcggtcagtgcagcagcccctcaggccatgctgctgctcagctgcatggcaaagtcctgcacatgctccttcagagtctggcgggcatctgcctgtgcccgcttctcccgtgcccgctcctgctgcagcttggtcagtctcaaccgcagccgctgctcccgccgcttgcaggcctgcagctggcgctgggccttgtcaagggcatcaagggctgcctcggctcgccgcttccagagtaaggcgctgcccacctggtagctgtgttcattctggatgtaggctccggcgggtgggggcaggcgcacatatacgctgagggggagactggccgtggttcgagaggggagggctgccgctctggtgaaggctgggcgctgcagcctgcttcatctgcctgggcacccaaggggcccagtaggtctgaaaaggggctgctaaggccaggctccagcctcccagctggggaggccggcaaagtggcaggtgctgaggcctcttccacaggaaagcaggtgacatcagcaggtggaggtggagaaaatggagttgtgggccctcggccctcggagcagcgcttcctgcatcgtctgagccggctgacttcagggggccaggtgggtaactgtgtcctttggtcttggttgtccggcgcaacttggagaaagactcaaatatggtggggactgccccctcctttagcctgtgatatccactgcggggaaaagcaacccagatgagctggagagcaagtgctgcctccccaggccaatctgcccccagcagcagcgccgtgggatgctggaaggcatcgtgcaaacaatacgtctggggaacgccaagttacagctacaccaatcgcttccccgcaggactcctcacagtccaggtgtgtggaaagcctgcataagccgagctgggctgaccagccagaaagaattctttgatttgtggacttgctggcaagactggggctctgaaagatactctctggaaaggctcctgttttccccttgtgtcacaggcacagtgatcctgggggtgggtttcactgtgcagagctgggaacaggaaacagcccccttggacgcaggctgctcaagggacttccatgacctgcagctgtcccagtccgccgggagccccacatcctaccccagcgtcggccggcagggaggcccacctgattcccaccagctcaaagcagttctcctcaaagtgtttggagcagaagtagatgtactcggatagccgggtcccacaggccctggccgctggggtccagccgctggcagttggccagccacaagcctcgcctcgggttgtccttcttgggatgtctgtggagccacaaatccgtgagcaccatgctgtccacagtcctgggctcatgctgcccaagcaccccatatgggaatcgcagacccaacacgcgccgccacgagacctccctgcgaccccgccgggtaagcaccaccgcccgggcacagacgaggcaacggaggcctcgagaagaaaagcagtttcctcagcgtcatctggcaggtaacagagtggggcgggtccaagccggctagacttcccgtcctccccttcccgactgcattcagtcccgccgggaccgttccgcttcacctcccacccacaggttcaagcctcctcagtatctgagaaaggcgcgaa

SEQ ID NO: 318739 - DNA, 526 bp, Homo Sapiens
gttgctcgcctcgggtcgcaactgcgtagaggcttcgcgcctttctcagatactgaggaggcttgaacctgtgggtgggaggtgaagcggaacggtcccggcgggactgaatgcagtcgggaaggggaggacgggaattctagccggcttggacccgccccactctgttacctgccatatgacgctgatgaaactgcttttcttctcgaggcctccgttgcctcgtctgtgcccgggcggtgacttcccaagaaggacaacccgaggcgaggcttgtggctggccaactgccagcggctggaccccagcggccagggcctgtgggacccggcatccgagtacatctacttctgctccaaacactttgaggaggactgctttgagctggtgggaatcagtggatatcacaggctaaaggagggggcagtccccaccatatttgagtctttctccaagttgcgccggacaaccaagaccaaaggacacagttacccacctggccccgctgaagtcagccggctcagac

SEQ ID NO: 318740 - DNA, 1656 bp, Homo Sapiens
  misc_feature (1639)..(1639): n is a, c, g, or t
acggtggccgcggggcggcggtggcgattggacttggtgggtcccgggccaggggcgggcgccgccatgggtaacctgttcggccgcaagatgcagagccgcgtcacggagcaggacaaggccatcctgcaactgaagcagcagcgggacaagctgaggcagtaccagaagaggatcgcccagcagctggagcgcgagcgcgccctggcccggcagctgctgcgggacggcaggaaggaacgggccaagctgctgctcaagaagaagcgataccaggagcagctcctggacaggacggagaaccagatcagcagcctggaggccatggttcagagtattgagttcacccagatcgaaatgaaagtgatggaggggctgcagtttggaaatgagtgtctgaacaagatgcaccaggtgatgtccattgaagaggtggagaggatcctggacgagacgcaggaggccgtggagtaccagcggcaaatagacgagctcctggcaggaagcttcactcaggaggatgaagacgccatcctggaggagctgagcgcaatcactcaggaacaaatagagctgccagaggttccctccgagccccttcctgagaagatcccagaaaacgtccctgtcaaggccaggcccaggcaggcggagctggtggcagcttcgtaacgtggcctcgtcttgtgggactcacggggatgccccagggactgtggcccacagagagtttgggtcacggccagcccctgaccgggttccctggagcccagtgcgcacggtgctgagcagagctgcagccacgcaggcgcattgcaggaggactccagagcgtctcctggagaccttgagcctgaacgcactcaggcgccactggcctgctctcagtccggattaactctcgaccgagcccagcttctggccggttgtgggctcccccggtgggcccgaggcccaggccccacgccctctggtgctgttcccctggagtcccagccccgcgtggctcgcgctcgtctgtgaggaagacacctccagaccttggggtccccgcgcttcctcttgctcctcgctgctcccattagctggtgcaggcttccgttaaggggtccctgccttggcctggcttcccggcgcacctcagcttccctgcttggtggggggatccccaggagcccagcatgttctgaacctctctgtgcctctgcctccgcaccctagacacccacctccagtttgaaaggtggcgggccaggggcctttcttgctgaattgacgactccgagagccctgactcccgccttgccactcagggctctgtccactagggctccgccctgctgagaaaggacctccgatgcttgggacacgctgctccggcaggtgcagccccggaagtttgtccatgggggtccccgcggctggggctcatggaactgcgagacccgggaccctcctgccctgcgggtccccgagccaccagcagccaggaccggaggctgtggggcatggcgtgacttctcgtgcacagggctggtttggttatgagacgatctcgctgggaccgcccctgcccgtgaaagccacaaggacaaagggagcggccacctcgacccccagacagggcggccccgtatanaaggggtcccgcacgcc

SEQ ID NO: 318741 - DNA, 1977 bp, Homo Sapiens
  misc_feature (26)..(26): n is a, c, g, or t
  misc_feature (418)..(427): n is a, c, g, or t
tcctataaaactggaggacaaatggnatgaacaattccccctctagaggcaagctgttgcggtggaagatgttaagcgtttaaataaactaagacgccgactctaaaaagtggagaagtatagaggttcaagatcaataccagtgcaagagctttttaagtgagttgactaggcaatgcatgcatccatccatgcaaatgtaggacatggcccccaaagagaactgaaaacatgtataacagctgggtaagttccttgccagtagtttataaaaatatatagtcaatattgtagaggctccttctacagtcaatactatggaagtccattttagttacccattacttcaataccaaaaagcattaactacttttcagacattccagacaaaggtcacttataacaaaaagatgacttnnnnnnnnnngaaccaagatagtgtccatttaaaaagtaggtcttttctttcaagtgaacaggacattttctgtattaaacttaacttctagtctgtcaagactgggtttaagatccttacgtatgtatgtgcatatatgcagaaacaaattaacttactttcaacattatctgcacagaaaaaagttaactcctcaaaacatgatagaacaggtctggttagtacaaatctattgcaaagtaaaaagattctgtgcatcagttcaatcaggagaagcaggaaaagaatgtcccaaccataagagttcaagtttaagttgtgttctgaaagcctagaagcttaagggacaccatgttgctcacagtatcctgatatgcataactgcttaagctactaagctgtgtcttcctctggaactagaaccacattccaatttactttctattccgaagacgtttagatttcctaagagagtctatggcttccgtggccttttttcgtttccgaggagactcctcattctgcccggaccctgaggaatttcctacagcactttccattacttctcgtagtttgcgttctagctctgccaaccgtgcattttgttcacctatgatctgggtctgctctagcagtttctggtcctggtcttgaagctgtttttgctgttcttgcactttggtgcgaagctcagaaatttcacgcctgagaacagtcacgccagcaccatttgttttaacctgctgctggagtttggtaacctcttgtcttgaaggattttgcttggagaagagctgcattgttgttagggctgcagacggtcctggaactggaggagagcccatgagtcttccagaaacatctgatcctggtaatttcctctttaaaattggaacaatcttttcatcaaagtactccattgccatagaggatatatcccttaattcttgaagtacttcatgagctcgttgaggggctctggtagaattgacatatctcaacacacgataaatctcatcaatcacctttcctgggatgaagcaacagagattggaatccacatatttcatgaaagtcatatttaatagtgacagccttgtttcaacagcagcaagaatgtctgcatgacgagctaatgaatggtttctcctttctgactctctccttgggagttgtgctttaacttgtttctgacatagattatggtacctctccactttcagaaatccctgattcaacattctctggcagaccaagtccattcttttacaaaccaggcggagctggctaatttcgtcgtaggacataaagctgaggatgttctcgatggctacgatgggcagcgccacaagcgtgttgttttgaggcagctggtccggagccagcgcgggggctgggagcgcctgggaccccggctgcgggtgctgtggcgcgggcggtggaggctgtcgctgggtagagccggaggccaaagaggaaccgccgtcgccttggccgccgcctccttcctctgccatccgctcctccgccgctgccgccatcttgggggcttgatatcc

SEQ ID NO: 318742 - DNA, 735 bp, Homo Sapiens
ctgagtatggaactccttaaaaaaccttcctctaaagaatattagggtttccgacctatttccataattagaattttaaatataaagatcatacaaatgatacatatttataactgtacagaaagcaaacaaattcattagtagaaactcagagaagtagaaacaattctaacatttctaaaatcaaaaattcataactgtataataagtttatgtagggcagtccagctgttctaggcaagcaattctattttacctttcctgggatgaagcaacagagattggaatccacatatttcatgaaagtcatatttaatagtgacagccttgtttcaacagcagcaagaatgtctgcatgaacgagctaatgaaatggtttctcctttctgacttctctccttgggagttgtgctttaacttgtttctgacatagattatggtacctctccactttcagaaatccctgattcaacattctctggcagaccaagtccattcttttacaaaccaggcggagctggctaatttcgtcgtaggacataaagctgaggatgttctcgatggctacgatgggcagcgccacaagcgtgttgttttgaggcagctggtccggagccagcgcgggggctgggagcgcctgggaccccggctgcgggtgctgtggcgcgggcggtggaggctgtcgctgggtagagccggaggccaaagaggaaccgccgtcgcctttgccgccgc

SEQ ID NO: 318743 - DNA, 1795 bp, Homo Sapiens
  misc_feature (619)..(653): n is a, c, g, or t
  misc_feature (670)..(785): n is a, c, g, or t
  misc_feature (1286)..(1286): n is a, c, g, or t
  misc_feature (1352)..(1352): n is a, c, g, or t
  misc_feature (1376)..(1376): n is a, c, g, or t
  misc_feature (1384)..(1384): n is a, c, g, or t
  misc_feature (1386)..(1386): n is a, c, g, or t
  misc_feature (1452)..(1452): n is a, c, g, or t
  misc_feature (1456)..(1456): n is a, c, g, or t
  misc_feature (1549)..(1549): n is a, c, g, or t
  misc_feature (1553)..(1553): n is a, c, g, or t
  misc_feature (1615)..(1615): n is a, c, g, or t
  misc_feature (1684)..(1684): n is a, c, g, or t
cttttctgagagcatggttaagaacatcttaaccatatagctgttgaaaaaatctgtttattaaataacaagttcacttctgtttatgttttgagtttagaaaatttgacttgaaaatttagattattaataaatttatttttaaatattaaagtcaaatttcaaatcacccagtgttgaagaatttgcagatgtatacaatactttttctaattatgtcttttctatctccatgcctggctttttctaattatatcctagagaaaaagactaatggtatttcaaagctgtgtatttgtgacgagataaagtagagtcttaaacatcttgtttgggagaatgcacaggccagtcaggagacccacctcctcctgtgccctgagctgctgagacccgacagatcatgaaggctagtaaagggcagagaaggccctgagccatcagtttacactcgaattgttgactcccctttgtggtgtttttgaaggctgcttataccaacagctaatgtggattagtgcttatgatctttgaaaaagtcttggaccaagaatccttaaactccaccactcctcccattccagcttaacactatcagaataatatccaaattccagannnnnnnnnnnnnnnnnnnnnnnnnnnnnnnnnnnaagagagacagtttctnnnnnnnnnnnnnnnnnnnnnnnnnnnnnnnnnnnnnnnnnnnnnnnnnnnnnnnnnnnnnnnnnnnnnnnnnnnnnnnnnnnnnnnnnnnnnnnnnnnnnnnnnnnnnnnnnnnnatgagccactgtgcccagcctagtttcttttctgtatgctttttttacaaaactgtgagccacagaggttgaccacttagccaatttgttgctagaagggagaaaaaaatctccaactagcctccagacaaaacatactcaaattcaaacagcagttagttttaattaacatacagaagtatttttagactttcagatttttatgctgactagaacactttgcaggctgatgttgacattattaccaaatacttcatttaagtacatactctgaagtgtcaggcttccagtatatatagcaacgctctgagagacaaactgggctcatatgacggggttgcattttattttcttcacaggtctttaaattgggcagttctgaaattctgtttggtcagttctagatggtacgtcatgtgaatgcaaccaagcactgtagttgaaattgtgttatgccactactcatatgttgtcttaggtactacgcataatgttaatagntgagatgttaaagaatttgaagtctaaaatataaaagatgaatatacccatattaatcctatgttnagatgctctggaaataaaggcctnattccctnanacatgcgatttttgtaagataatatatacacagtatattttaaatgtttgtgtgggtggtctgtgnagtnactccccatacaacaaagctgacaaaatttttaatttacacaatgtattctgcattttcaaatgtttatgttgtgtatatagcaaagaaattntctnactgatatgcgttgaccaaatcccatggagaaaagacatctcatttgaggttccccttcctntcatgtgtttgattttttggaaggtgatacagtatgtgggtaaccatgcaaatgtttatgaataacttnactgaagtgattccatccgtattctgttctaatacttggagaatgaccttcatatttatatattttatttctttgtttcaaatatccagtgataattcaggaaatgtttcc

SEQ ID NO: 318744 - DNA, 1259 bp, Homo Sapiens
  misc_feature (582)..(616): n is a, c, g, or t
tgaggtataaaaaggaatatttatcttttaaaaatacaactttgaacactactggcatctcatttacaaagtatttttgtgaaatactctccattggctttgcttgctcagtacattcttttatcttcaattgagactcaagggagggtatgcttgcattattataaataccacaaccaccaccacacacaataaagaccatctctgcctcaggacattcgccccaaacctccatcctctctgtttactttccaccaagcagaagtttctgaatggtccactcacatgctgccattgcgatttgccgatgggcactaccaaggtgtctctggcaattcgcactccaggtggagctgacctatttgtagaaagcctcacaaaccctagctcattatttattcattgattcattactattaatacttatatcaagtctttgcaaacattcagcatgaagtaaacatagtatttacagcagtactcggtttgcaattcaacacactgacaacagaagcaaagggaccaacagactgtaagaaggccagaggggaaagaatattaatataaatcccttctgccacnnnnnnnnnnnnnnnnnnnnnnnnnnnnnnnnnnncccacacatgagcatattttaattcacagaaaactgaacatgccctcctttaaaagcagactatttacaagtgattctgaatagcatgaacacatgccagtcatactggatacttgctttctgtaaacacatctagatgtactttttacaattctgaaacagatctttaatgtgatatgttagagaaaataactttggaacatttgtcaacttttggttcatagtaattttgcaaaaagccacaaaccatgctttgtcgtttaaaaggtgaacctggtcaggcaccttctagaagacactgatgtgttatttatttactggtctactggggattggaaagacaatggcagttacacagaggacttagtgctgctctcatgcctttcaccagtaacaacattaatgtaaagagaagtttagaaacacaaatcacatacaaatcatcaaaacatttcagttaacagtgtttaaaaaaataccaaggtctacaacagtagtacagacactgaaaacactccaaatactgtttagcatcaggacttttgcaatatttaaagacaaccaattgacagaaaggggaggaagttacagcacttgtggtttgaggcaatttctctttagggcctgtagttcgaggtgctgt

SEQ ID NO: 318745 - DNA, 1272 bp, Homo Sapiens
  misc_feature (1114)..(1114): n is a, c, g, or t
  misc_feature (1123)..(1123): n is a, c, g, or t
  misc_feature (1125)..(1125): n is a, c, g, or t
  misc_feature (1166)..(1166): n is a, c, g, or t
  misc_feature (1259)..(1259): n is a, c, g, or t
ttataaaacataaataatcatttatactccatgattagcaatggatcctgtctgaagtaaacaaggacaattaatacagtacaagatatttgtggttttgttttttataacccactaagccaagatttgtatctctgtatggaactgattttcaaatggacagaaatggtctttgatctttctgaaccacttgtcttcaaattcttctgaggatacagtcaccaaggcagtcagggctacggagccaacacacttcacctctgggtgaacttcatcttttattttttctgggatatcttctcccataacctcagctatcaacagcaaagtgtcttctttgaagctgaaccctttcattttatcttcaatttcctgctgagtccttaagttcctctccaaagcaaacgatgtttgctgaggttgggtaaactgaagcagaagcctggttcgtataaaagaggcacatgctttcagctgagtctctatcaacactgtttctctcttttctgccatacagttttggatatttgtcagagctttctcatttttctggctattactgctattcgcttccacagaaaataaagagctcctcaggcaaggtttcaggaaaacacaaaagacagtgttttcctgagtgtggaaagaaggatttgatagttttgtcacttgaggtgaaactgtgctgtttctgagatgacgcaagtgctgctgaaagagctggccccagattcaggtaagcctctgccaatttgccccagttccaaggattaaaaggatgcaaagaaatcagtttctgcaggcagaaaattgttttctccaagttctgcaaacttgaacaaatagcaagctggaggtagagtaccgtggttaaatggtctgtgttggttgctttattttccaagtttgcagcaatctccagcgcctccatatgcctacccaggtgagccagacaccgagcctgaccttcctggacatcccttttcatggcaaaattggttgatgacaatttttcagagatactggaatactcctgcagtgctttctgatactcttgtcgtctgtaggccagttctcctttgaatttcttgagagtcagcacttcaacatcatnactgctttntntttcttcataaaaccactgcggctcgcagagcttggcgcantaggacgcgggcggtcctgaccgccgctccggcctctcctcgaacaccgagtcctcgaactcgccgccgaacaaccagcacccggaatccttntcgcgcccgcggc

SEQ ID NO: 318746 - DNA, 1661 bp, Homo Sapiens
  misc_feature (148)..(261): n is a, c, g, or t
ggggggaaattccaaccccctttttcttggccccggttttcttggggaacccactattggcccctgttccctttcccctcgggggccgccgcccccaaacgaaaggttttgaaaacttttttgaggggcgggggggcccccccagggnnnnnnnnnnnnnnnnnnnnnnnnnnnnnnnnnnnnnnnnnnnnnnnnnnnnnnnnnnnnnnnnnnnnnnnnnnnnnnnnnnnnnnnnnnnnnnnnnnnnnnnnnnnnnnnnnntaaaagcttcaagatgcttttatgtcaagggtgtggggttgccctgcttggcctgcagtgctttggggccccatgtggtggaggggtgggcacccatggtacccacccaccctgctgcctgggcagaagtgcaacatggcacacgatgcctgggggatcactccccccagggactcatggtcagtgtccactcacaaggcctgcttccctcatgacatctggccagtgacacccacaggggaggttgggggcagacacccttctcttccggtacccttgaacatggtgtcagggtgtggctagctcgacggacaccgaacagctccacagggagggtagttccccaaggctttttgcctcccctaccatgtcccggcacttcctgaaatgcagctcaaaaccagggagcagctccccccaggattctggcttgcttcaccccctggagcaccaggccagggcgggtgtctgtccttgagagccaggcccaggtctcacggtggcgtatggacagctcctccccataggcctggtcacaatagggaagcgggggtggctcctcccctagcctgcaggaagcccttggtagcccacttatccaccttctcctgggtgtgtggctcagcagccaagtccttgtgcactgggttgggtcccagcatgagcctggtggcctggcgggccctggcaccatggagagcagcctgctgccagtgatggcctggatctccaagacggcctccagcactgtcatgcccttgaccagctagtgctggtacaggacctgggtaacaggcatgtccttgggcgtcactggctcaggggcagaggacgaggttgaggaggaagctggatacccctgtccatggtgggctggggctggaagggtggctcagtggcctcgaagtgccgggaggactcccagctggcaccaggccatcagcagccgggtgggcagtgccgtgctgctgttgccctcagggccttgcagtggtagctgaagatggcaccttatcaggttggatcaggtcacccggcagcagcagctctcgagagctgaggcacaaggcaggggcccggctgtacacctgcaggacccaggagagcctgttgcagttcttgcccgaagcgccgagatagccagctcagtgtccctgcagcaggagcagaaccagctctggcccaggtgggtgggtggcagcgctttcctagccatggctgcagccacgcctaggcaggaaacagcagagtgtctggagggatgcaacaccaggagtaacaggcagcctcctctgttcttaatgagtgatggtcaggcccttcagcacctggataggcatggtgggtggtcctaagcttgaagctgcaccccagcatcctcgtgccgaattcgccaccca

SEQ ID NO: 318747 - DNA, 1508 bp, Homo Sapiens
  misc_feature (11)..(11): n is a, c, g, or t
  misc_feature (14)..(14): n is a, c, g, or t
  misc_feature (26)..(26): n is a, c, g, or t
  misc_feature (46)..(46): n is a, c, g, or t
  misc_feature (63)..(63): n is a, c, g, or t
  misc_feature (65)..(65): n is a, c, g, or t
  misc_feature (78)..(78): n is a, c, g, or t
  misc_feature (82)..(82): n is a, c, g, or t
  misc_feature (85)..(85): n is a, c, g, or t
  misc_feature (89)..(90): n is a, c, g, or t
  misc_feature (100)..(100): n is a, c, g, or t
  misc_feature (107)..(107): n is a, c, g, or t
  misc_feature (122)..(122): n is a, c, g, or t
  misc_feature (128)..(128): n is a, c, g, or t
  misc_feature (133)..(133): n is a, c, g, or t
  misc_feature (185)..(185): n is a, c, g, or t
  misc_feature (205)..(205): n is a, c, g, or t
  misc_feature (249)..(249): n is a, c, g, or t
  misc_feature (259)..(259): n is a, c, g, or t
  misc_feature (262)..(262): n is a, c, g, or t
  misc_feature (285)..(285): n is a, c, g, or t
  misc_feature (394)..(394): n is a, c, g, or t
gggacattttnttngggagtaatttncctttccaatttttaaaagnaaaactccttgagggangnttggcaagccaanaganacntganngggctgagtnaacccantaaccactaatgggntggctntgctnatttgacgggccacaccagggagagggtggcaccctcggtgccaggagagcntctctccccacttccttagnaccaaggccagcaggggcggggggtgatgggcagaacctagggnccccagcagnccnagggaggaggggcagccgagggnccttgaggtggcctgtccaaagttcccagggccagcaggagcatcccccacccagctgtccagtcactgccaaggctgcagttccaggtaccggggtgcaccttaggancctgtgggcttcttcagaaggcagggtgacagtgggcgctgcaccctaggcagcagtgggaggttgctggcagcggcaggctgtcccaggccctggggctccacctgctaagagagctgggggaggtccctctgctcagtgcccaggtggcagggtcccacttgcccctcccctcaagccaggaccagcatctccaggggaagctgctcccaggtcacagcaggtcacaggcagccctgtctgtggtgtgagatctgcagacccacccagcagaggagtagggctgggtagtgtccacacagctgctgcaggctctgcctcaagtccagcagcccagaccctcacaccagcagccagtggctcctggcttaagccagtctggagaaaggagcagaggactccaggtgtagggacacgtgcaaaggcccctctgcaggctgtgcctcagcgtggacagtccaggcctcacttggacccacacagagccagaagaggggacagggagggaggggcgcccagcccttcgcagctccccctccagggtctccgcgagcttctcctcatccgcctgctgcctctgctgctggatcctggcataggagatcgcatcgccctttttgcccagagcagagagtccgtacagcacccccgtagcaaaggcgatggcgttgcccagcagcgtggtcagggtcaggctgatgacgatgggaacgaccgccatcccgcagtagaagacagccttctgccaggagcgcagccggtccaccttctccgccactgtgtttgcaaactcgatgaactggcagcagaagggcgcctcacacagcaacaagatgaaggcattcatgatcatccacacgccggccgcgatgttcagagggtggatggtgatgcagttgaagaggccagagatcgcgcaagagactgcccccagcaccccagacaggcgacacagccagcggtaccaccacgtcatgccctcttcctgcgcgggcggcgcagagctggcggacgccccgggcgccccacctgagctgctcatggtgccaccgtcaggcgcagcgtcacagccctcacaaagggctcgatccttggagttccggaccggtaccag

SEQ ID NO: 318748 - DNA, 1023 bp, Homo Sapiens
  misc_feature (678)..(678): n is a, c, g, or t
  misc_feature (863)..(863): n is a, c, g, or t
  misc_feature (871)..(871): n is a, c, g, or t
  misc_feature (924)..(924): n is a, c, g, or t
  misc_feature (947)..(948): n is a, c, g, or t
  misc_feature (950)..(953): n is a, c, g, or t
  misc_feature (958)..(958): n is a, c, g, or t
  misc_feature (962)..(962): n is a, c, g, or t
  misc_feature (971)..(971): n is a, c, g, or t
  misc_feature (977)..(977): n is a, c, g, or t
  misc_feature (980)..(981): n is a, c, g, or t
  misc_feature (983)..(983): n is a, c, g, or t
  misc_feature (986)..(986): n is a, c, g, or t
  misc_feature (996)..(996): n is a, c, g, or t
  misc_feature (998)..(998): n is a, c, g, or t
  misc_feature (1001)..(1001): n is a, c, g, or t
  misc_feature (1008)..(1008): n is a, c, g, or t
  misc_feature (1010)..(1010): n is a, c, g, or t
cactaagccgcagatatttatttgtgtgtggctagaatgggatgttttgaatcttctgttacaaccttgggaacgtggctgttatttcaatttatgagccagaaattttcacatcccgagactgcccagagttccaccagcctgggtatagtatttgttataatctagtcgtaacagtagttgagccaaatctgagttgatctgatgattccgaacactggagagaatcttgaacaggagtgaagactggcggctaaagcccttcacgagactgctcagctgggcggctccacgctcatccagtgggcctaggttctgactgaccagcgaacaaaaactgtgacagagatctaggatttcattcaggcagtgaaacacaggtttcaataggataaaggattgagccagcaaattgctcaggaagtggtcatgagccaatcggatgctttcaaagtctcgggtagaattgatctgatgaagcagctgggagaactgagactccaacacatctacctggagatagtactgaagattatccaccaaaaatgccatgtgatttcttaggcgccacttgattgcatcagtctggttcgacttgaggtgcttgcgctgcatttgtagggcccagcagtgctgcagctcagcttgcacccggcgcacactcagtaagtacttaanaacaacattgtacttttccaggacagctggggtgaagagaatatgtagtggccactgtactttgtaggaaagacctagggctgcccagccagatgcaggggcttcccgggggagaagtttcccgagaaggcccttctcttgcctgagtagcatctttgtgctcctttccgtgatactcgattgtnaagtgcanagaggggagaaggttgtcatcatctagcaataccttgtgtgctgactgttganaggccacattcacatcatgctcnntnnnngcagngggnggggtttcnacatgngtnnancgngtcaagaagncnganacagtcncncgtccagaagtaa

SEQ ID NO: 318749 - DNA, 746 bp, Homo Sapiens
  misc_feature (116)..(130): n is a, c, g, or t
ttcatcattaaatatttattgagtgcttactgtatgcaaggcactggggatacaaagaggtataattcatggctctgcccttaaggagctcacaatctagttggaaaaacaagacnnnnnnnnnnnnnnncatacaaaaatcagtaacaacacagaggcctgaacaattgccaagtggacaacagtacagataataaagaagcaagaaacgagggttcactaaaggctatagtggggaagggagtgcttcactgagagagtgggacttgaactggtattaaaaacaagagcatcccgggcaaagggaacaacactcacagctcagaggcaggaagacactctgcgggtctaagaaatgaagagttaaatgtggctagattggaggtttggtgcagggctaagagagtaatactcgcttagccaggaaaggatgcatttgttttacgcatttggtgcgtctgaggggctggcaggccttgcacgtggcagtgtctatcctgtcagatttgggaggtcagctattaattagatcagctattaatcagactgttctcctaacactttaacttcatggatgtaccttccttcctttcctaatgccaactctgtttcccgggtaggtgtttcactgcctgaatgaaatcctagatctctgtcacagtttttgttcgctggtcagtcagaacctaggcccactggatgagcgtgggagccgcccagctggagcattctcgtggaagggcttt

SEQ ID NO: 318750 - DNA, 1728 bp, Homo Sapiens
  misc_feature (110)..(110): n is a, c, g, or t
  misc_feature (209)..(209): n is a, c, g, or t
tccacacggggtgggcaaaaaccattaggtggggaaatttcattctccagacccttgctgggcccccagggggcttgttctttaacccggagggccagtggtggtagtgnccagtgtgggtctgtactgggagggctggctgccacacggtcacatcggagccattgccaaaggcttgaattgcatttttaagacatgtattgtcctgnaagaaattcaaaaatttcaagcactcttctaggtcgttcccactgttgctgcagtcacaccatggggccacactgaggctactggagtctatgtagttgggggtcatgactgtgccaataagccccgagtaggcgaggaggcagtcagcgtagttttcctttagacagctgctgacagaccttgactctggctggcagttggtaaaaaaatccgcaaggcgagatctgcagatgtaattcgtcttgcaggagtcctgcaaattcaaacagttgggcttctccctctcttcataggagcacacaggcacgatggtctgtcgcctccgctctgtgcaggcgatgtcccggcagggaagcagaagagcatttcggtagctgtgcttggcccgggaccttgtcaaagaactgccggaggggcttgtgggcacttgcggcggttgcagacatcattggacacgctggtggtgcacggggtgatgtacgccgacctgtacttcttgcaaatgtcgtcgaggttgcaggccttcgctgcatccaggcagttgttccctttgggaatgtgctccactgatatgaatgggaccacccggaatatatctgacaatctgctgttaactggttcatatggggaatcctccagcagatcatttccctgcaggctctggtacatgctccagtaaatgcgcaggcagttcttctccttcttcataccccgcttgcagcggcagttgtagagcgacttctgcttcagggcctccatggcgctgcggcactcatccttggcctccaggccggatgccaggctgaagttggtctccttgcccgccacgcactgccttagcgtgcggtacttggtgctgcagctctgctccttcaggcactgatcactggctttcacgcaatccaggcggtctccgccgctcacttcggccgacaggagcaagtccaagagcggcagcgcgaagtacagggtcgccaggaacatggtgccggcgcggggctggtccccgcccccccaaaaaaatcccgagccgccgctgggtcttgccgagggagctcagcgtgcagcgatccccggacagctgtgctgctctggccgcccaaagttcagctccatccagtgaaagaggaaactccgggtctggcagcagccaccgccgccggcgactcagctccgggatggcgagggcgggaggcggttccgcttttaggggttcaggtccgacccaacctggactcaaccgaccgcgtccagctgcggcgaggagccagtttgtttatttacttatttattctttcagggcaatggtgtccccgccccctccttccctttccgggctcactttatctgcgcgaagtctacactgggtcgggagaccggtctaggagccagccggcagtgctcgggatctttgctgatgtccaagttcatctctcggggagaccgagtttgaatcaaatctgcgtgcgcccagctgtcaaatctgcaaactctatcacgccagacaatgggccgccg

SEQ ID NO: 318751 - DNA, 754 bp, Homo Sapiens
  misc_feature (549)..(560): n is a, c, g, or t
  misc_feature (609)..(609): n is a, c, g, or t
  misc_feature (751)..(751): n is a, c, g, or t
aatgttggtaacttttgcttcctctacctgaacaaagagatgaataattccatgggccagtatgccagtttgaattctcagtctcctggcatcttgtgagttgcatattaagattactggaatggttaagtcatggttctgagaaagaagctgtacgttttctttatgtttttatgaccaaagcagtttcttgtcaatacacggggttcagtatgacacagaatcatggacttaacccgtcatgttctggtttgagatttagtgacaaatagaggtgggaagcttataatctaattttaggaggaccaaattcagtggatggcaactggaacattgattgtaaggccagtgaagttttcaccccactggaatttgatggaaagaaggtttgtgtgtttaagacgccaagggcattgcagaatccctctcagtggacagtatgcactcagctgaccactctctctagccaatagtcaagatatggaactaaggaaattttaatgccaaattacatacattcctgaaagacgggggaattaaattactaannnnnnnnnnnnaaatgatgacagtggtcccagaacttggaaaagttgtagggatttctanactcaagcagattcgcaagtgctgtgcgcttgtcagaccatcagaccagggccaaccaatcagaaggccacttactgtataaattatgcagagttattttcctatatctcacagtattaaaaataaataattaaaaattaanaat

SEQ ID NO: 318752 - DNA, 2175 bp, Homo Sapiens
  misc_feature (517)..(517): n is a, c, g, or t
  misc_feature (620)..(633): n is a, c, g, or t
  misc_feature (1431)..(1431): n is a, c, g, or t
  misc_feature (1434)..(1434): n is a, c, g, or t
  misc_feature (1554)..(1554): n is a, c, g, or t
  misc_feature (1557)..(1557): n is a, c, g, or t
  misc_feature (1803)..(1803): n is a, c, g, or t
  misc_feature (1968)..(1968): n is a, c, g, or t
actaggaagaaacaaacaatatatttcgcttaaaataagaagcacgtggaaaaagaaagactttgaaagagttggccaatgtcttctcacaattttttgtatagcttttaaaaatgtctgcatggctcagtggagatggtgtccacgtcttccctccacctggaacctgcattcaatccttcacaagtgctgtctatgtatgagaccagctgggtgactcggttaaacccctcgcctctctaaacaaagtatgttatttaccctgaatcattcttcagcaagtactaaaaaggtataatttcttaaaatgaatgcgattgatcgacttttgggcttgcaaaaatgacttctcattgggaaaaggggacacaccttaggaaagatgaaaatgtggaaaaacaacagtccataaaatgggattcgctccatgctcggactctctgccaccagacatctgactgtgcagccatcagctgaagaggctgcttgccagttccccatcccaggacccacggtngcctggtgctaaggagcgactggactgaggaagcctctcatcaccagctgtgttgcagctttaaattctgccccagttgtggtatttaaaattctgtatgttnnnnnnnnnnnnnnccaccaatctgcctacatcttcctagttaaagctagaaaggggaatggagagaagatccaacccagctgggcagagtggctgagcacgagacacccacaaaccccaacgcggttctaggggttggatcagaagagtctctgtgtcgtcggtcgggcacaggcttgcctcctcgattctagatgtgccctcggccacagtgtctaatcttcctgtttcctggcattcaggtgttttacctctctgcccggattttgtacctgaggacaaaataggcaatgaggcggagggagatgaagaaaatcccgagtacgatgaagtccaggtacagcttggcattttccacgtccagctcccgcaggatggcctccgacttctggaagtggcacgtctcgtcgatgtcacagtgcagatcttcccggtctaagccatagatggagaggatgaccccttcgaacccatacctgacataggagatgtaggacatccactgtaggtacgtggggatggtgtcgaagctgacgaagaaccccgagaacaggagcaccgggatggctgtcactgggcccacgaaagtggccacctgcagggacgtggaggcggctccgatcagcaggcccagggactgtgccaccagggaggtcatggtgcccagcgcggcaaacagcacaaagcgcacggcgtcggacggctgcgacgtcatccagtacacgatgctgcagtaggccactgggaacatgatctgaaagggcacgtctgccatggtcttggccaggtagtaggccttcaggctgtaccantanttcaggtgttcccgaagaaagactcccatctccaggggaaatgtcagaacagtaggcatgagggccgcgaacatgaggaacagcatggagaagaagaggaagccggagttgctcaagacnttnttggcttcgttcccgatccccaagtacagcaggccaatgaggaggccgatcccaatgtgcgaggtgatgcgcaggtgtgtcaggaccgagtccctcatgatgctgaggaaggtctctcttgaagaggatgcagaactgcgtgaggcagctggcagagaagctgtggcagccttccatggacgaggagtcctcttcagagggccggtgccaaagaaaagggttcacctcggcatcacccccgaggtntctcttgtggtctgagtcacacatgccctcccgaaccgctctcaccagccgactgttctgatcaccgtactcgccggatgcaacctccatgacaaaatctgctgggttgtggtaggttgggcagttcagacccaaatccctcaaatatggcacaagattgcaganttttccccggtacacacattgtccttgactcaggacgtaaagctggtcgaacagctcgaagagtttggcgctgggctggtggatggtgcaaatgatggagcgacccccttgagcgagccctttcatcagcgagaccacctggaagcaggaggcgctgtccaggccgctggtgggctcatcgaagaacatgactggagggttgttcac

SEQ ID NO: 318753 - DNA, 486 bp, Homo Sapiens
  misc_feature (222)..(284): n is a, c, g, or t
caggaaaaagcaagaagaaaacaagtagggaaaaacagctaacctggagagaaagaatttctttaacctttatgttcttcattaaaaatcttatcttggactgatttgagggatttttagaaacatggccttattttatataagcattaccttcccaggaatctttgttgtatattaatttttgataaccatttgattaactttaaaattaagtatatgtgnnnnnnnnnnnnnnnnnnnnnnnnnnnnnnnnnnnnnnnnnnnnnnnnnnnnnnnnnnnnnnnatacacatagacatacagagaaccactactttgtaatagtgtacagtttgttttatatctctttactttttttgttactattttatctggccagcgtaatagttttatttagattttttaaaattctgtagattaaagcaaatgacagttattgaactatcacaaaactattaaactgtggtacatttaatgtgtaaaaaaa

SEQ ID NO: 318754 - DNA, 1739 bp, Homo Sapiens
  misc_feature (542)..(551): n is a, c, g, or t
  misc_feature (650)..(813): n is a, c, g, or t
  misc_feature (1472)..(1472): n is a, c, g, or t
  misc_feature (1575)..(1575): n is a, c, g, or t
  misc_feature (1636)..(1636): n is a, c, g, or t
gatgtaaaacttgtgtacagcaaaatgtatagaccctaaggatagaattcagtaaaccttgataaatttatacacccatgtaactactgctgcattcaaaatatgtaacatttccatcactcctttcttcatgctacttccaatcaagagcagttgttaaattttcggcaagtttcaaatttttaaataatttttatatgtctatttggatattgtatctcctttttgcagaaggatgattaatttccccttggaacaaaagaccattttgtaacacccgtaattgtggttccttattctgcttcacttttgataggtaattctgaaatggatatcctactctggcgttgtttaagataaattacagggttcaaggattaattatatttcattttctttccacagttaagttgcttttacagagttaacaggtctccaagaaattttaaaaaaggtaagatatccagagtttaaggctttgaggctcaacaaaaaacatgtgaagtagaatagtacatctaggtatccatggcttctgttcnnnnnnnnnnaaaaagacagggcctcactctgtcctccaggctggagtgcaatggcacagttgcagcccattgtatcctgaaaatttcaaattgggctcaggcagtctnnnnnnnnnnnnnnnnnnnnnnnnnnnnnnnnnnnnnnnnnnnnnnnnnnnnnnnnnnnnnnnnnnnnnnnnnnnnnnnnnnnnnnnnnnnnnnnnnnnnnnnnnnnnnnnnnnnnnnnnnnnnnnnnnnnnnnnnnnnnnnnnnnnnnnnnnnnnnnnnnnnnggcatgagctatcatgctggcctggctttttgttctctgtgtctggccagtggtaggcaatttattatcatgagcagaaattatatactaaccatagatgacttttctaaatatgtaaaattcattgcagttgataaaataatctacaaagctctcatgtttcagtagaagataagattctaaatgagtctgaaagtagtttggtcttgtgaagcagcatttggcagacttacaaaggaagatttgatatttttgatgttcctattgtatagaataggtgatacgaaatgtttcttcaaggtagttggtttatttgtatttttagatgggagaaagtttatcccttgttttctttaataattagatatgatcagtatttttgtgaacttgtatcttgttttcatttataaatgttgaagaaagcaggaaccaggtaattattaagcttagtttgggctaaggtacttcaaaaataagacttgctattatgtgtacctttttgtctgcaggtcattattgctgtggtttgagctcagcatggctgtagtcatccgtttactggggcttccttttattgcggggcctgtggatattcgtcacttcttcacgggattgactattcctgatggaggagtgcatataattggaggggaaattgnggaggcttttattatttttgcaacagatgaagatgcaagacgtgccataagtcgttcaggagggtttatcaaggattcatctgtagagctctttcttagtagncaggcagaaatgcagaagactatagaaatgaaaagaactgatcgtgtaggaagagggcgtnccaggatctggacatcaggggttgacagcctgtctaatttattgagtctgtaaaggaagaagcagtattcctgatatgctcttcaattatcagatgctggttt

SEQ ID NO: 318755 - DNA, 1789 bp, Homo Sapiens
  misc_feature (127)..(127): n is a, c, g, or t
  misc_feature (1739)..(1739): n is a, c, g, or t
ccgggatcgggccgacgggctcgcggggccggcgccgccatggcggccgtgtttgatttggatttggagacggaggaaggcagcgagggcgagggcgagccagagctcagccccgcggacgcatgtncccttgccgagttgagggcagctggcctagagcctgtgggacactatgaagaggtggagctgactgagaccagcgtgaacgttggcccagagcgcatcgggccccactgctttgagctgctgcgtgtgctgggcaaggggggctatggcaaggtgttccaggtgcgaaaggtgcaaggcaccaacttgggcaaaatatatgccatgaaagtcctaaggaaggccaaaattgtgcgcaatgccaaggacacagcacacacacgggctgagcggaacattctagagtcagtgaagcacccctttattgtggaactggcctatgccttccagactggtggcaaactctacctcatccttgagtgcctcagtggtggcgagctcttcacgcatctggagcgagagggcatcttcctggaagatacggcctgcttctacctggctgagatcacgctggccctgggccatctccactcccagggcatcatctaccgggacctcaagcccgagaacatcatgctcagcagccagggccacatcaaactgaccgactttggactctgcaaggagtctatccatgagggcgccgtcactcacaccttctgcggcaccattgagtacatggcccctgagattctggtgcgcagtggccacaaccgggctgtggactggtggagcctgggggccctgatgtacgacatgctcactggatcgccgcccttcaccgcagagaaccggaagaaaaccatggataagatcatcaggggcaagctggcactgcccccctacctcaccccagatgcccgggaccttgtcaaaaagtttctgaaacggaatcccagccagcggattgggggtggcccaggggatgctgctgatgtgcagagacatccctttttccggcacatgaattgggacgaccttctggcctggcgtgtggacccccctttcaggccctgtctgcagtcagaggaggacgtgagccagtttgatacccgcttcacacggcagacgccggtggacagtcctgatgacacagccctcagcgagagtgccaaccaggccttcctgggcttcacatacgtggcgccgtctgtcctggacagcatcaaggagggcttctccttccagcccaagctgcgctcacccaggcgcctcaacagtagcccccgggcccccgtcagccccctcaagttctccccttttgaggggtttcggcccagccccagcctgccggagcccacggagctacctttaccttcacttctgccaccgccgccgccctcgaccaccgcccctctccccatccgtcccccctcagggaccaagaagtccaagaggggccgtgggcgtccagggcgctaggaagccgggtgggggtgagggtagcccttgagccctgtccctgcggctgtgagagcagcaggaccctgggccagttccacgagacctgggggtgctgtctggcgggtggggtgtgagtgcgtatgaaagtgtgtgtctgctggggcagttgtgcccctgaatcatgggcacggagggccgcccaccaaaactcccgcttaactggttcccccggcagattaaaagggttggattaatggcgcccgaaacanacacctattattttgatagcccaacaatgcgctccccgcccccatatttt

SEQ ID NO: 318756 - DNA, 1581 bp, Homo Sapiens
  misc_feature (98)..(98): n is a, c, g, or t
  misc_feature (330)..(330): n is a, c, g, or t
  misc_feature (343)..(343): n is a, c, g, or t
  misc_feature (471)..(471): n is a, c, g, or t
  misc_feature (1566)..(1566): n is a, c, g, or t
cccgggatcgccgggcggcccgcgcggagtctgagtggagatggaagttgagcaagagcagcggcgcagaaaggtggaggccgggaggacgaagcttnctcacttccgacagagaaaaacaaaaggtgacagttcgcattcggagaaaaagacggcgaagaggaagggctcggctgtcgatgcgtctgtccaggaggagagtccggtaaccaaggaggacagcgcactctgtggaggaggggacatttgcaaaagcacatcatgtgacgacacccctgatggggcaggaggggcctttgcagctcagccggaggactgtgatggagagangagagaggacttngaacatctgcagcagaagcaagtcaatgaccatcctccagagcagtgtgggatgttcacagtcagtgaccacccaccagaacagcatgggatgttcacagtcggtgaccacccaccagaacagcgtgngatgttcacagtcagtgaccacccaccagaacagcatgggatgttcacagtcagtgaccacccaccagaacagcgtgggatgttcacaatcagtgaccaccaaccggaacagcgtgggatgttcacagtcagtgaccacacaccagaacagcgtgggatcttcacaatcagtgaccacccagcagaacagcgtgggatgttcacaaaggagtgtgaacaagaatgtgaacttgccattactgacctggggggcggccgtgcaagatgaggctggcctgcatcagagtcaggccgtgcatggccttgagctggaggcgctgcgcctgagtctgagcaacatgcacacggcgcagctggagctgacacaggccaacctccagaaggagaaggagacggcattgacggagctgcgggagatgctcaacagccggcgtgcccaggagctggccctgctacagagcaggcagcagcacgagctggagctcctcagggagcagcacgcacgggagaaggaggaggtggtgctcaggtgtggacaggaagcagctgagctgaaggagaagttacaatcagaaatggagaaaaacgcccagatagtaaagaccctgaaggaagattgggaatctgaaaaagatttatgtttagaaaatctacgcaaagaactgtctgcaaagcatcaatcagaaatggaggatttacaaaaccagtttcagaaagaattggcagaacagagagctgagttggagaagatttttcaagacaaaaaccaggctgaacgggcccttaggaacctggagagtcatcatcaagcagccattgagaagttacgtgaagacctgcagtccgagcacggccggtgtttagaagacttggagttcaagttcaaagagagcgagaaagaaaacagctggagagctacatgagcaactcctggcgcgcacctctcgtgtggaagatttagaacagctgaagcagcgagaaaaaacccagcatgagtcagaactggagcaactgagggatttatttgaaaagagttaagggatgctgagaaaacttaccagaagacctaccctgttacagcagaggctgcagggngcgagggaagatgct

SEQ ID NO: 318757 - DNA, 1133 bp, Homo Sapiens
  misc_feature (872)..(872): n is a, c, g, or t
  misc_feature (967)..(967): n is a, c, g, or t
  misc_feature (970)..(970): n is a, c, g, or t
  misc_feature (985)..(986): n is a, c, g, or t
  misc_feature (988)..(988): n is a, c, g, or t
  misc_feature (1004)..(1004): n is a, c, g, or t
  misc_feature (1011)..(1011): n is a, c, g, or t
  misc_feature (1013)..(1013): n is a, c, g, or t
  misc_feature (1032)..(1032): n is a, c, g, or t
  misc_feature (1035)..(1035): n is a, c, g, or t
  misc_feature (1049)..(1049): n is a, c, g, or t
  misc_feature (1052)..(1052): n is a, c, g, or t
  misc_feature (1064)..(1064): n is a, c, g, or t
  misc_feature (1076)..(1076): n is a, c, g, or t
  misc_feature (1082)..(1082): n is a, c, g, or t
  misc_feature (1084)..(1084): n is a, c, g, or t
  misc_feature (1094)..(1095): n is a, c, g, or t
  misc_feature (1103)..(1104): n is a, c, g, or t
  misc_feature (1107)..(1107): n is a, c, g, or t
  misc_feature (1117)..(1117): n is a, c, g, or t
  misc_feature (1119)..(1119): n is a, c, g, or t
  misc_feature (1122)..(1122): n is a, c, g, or t
ggacgcgtgggccgcgggcgggagggcggacggaccgactgacggtagggacgggaggcgagcaagatggcgcagacgcagggcacccggaggaaagtctgttactactacgacggggatgttggaaattactattatggacaaggccacccaatgaagcctcaccgaatccgcatgactcataatttgctgctcaactatggtctctaccgaaaaatggaaatctatcgccctcacaaagccaatgctgaggagatgaccaagtaccacagcgatgactacattaaattcttgcgctccatccgtccagataacatgtcggagtacagcaagcagatgcagagattcaacgttggtgaggactgtccagtattcgatggcctgtttgagttctgtcagttgtctactggtggttctgtggcaagtgctgtgaaacttaataagcagcagacggacatcgctgtgaattgggctgggggcctgcaccatgcaaagaagtccgaggcatctggcttctgttacgtcaatgatatcgtcttggccatcctggaactgctaaagtatcaccagagggtgctgtacattgacattgatattcaccatggtgacggcgtggaagaggccttctacaccacggaccgggtcatgactgtgtcctttcataagtatggagagtacttcccaggaactggggacctacgggatatcggggctggcaaaggcaagtattatgctgttaactacccgctccgagacgggattgatgacgagtcctatgaggccattttcaagccggtcatgtccaaagtaatggagatgttccagcctagtgcggtggtcttacagtgtggctcagactccctatctggggntcggttaggttgcttcaatctaactatcaaaggacacgccaagtgtgtgggaatttgtcaagagctttaacctgcctatgctgatgctgggaggnggnggttacacatttcgnnangttgcccggtgctggnatatgananactgtggcctggatacggnatncctaatgagcttcntanaatgactatttnaatatttggacnaatttnangtccacatanntcttcaanntanttaccagaangnatnagtactggaga

SEQ ID NO: 318758 - DNA, 2530 bp, Homo Sapiens
  misc_feature (1708)..(1708): n is a, c, g, or t
  misc_feature (1853)..(1853): n is a, c, g, or t
  misc_feature (1992)..(1992): n is a, c, g, or t
  misc_feature (2066)..(2066): n is a, c, g, or t
  misc_feature (2313)..(2345): n is a, c, g, or t
  misc_feature (2391)..(2391): n is a, c, g, or t
ccagaaaacagcgattttaatttgaaagcgattttatgtatgagaggggaaaggagccccaaagagaagggacgcagggcaaaaatcatgcagccccagcaccccacctctgcgggctggccacctcccctcaattctcaggccaggatcctgtgtccccagcctatgctatgtgcccagggctggaggagagctgtaaagggaaggcctccgggactacactcgtgaaaccatcccctgtggggcacctgtcctcacagcccaggccccttccccaagttagacaggaagagatggggggggcggcgggaagctggggaaggctagtgcttggagagccctagggacaggccatttcagggccctgcctttcccaaacacccacctccaccactggcatttcttagtcaacctgggaaagtacagtacttctttgagtctaactgcaagtctctatcttcacaggaaattaaaaatagcagatcggttcctacatctccaccagccctttcaccaccaccaccaccttttttatatttcagtctgactgcagaaggaggtgaagtgtaaaaagagactctggacagtgacagggcccctccctcttccagagaggcccccatctgccaggtttgagaggaggaaggcctgtcagggccctactctcatgtccatcagcttgggaggcctgccccccagtatccacctctgggggagttccccatttccactcttcagatgggaagcaaaatgaggcaagatgagaaggaagcaaggtcctggaggcaaggccagtgctttgtgctgggggaaggacagagggtgagaaatcaccccaaatcatgggagaacccgacaaattcagagactcaaggccaccgaagagagacaaccagtcctcacaggtatctggggtcccttccaacttgggatatcaagcagatcccttggagggtttatgttcttggttctgccctgtacttctcaccccatcaaggttctgggaacatggccccccaccctgccccagggcttggagtccctcttggatgtgtgctcctccagtgtgagaagcaccacgtctgggtctgagctcaggccagttgatggggagcctcaagcatctccatgaggaaggtgtcgatgggggtgtcaccaatgagcttgaagaaaaacagatgctctagacacttaaggccaatggaccggagggcaggaagacgtagcagcagcttggcaaaccgtccctgctgctcagggtacttctgtttgcagtaggtctccagtgatgcatacactttctcccgcaggacctccacctcactagggttggagaggcccttggcatctggattaaacagaatgattgccctcaggcagccaagctctgtcttgtccatcctcatgtcacgcattttggacactagctctgtcagcacccgatcaaagatggctcctactcctgctgaatgggctgagttgcggtgcacgtgaagacctgtggcaaggaggatgccatctcgaacatcaatggatcggtgtgaaaaggaggcaatgaggagttcattccagcctgcccgcagcaatatgacctgatcatccagaggcaaggaggaaaagtgtgggatcctcttcgcccactcaacaagcgtgaatagctgtttgtcagctgcctgacagatgttagtcacaagggtcatttgggctntgccgctacccccggttcccccaggaccctcaacgccctggtcactcttctgttccacagcaagctctgcctccaggatcctgtccacaggcatctcctcgggggctcccccagccccctccccatccccatccttgtcctttcncttctgacgctcctcctgtaccgcctccctcttcatgccagtggccaggcacttctgatagcggcagtactgacagcggttttcgctggcgcttgtccactgtgcagtctttgttgtcccggcaagagtatgtaaggtntttgcggatggtgcgtttgaagaagcccttgcaaccctcacagctgtaaaccccgtagtgtttgcctgagcttntgtccccgcagattgcacatagccgtttgccagccccagggccacctggagggggtggacagtgcaggccccggacccctaagactggtggtttcacatcttcaggggggccagacccacccccagggagtgacactgttgagttaatctgggggctgctgacaggcccggagaatcctgggggagctggagggggcagaccaggggaccccatggaagaactgatgactggaaagggagagcccannnnnnnnnnnnnnnnnnnnnnnnnnnnnnnnnccccagagcctccaagggatggagctgttgaagggggtaggggtgncccaggaggagaagggggagggactccctggggaaggggatttggggaggagctgtctgggcttcgggagtcccgcccgctgtcgcccatcccgtcccgtccagcctcccctggctccggctccggggtttgttgttct

SEQ ID NO: 318759 - DNA, 2187 bp, Homo Sapiens
  misc_feature (2121)..(2121): n is a, c, g, or t
  misc_feature (2167)..(2167): n is a, c, g, or t
  misc_feature (2169)..(2169): n is a, c, g, or t
ttttggtagttcacatctgtttaatgtgcataaagccaaggaaaggacagttccgaattcaatagaaatattctgtacaattcatatggtggggttgagggggagggggacaaggctgtagaacccacacccgaacatgtacaaaaataacttatacagcaacccccacctgcaaggatgatgcagctctgcccagccaccggggctgggggggcacactgcagacatggcaccgcgggagccaaccagtatgggccccagatgcaggtgggagtgaggagggcaccagtccggaggggagggcagctattaggaggccttgagacggttgctggccgagcgtgagctcagcagcttgtccaccatagtgcgggcgtagcggagccggctggccagctccttgcagcagccgtactcctccaggagactcaggcggtatgtgcggaagtcccgcttctcgtcgatgtaggtcacggctgccatcagtgggcacaagatgagcttggtgtgatcctggaagaagttgatctgcacgctgccgttgctgaggtgcaggatgatggcgctgcgggtgcggaaccaggtccgtaggtagggcagccgggcgagctcatcaccttcgcgcggcgtgatgttggcacctgccttcagcaagtgctcgctcatgtaattgcggaaatatttaaggagggtgatcttcttcatcaaggagttgggatgggaactcacggtgaggtaggactcagtgccgtcacgctctatgtactgcaggctgtcaccatcattgtagaggatgaggcgtgttgagtcattgaagagcacccccacgctgttatcacagagctgatacccaaggccgtacttgtccgaatagtccacccacttgctgacccagaagatggggatgcaggcaggatcctcagcctcctcttgcctgaccagcccacgctccgagggcttggaggcattgacactgtgcagctgctgcagcatgtcactgaggtggcagtcgaccacctcacctgtctctcgaaccactggttcttctttttcccggggacgctcaggcagggggttctccaagcctttattgaggactgtgaggggcttccggttgctggggtccaggctgctgggagcaatcgaaaaccttggtggaatggtcaggcaggtgatggggagacgggcagggatatagccagaagtaaagaactcgtcattaagcagctcgttaatggttgggcgggcagtgggatctgtctgaagcatcttctggatgagggaggcggccacggggttgatgtgcttgggaatactgtattcattcttcttgatccggaggtaggtctcttttaggcaagaagtctcaaaaggtggtttgcccactaacaaggtatacatgatacacccaatggaccacacatccacctcgaaactgtgccctttcttgctcagcacctcgggagctatgtaattaggagtcccacacagggtcttcttcctctccccgtcatattcgactttggttgccagtccaaaatcccctattttcacctccagatcttcattcaggaaaaggttgcccagcttgaggtctcgatgaataactcggtttcggtgcaggtactggcagccaagcacaatttgccgtaggtagtatcgggcctcaggctcagtcagggctttcctcctcttgtgcagctccaggagagacctccggcggcagagctccaacaccacgaacacgaagtcgttgtcctcgaaaaagccgtggaatcctacgacgtgctggtgggcgaggctgcggtgaatggatatttccatggacatcttctccctctggtgcggcttgagcagcagagacttaggcacaatcttgcccgcgaacacctccttggtgtccgcgtccgagatctcgaagcacttggcaaagccgcccttgcccaaaaagcggccccgcacatagcgccgccggctgcgtgggtccactaggacctccgggatctctttcgccggtggagccgccgccggagctccgggagctgcaactccggggaccccggctttcccagggtcggccggtgcccgtgccagcttccctgcagtcactgcagcactcangctcccgaagtgcgctgcagacctcgatccgagcagagcctccgcnangcgcccgctcctccccga

SEQ ID NO: 318760 - DNA, 910 bp, Homo Sapiens
  misc_feature (77)..(77): n is a, c, g, or t
  misc_feature (89)..(89): n is a, c, g, or t
  misc_feature (430)..(430): n is a, c, g, or t
ctgtgccctttcttgctcagcacctcgggagctatgtaattaggagtcccacacagggtcttcttcctctccccgtnatattcgacttngttgccagtccaaaatcccctattttcacctccagatcttcattcaggaaaagttgcccagcttgaggtctcgatgaataactcggtttcggtgcaggtactggcagccaagcacaatttgccgtaggtagtatcgggcctcaggctcagtcagggctttcctcctcttgtgcagctccaggagagacaaagacactttccatacgtaagcgggaggctcccagcacccttctctagcagctccaagtcccaggctctcccttgctgggtactctttccagcagctccaggtctgggcgctccaactgccccgcaggcagttccagttctccagcagcganactcaccctccggcggcagagctccaacaccacgaacacgaagtcgttgtcctcgaaaaagccgtggaatcctacgacgtgctggtgggcgaggctgcggtgaatggatatttccatggacatgttctccctggtggtgcggcttgagcagcatagacttaggcacaatggttgagccgggaacgcctccttggtgtgtgcgtccgagatctcgaagcacttggcaaagccgcccttgcccaaaaagcgtccccgcgcatagcgccgccggctgcgtgggtccactaggacctccgggatctctttcgccggtggagccgccgccggagctccgggagctgcaactccggggaccccggctttcccagggtcggccggtgcccgtgccagcttccctgcagtcactgcagcactcatgctcccgaagctgcgctgcagacctcgatccgagcagagcctcaacaccgctccgctcctccc

SEQ ID NO: 318761 - DNA, 968 bp, Homo Sapiens
gttcctgggatgaaggggaaggcgggccccaccgggggttggaatgtggctttggggaattacggttattccatttctttcttggatccgggaggttaggttttctttttagggcaagaaagtcttcaaaagggtgggtttgcccccctaaccaaggtaatccatgatacaccccaatgggacccacacatcccaccttgaaaactgtgccctttcttggctcagcccctcgggagctatgtaattaggagtcccacacagggtcttcttcctctccccgtcatattcgactttgggttgccagtccaaaatcccctattttcacctccagatcttcattcaggaaaaggttgcccagcttgaggtctcgatgaataactcggtttcggtgcaggtactggcagccaagcacaatttgccgtaggtagtatcgggcctcaggctcagtcagggctttcctcctcttgtgcagctccaggagagacctccggcggcagagctccaacaccacgaacacgaagtcgttgtcctcgaaaaagccgtggaatcctacgacgtgctggtgggcgaggctgcggtgaatggatatttccatggacatcttctccctctggtgcggcttgagcagcagagacttaggcacaatcttgcccgcgaacacctccttggtgtccgcgtccgagatctcgaagcacttggcaaagccgcccttgcccaaaaagcggccccgcacatagcgccgccggctgcgtgggtccactaggacctccgggatctctttcgccggtggagccgccgccggagctccgggagctgcaactccggggaccccggctttcccagggtcggccggtgcccgtgccagcttccctgcagtcactgcagcactcatgctcccgaagctgcgctgcctcgtgccgaattcgccacccaggcctcgctacctataaccgtaggagttactgcca

SEQ ID NO: 318762 - DNA, 1135 bp, Homo Sapiens
  misc_feature (765)..(774): n is a, c, g, or t
  misc_feature (1038)..(1038): n is a, c, g, or t
cccccctccaccacatctataccctgtgggctacacgtccactcccccccgggctgcttggcgaattcggcacgagggtgctgcagtgactgcagggaagctgggacgggcaccggccgaccctgggaaagccggggtccccggagttgcagctcccggagctccggcggcggctccaccggcgaaagagatcccggaggtcctagtggacccacgcagccggcggcgctatgtgcggggccgctttttgggcaagggcggctttgccaagtgcttcgagatctcggacgcggacaccaaggaggtgttcgcgggcaagattgtgcctaagtctctgctgctcaagccgtatcagagggagaagatgtccatggaaatatccattcaccgcagcctcgcccaccagcaggtcgtaggattccaccggctttttcgaggacaacgacttcgcgttcgtggcgttggagctctgccgacgcaggcctctcctggagctgctcactaggaggaccctcctgactgcccttgaggaccgccttccccttgcgccactgctcctgcccgccttacctccccacccctccccacttactctgggcaaccgcgggccgcgcaagctttcccaggttcacccccccgacgggacaaaagccgcaccccgcccccctccgcttcctccaatctcccccgcccatctcacctcgccctttgctcccccgctcctcccctctttccctcttccgccggccgctcccatcccttctnnnnnnnnnnttctagccccgctgctgcccgccgccgtgtggccgtgtgttccccctgcgagcccgttacatccccggctgcttccgtatctcttccccctcatccccttcctccgtggcgcctctcccacaccccccatgccgccgtcgtttccccgtcttccgtcccgcatctttacacccgcctatacccgctctcaccgcgcgattagctcctcctatcgttcgcgcttcccaccccgctgaatgccctcccagatgttcgcccgccgtntgcgacgctaggcgccgcgcagtccgcgtatacgcccccgccagtcagctataatccccctgcccccttatataccccgctcttattccccgctcct

SEQ ID NO: 318763 - DNA, 1042 bp, Homo Sapiens
  misc_feature (9)..(9): n is a, c, g, or t
  misc_feature (12)..(12): n is a, c, g, or t
  misc_feature (21)..(21): n is a, c, g, or t
  misc_feature (30)..(30): n is a, c, g, or t
  misc_feature (41)..(42): n is a, c, g, or t
  misc_feature (47)..(47): n is a, c, g, or t
  misc_feature (51)..(51): n is a, c, g, or t
  misc_feature (53)..(53): n is a, c, g, or t
  misc_feature (63)..(63): n is a, c, g, or t
  misc_feature (71)..(71): n is a, c, g, or t
  misc_feature (75)..(75): n is a, c, g, or t
  misc_feature (77)..(77): n is a, c, g, or t
  misc_feature (79)..(79): n is a, c, g, or t
  misc_feature (97)..(97): n is a, c, g, or t
  misc_feature (593)..(593): n is a, c, g, or t
  misc_feature (950)..(950): n is a, c, g, or t
  misc_feature (953)..(953): n is a, c, g, or t
  misc_feature (960)..(960): n is a, c, g, or t
  misc_feature (976)..(976): n is a, c, g, or t
  misc_feature (991)..(992): n is a, c, g, or t
actccttgncgncaatgatgngagatgtanagaagatttgnnatgtntttnanagttcagggnagaaaaanatantntntggctcagggacagctgntttttccccagcagcagctgggtgtccactgcgaggaagcaggtgaagagcagagcgcccagtgaggcgtacacgatctccaggatgcggttccggatgaagatgcagagaatggcgaagatgaagagcaccaccatgctcaccaggagcacgcccatgcatgaggtgaagtcgtagcgggtctgcatggagaagatgacgacggtgaagcagacggctgtggtgatgcccacggccatgataactgcctcggtgttgtagaagctggcgatcatccccaccatgtacgacaggctggcggtcaggaccgactgcagttgggagacacaggctgaccttgggtgtgtgcccccatgccacccctgccggcccctgcctcatgagcacaaggagaaccacggtgaccaggcccggaagagtgggcgtgtgggactgcatggccggacccaggcacagaggctcagcgtttggcgcggttaccagtgcaacaaggttnccaggggtgctttcgccggaagtccccacaacagctgaggacgatgagagagatgaagaagacagcataggagacatagtaggtccagacattctcccggacaaagcccttcacctccgcaacaaaagtgaacacagacaccgtggacagggtcaccgacagctgcaaggtcagcactaggaacaccttgcggatgaaggcctgtcggatgctcttgtcatcccagttggtggcagggaagtcctggttgtcatagtaggatgggggaccctcctcctggtagtttccatgctggggtgagtcagggtcttgtcctgggaagacctgtggctgtccataggggttgggggggaaggngcntctgggnctatggcccctggggntagcctccttggggnnaggggccctgtgggtagccctcttgtgggtaggggccctgtgggtagccc

SEQ ID NO: 318764 - DNA, 713 bp, Homo Sapiens
  misc_feature (505)..(508): n is a, c, g, or t
  misc_feature (512)..(512): n is a, c, g, or t
  misc_feature (522)..(522): n is a, c, g, or t
  misc_feature (526)..(526): n is a, c, g, or t
  misc_feature (538)..(539): n is a, c, g, or t
  misc_feature (544)..(544): n is a, c, g, or t
  misc_feature (551)..(552): n is a, c, g, or t
  misc_feature (564)..(564): n is a, c, g, or t
  misc_feature (649)..(649): n is a, c, g, or t
  misc_feature (654)..(654): n is a, c, g, or t
  misc_feature (671)..(672): n is a, c, g, or t
  misc_feature (687)..(688): n is a, c, g, or t
  misc_feature (703)..(703): n is a, c, g, or t
ccgtgggcatcaccacagccatgatgactgcctcggtgttgtagaagctggcgatcatccccaccatgtacgacaggctggcgatcatccccaccatgtacgacaggctggcggtcaggaccgacagtgcaacaaggttccaggggtgctttcgccggaagtccccacaacagctgaggacgatgagagagatgaagaagacagcataggagacatagtaggtccagacattctgccggacaaagcccttcacctccgcaacaaaagtgaacacagacaccgtggacagggtcaccgacagctgcaaggtcagcactaggaacaccttgcggatgaaggcctgtcggatgctcttgtcatgcccagttggtggcagggaagtcctggttttcatagtaggatgggggaccctcctcctggtagtttccatgctggggtgagtcagggtcttgtcctgggaagacctgtggctgtccataggggttgggggggaagggcctctggnnnnatgncccctggggntagncccccttggggnnagggnccctgtnntagccctcttgngggtaggggccctgtgggtacgcccccttgggggtagggaccctgtgggtagcccccttgggggtaggggctggggccatgggantaccntggctgaccgtaggggnngggctggaaaggggnntgtgggtaaggggcnccagggtagg

SEQ ID NO: 318765 - DNA, 1150 bp, Homo Sapiens
  misc_feature (153)..(176): n is a, c, g, or t
gcagagagcaaatcccatttattggaatttcactgacaacaaattgagaggaaggcttccccctcccctgaaacatgccatcctctctgccctcagggctcagcacagggataagacccccactccgcatgtccccagagggcagcactccannnnnnnnnnnnnnnnnnnnnnnntgctctacgccaggctggggagctgggacaggagggaagacgtgcaccctcacctcttggctcaatccctctccccgggacctggtgctgcccccagtccctggggtgggctggcagacagggctcatgcaacaatgagtagacaggaggtggcacggaaacgtggccttggtgccccttggcgggggcgggaggactaaaggggccatgctgtggccacagcgggtccaaatggaagtatctgcagtgtacatacaggagggttggagagaggcatccttttccctaggctgtgcctggggacaagagagaggggaagtacagctggcactgccgtgccaggggcagggtccaggccagccgtgccacctgagcgggcacagcgagctggagctcggctactccttggcgcggccaatgatggtgaggatgtacaggaagatgttgatgatgtctgtgtacaggttcagcgcagcaaacacatactcttctgggctcagggacagctgcttgttccccagcagcagctgggtgtccactgcgaggaagcaggtgaagagcagagcgcccagtgaggcgtacacgatctccaggatgcggttccggatgaagatgcagagaatggcgaagatgaagagcaccaccatgctcaccaggagcacgcccatgcatgaggtgaagtcgtagcgggtctgcatggagaagatgacgacggtgaagcagacggctgtggtgatgcccacggccatgatgactgcctcggtgttgtagaagctggcgatcatccccaccatgtacgacaggctggcggtcaggaccgactccgcaacaaaagtgaacacagacaccgtggacagggtcaccgacagctgcaaggtcagcactaggaacaccttgcggatgaaggcctgtcggatgctcttgtcatcccagttggggcagggaagtccctcgtgccgaattcgccacccagc

SEQ ID NO: 318766 - DNA, 1130 bp, Homo Sapiens
cggtccggaattctccgggatgacagccacaggtcttcccaggacaagaccctgactcaccccagcatggaaactaccaggaggagggtcccccatcctactatgacaaccaggacttccctgccaccaactgggatgacaagagcatccgacaggccttcatccgcaaggtgttcctagtgctgaccttgcagctgtcggtgaccctgtccacggtgtctgtgttcacttttgttgcggaggtgaagggctttgtccgggagaatgtctggacctactatgtctcctatgctgtcttcttcatctctctcatcgtcctcagctgttgtggggacttccggcgaaagcacccctggaaccttgttgcactgtcggtcctgaccgccagcctgtcgtacatggtggggatgatcgccagcttctacaacaccgaggcagtcatcatggccgtgggcatcaccacagccgtctgcttcaccgtcgtcatcttctccatgcagacccgctacgacttcacctcatgcatgggcgtgctcctggtgagcatggtggtgctcttcatcttcgccattctctgcatcttcatccggaaccgcatcctggagatcgtgtacgcctcactgggcgctctgctcttcacctgcttcctcgcagtggacacccagctgctgctggggaacaagcagctgtccctgagcccagaagagtatgtgtttgctgcgctgaacctgtacacagacatcatcaacatcttcctgtacatcctcaccatcattggccgcgccaaggagtagccgagctccagctcgctgtgcccgctcaggtggcacggctggcctggaccctgcccctggcacggcagtgccagctgtacttcccctctctcttgtccccaggcacagcctagggaaaaggatgcctctctccaaccctcctgtatgtacactgcagatacttccatttggacccgctgtgggcacagcatggccccctttagtcctcccgcccccggcaagggggcacccagggccacgttttccgtgccaccctcctgcctactcattggtggcatgaagccccttgtctgccagccccacccccaaggaactgggggggcaccacccaggttc

SEQ ID NO: 318767 - DNA, 936 bp, Homo Sapiens
  misc_feature (125)..(134): n is a, c, g, or t
ttgttctcccccaagtttcccgtggagtggggttgggccaattccggggttttcacggcaccctactagtttacccacggaggtgggccctgggaaaccggggccctgggtggccccttgggccnnnnnnnnnnaaggatctaaaggggggcccatgttggggcccccaggggggtcccaaattggaagtatcttgcagtgtacattccaggaagggttggaggagagggcatctttttcccttagggctgtgcctggggccaagagagaggggaagtacagctggcccctgccgtgccaggggcagggtccaggccagccgtgccacctgagcgggcacagcgagctggagctcggctactccttggcgcggccaatgatggtgaggatgtacaggaagatgttgatgatgtctgtgtacaggttcagcgcagcaaacacatactcttctgggctcagggacagctgcttgttccccagcagcagctgggtgtccactgcgaggaagcaggtgaagagcagagcgcccagtgaggcgtacacgatctccaggatgcggttccggatgaagatgcagagaatggcgaagatgaagagcaccaccatgctcaccaggagcacgcccatgcatgaggtgaagtcgtagcgggtctgcatggagaagatgacgacggtgaagcagacggctgtggtgatgcccacggccatgatgactgcctcggtgttgtagaagctggcgatcatccccaccatgtacgacaggctggcggtcaggaccgactccgcaacaaaagtgaacacagacaccgtggacagggtcaccgacagctgcaaggtcagcactaggaacaccttgcggatgaaggcctgtcggatgctcttgtcatcccagttggtggcagggaagtccctcgtgccgaattcgccacccaggcc

SEQ ID NO: 318768 - DNA, 1659 bp, Homo Sapiens
  misc_feature (55)..(63): n is a, c, g, or t
  misc_feature (104)..(104): n is a, c, g, or t
  misc_feature (110)..(110): n is a, c, g, or t
  misc_feature (151)..(151): n is a, c, g, or t
  misc_feature (506)..(521): n is a, c, g, or t
taaggagtaggtgggaaaatgcataaagattctttttaggaatggagggaaaggnnnnnnnnncacaaggttttataatctctttttcccacttacccgatccncaaatnatggatagagataattaattaatagagataataaagtaaanaggcttaccaagaaaatcaggattaggaagaaatctcccaactgtggcaacagatcttcagggaataaactagaaaaacctatgtcttggactttaaaaatactgtttaaaatctacctcaggaaaaggactaggattagtacatgacctgtctgcatgtatatttacagaatgaacatcatgtttctttctcgaagttcagtttacaagtggtatgttgatttagggattatcacaaaacacaaatcttactgataccaacttttaacagcaacagtataaccacctcagcttgttttctttgcagttgtcctggaaacataaacagttgttgaataaatatacaatagaggannnnnnnnnnnnnnnngctttccctaatatggctgtgttcagtaatggccagtgtgtgctccagcctagcagcacatcaagatcatgggacacctgaaatcccaaaggaagcctgaaatgcctaagagggacaagcgggatggctgctggtttaggttgacatcatcgaatgtggaaaccttcagacttcctggtgccataatcaatgagatggtgtcatcgttgactccacagtaaaaagaggaccggagcattatggggtgagagccagcaatagtccacgatgctgtactgcatgtagcccagaaaaaagccaaaagctacgtcggtgacattgtgccgccccagcatgaccctggataggcccaagacgaaggcccacagaaccaccagcaccctcagtggaatggccagcaccaggtggttcaggatgaacctcgacatcagggcggcccttgtggcatggcccgaggggaaggagtacttgtccaccgagagagtgacaaacatgtccatctggttgtgggccgggcggcgctgcggaccagccctttgatcaaggccaccagcagcaggtccaacagcagggcgaagagcaggttcatcagcacctcgcgcccggcccagctgtcgctcctgcacaggcagtagagggtgcccagcagccaggggatgccgtgtcccgagatctccagcagcttcataaggggtcgcacgctgccccacgacgagctctctcccgcgcacacccccagcttcttggacagccacaggtcgatggccagcagggagcgcagggcgatgcccaggaaggacgggttcaagtccatgcggtcctcctcgggcagcggaggcgcgggcgactgcgaggggcccgccgcggccagggggaaggagccgcggcggtgaactgggctctccgatgcacggagccgggcgcaggtggggtccacggccgtggcgcggctgctgagcagggactggaactcaaacctgctgccgccgccaccgccgccatgggctgggctgccggggctgctgctgctgctcgaagcggagacgcccagcggccgtccctccatgctcctccggggacttggcatcgcagcgggcggcccggatcccgggacctggccggaccaaacagaggcttc

SEQ ID NO: 318769 - DNA, 1555 bp, Homo Sapiens
  misc_feature (394)..(394): n is a, c, g, or t
  misc_feature (423)..(423): n is a, c, g, or t
  misc_feature (510)..(510): n is a, c, g, or t
  misc_feature (514)..(514): n is a, c, g, or t
  misc_feature (524)..(524): n is a, c, g, or t
  misc_feature (983)..(983): n is a, c, g, or t
  misc_feature (1033)..(1033): n is a, c, g, or t
  misc_feature (1035)..(1035): n is a, c, g, or t
  misc_feature (1048)..(1048): n is a, c, g, or t
  misc_feature (1052)..(1052): n is a, c, g, or t
  misc_feature (1064)..(1064): n is a, c, g, or t
  misc_feature (1073)..(1073): n is a, c, g, or t
  misc_feature (1086)..(1086): n is a, c, g, or t
  misc_feature (1090)..(1090): n is a, c, g, or t
  misc_feature (1113)..(1113): n is a, c, g, or t
  misc_feature (1130)..(1130): n is a, c, g, or t
  misc_feature (1145)..(1145): n is a, c, g, or t
  misc_feature (1158)..(1158): n is a, c, g, or t
  misc_feature (1162)..(1162): n is a, c, g, or t
  misc_feature (1165)..(1165): n is a, c, g, or t
  misc_feature (1188)..(1188): n is a, c, g, or t
  misc_feature (1203)..(1203): n is a, c, g, or t
  misc_feature (1207)..(1207): n is a, c, g, or t
  misc_feature (1209)..(1209): n is a, c, g, or t
  misc_feature (1216)..(1216): n is a, c, g, or t
  misc_feature (1248)..(1248): n is a, c, g, or t
  misc_feature (1264)..(1264): n is a, c, g, or t
  misc_feature (1294)..(1294): n is a, c, g, or t
  misc_feature (1299)..(1300): n is a, c, g, or t
  misc_feature (1311)..(1311): n is a, c, g, or t
  misc_feature (1349)..(1349): n is a, c, g, or t
  misc_feature (1362)..(1362): n is a, c, g, or t
  misc_feature (1371)..(1371): n is a, c, g, or t
  misc_feature (1377)..(1377): n is a, c, g, or t
  misc_feature (1393)..(1393): n is a, c, g, or t
  misc_feature (1398)..(1398): n is a, c, g, or t
  misc_feature (1424)..(1424): n is a, c, g, or t
  misc_feature (1449)..(1449): n is a, c, g, or t
  misc_feature (1462)..(1462): n is a, c, g, or t
  misc_feature (1470)..(1470): n is a, c, g, or t
  misc_feature (1474)..(1474): n is a, c, g, or t
  misc_feature (1484)..(1484): n is a, c, g, or t
  misc_feature (1493)..(1493): n is a, c, g, or t
  misc_feature (1496)..(1496): n is a, c, g, or t
  misc_feature (1502)..(1502): n is a, c, g, or t
  misc_feature (1539)..(1539): n is a, c, g, or t
gggaggtccgggattggccggagcgcccgccgctcacggtcaggggttgccggatcccgtccgcgggcgatgctgctgcggagggtggtcgagggaggccgggcggtagcgtccgcggtccgtggctcggcaagtaccaggacgggtcttggcagcgccgaagggcacgtccgagaggccgctgtccgggggcccgcacgtaccgggaggagccccggcccctccacccgcatgtggggacggagccgggaggatcgcgcgctggccgccgccgaaggcccctcgctcctctcctccatcggctcttaccgagtccccgccccggaatctgtggaggggccgcttagccttgggagaggaagcagcccggtgaacggccactttcctgtttctnagtatctgccgagcgcctgtgtgcgagcnctcctgggctctggggactggccgtggacatggagcggatgatgcccctcgcaggactagttaaataagtgaagttggtagcgtgtnagtncgtgatcctnggtagatagagcagggcagcgacggaagactgcctataggacattcacgctgggatgagaggggcctgagaggcctgggctttgtgacagggaaacttggataaagggtggtgcgattcttccggttggtccctcagaggtggtggggcttggttatactggtagaggtgctgggctggccaggagcttacagggttacacctctcgcatactggtgtccacagagcagccatcttagctggaggtgtcgagtgcctcccccaccccccaccatgtgcttgagtgcacacccggcgccaggccctgatcctggcacttcttgttaatcacaccgtgtcatacccattacttccattgcacagtggggaaactgagtctagagaggtgaaataacatgtctaaagtcacaggaagtgaaaaagctgaggacatggagccagttgcccaatgacaggaganctgaaatgtcctcactgctgggggtagacggggcctcaccagcttcctgnanaatcacatgtttntctncatcctcagggngctcgccgnttctccagcccgnactnctgccagaggcttcctggaggtngcagctttcttcaaagncaccatcccggagcncaagcccctgatnagcncanaaaattcgggacaaaccacgtanaggtgagctcccaancagntncggacgncaccaggccgcccaaggcatcgctgccacctnagctccagccgcccanaaactgctgcatgaatggctgccccaactncgtgnnaatggagtacncagacaggctactgcagcacttccaggacggtggggancgggccctcgctnccctaaaanaacacntaactaataaaaaccnaaaanccattcaaaaaggataaaaatccaantgcacaccagatgcggaaaaataanccaaaccctgctngactcccnaccnacaaacggantccaggacncanccgcancctccttccttcacaccccctcacagactccttgtgnccaacgggaataggaa

SEQ ID NO: 318770 - DNA, 1657 bp, Homo Sapiens
  misc_feature (3)..(3): n is a, c, g, or t
  misc_feature (8)..(8): n is a, c, g, or t
  misc_feature (28)..(28): n is a, c, g, or t
  misc_feature (36)..(36): n is a, c, g, or t
  misc_feature (59)..(59): n is a, c, g, or t
  misc_feature (75)..(75): n is a, c, g, or t
  misc_feature (77)..(77): n is a, c, g, or t
  misc_feature (84)..(84): n is a, c, g, or t
  misc_feature (92)..(92): n is a, c, g, or t
  misc_feature (129)..(129): n is a, c, g, or t
  misc_feature (157)..(157): n is a, c, g, or t
  misc_feature (165)..(165): n is a, c, g, or t
  misc_feature (1393)..(1393): n is a, c, g, or t
  misc_feature (1635)..(1635): n is a, c, g, or t
  misc_feature (1637)..(1637): n is a, c, g, or t
  misc_feature (1643)..(1643): n is a, c, g, or t
ggntcggnacagcgaaggcttgcaaccncctccagnaaaccctcacgccgccacctctnctgccaggcagtccangncctcagnttcccgangcccttgttccgtgaactctgtgctcagctgccacancttcactgtgccctgggcatcgcccgcngccaaganctgagtctgctggctgttgaactccagacagtagacagggctttcatccctgggtttgcttgatcaaacctggtggttttctgggagcttttctggagatcaaacagctgcacgtccacctttcccagagggcagctgcaaaagccaagggccgcactgggggaccagcgcacagcaaacagatacttgagggagagctgcagcgaagtcaagggaggggcctgcagcatggagtacaggtggacatgcccgtcagtcccagcgctcaggaagagattcctgtggaagggggaacagctcacagagtagatgggaccgccgtggggggagaaggtaaactgtgctggggcccgcaggggcacggagctgggcatccgcgtgagggctgcctctccagctgccagggaacacttgagcgggaagccgccttccgtgcccagaatgaacagcctagggtcaaagctggagaaggccactgccgtggcgcccacctcggtctccccgcggggatgcttcttgagcttggtgctccgtggcagctgctgcatgaccagggcgaagccctctgtgagctgcagctggcctaccccgatgccctgccagagtagcaccttcccgtcagtggccacactcagcacctggaagcggtggctgtgcccaggctcgggcagccacaccacctgggacacagggtctgtgtgggtgtcatccgtcaggcctgtgcgccacagcagcgggtcctcaagacggctcaggtcccacaccaacacctcaccactgtacagccctcctgcgacgtgggagggctgcgtggggtggaaggccagacacaggacagcgctggggacctccaccacggccgacggttgctggggacgcaggtctcgccggtccaggttccaggcacacacgaaggacttaagcgtgctccagtccccatggtccagccggccgtaggcacaggccaccacagagccagtggagttccaggagatgctggtcacatgcagaccctgcgcttgggctggcgggtagcccagggtatacagacaagacaccatctgctgctgctcggtccagttcacctcgaagccatcaaacgcgtggctctgccaattcttgttcagctctcggatgaccatggcctccactctccgaagaaaggctgcgagcctgggtatgtcgtactgggacgggggctgcacgctgacaggcacgggggcctccntctgcacctgggcgtccacatgattcctggcctgggcggatgcactggcagtggcaatgctggccgtctggcaacttttcgtctccccgcggatgccctggacggccctccactgcgagggcacggacgccacacccagggtctcgtcctgcagcggccctggccgccccggccccgggccgctcgcaaccccgactgtcgccagcgccgcaacaccagcgcttcccgcctggctgagtggncncccgcngcgcgcgggatccc

SEQ ID NO: 318771 - DNA, 1582 bp, Homo Sapiens
ggcctgggtggcgaattcggcacgagggggaagcgctggtgttgcggcgctggcgacagtcggggttgcgagcggcccggggccggggcggccagggccgctgcaggacgagaccctgggtgtggcgtccgtgccctcgcagtggagggccgtccagggcatccgcggggagacgaaaagttgccagacggccagcattgccactgccagtgcatccgcccaggccaggaatcatgtggacgcccaggtgcagacggaggcccccgtgcctgtcagcgtgcagcccccgtcccagtacgacatacccaggctcgcagcctttcttcggagagtggaggccatggtcatccgagagctgaacaagaattggcagagccacgcgtttgatggcttcgaggtgaactggaccgagcagcagcagatggtgtcttgtctgtataccctgggctacccgccagcccaagcgcagggtctgcatgtgaccagcatctcctggaactccactggctctgtggtggcctgtgcctacggccggctggaccatggggactggagcacgcttaagtccttcgtgtgtgcctggaacctggaccggcgagacctgcgtccccagcaaccgtcggccgtggtggaggtccccagcgctgtcctgtgtctggccttccaccccacgcagccctcccacgtcgcaggagggctgtacagtggtgaggtgttggtgtgggaccttgagccgtcttgaggacccgctgctttggcgcacaggcctgacggatgacacccacacagaccctgtgtcccagggcatcggggtaggccagctgcagctcacagaggggttcgccttggtcatgcagcagctgccacggagcaccaagctcaagaagcatccccgcggggagaccgaggtgggcgccacggcagtggccttctccagctttgaccctaggctgttcattctgggcacggaaggcggcttcccgctcaagtgttccctggcagctggagaggcagccctcacgcggatgcccagctccgtgccctgcgggccccagcacagtttaccttctccccccacggcggtcccatctactctgtgagctgttcccccttccacaggaatctcttcctgagcgctgggactgacgggcatgtccacctgaactccatgctgcaggcccctcccttgacttcgctgcagctctccctcaagtatctgtttgctgtgcgctggtccccagtgcggccccttggtttttgcagctgcctctgggaaaggtgacgtgcagctgtttgatctccagaaaagctcccagaaacccacagttttgatcaagcaaacccaggatgaaagccctgtctactgtctggagttcaacagccagcagactcagctcttggcctgtgggcgatgcccagggcacagtgaaggtgtggcagctgagcacagagttcacggaacaagggccccgggaagctgaggacctggactgcctggcagcagaggtggcggcctgaggggtcccgggaggcgggtgcaagccttcgctgtgccgagccttgtgtttctgacgcaagccaa

SEQ ID NO: 318772 - DNA, 665 bp, Homo Sapiens
tatggctttcctcacttctcaggctttattgggctttatttgtgggagaagggggctggtccccagtttttgcagtgcaaagccagagcgccacctgctggtagccctcaggtgtaggttcgaagctgctggggccccctggggtttgggacacaggagaatttcaggctgtgagtggagacagttactgccacgattccacaggcaagttgttcacctcaaagatctcctgcaccgactggtgaaagtggtcgtaggtgaggcgcagctttagccgcaggggggccttgttaggattgaggattctgaagagctgggtgataggaaggccaccccgagctggaactgtgttcccactgggggcctgcagctgcagctggagactcttgggcacagcagcctggcagatgaaatgggtgacatcaccctctgagaagttggtggcagtgatggtgattaacagcaaagcagggttttcagggggtcgaatgaaagacagattcagctgtactccctcacgctcaaacactttgagatctgggatgggagctgggggtggaggtacacagggaaggtcaagcaggtgtaccagggcacctcctggggaggggtccagatggggaggatgctggacatccccagaagccccatccaggagatctacc

SEQ ID NO: 318773 - DNA, 1554 bp, Homo Sapiens
  misc_feature (1410)..(1419): n is a, c, g, or t
attggtgtatacccctggatgtgatttccgcagccccagcaagaaaataagctccagttttaggaaaaaatatggatgtgttcctccctccccaacacagcttgcttgctcatcctaaaatgacactagggctaagtattgtctaccactatcgccctattctttagctaaattactaattagtttagcatgtctggtttttaacctgcaatggtgagttaacctgtaatgctttcaaaactaaagactggctagtggtcaggtaagctatacctcttgcttctctggtcgagtccacgaagccttttcttcgctgctgatgttccgggtagaagtcctccaggtgatggagggaatggggtctccggaggcttcacaggtaagagtgacctgctcctctaattccatggcagtctggttctctacatatgtgattttgggttttgcaaagactttgaggtggatggtcgcatcctgctcgccagccttgttctcagcaatgcagatgtactcagcctcgtcgttcttatccacctttttgatggtcagctgggaactatcgtcgctgaagatgtacttctcatcgtcttcctcttgctctatctgttccccatcctttgtccagctcatggtgggctctgggaagccttcggcatcgcacaccagggtgacggactggccgaggttggcggtggcattcacaatattctgcctggcctggatggtaggtggcacattcacaatgacctgaatgtccttgaagttatctccccccgtgccaggattctgccctcacagcgataagtgccctcatctgttttcttgatgccccggatctgcaggtagttgttggacaggactatgaatcggacatcttttttcaggatgacatctcggcctttgtgtttccagatgatggttggtgggagggagctgaccacatcacacacaatcacggcatcttccccctcccggaactcctgtggggttggcgcattcttgaacatgagcttctgaaagatcttcacgttgacggtggcctctgactcactgccatcctcgcctgtaaccacacacttgtaaatgccggcgtcgtcgatgttggcgttatagatggtgagggtggaggaggaatcatcattccacaccactgagatccgctgctggtttggggtgagcttttctccattgggggagaaccaggagatgtctttatctttggcatctcctgccacttggcataagaagaatttggactctccaacgctgatctccccctggctgggaacaatatccacctgcagagaaactgcagttcccaggaaaaacaaagtccagatgagatccttagtttgcagcattgtaatctgctggctgggagggatgttcttgccgcggtaaattctgtgnnnnnnnnnntgcagcgagtgtggacggcggctgagcgacagacctaggggcagacaattgccaggctgagtatgattatttttgcagaattgtttcctgccagcggcagccgagctgcgttcacgcgctgatcggagaatgagt

SEQ ID NO: 318774 - DNA, 2386 bp, Homo Sapiens
  misc_feature (302)..(477): n is a, c, g, or t
cgtgaatagactgttcggccgcgttggtgtgtggtgctcacgcgttacgtagtaagtatttatgcgggccatgatgcatcatcgacgacaataagagtggctatggtcgatgtccgagcgaggagaatgacagtctacctgtgcccgcagcgggaggtcaggctcctataacagatttgtttgatcccatcttgtacccgtagcactggcacggatgactgcctgggggcgtgatgctctgttgtggttgggcttttggtcgctctttattcgttggctggctcgtacttgttgcgtctgcnnnnnnnnnnnnnnnnnnnnnnnnnnnnnnnnnnnnnnnnnnnnnnnnnnnnnnnnnnnnnnnnnnnnnnnnnnnnnnnnnnnnnnnnnnnnnnnnnnnnnnnnnnnnnnnnnnnnnnnnnnnnnnnnnnnnnnnnnnnnnnnnnnnnnnnnnnnnnnnnnnnnnnnnnnnnnnnncttctttctctgtattgtctggtgtatttcttgtgctggttttttttgtttattgtaaatacatttatttgaaccggcctgggggaggcttgatgttgatgggttggtgattaaagcctcccaaagccaatccttggcatggcctttgggactcaaaacacaggatctgactggtgggcacaataccatcttgaacgcccacaaaaaggtttggttttgttgccaaagggcaggtggctccaggcagggctgatggtggcagggtggggtgaggacaggacaagagatctgggtgtggaaggatggccgggtttctgcagcagcaggaggaaagggtgggagcacacaggcacagaacactgtgagcaggactgccaggccagtgtcacaagcgctaccatctgggtgtagacagacctgagctgacaaagctgggggagcaaggccaacggcttttaaacacaagctcaggggcttggggtttatcccgagggcacagggcagccatgtagggtggagttggcatgagttaagcctgggctgggtgtgtagactggacagaggtgggtagggcaggcagtgaggagctggtgtgcaagagactttagggccaggcatggggggacagaactcccacctcgttcgtgctcccaccctccccagctccaccgcctggtcttcagtctccggcatagcaaggaggaacgggaggacctggatgctgatgagcagcaaggctcctcacttccctgtacagaatgggtgcccagagagtgccatggagatgaatggtagggcaccatgctgggaggtggggctggaggagctgagttcccgcaaactaactgcagggcctcaatttccctcagagccccaggccccggcaccaagcctcttccgccagtgcctgctctggttttgtggaatgagcagaggtggggtgggcagtcctccgccccttacccaggaggaggcagcggcagcagccaggcggctggaggacatcagcgaggacccgagctgggcccgtgtggtcaacctcaatgccctgctcatgatggcagtggccgtgttcctctggggcttctatgcctaagaccaactgcgttggacaccataagccacagcctcacaggaagtgggggtgaggagcctgcggtgctccccagaaaaggggaaggggcagtggggtgagaaggtcctggctccccttctcccggccttcctctgcctggggcccactgcatctgattggcagtcacttcccatgagggcctggcccacccgctgcagttgccctaaggaaaaataaagctgcctttcccctgtcctgctgtggccaaagtgtccttgctccaggttcctgccctgggcttgggcctccgtctgggctgctcacaagaccttcttttcgggagacagaagccatgtggccctccactcatccacctctagctggtgcttctcggtcttccagccggcatcctgcagtcctttcaagaactttgggaacagcatgtccaacacttcgtgtgtctccttgacgacgacccagctctctttcttaggacctgcccgcacccggttcctcagctcctccagctctgctggaaggggtccatctccctgcagggccccaagcatcagcccatgtgtggcggcccttaggatggtcttggggcctgccttctggttcagaactacctgtacctggttttgtgactggtcccagcagaggaggtaggattcttggtgcccctcaaccagctgctgcagctcaaagacactgtgggggagaggacagtgcagtgggggtggaggacagcaaaggcaggcatgcccaaccagccactgaacagccacccagtgaactgaaatgatccaggcttcactcaggtcccctcgcttc

SEQ ID NO: 318775 - DNA, 1563 bp, Homo Sapiens
  misc_feature (27)..(27): n is a, c, g, or t
  misc_feature (34)..(34): n is a, c, g, or t
  misc_feature (128)..(128): n is a, c, g, or t
atcacataagatatagagttaagcagnaaactgntgaattttcttcagatgatctttaagaatctcaaaagccttgaagtttgctatcttctactgtcttattagaaggataaaaaactttgaatganaatccacttcttggaaaagagccagggtttatgcagaggcattcggtatttgtcgtagtgaaaggatcatatttgtctgcaatgacaagtagatcgggcacaggatacactctcaaagcatagtcatatgcccaatacactgggcagacataaagaggtaggggagtcagatgtccttgggataagatagtctttacaaagtgattaggaatagccaaattgctgctaggaaaacggacgcagtttctgcacattttatttactaagtcttcacggaagacagtaatttcctgtgtacagtactgaattctgccaggattagtagtaaacactgaaaatggtaccctttgtctgaattcattagtgatgctttcagccagtggtggccttggtaagatggaaccaaatccaggatcctctggaccaggtacaaacacaaaacgactactttggtgaatatctgggtattcacatattatatctgccaaagtttttagggaatctttcaaagcttgaacttgattttttccatatggtgtagatgaaaaattaccacacagaataaagcaggttggaggtgctggtgaataaccagcaaacattatgcgaagtttttccaatacttccacctggtccaaccaaacatcagataaaaacacaaacatagcatctttattctcctcttctagctgttttagttttgcagaagtcttcacagatgtattagaaggacctccaaaaaaattaatatttccatagtatgccctagtagtactagagggctcagtgggtggaaatccaaaggcattgacatgaaacacttgatcttcaaaccaaccttctgctaagacaaagcatgcctctgtgtataaaccactatggaactgagctttactaaggtctagttggactgttccagtaggatcttccagaaaaaattttccctcttttaactgcgttatcattccaagaacaatcgcatctccgattttggttgtactacccaataaggtttctattgttttaagctggaatttgcttccgctttcatcagggtgagaacctatcaccggaggagtaaataattcatgcctgtgggtcctctggtgcaaaatggtatatcgctcacgaaacatctctgctttatctcttggtgttccaaataaatttggtgcagggtggttggtcattaacagaatagtttcatcaacagactgactgcattcctggactgctgcttccaccacagatcgttcaatcatgtttgatgacaagggttgcttctcaactgcattaattatcttttccagtttatcttcaagctctaattcactgatagactgaagagcttctgtgaggtacttaatagcttcaccacggagcagcaagccccgcaacttgaaggcggagagcgcccggtccgcagccgctccgg

SEQ ID NO: 318776 - DNA, 1530 bp, Homo Sapiens
tcacttccaagagtgtgtttataaaaaaacagcaacggagtacagtgctgaccccacagagtcttccaggccagcaggagcagcaggccccgattcccggctccctgtggcccagggtgcgtgagtctgggactcctggccctccaggcccctcctctcccagagaccctgatgcagcttgtgggctggaccctggagcccagctgcaccctggtgggtcccaggcggctgagcagagggctcggacagtgtgcgtctggcctcggggtcctcccatctgctcctgggccatcgggggccttgtggctcagcccaccagcgggccacagccgcaagcctcatctttatcatcccagctcccagaggtgccgtgggcgcgagtccctgccctcgagcccggggagggtccagctgagccccctgcaggggacaccaggggcctgtgtctgagaccagtgacagaaggggcttcctgcttcccgggctgagtgagagctgggggagccggacagagtggtatttggaagccgggaggagtcccctctgcccatcctccagccatcggcttccacctgccctccccaggtcatgccctgccgtggtctgggctactgggccggctgcacgccagaccccgcagtggccccgttctcctggggggtcttggagatgtggaggaaggtggtcctcatggcccggtggcaggtgtccacgagcgcagggacgtccgccgcagtgaggccgctggtggggatggcttccagcacctgcactgtgactgttcctgaagtgaagaacttcttcttggtgttgtagaaggaggagaaggaagagtacaccacggggacgatgggcacctgtgcctggactgccaggtagaaggcgcccttcttaaaaggcagcaggtccccattgtcgttgcgagtaccctcgggatagatccacactttgaggttctccctgaccatgcgctcgcccaggtcggccatcactgtcatggcagtgctagagcgctgccggttgatgaagaagacgcccccgaggtacatgatgaggcccacgggccccaggaagagcagctcccgcttggcgatctgcacgcagcgctccggaaggacctccatgaggcccatcatgtccaggatgctctggtggttggagacgatgacacagggacgggcctcctgcagcctgcgcgggtcccgcacctcgaagcggagcccgtaaaagtacttgaagcttcgcacgaaccagccgatgatgctcatgttctccaccgtccggccgccgtggcgcagcaggcagacgagcgaggccacggcggacaccgtgaagcacagcgcgcagtacagggcgaccttggcgtagaactcggccgcgcggctcagctgcaccagcagcagcagcaacagcagcgccgcggccagacacggccacagctccatggcccggcccggcgcccgacggcgccgccagctcgctcccgctcccgctcccgcttctcccccgcgcgctcaggccccttattgc

SEQ ID NO: 318777 - DNA, 961 bp, Homo Sapiens
  misc_feature (608)..(608): n is a, c, g, or t
  misc_feature (779)..(779): n is a, c, g, or t
  misc_feature (788)..(789): n is a, c, g, or t
  misc_feature (800)..(801): n is a, c, g, or t
  misc_feature (803)..(803): n is a, c, g, or t
  misc_feature (825)..(825): n is a, c, g, or t
  misc_feature (829)..(829): n is a, c, g, or t
  misc_feature (831)..(831): n is a, c, g, or t
  misc_feature (834)..(834): n is a, c, g, or t
  misc_feature (836)..(836): n is a, c, g, or t
  misc_feature (864)..(864): n is a, c, g, or t
  misc_feature (886)..(886): n is a, c, g, or t
  misc_feature (900)..(900): n is a, c, g, or t
  misc_feature (912)..(912): n is a, c, g, or t
  misc_feature (931)..(931): n is a, c, g, or t
  misc_feature (935)..(936): n is a, c, g, or t
  misc_feature (940)..(940): n is a, c, g, or t
  misc_feature (952)..(952): n is a, c, g, or t
  misc_feature (958)..(958): n is a, c, g, or t
aagaacccgctggggtcctggccagccagggcaggcccaggatggggctccggggccatggaggcgaaggcacagtggcaggcaagggatgaggtggtcacaggtacacgggctgctcctggcctgtaaggaggcgatatgtggcagctggcatcgtcttgatatgcacctcgccataggcctcggtgagcagctcgatgatgcgggcgtgtggcgtggccaccacactctgcccattgatctcaatgatgcggtggccgacgcggatgcccccacgctcggcgatgccaccacggaggaggctgcagatgatgccgtcctccacgcagaagcccagctgctcgcgggcgtggggccggtggatgatggcggtggtgacgggagggcagtggacgatgctgagtgtcaccgacgtctgcgacttcgtctcgcggacagcggcctggcacgcagccaggggcagccccaccaggctggtcccgttgatagcggtcaggcggtccccgatgctgagggcccccgagcgctcagcaggccccccgtgcagcaggttggcgatgacggctgttggcagcagggagccccagcccgactccaccagggccacnccaggccctcccctcgccgcttctcgaggtgcacctcccggcagttgtcactgttggagaagtggtccaggtccccattatggaggtggcgggcgcctgggctcgggtgcacgcccacctggctggggtcaataccgctttcccgtagaactggctgtaggcggcggcgangcctggccnntggctgggcgnngngctgggcgtcctctgcgtagantccntnggngnccatcttgtagacgggggcggcgtggtnctggggtgccggctccgtgcanccggcgcggccaanagcacagccgcngcgatgtgggtgtttaganacgnntccngggtggtcctcnggctcntgg

SEQ ID NO: 318778 - DNA, 1307 bp, Homo Sapiens
tgggaacttgtcctttggtcttgggaaaacttctggtcaccaaaggcgaccccctggcctcgatccatttccccaccgctttcggcttccgcccctggagacttggcaagccgtttctgcttggcctcggggaacaggtccaactccaggctcgccgtccttgaagggatcccagaggcctcttcatcactacccccgacccgtgccttcttcatgccctccaggctcttctttctgtgggcctcccgctgctcctgcttgcgctgcacattctgggcctgctgggcctgcctctgcgccttcagccgcagcttcttctccttggcttccaggatggcctgcagctcctcctccgtcttgctcacaaaactgtggaacatcactttgccctccccgacgccctcctggaccttgatgagctgcagtgtcatccgcgggccgatctcggtgagccgcactgcactctgctgggcccgcatgttgccacggccagcgacagcctgaggcagctctgtgatgttgtggtcgccgtcaggctctgcctcgctctccgacagccccgcgcccgtggccagcagctcgctgatgtcctgcaggcggctcatgttggggaacttctcctggagcagcttcttcatcccgcgactcgcgcccacaggaacaactttgatgctatagtggcggaagtccagctcctgggagtcggggttgtagtcgatgaggaggcagcgcttgatggtgttcaggttcaccttgtgcacgttgatggaggggaacaggttctggaacatggtggccatgagcttcacatgcataccatgggggccaaagctgttgagtaccaggaggggtgggtggggaaactgctgctcgtgcatgcggtgccggcgcagtgaggagaccacatcacgcaccagcgagtacttcttgacctggaaggtcaaggtggggcctcctgggaggcgcatcagcttaaagtagacattggtttttgttttgctcaggatcagaaagtgtgtgaccccgaggggcccagccactgccacgcagtccttcagcgagttcttcttacgaacctgcagacggctggcagtgagcggctccatgacccgccgcacgtccaggctgagctgccggatgttgcgacccgtgcagcctcgcgtgaacacgaacgagtgcgggttcgcggcataggcctcgaggttgcggagtgcgcctgggcgcgggcgcgcttctggtgccgggacctccctgactgtcccatgctgctgtgtcctccacgaggcctcctgcgtccgccatcccgg

SEQ ID NO: 318779 - DNA, 1163 bp, Homo Sapiens
ccccccccgccattactcagacccagagctgaaagccacagacggggccgcagggcagcagctcccgggctctcgtgaaacacttcagaaggaaaaaatcttaaggaacagaatcctgaatggagaaaacccaacttttttaaaaaagaaggaagtgtatgatgggaatctacggggtgggttttctttaagaggtgagaacttggaatcttgcaagcactgggagtggactccggcggcggcgcagacgcggagcagggagcgtcctcggggccacctgcctcaggaagagttcctctggcggacgttcttgcctttgtcattctggtgctgcccgctgctcttcaggggtgcagagccggcgtcgtcatcatccaggacgtcctcgggcttccggcgcttctcgtagatgaagatgatggtgaccagcaccagcacctcagccacgatgcccaggaagggccagagggcggccaggtggctgcgcacgcggagcgtgatgatggcctggtcggagcccttggagctggtgccgttgcaccggtactggccggggtcggcctccatgttcaggttctcaatgtgtagctctgaccggccctgcgaggaactcacgaagaacctgctctcggagccgttcatgagggccttgtcctcagagtcagtgatcttgtaccaggcccagtcagtgacaggtggcacggactctgacttgcagaccagcatggccgtctccccctcgttgatgtgttctgacgacttcacagccttcactctgggaggcccgtggagctggatgttggccgtgcccatgggctcggggaggaagacgcaggagtactctccccactggtcgtcggagtccaccttgaactccgttttctggccgggcagcgcgtcctccttcagcaccacgccccccttcagccagcggtgccctgtgacctctgtggcgctgtcattcaaggagcaggtgaggagtatcttggagccaaggtcttctacggtagtgaagactgtgccggcagccccggaggctccgtgggtgcccagcagcgcgaatcccagcagcacgaacagcgcagccgccatgattcctattcctcgccggtcctacaacctccaaccgctgccgccgccgcccgcggccgctataaaaaaaa

SEQ ID NO: 318780 - DNA, 1009 bp, Homo Sapiens
  misc_feature (85)..(85): n is a, c, g, or t
  misc_feature (292)..(292): n is a, c, g, or t
  misc_feature (303)..(303): n is a, c, g, or t
agggggggtttttcttttaaggggggagaaccctggaatttgtcccaaccccgggggaagtggatttcggggggcgggccccaancccggagcaggggagggtccttgggggcccccctccctcaaggaaaggattccttcggccggaccttttttccctttgtcattcgggtggggccccgctgtttttccagggggtgcagaacccggggttgtcatcttccaggacgtccctggggcttccggcgctttttggtagatgaagatggatggtgaccaagcaaccagcccncttcagcccanggatgcccaggaagggccaagagggcggcccaggtggctgcgcacgcggagcgttgatgatggcctggtcggagcccttggagctggtgccgttgcaccggtactggccggggtcggcctccatgttcaggttctcaatgtgtagctctgaccggccctgcgaggaactcacgaagaacctgctctcggagccgttcatgagggccttgtcctcagagtcagtgatcttgtaccaggcccagtcagtgacaggtggcacggactctgacttgcagaccagcatggccgtctccccctcgttgatgtgttctgacgacttcacggccttcactctgggaggcccgtggagctggatgttggccgtgcccatgggctcggggaggaagacgcaggagtactctccccactggtcgtcggagtccaccttgaactccgttttctggccgggcagcgcgtcctccttcagcaccacgccccccttcagccagcggtgccctgtgacctctgtggcgctgtcattcaaggagcaggtgaggagtatcttggagccaaggtcttctacggtagtgaagactgtgccggcagccccggaggctccgtgggtgcccagcagcgcgaatcccagcagcacgaacagcgcagccgccatgattcctattcctcgccggtcctacaacctcctcgtgccgaattcgccacccaggcc

SEQ ID NO: 318781 - DNA, 988 bp, Homo Sapiens
  misc_feature (199)..(199): n is a, c, g, or t
  misc_feature (347)..(347): n is a, c, g, or t
gcgttatccgtttaaagaggggcgtcacccgggagggtttccgcacgccccgtggaagggtgtctcccgcggggtgggccagattaccggagccggaggaggttccttgggcccaccttcctcaggaaagagttctttgggcgggcggttctggccttgtccattccggtgcggcccgctgcttttcaggggtgcaaanccggggttgtcatcatccaggacgtctcgggctttccggcgcttctcgtagatgaagatgatggggccagcaccagcacctcagccacgatgcccaggaagggccagagggcggccaggtggctgcgcacgcggagcgtgatgatggnctggtcggagcccttggagctggtgccgttgcaccggtactggccggggtcggcctccatgttcaggttctcaatgtgtagctctgaccggccctgcgaggaactcacgaagaacctgctctcggagccgttcatgagggccttgtcctcagagtcagtgatcttgtaccaggcccagtcagtgacaggtggcacggactctgacttgcagaccagcatggccgtctccccctcgttgatgtgttctgacgacttcacggccttcactctgggaggcccgtggagctggatgttggccgtgcccatgggctcggggaggaagacgcaggagtactctccccactggtcgtcggagtccaccttgaactccgttttctggccgggcagcgcgtcctccttcagcaccacgccccccttcagccagcggtgccctgtgacctctgtggcgctgtcattcaaggagcaggtgaggagtatcttggagccaaggtcttctacggtagtgaagactgtgccggcagccccggaggctccgtgggtgcccagcagcgcgaatcccagcagcacgaacagcgcagccgccatgattcctatcctcgccggtcctacaacctcctcgtgccgaattcgccacccaggcc

SEQ ID NO: 318782 - DNA, 1028 bp, Homo Sapiens
  misc_feature (59)..(59): n is a, c, g, or t
gggaattttttgccaaagccccctgggaaggtggagttcccgggccgggcggccgccanaacgtggaagccaggggaagctttccttggggccccccttcccttcagggaagagttccttcgggcgggcggttcttcccttggtcattctggtgcgcccccctgctttttcagggggtgcagaagccggcgtcgtcatcatcccaggacgtcctcgggctttccggcgcttctcgtagatgaggatgatggtgaccagcaccagcacctcagccacgatgcccaggaagggccagagggcggccaggtggctgcgcacgcggagcgtgatgatggcctggtcggagcccttggagctggtgccgttgcaccggtactggccggggtcggcctccatgttcaggttctcaatgtgtagctctgaccggccctgcgaggaactcacgaagaacctgctctcggagccgttcatgagggccttgtcctcagagtcagtgatcttgtaccaggcccagtcagtgacaggtggcacggactctgacttgcagaccagcatggccgtctccccctcgttgatgtgttctgacgacttcacagccttcactctgggaggcccgtggagctggatgttggccgtgcccatgggctcggggaggaagacgcaggagtactctccccactggtcgtcggagtccaccttgaactccgttttctggccgggcagcgcgtcctccttcagcaccacgccccccttcagccagcggtgccctgtgacctctgtggcgctgtcattcaaggagcaggtgaggagtatcttggagccaaggtcttctacggtagtgaagactgtgccggcagccccggaggctccgtgggtgcccagcagcgcgaatcccagcagcacgaacagcgcagccgccatgattcctattcctcgccggtcctacaacccctcgtgccgaattcgccacccaggcctcaaacaagacgagacgcggcggtggggtaacgaggaaatggaggggggga

SEQ ID NO: 318783 - DNA, 1082 bp, Homo Sapiens
ttttcgagggtggaggtgggggcgatctttattgtggcggtgggtgggaggggggttcccacgtgagccctggtgctatagagagccggccgtcctccaggggtgagctggggaggcttctgcggttctggagtcccggcgatggcgccagttccccagcaaaccccctccagagctgcccccggatgcacagacaaggagggggcttgggagtgacttgaggctgtgacggggtcgccctcggtgtgggcaagtgagtcctctgtggccaagaggtcagagtcgtccctgaggctgagtcgaacacagacccgtggccctcataaaattaaacataaaagcacaaaaatggcgcaaccagacagcattggcttcagacaggcaggacacggggcccctcgtgtgacctgtgactttccacaaagggcaaggacctggcactgactccggccagtggagaaggctgtgccgcccacccggccatgactcagacccagaggctgaaagccacagacggggccgcagggcagcagctcccgggctctcgtgaaacacttcagaaggaaaaaaacctaaggaacagaatcctgaatggagaaaacccaacttttttaaaaaagaaggaagtgtatgatgggaatctacggggtgggttttctttaagaggtgagaacttggaatcttgcaagcactgggagtggactccggcggcggcgcagacgcggagcagggagcgtcctcgggccacctgcctcaggaagagttcctctggcggacgttcttgcctttgtcattctggtgctgcccgctgctcttcaggggtgcagagccggcgtcgtcatcatccaggacgtcctcgggcttccggcgcttctcgtagatgaagatgatggtgaccagcaccagcacctcagccacgatgcccaggaagggccagagggcggccaggtggctgcgcacgcggagcgtgatgatggcctggtcggagcccttggagctggtgccgttgcaccggtactggccggggtcgctgccatgttaggttctcatgtgtagctctaccggcctgcaggaactcacga

SEQ ID NO: 318784 - DNA, 466 bp, Homo Sapiens
  misc_feature (435)..(435): n is a, c, g, or t
  misc_feature (447)..(447): n is a, c, g, or t
aagaacgtccgccagaggaactcttcctgaggcaggtggcccgaggacgctccctgctccgcgtctggccgccgccggagtccactcccagtgcttccaagattccaagttctcacctcttaaagaaaacccaccccgtagattcccatcatacacttccttcttttttaaaaaagttgggttttctccattcaggattctgttccttaggattttttccttctgaagtgtttcacgagagcccgggagctgctgccctgcggccctgtctgtggctttcagcctctgggtctgagtcatgggccgggtggggcggcacagctttcttccactgggccgggagtcagtgccagggtccttgccctttgtgggaaagttcacaggttcacaaggagggggcccctgtgtcctggcctgttttgaagccaatgtgtntgggttgcgccnttttgtggttttatgttta

SEQ ID NO: 318785 - DNA, 1015 bp, Homo Sapiens
agtgtgcggtgcccggaattacaattgtccgccagattttttgggccaaaaaataatggttcctctttgggggaaaaaccccccgagaggggggctggggaaaagggaccccggtgccttttgggtttggaaaaaagattatgtcctggacagcattttttcaccttactgttttggaagccccaaaatccccaaaggaaactgcccataacccaggaactctcctgtttcctcagggtatttggttctctgagggggaaggagttgggtaagtcttggaggaagcaaaggagtgggtagaaaaaggggaaaatccccatttattccctaaagctgtctcccagagcccataaaagggctattgcagggatggcaagaccccaattccttctggccagaaacctttaacacttgactccaaaaactaaggctggagctgtggggttcagtaggggtgttaggcacaggtgttaggggcatccatcatcagcagagggaacacccctgcccctccggatcttcctccagccccttttctcttgcagccacactcctgggcctccagaaatagccacaaaatggctctgctcagcagggctttggtttcctggatctctgtagatctcaacatgtaagtttcccaaaacagtgagcaatccaggctcttctgcctgcccacctcaattccttttctgctcccaggagccactgtttctgccccatggggatggaaagccagtggaaacaaggaccaagagccaaacatcaaaaaaatcaccctggaagagcagggagagacatgtgcacttccctgggccacttcaccagcgtcacccatcgttagcagccaccagctgccccatgccctcacggatgtagacagactggatctccttggtcttgaggcagagatcgcaggcccagacggcagaagcttcagtggtcagcagcccataggcgctctcagtcatgcctgtgcctcgtgccgaattcgccacccaggcctcgctacctt

SEQ ID NO: 318786 - DNA, 1011 bp, Homo Sapiens
  misc_feature (894)..(894): n is a, c, g, or t
agagtccagccttgggccagagtgccgggtctaggcctggaagcgcgaggcgggcatttcggaagagagtggcgcggcgtggggcgccgcgagggcactacgagcccaggaactgccgcgccggcccgattttccgcggctgtattatgactagcgcttcggtagccggggagctggagggaacctgatttgagatcaattcttggagaacacaaagaagtgtgatggattgaaccagctgccctttgaccctgctaacaacaacgagcccctgcagtttggtagtgccagtggccctctggtcacagaaggcctcattgagaatggaggggaatcaagcaagaaaagaaagagaacaaatactccttcagccgataacagtagaactctgaacgtggattccactgcaatgacactacctatgtctgatccaactgcatgggccacagcaatgaataatcttggaatggcaccgctgggaattgccggacaaccaattttacctgactttgatcctgctcttggaatgatgactggaattccaccaataactccaatgatgcctggtttgggaatagtacctccaccaattcctccagatatgccagtagtaaaagagatcatacactgtaaaagctgcacgctcttccctccaaatccaagttaccgcattcgcctgggctctagtactgacaagaaggacacaggcagactccacgttgatttcgcacaggctcgagatgacctgtatgagtgggagtgtaaacagcgtatgctagccagagaggagcgccatcgtagaagaatggaagaagaaagattgcgtccaccatctccacccccagtggtccactattcagatcatgaatgcagcattgttgctgaaaaattaanagatgattccaaattctcagaagctgtacagaccttgcttacctggatagagcgaggagaggtcaccgtcgtagcgcaataactctactcatgatcagtcggcaacagcatgtccgc

SEQ ID NO: 318787 - DNA, 1156 bp, Homo Sapiens
  misc_feature (1077)..(1077): n is a, c, g, or t
  misc_feature (1095)..(1095): n is a, c, g, or t
  misc_feature (1128)..(1128): n is a, c, g, or t
  misc_feature (1137)..(1137): n is a, c, g, or t
  misc_feature (1150)..(1150): n is a, c, g, or t
gcaggctggtaccggtccggaattcccgggatgcgggccgcgcggcgcatttccgcctctggcgaatggctcgtctgtagtgcacgccgcgggcccagctgcgaccccggccccgcccccgggaccccggccatggacgaactgttccccctcatcttcccggcagagccagcccaggcctctggcccctatgtggagatcattgagcagcccaagcagcggggcatgcgcttccgctacaagtgcgaggggcgctccgcgggcagcatcccaggcgagaggagcacagataccaccaagacccaccccaccatcaagatcaatggctacacaggaccagggacagtgcgcatctccctggtcaccaaggaccctcctcaccggcctcacccccacgagcttgtaggaaaggactgccgggatggcttctatgaggctgagctctgcccggaccgctgcatccacagtttccagaacctgggaatccagtgtgtgaagaagcgggacctggagcaggctatcagtcagcgcatccagaccaacaacaaccccttccaagttcctatagaagagcagcgtggggactacgacctgaatgctgtgcggctctgcttccaggtgacagtgcgggacccatcaggcaggcccctccgcctgccgcctgtcctttctcatcccatctttgacaatcgtgcccccaacactgccgagctcaagatctgccgagtgaaccgaaactctggcagctgcctcggtggggatgagatcttcctactgtgtgacaaggtgcagaaagaggacattgaggtgtatttcacgggaccaggctgggaggcccgaggctccttttcgcaagctgatgtgcaccgacaagtggccattgtgttccggacccctccctacgcagaccccagcctgcaggctcctgtgcgtgtctccatgcagctgcggcggcccttccgaccgggagctcagtgagcccatggaattccagtacctgccagatacagacgatcgtcaccggattgaggagaaacgtaaaaggacatatgagaccttcaagagcatcatgaagangagtctttcagcggaccnccgaccccggcctcacctcgacgcattgctgtnccttccggngctcagctttgtnccaagc

SEQ ID NO: 318788 - DNA, 1014 bp, Homo Sapiens
  misc_feature (426)..(544): n is a, c, g, or t
  misc_feature (836)..(836): n is a, c, g, or t
  misc_feature (839)..(839): n is a, c, g, or t
  misc_feature (842)..(842): n is a, c, g, or t
  misc_feature (854)..(854): n is a, c, g, or t
  misc_feature (866)..(868): n is a, c, g, or t
  misc_feature (880)..(880): n is a, c, g, or t
  misc_feature (902)..(902): n is a, c, g, or t
  misc_feature (930)..(930): n is a, c, g, or t
  misc_feature (933)..(933): n is a, c, g, or t
  misc_feature (939)..(939): n is a, c, g, or t
  misc_feature (966)..(966): n is a, c, g, or t
  misc_feature (975)..(975): n is a, c, g, or t
  misc_feature (981)..(982): n is a, c, g, or t
  misc_feature (992)..(992): n is a, c, g, or t
  misc_feature (994)..(994): n is a, c, g, or t
  misc_feature (999)..(999): n is a, c, g, or t
  misc_feature (1008)..(1008): n is a, c, g, or t
  misc_feature (1011)..(1011): n is a, c, g, or t
gacacgtgaagggttatttatggttatgatgaccctgtcctgcaacgagggactggcagccactactgaggaggagggtcccatctctctcctgtcggctttcaccgaggtcacagccagacgtggggcaaaggtgttccctgtcctacccagccattcctgggcctgccgcctaggggctcacagggcccaggaagtccccagctcacaggccagggcatcaggccaggcgcgttcggtgcacaccgcacctgggaggacctgggtacactcaggagaccaagagcactggcgggtcaggatggttggcgttcagctcctacggggtggggagaagtctgtagccgagagcccagccccctcctgccaggtcttcccaggttcgagagaggctggaactcaatttctgcagaaaatctcccagtnnnnnnnnnnnnnnnnnnnnnnnnnnnnnnnnnnnnnnnnnnnnnnnnnnnnnnnnnnnnnnnnnnnnnnnnnnnnnnnnnnnnnnnnnnnnnnnnnnnnnnnnnnnnnnnnnnnnnnntggcatgaaccactgcgcccggctggagctcccggtttttaagcactgcacgatactagaagagctgaccttttttctggcctcacagcttatgctgaaagctgagtgtgaggaacagagagacctttctgtgacgaccgctggggtagagtggtctatgcgccgagatcctggcatcagcaagggaggcgggtcctcggggaggggcagcttccacagtgtggctgcagcgtgcacagccaggtaggccctgagatgttcacccctcacctgcccttggggaagcacttgnacngtnggggatgtccancaagggaatagnnntgtgtcgggganaaaatgcagcatcagcacccanaaggcccggcctagacccccctctccantcncccgangtctttctgtggccaaaacgagagtcnagggttggngagacnncggttgcgananggagnccaggctcncgntgg

SEQ ID NO: 318789 - DNA, 980 bp, Homo Sapiens
  misc_feature (108)..(116): n is a, c, g, or t
  misc_feature (757)..(801): n is a, c, g, or t
tggggctccttttctttggccttggactttcgccttgggtttttccaggtttgcggttgaaggggctgcaagtttcttggttcccgggaggggggccacaaaggcccnnnnnnnnnattggcttgtggggtggcccagttccaccggaaccttagcttcagggatggggtgggtgacccagcctcccagtgtgggggagctgcccccattctccctgaggtcagggagtagaagcccagggaggtccggggtttgcaggaggcctgtgaacttgcttctggctgatgtccgcaggtgcaggggtgggatgtgggctgttgaaatgttcgtagagagagagttgggggacaccgtgggggggttgattggccttgtgcagcgggggctgcggctgggggtgctgccctgctcccgaggggggtgggtaatgcatgagcagattgaaggcggagtagacggtctctttgtacatgccgctggtgcactccggggccttcaggccgtcctccaggggctctggaagtttgtccgggaagagtctctgcgcagcgtgttcccgcccgagagcctcggcctcgccgcgggccccggcgccggcccccgggacccccgggatccctgcgccgccggccgcgccctcggactcgttcacgagcgacgacttgagctcggccaggtcgcgctcgggaccggcggcgctgtcgcggctcttgtcgtcctgctcctcgccttcatcctggaaggccagcagctcgtnnnnnnnnnnnnnnnnnnnnnnnnnnnnnnnnnnnnnnnnnnnnnagtccagctgcggcatggtgcgctccgcccgccggggcgcggggcgctgggcgccgggagtgcggggcgcggagccggcccggggggcggcgagcccggagtccgaacctccgagctcggatcgcggcgggcggagcgcgggctgaccctcgtgccgaattcgccacccaggcctcgct

SEQ ID NO: 318790 - DNA, 994 bp, Homo Sapiens
  misc_feature (82)..(90): n is a, c, g, or t
  misc_feature (788)..(813): n is a, c, g, or t
  misc_feature (839)..(898): n is a, c, g, or t
ttgtttgctccccgggaacttttggccaattttcttcaagtttccgggtggaacgccaagaaaaggatcccgttttgccctnnnnnnnnnccaccatttgccccggtttggggaagcggctttccggagtagcccggggttcccccagaaaccttggcattccaagaatggggtggtgtaagccagctccccagggtggggggagctgccccccatggtgcctggaggtccggggagtaggaggccagagaggtccagggttctgcagcggccctgtgaaacttgcttctggctgatgtcccgcaggtgcagggggtgggatgtgggctgttgaaatgttcgtagagagagagttgggggacaccgtgggggggctgattggccttgtgcagcgggggctgcggctgggggtgctgccctgctcccgaggggggtgggtaatgcatgagcagattgacggcggagtagacggtctctttgtacatgccgctggtgcactccggggccttcaggccgtcctccaggggctctggaagtttgtccgggaagagtctctgcgcagcgtgttcccgcccgagagcctcggcctcgccgcgggccccggcgccggcccccgggacccccgggatccctgcgccgccggccgcgccctcggactcgttcacgagcgacgacttgagctcggccaggtcgcgctcgggaccggcggcgctgtcgcggctcttgtcgtcctgctcctcgccttcatcctggaaggccagcagctcgtccggcgcgcggaggtcgtnnnnnnnnnnnnnnnnnnnnnnnnnngagtccagctgcggcatggtgcgctnnnnnnnnnnnnnnnnnnnnnnnnnnnnnnnnnnnnnnnnnnnnnnnnnnnnnnnnnnnngggcggcgagcccggagtccgaacctccgagctcggatcgcggcgggcggagcgcgggctgaccctcgtgccgaattcgccacccaggcctcgctt

SEQ ID NO: 318791 - DNA, 1476 bp, Homo Sapiens
  misc_feature (110)..(110): n is a, c, g, or t
  misc_feature (303)..(303): n is a, c, g, or t
  misc_feature (309)..(345): n is a, c, g, or t
  misc_feature (379)..(379): n is a, c, g, or t
  misc_feature (383)..(383): n is a, c, g, or t
  misc_feature (633)..(633): n is a, c, g, or t
tccgggcccggccgtctcagagaaagtttttcccatcggaggggcgggagccgccgcgggccttttggaaaggaagtggggacggaacaggaggcgagagccgccgcggngcccgcggagtgcatggtgcccggcgcctcggctgcctggcaggaggacctcggggcggggtcgagctgagcccagctccttctcgcctcagccgcgccagaaaccgccttcccggacggccgcgggggtcccagctcctcagctcgccatgtcccggctgctgccgctgctgaggagccggaccgcgcgcanctgagnnnnnnnnnnnnnnnnnnnnnnnnnnnnnnnnnnnnntcctggtgctgctgcgggcgggggctgctggcgntcgngcctccccggcggcttgccgggcggccccaggcggctgggcacgcaccccaagaaggagcccatggaggcgctgaacacggcgcagggcgcgcgcgacttcatctacagcctgcactccacggagaggagctgcctgctcaaagagctgctatctcttcgagtttattgccattgcccaagaaaaattggaagctccaccacccaccccaggacagctgagatatgtattcatccacaatgcgatacctntcatagggtttggctttttggataatgcaattatgattgttgctggaacccatattgaaatgtctattggaattattttgggaatttcaactatggcagctgctgctttgggaaatcttgtgtcagatctagctggactcggacttgcaggctacgttgaagcattggcttccaggttaggcctgtcaattcctgatctcacaccaaagcaagttgacatgtggcaaacacgtcttagtacacatttgggcaaagctgttggggtgactattggctgcattctaggaatgtttcctttaattttctttggaggaggtgaagaagatgaaaaactggaaacgaaaagttaatcctcttagaatacctataaaaagatgtaaactaatgtacctcagtaattaaatatgctgtcacaacatttaggaattaagacagtaacagtatagatatgggatcaaataatttagcatgtattatggaaaacactaacttattgtggcttgatcttcttaggacatcttttttaaaaagctgtttagtatcattttgtgtatattgttgaaatgctttttcatcaatagcagtcaacattttatcctttctttttatattcataatgttatttaagtgtcattgatgtactgtattgacttggggtttgcttatttgttacttaacatgtgtacatgcatgaaagcatttttcgttgttccctgatagttacatttcaaccttgggatttttccaaattacttaagatgtttaatgtcagttaaagatttttttaccctctttttgggaacctcaattttgtactgttatgcagtaaacatttataataat

SEQ ID NO: 318792 - DNA, 1765 bp, Homo Sapiens
  misc_feature (31)..(31): n is a, c, g, or t
  misc_feature (50)..(50): n is a, c, g, or t
  misc_feature (63)..(63): n is a, c, g, or t
  misc_feature (76)..(76): n is a, c, g, or t
  misc_feature (113)..(113): n is a, c, g, or t
  misc_feature (133)..(133): n is a, c, g, or t
  misc_feature (157)..(157): n is a, c, g, or t
aaaaccctctggccaaaccccttaactcttncccccttacccccttctgnaaaaaccttaaangggaaattaaatnacaaaattttaacaaaaataaaaaggggtcccaaaanaatttcccctggggccgggnccctgctcttgccccctaacccanggccctgggtcccggttggaattggaggggccccttggaatgcaaggccgccccgcccgtcacctcacatcattccctagctgcagcagcgtgttggcataaggccatgggcttgacgttgggatgaggcactgctgtgaactggtggaactgaggccgtaggtcagagccctggaggtggatgtaggaggctttgttccccatctggtcgcagtagttgggggcagagaagacggtgacacagcggcctccgtgagccacctcgtagccctcggccttgacttcgtggctgcggatgatatagtccaggttgttctcttccaagaaggccttggtgacgtcaggcccaaactgacagctcacgccccgcttgctgatcgagcgcccgttctgtggctgtggatctgaccagagcaggtcacacatgggccctgaatctgggggttgtcgattccgctcaattttccggatgtcatccagggtgacaccgtcttcactgaacaggcctccgtgcatgatcagcactttgccgttgatgcactgggccaacgggagccactcgaacacctcgctaaagagctcgtacatctgggctgtgtacttggccttcacctcaccctcgaaaccgtagatctggttcatgttgtctgtctcgtggttgcctcgaaggaggtgaaagtgatctgggtacaggagcttgaagccgaaaagggtgaggatcacttctacagagaaggagcctcggtccacaaagtcaccattaaatatataggggttggtctccgagggtaaaccgttgagctcgaatatgttgaggaggtcatagaactggccatgggtgtccccacatactgtaatcttctctgtctctttgagtgtggtttccacgagcgtgctcagcttggagaggacctctttgacctgtaccagaatctggtaggcacatttccggtgcagtttcttctggtccttgtaccactgcatgagctccttcatgaaactgattgtcactttgccgtcttcaagcttgggtccgctgtactcatcctcaatggtcatgctctcgatgtccagcgagtccaccacggagcgcttgtgctcgtcgcccgcgatggcccgctcaaaggccttctgcttcacgatcttgttgcactcctggtatttcattttggcatccttgtcatggggcttcaccttgaccaccgtctcgtagtctcgcagcgcggcccggaacttgcccagtgccatgttgctggcagcccggcggtaataacccttgatgtacttcttgtccagctcaatggcccgcgtggcgtctcccagcgcgtagccatagcactcagtgcgcaggtaggccaggctgcggttgccatagtagatggcattgctggggttcagctcgatggcctggctgtagaacttgatggcgttctcgtagtccttggctttgaagtagtcattggcctgagtcttgagctcctctgcccgcttcagagctccatcagccgggggttcgtcccgggggggctcagcacactcagtcctctcgccctccgccatcgccatgccgccctcgtgccgaattcgccacccaggcctcgcttcctt

SEQ ID NO: 318793 - DNA, 937 bp, Homo Sapiens
gcttcagggccagggaaggtctttctgtttttgaccgccagcacggggattccttcatggccccaccagtaacccccaggtgggcgggaggcgtttcctgggctcggaggccaggaccaaaaggaggaagggtggcggtgaccaggcttgcactgagcctccgcagcaggctgccataacccccataggcagttgggcttccagactggtttccggcagaggaggatgtggcattcccgacagaggggacactctccagggtcacagggggccccatggttgtggcattcctgagagaggtgacactctccagggtcacagggggccccatggttgtggcatccccttccgggaggatctcattggttccacagccgagctcgtcgctggagtcgggacagtctgggtggccgtcgcagcgccacgtgagtggaatgcagtcatcgctcagcgtgcaacggagctcgcctgctaggcaggccaggcggctgcagttgcgcagtttcttgtcagttcccccagagcagtcactgacgccggtgcaggggcaggggaggccagggggcggtgggcattgccctttctgggtacatggctcaatcctgcactcctcctcatcgctgccatcgctgcagtccaagtccctgtcgcagcgccaggtgaggggcacgcataagccactggtgcggcactggaacttggtgggtgggcacgagcctgagctggggcctgcggcctgggcagaggtcggggtggaaagcgggctcgcggcggcctccaggcctagtccgaggccgagcagcagcagcagcgccaggcccagagcccctgttcgccacgctccaacctgcgccatccaaccgccgctcatgctgtccccacagcggcgccggccacgcgctgtccagaccgctctcttatccctgcgcacgcgcac

SEQ ID NO: 318794 - DNA, 1077 bp, Homo Sapiens
gaggatgtgaagcaactttaatcgccaccctcagacggggcagcaggagtgtcttaagcacagggccgttctaccccctgggagctgcctggggccagcccctcagttctggctgtggcaggttccccatcctagctccccggatctccatagggagtgtccagggaccctcaatctccagggccacttctgcaggagctcgggttcgaggttccacgtggccagaagagctcaggtctctgagggctggtgtgcccgggtacccatccgcatcactgctctcctcctgtccggctacgcccagggctgagtgacggtggtggcaagtgcttgtcctcagggcagcgaggtcttctgttctgacagcagcagggactccttcatggccaccagtaaccccagtgggcggaggcgctcctgggctcggagccaggacaaaaggaggagggtggcggtgaccaggcttgcactgagcaccgcagcagctgcaataaccccataggcagttgggcttccagactggtctccggcagaggaggatgtggcattcccgacagaggggacactctccagggtcacagggggccccatggttgtggcattcctgagagaggtgacactctccagggtcacagggggccccatggttgtggcatccccttccgggaggatctcattggttccacagccgagctcgtcgctggagtcgggacagtctgggtggccgtcgcagcgccacgtgagtggaatgcagtcatcgctcagcgtgcaacggagctcgcctgctaggcaggccaggcggtgcactcctcctcatcgctgccatcgctgcagtccaagtccctgtcgcagcgccaggtgaggggcacgcataagccactggtgcggcactggaacttggtgggtgggcacgagcctgagctggggcctgcggcctgggcagaggtcggggtggaaagcgggctcgcggcggcctccaggcctagtccgaggccgagcagcagcagcagcgccaggcccagagcccctgttcgccacgctccaacctgcgatcccggaaattccggaccggtccag

SEQ ID NO: 318795 - DNA, 924 bp, Homo Sapiens
ttctttctgttttgtgaacagccaggcaggggatccctttccatggcccccccagtaaccccccagtgggccggaggcgctcctgggcttcggagccaggacaaaaggaggaggggtggcggtgaccaggcttgcactgagcaccgcagcagctgcaataaccccataggcagttgggcttccagactggtctccggcagaggaggatgtggcattcccgacagaggggacactctccagggtcacagggggccccatggttgtggcattcctgagagaggtgacactctccagggtcacagggggccccatggttgtggcatccccttccgggaggatctcattggttccacagccgagctcgtcgctggagtcgggacagtctgggtggccgtcgcagcgccacgtgagtggaatgcagtcatcgctcagcgtgcaacggagctcgcctgctaggcaggccaggcggctgcagttgcgcagtttcttgtcagttcccccagagcagtcactgacgccggtgcaggggcaggggaggccagggggcggtgggcattgccctttctgggtacatggctcaatcctgcactcctcctcatcgctgccatcgctgcagtccaagtccctgtcgcagcgccaggtgaggggcacgcataagccactggtgcggcactggaacttggtgggtgggcacgagcctgagctggggcctgcggcctgggcagaggtcggggtggaaagcgggctcgcggcggcctccaggcctagtccgaggccgagcagcagcagcagcgccaggcccagagcccctgttcgccacgctccaacctgcgccatccaaccgccgctcatgctgtccccacagcggcgccggccacgcgctgtccagaccgctcatcccgggaatccggaccggtccagcct

SEQ ID NO: 318796 - DNA, 990 bp, Homo Sapiens
  misc_feature (841)..(861): n is a, c, g, or t
ggtatcggtccggaatgtcgggatatcgtcgacccacgcgtcgggacttgaagtttcagaatattgttgtggaaatcttaattgaaaaccatgaaaagatttttcggacgccgcccgatactacattccctgagcccacctgcctgtcagcatcacccccaaatgcgccaccaaggcagtcgaagagacaaggccagagaaccaagaggcccgtggccgtctacaatctttgtctggagctggaagatggtgacaatccttacccttccaaggaggacacccctaccagcagtctggactcactttcctccccgtctcccgtgactacagctgtccctgggcctcctggaccagacaaaaaccaccttctggcagatggagggagctttggagactgggcatccactatcccaggccagacccgatcgtctatggtccagtggcttaacccacagtctccaaccacaacaagctccaactcagctgtgacacctctttcacccgggtcgtcccctttccccttttctcctcctgctactgtagcggacaagccacctgaaagcatccgcagtcggaaggctcgagccgtgtatccgtgtgaaagcagaacacagctcggaattatcttttgaaataggagcaatttttgaggatgtacaaacctccagggaacctggtggtagaaggactctgaaaggcagaggggggctgatccacagaactacgtaagtgtgtactctggctcagaagcctgtaacctggaccagacctgctggggcaaaggtgtccctccgaggcctgggtgggcccaggtgcccactgtgggtcaccacacgcagcnnnnnnnnnnnnnnnnnnnnnaccccaacagtgtggttccggggtgccgcagagggctcgaagaggggaaacacacaaaaaggggggcgtgtctacagaaccagtcttctcgaaagaaaaagtgcgaagaagagaaaacgccttgataca

SEQ ID NO: 318797 - DNA, 1228 bp, Homo Sapiens
  misc_feature (48)..(50): n is a, c, g, or t
  misc_feature (69)..(69): n is a, c, g, or t
  misc_feature (78)..(78): n is a, c, g, or t
  misc_feature (86)..(88): n is a, c, g, or t
  misc_feature (97)..(98): n is a, c, g, or t
  misc_feature (224)..(224): n is a, c, g, or t
  misc_feature (231)..(231): n is a, c, g, or t
  misc_feature (462)..(462): n is a, c, g, or t
  misc_feature (500)..(500): n is a, c, g, or t
  misc_feature (529)..(529): n is a, c, g, or t
  misc_feature (554)..(554): n is a, c, g, or t
  misc_feature (584)..(584): n is a, c, g, or t
  misc_feature (599)..(599): n is a, c, g, or t
  misc_feature (620)..(620): n is a, c, g, or t
  misc_feature (669)..(669): n is a, c, g, or t
  misc_feature (698)..(698): n is a, c, g, or t
  misc_feature (1084)..(1084): n is a, c, g, or t
  misc_feature (1140)..(1140): n is a, c, g, or t
ttatttcatcagcataaaacctgcagacagaggtcacacagttgttcnnncctggtgtgatagaacccncgcggcaanacaggcannntcgcagctnnctggagcagtctcacaccccttgtggcaccggcgacagcgtcttgctgctgtgtccccaaagtagcccaaggggcacacactcacgcacttcctgctggtcttgacactcccccaggctgaagtgnacgcagntcaagcactggtctgcattggggccatcacagcctttgtcaccacactccggatggcacacactggtctgtaaaatattagcagagcctggggtggattgagctgtgtaatcttcctcatcttcaggaacttccacctgggagggtgacagggcagccttgggtggctccagctctggggctgagagctccagcatccgcgagcgggactgatgggcactgaaggtgtggnacgggtgctctgctgtgccatacagtatgaggctccantctttcaacttcccttgcttctccgggtngcggacctgggatggcagatcttgnatttccaaggtccactgcccttcagccttntctccccagcagtgnacagtcatgaattcccagttngtaaacccttcattggaaagatccagcaacctctttgccagaagttganacttggttcccgagggagaaaccaggtanatctggaggtctcctcggcgtgggtgtgagatggaggtgcgaaccaccacgtgctccaagtagaccacccgctggtccgagtgctccgcgcaggcgctggtcagggccgtagtccgcagcacctgcactaaggggatgctcctgggtctcttgtccgaggcggccacacacatgtgctgccgatggcactgctgtccacttctttgcctccacaacgagagcttactgcgtccaccaaaccaaatccatagaaatggctaactttatgacccgcgccgttcactttccagtcgctcgctttcaggtgggccggccgggatgtcttcactagcaggtgctggacgtccctccaggttaactggctgtttgcttctagagccaaggcnatgatgcccgccaccatgggggcagagactgaggtcccagtgtggccatcggtacnagctgacgcagatccgtggtgacgatttttcgctcataaaaggccccactgctgtaggtggtggccagggtggaggcacactcttcca

SEQ ID NO: 318798 - DNA, 1180 bp, Homo Sapiens
  misc_feature (16)..(16): n is a, c, g, or t
  misc_feature (145)..(145): n is a, c, g, or t
  misc_feature (579)..(579): n is a, c, g, or t
  misc_feature (632)..(632): n is a, c, g, or t
  misc_feature (720)..(720): n is a, c, g, or t
  misc_feature (780)..(780): n is a, c, g, or t
  misc_feature (1092)..(1092): n is a, c, g, or t
  misc_feature (1114)..(1114): n is a, c, g, or t
  misc_feature (1168)..(1168): n is a, c, g, or t
ctcagggaagcgagcncgggcgccggcgggcggccgtcgcgtctgacagaccactgcagaccacgggccgaggcccagcgcccgtccgcagcgcgccggcatggcggcgacaaggagccccacgcgggcaagggagcgggagcgntctggcgctcccgccgcaggaagtgaccaagttcactcctggatgctagctacaagccaagccttagacactgtctggagaatggcaaaaggctttgtgatgttggcagtttcatttctggtggctgccatctgctacttccggaggctacatttatattcagggcacaagctgaaatggtggattggatatctgcagagaaaattcaaaaggaacctcagtgtggaggcagaggttgatttactcagttattgtgcaagagaatggaaaggagagacaccccgtaacaagctgatgaggaaggcttatgaggagctattttggcggcatcacattaaatgtgttcgacaagtaaggagagataactatgatgctctcagatcagtgttatttcagatattcagccagggcatctcttttccatcatggatganagaaaaggacattgttaagcttcctgaaaaactgctgttttcacaaggttgtnattggattcagcagtacagttttggtcctgagaagtatacaggctcgaatgtgtttggaaaactacggaaatatgtggaattattganaacacagtggactgaatttaatggcattagagattatcacaagagaggaagtatgtccanacccttttttcagatgccattctggaatataaactttatgaagctttaaagttcatcatgctgtatcaagtcactgaagtttatgaacaaatgaagactaaaaaggtcattcccagtctttttagactcctgttttccagggagacatcctctgatcctttgagcttcatgatgaatcacctgaattctgtagggcgacacatgtgggactaggagcagattgatatgtttatacttgggatactcccttgaagtaaagattaaagtgttcagactgttcaagtttaactccaggggactttggaagtctgncttaccccagagggagcctctncggggactgggccgggggatctcccctgctggacccgaggaacggacccgccantacccacatttc

SEQ ID NO: 318799 - DNA, 1522 bp, Homo Sapiens
  misc_feature (279)..(288): n is a, c, g, or t
gaaccttcaagtggcttttattggtagagcctagaaaaagtgtcatagccatttctgagcaaaaatctgtatcccagtaaggtattcagtgttatgtttaacacactactgaaccagaaagtttaagttcctgacacagacgcaaccaggtcactaagaggctccaaaatcaacaagttaagccctgctgctctgttaagatctgaaaggcaagacacagtcctggatgtgtgcccttgttacggggtgactaaaaaggcaggcaacagtatcaaggannnnnnnnnnaggtggactcctgtgcactcccacattgcaaggatgtgcttcagcagcaacactcaagtctcctcttcattctgtatctgcctaagcaatctgcttaggacacgtgtggtcggtcataaaacatgatcatcaggatggtagagttcactcatcaggcggtagatgtaggaaggtgcattcccaccaatgttggagataaagagggtaatgagctctgggggaacgtagtcaaacacagggcaatgcacgctgaccttctccagaatgtccccttctgtgaatggcaggacttcttcaggagccacaaacttatgaaatgagtcttcttcattggggaactgtggagaaagtttgaacataggtgcacagacgatgagtggggtggaatggtgttttgctgccagtgccagagtgtgagttcctgtcacagctctcagggccccattggccaggatggtcttcgtgccaatgatcaccttgttgactcttgacataacggcaaaaatggcagcatcagtcatgacagttgtctcaatacctgctttggacaaattcacagccatttcatgaccctggcagaaaggagcacactctgctacaatgacatggaatttcctctttcgggcagcctctttgaggaaggcctctactgttcgggagaagccaatggtcatgatcacctcattggagtgaatgtgctccagagcacatgggctgcaatgttctccattgtcccttccagctccactagcagctcattaatcgcctcaatgatgttggactggagttgggcataatggaagctgaaatcctcgtttaggcctccggatgtcaacagtttgtgcagggactcctgctgatcactctcgtcgctgcgtccatggagtctgccatactcctcccggataatcttagagcaactactcacagacacacatgttagcccacggtaggtctcggagggctgagcggccgtcatcctcctgccctctctgcggatcagctccatcagctcccccgcgttgctccagcggtggtccgtgatgatctggcgcagcaaccctagggtctcccgagccatttcctcaggagctgcgcggcccaccacccacgacttcagggtctccacgaagctctcgatcctctctgaacaactccgagcccttcgctgcggatcccggcatctttaaggtagctgccttcagccttcaccggcggaatccacacctgccag

SEQ ID NO: 318800 - DNA, 1288 bp, Homo Sapiens
ttcacacgggcaccaggacatatgaattactaccacagctccgggggatgtagcgaaggccctccgccatctctcctgccatctttcgagggcagccctggaggctctggtaggtgaacatggccacccccaggcagaagaggaggccaaggaaggccagcagccccaccgcctgcctccgggtggcagcctgggcgtcagggacaggagtgataaggacgcccagcctctgggggtccatggtggcatggatgggttcctcagccttaggggtccagctgcctgaagccactggctccctgctgggggtcccttctgaggagacagggaccacagagacgtgggccatgctgccaggcccccagtcctggaaggcatccgtgtgcgctggcacgggacccatctcctcccgctccagagagttctctggcctggggctctgtccctgaccccacacacgctggccttcagacggagcattctcctctggggctggggaggacgcattggaggcctgggttggagggtttctgggtggacggtgcctcataggtcttttgcctcagcccagaggctgggcccaggttggtggggagcagacctctgccacgtggcgccagtggagacgggaggcactcggaaaagctccgtgcccacaggccttccatcctgagcctttggcgtcggggggagcctggtccctgaggaaccagtcacgcccgtcggcagctctggggaggtccccagggccctctgtgcttcctgggaagaaggagtcggctccaggctactgctttcgcctgtggcttcgggctccaggaccacagactcgtccattcccccggcggcaggggtggtcctgggcttcacctcgccgatctgcttctcgaaggtgccgccatttcgagttagggcagcagcctggcggtccagatgctgcatcgcgtccttgacccattgctccttcgggtcggcacagaacagcctgtgctgtctcgtctccaagatgattgcgcgtttgccgcatgatgcctggttctgttgatagtggatgagcaaagctacaggtatctttgatgtcatcttgctgcacgtgatgttgcatttcgtcacaccgtggtgctgtccagccagcaggacagtcagatggcagaaggtggccaagcggagcagccacgacagagatatcggagccatggctgagggtgggcaagagtcccggcgggggccaggcaggcggctagagccaggcggcagagctcagcctcgtgcccgaattcgccaccca

SEQ ID NO: 318801 - DNA, 906 bp, Homo Sapiens
  misc_feature (48)..(48): n is a, c, g, or t
  misc_feature (695)..(695): n is a, c, g, or t
  misc_feature (741)..(741): n is a, c, g, or t
cccggcctgccttaccctgcccccaccttacccctcctccggcttttntcctcccaacccggggaggtccttcccggtggccgccctgacgaggtctgagcacctaggcggaggcggcgcaggctttttgtagtgaggtttgcgcctgcgcagcgcgcctgcctccgccatgcacgggggtggccccccctcgggggacagcgcatgcccgctgcgcaccatcaagagagtccagttcggagtcctgagtccggatgaactgaagcgaatgtctgtgacggagggtggcatcaaatacccagagacgactgagggaggccgccccaagcttggggggctgatggacccgaggcagggggtgattgagcggactggccgctgccaaacatgtgcaggaaacatgacagagtgtcctggccactttggccacattgaactggccaagcctgtgtttcacgtgggcttcctggtgaagacaatgaaagttttgcgctgtgtctgcttcttctgctccaaactgcttgtggactctaacaacccaaagatcaaggatatcctggctaagtccaagggacagcccaagaagcggctcacacatgtctacgacctttgcaggggcaaaaacatatgcgagggtggagaggagatggacaacaaagttcgtgtggaacaacctgagggtgacgaggatctgnaccaagaaaaggccatgggtgctgtgggcggtaccagccccagatnccgcgttctggcctagagctgtatgcgggatggaagcacgttaaatgagactcttcagagaaagagatcctgctgagttcagagcgagtgcttgagatcttcaacgcattttaaatgaggggggttttgtgcctgggcatgaaccccccgttttcacggccagag

SEQ ID NO: 318802 - DNA, 1539 bp, Homo Sapiens
  misc_feature (16)..(16): n is a, c, g, or t
  misc_feature (1486)..(1486): n is a, c, g, or t
tctcggttaatttttntgtttgtttttcatgtttgtacttcagacattctagaagtgcttaggtgataacatttacccatcaatttgcattgctggctcaaattctgaagtgaacaactccttgtataatggaggaaaatgaagtcgcacaatgtctgggtatattgctttaaatgccattagcttttctgtatgtcgtccacataaggctcttaatgtagacaccttgcatattaactttgttagtattccatcttctcggtgattcttctgtaggacgtgttgaagagctagctgaattttctgttgcagtttttcaatttttaccttttcttgcagccatgagcgatctgctgacatcagtacaaatgcagaaaataatgcaatttcatcttcagtcaggtgcatagaacataaactctttccaaattcaaacacaaagctaataaagtcttcacaacctaaggatttgaagacgtcggggctggcatacttcccatcaaagtacacggtgttgttctgagagtcaaaggcacggcacattctgataaacaccacctctagagaacctgcttttagaagcacaatttgatcattttgacacagttccataaatccatcaatgcgtttggcaaactccaccacatactgtatagcttctgtaattttgatggcacacaattgccacatcacctcccgctgcttgttttgatagttctcaatttcttcctgtaaaaaggtctgccacgttatctgctggagctcttctctcaagtattggcaggtttccagatgcgatttagatatattctgtgcaaggtgttctaattctgccatggacacagttggggaagtctcgccgttggtgaacgaacagtagggaaagaagcctgatgctggtgtgtagtcacatattggttctggtttgattccattgatatcaagacctgactggtctggggaaggctgtatgtccaggtagaagctgctgacggcggagtctgccttactcccctcaggggtgtgcccgtcaatgtagttactgaggtcgtcgtgaagttccgtcagcccgttggccgagatgttgtaggtgggcgtcagcggctcagcctctccaggctgctgctggtggtcgcgctgctgctgctgcatccggtgtttctgtacttctgcatacaagctgtctctctgcttttttgacattcggccaaattttacagcatctcgagacatccctacggcaaggcatttctgtaatcgacagtgttggcagcggtttctactggttcgatcaatcaaacagttcttctgacgaggacaggagtaggtggcattgctttgctgacttctcctgaaaaagcccttgcagccttcacatgtaatgacaccataatggattcctgatgatttgtctccacagatcttgcatggaataatttcaatattgagcttttatcgctgcgatcacaaaatacatcatttaagncgcggtgcggagagcgcagggagagcggatggtccgaccccggagccccctct

SEQ ID NO: 318803 - DNA, 550 bp, Homo Sapiens
tcaccttaggtataaagcaatccttggaatataactaaagtaaaccactaatgaagttaatgtagccatttcctgaacttacagttttctgcagaattcaaagactgcttccgttggttttgccccatttctaatgctgagaggtcaatgcatgtattggataaaccatgggaaacagcagagggtcaaaagcaagggggcagggcagaaaattaagtggcccaaatggtaaaggtgaattgcatcatttagcagaactcattagaggaaagtcagacataccccttttacttcaaagggcatgaatagagcatcccaggagaagcatgcatgccattgcctaattctgccctgtacacagttggggaagttctcgccattggtgtacgagcagtagggaaagaagcctgttgctggtgtgtagtcacatattggttctggtttgattccattgatatcaagacctgactggtctggggaaggctgtatgtccaggtagaagctgctgacggcggagtctgccttactcccctcagggtgttgcccgtca

SEQ ID NO: 318804 - DNA, 2733 bp, Homo Sapiens
  misc_feature (1523)..(1541): n is a, c, g, or t
  misc_feature (1860)..(1860): n is a, c, g, or t
  misc_feature (1896)..(1896): n is a, c, g, or t
ttttgctttagtttgccttttattttaccaaaaataacaacaataaagtcttccctctgtttcataaaaataaattttccaaccctccccctatcccagaaatcagcccttgccacagcctagaatccatcatgcaagtcacagcactctgggaaaagctcctactaccctcgctccacagcctctggcaaagctgccaggccactctggaggcggcagaggcagaagtcccaggcccagctggctgggcccaagagctccatctgtttccccaaagtacaggcagcttctaggccattgagtggggcatgatattggatgcttggctcaggaaacaaccccagccaacccaaggggcagtgggacatgttggcctcaggttagaaattattgctcaaagcagaaacagttgtgtcctagagagggtctgttaaaccctctttccatgtgtatctctatgtagcaattgatgggccctgcggtcaggatccctggtttctccagctccatgaatgcctccctgtgaggccctggacagtttctccctcttcttctcctggcttcagtttccccgtatgtacattgagacagtaagactggatgattctccaggttccctctggctttccattctggcatccccagagtggaggctctgggagggcagaaccctgttcctgcctcagtttccccacctgtgggtctgcgtatagggctgggtatggaggtactgagtaatggaagtgctgcgtgaacatcccagtctccctgtggatagctgtgctgtgagatccaactggctggaatgtgtcagggatggctgggaaggaggcaggtacttttaggatggaggatctccatgcctggaagagtccattcaccaactacatcctcaatgtgctgggatgggagacaagactccaaagttcccaattcaagttccacaagctccttggacggggagattattttgtgctgggcttcagatccgaggagccaggtctgtagattctgggagctagagtggagtatatgattcccagatgaagggccaggggacctttgtgtacttgagggatcatctccaacccccaggaggacacgtataatacaggccttcttggaggcagagggatgagtaaaatgtcagctcatgggcatctctgggtaagagaatcagagcctgtgtctgcagtgggtcggtttaggaactcaaggcaaggctcctcttcctaccttcccccagctctccaggactcatgctgatggaagagtgtagcctggaaggtttgaatgtagagcaacatctacaaccacatttttgtgcacttacacacatggtcagatacactgagtggggacgctgagctgtcatcactcctacagtggacatggtctgatggtcccatggtctgatggtcccaatctatttatccatccatccgacatttatggaaggcctactatgtgccaaggaggggtaaggcagctagctctcacagacacaccccacagtgaaaatnnnnnnnnnnnnnnnnnnncccggtatttgtgctcactcacaggcagactgctcactttcttgcacctttcttgccatcacctcggccacacccacattccttcaataggcttgggaaccagcatggaagggtcaagtgtcatagaagaaaccccctagcctaccctactcccagacttcatgccagaggtttaactccacttcccttctgtttgcctgcctagatgctctccccttctccatccacaagcggtcaggccgacaggtaggcagactcctgagaaccagaagtccagaggctttgggtgtgtggagtgattccagtgccttcagattcnttcaggctcctggggtcccctctgccagccaccctntgttcagatcgtccatctgatggccaaaaaagtccagacctgggctcagtggcagatccgctctgtcatctccctcagtggcttcagctcccgctggtccaccagactgaactcgcggatgaagtagtagaagtgcttgtagcaggtgttgacgtgcgcctctgcccccatgctgaggatgctatcgaagtggtggatgtagacatggacaaagactcggaagaggcgggtcaggatcttggtgcagacctgctggaagttcttagggaagggaactccaacacgcgtgggaaagacctcttcgtcgttgatgaggccttcgatccagtccatgagcaacgccatatagcgcggcgcagagagcttggcgggccgccggtactggcgctcgtcctgccagcggtactcgtagcggggcccgccggccatgaccgggcagctggtctcactgcagcgctccgccatagtgccgtagatgaggttgatgcggttgaagaagtccaccacgtgcacggcgatccagtcgtcgatgttctccccgggtggtagcctcaccacactgcgcaggtccaggcccgacttgagagaggcctgtgccttcttgtacagctcaaagcgctgtgtgcccggctcaaagcgcttccgcggccggaacgtcttgtccttggcgaacacctgcttcaggcacagggccatggccagctgggcctggggctgctgtccaggggctcggacctgaggataccgggtcctcttctggccgtggggtcacattcccagccacaggatcgcctttctcctgcaggtcccgcagtgcctgttctctctcctgtcagc

SEQ ID NO: 318805 - DNA, 1215 bp, Homo Sapiens
atcagcccaaaggtaggctcaggctccgacggtggcccgcgggggtcacgaggcttcgtagtggaggaacgggtttggcgtgtgggacgcagctgcctctgtactggggagtcacggagtgccgggctccagggacatggcggcggcctctgcggtgtcggtgctgctggtggcggcggagaggaaccggtggcatcgtctcccgagcctgctcctgccgccgaggacatgggtgtggaggcaaagaaccatgaagtacacaacagccacaggaagaaacattaccaaggtcctcattgcaaacagaggagaaattgcctgcagtgtgatgcgcacagcctaaaaactgggtgtacagactgtggcggtttatagtgaggctgacagaaattccatgcatgtagatatggcagatgaagcatattccatcggccccgctccctcccagcagagctacctatctatggagaaaatcattcaagtggccaagacctctgctgcacaggctatccatccaggatgcggttttctttcagaaaacatggaatttgctgaactttgtaagcaagaaggaattatttttataggccctcctccatctgcaattagagacatgggtataaagagcacatccaaatccataatggctgctgctggagtacctgttgtggagggttatcatggtgaggaccaatcagaccagtgcctgaaggaacacgccaggagaattggctatcctgtcatgattaaagccgtccggggtggaggaggaaaaggaatgaggattgttagatcagaacaagaatttcaagaacagttagagtcagcacggagagaagctaagaagtctttcaatgatgatgctatgctgatcgagaagtttgtagacacaccgaggcatgtagaagtccaggtgtttggtgatcaccatggcaatgctgtgtacttgtttgaaagagactgtagtgtgcagaggcgacatcagaagatcattgaagaggccccagcgcctggtattaaatctgaagtaagaaaaaaagctggagaagctgcagtcagagctgctaaagctgtaaattatgttggagcagggactgtggagtttattatggactcaaacataatttctgtttattgaggatgatacaaggctgccaggggaacaacctgttactgggatgatcacaggaactgacttgtggaggggccgcctta

SEQ ID NO: 318806 - DNA, 2026 bp, Homo Sapiens
  misc_feature (355)..(355): n is a, c, g, or t
  misc_feature (360)..(417): n is a, c, g, or t
  misc_feature (457)..(457): n is a, c, g, or t
  misc_feature (472)..(472): n is a, c, g, or t
  misc_feature (526)..(526): n is a, c, g, or t
  misc_feature (567)..(567): n is a, c, g, or t
  misc_feature (571)..(572): n is a, c, g, or t
  misc_feature (723)..(723): n is a, c, g, or t
ggaagaacagaagcctttatttctggtacggctgggtgggggactggtctcctcccgtcttctgccgggctgcctgggggttgggggcctgctggtgggtgggccggcactaacaggagagggccgcgtgcccaggcccatcccacagaaaagccctccttggccatggtcgggagatgcagccaaaggacagttaggcttcctcccggtggcggcgtgggctgggcagggaaggcttcccggaggaggcatcattgtccactgagaagcaccgtggggcctggccactgcctgtgtgtctgcttggagctgggcacggctgggcccttcaaactctgctgcagccgtgggaggncagcnnnnnnnnnnnnnnnnnnnnnnnnnnnnnnnnnnnnnnnnnnnnnnnnnnnnnnnnnnccacaggcgggacgtgcaggggcccactgggtcactggtnctggttggggggggncagcgtgttgcagcggctgtgcgacatgtcctcgttctcctctcttgccgccgntttcttttcccaccccgagcccagtttctttttctgaaagncagnnccgccgtctcccaccagtggccagcgtggtgtcctggaccccaccccactccggtcagctttctaattttaacacgagacccccacggggctcctctgggctggccccaggtctcctgagccccagggcttcccagcagagccttccccangcagggctgggtcggaccctggggtgcctctgaagaaggagagtggaagtggcttggacccccccaccaagcccaagccaagcgggacccccactccagccccagacaaacagcaggggccggggggagtggccacgcctagactctgtgtctgtctgaggccccctccccttcccacggccacacagcacgccggcacactccaacatgcacgcacagtcctcagagatccccacacacaggctcacacctgcacacgtgcacacgcgggcccagcgcctgggcgctccctcctctgcccgcacactccaacctgcacgcacagacctcagagatcccccctcagacactcacacctgcacacgcgcacacgcgcacacgcgggcccagcgcctgggctgctccctccccctcaggtcgctttggtgctggtccccctccctccccgccgaggccacttccaccctgagagttccagagcctgcagaggaggcggcgggtaccagggttttcctctggggctttggcgccccccacgctgctctcaggagagggaacaatctttggggtgcaggtggcagctggggctcacactgacctgtgtcctcgccagcacacacgccacccccaggcccagcccgaggaggaaggagatcaccgccagggccgcagggagggcagaggctgctggcgggtcagggagggcagaggctgtctgcgggtcagggagggcggagcctgtcggtggggcagggagggcagaggcccttggtggggcgtccgagcatctatgccatccttgggactgttcctctgtcaccaggaccagggtgccggagccgtagacattgacctccgtgatggcctggcaggtgtaggtgccagtgtccgacagctgcaggcggtgcatggtgatagtcaggttgtcctgggaccctgagaagtcgatgcggccccggaaccgtctgtccgtagtgggcaccaccccatcctcgtagtaaatgatgtcttggggctgtggcccgagctgcctcaggtagatcccacgcaggcccccgctggtggagcaggtgatgttgacggaggctcccacggggacagtcgtgcagtggggagactggtgcacctctggggaggacctgggctgtcaccatcagtcttgggcagccagggccccaggcaggccgcgagccagcgccagaagcaggggcagcagcaggagcctcggaggcccggccatgttccccacacccagctctcccagccgggcgagtgcagctgagcctctctgggtctacaggac

SEQ ID NO: 318807 - DNA, 893 bp, Homo Sapiens
  misc_feature (157)..(157): n is a, c, g, or t
  misc_feature (164)..(164): n is a, c, g, or t
  misc_feature (171)..(171): n is a, c, g, or t
  misc_feature (183)..(183): n is a, c, g, or t
  misc_feature (186)..(186): n is a, c, g, or t
  misc_feature (190)..(190): n is a, c, g, or t
  misc_feature (200)..(200): n is a, c, g, or t
  misc_feature (211)..(211): n is a, c, g, or t
  misc_feature (227)..(228): n is a, c, g, or t
  misc_feature (248)..(248): n is a, c, g, or t
  misc_feature (251)..(251): n is a, c, g, or t
  misc_feature (254)..(254): n is a, c, g, or t
  misc_feature (256)..(256): n is a, c, g, or t
  misc_feature (258)..(258): n is a, c, g, or t
  misc_feature (261)..(261): n is a, c, g, or t
  misc_feature (264)..(264): n is a, c, g, or t
  misc_feature (266)..(266): n is a, c, g, or t
  misc_feature (270)..(270): n is a, c, g, or t
  misc_feature (276)..(276): n is a, c, g, or t
  misc_feature (278)..(278): n is a, c, g, or t
  misc_feature (285)..(286): n is a, c, g, or t
  misc_feature (292)..(292): n is a, c, g, or t
  misc_feature (295)..(295): n is a, c, g, or t
  misc_feature (298)..(298): n is a, c, g, or t
  misc_feature (301)..(301): n is a, c, g, or t
  misc_feature (309)..(309): n is a, c, g, or t
  misc_feature (311)..(311): n is a, c, g, or t
  misc_feature (315)..(315): n is a, c, g, or t
  misc_feature (342)..(342): n is a, c, g, or t
  misc_feature (347)..(347): n is a, c, g, or t
  misc_feature (360)..(360): n is a, c, g, or t
  misc_feature (363)..(363): n is a, c, g, or t
  misc_feature (365)..(365): n is a, c, g, or t
  misc_feature (388)..(388): n is a, c, g, or t
  misc_feature (391)..(391): n is a, c, g, or t
  misc_feature (396)..(396): n is a, c, g, or t
  misc_feature (401)..(401): n is a, c, g, or t
  misc_feature (409)..(410): n is a, c, g, or t
  misc_feature (412)..(412): n is a, c, g, or t
  misc_feature (417)..(418): n is a, c, g, or t
  misc_feature (423)..(423): n is a, c, g, or t
  misc_feature (431)..(431): n is a, c, g, or t
  misc_feature (437)..(438): n is a, c, g, or t
  misc_feature (445)..(445): n is a, c, g, or t
  misc_feature (454)..(454): n is a, c, g, or t
  misc_feature (456)..(456): n is a, c, g, or t
  misc_feature (459)..(461): n is a, c, g, or t
  misc_feature (464)..(464): n is a, c, g, or t
  misc_feature (466)..(466): n is a, c, g, or t
  misc_feature (468)..(468): n is a, c, g, or t
  misc_feature (473)..(473): n is a, c, g, or t
  misc_feature (477)..(477): n is a, c, g, or t
  misc_feature (482)..(482): n is a, c, g, or t
  misc_feature (486)..(486): n is a, c, g, or t
  misc_feature (490)..(490): n is a, c, g, or t
  misc_feature (505)..(505): n is a, c, g, or t
  misc_feature (509)..(509): n is a, c, g, or t
  misc_feature (511)..(511): n is a, c, g, or t
  misc_feature (517)..(517): n is a, c, g, or t
  misc_feature (520)..(521): n is a, c, g, or t
  misc_feature (524)..(524): n is a, c, g, or t
  misc_feature (529)..(529): n is a, c, g, or t
  misc_feature (531)..(531): n is a, c, g, or t
  misc_feature (533)..(533): n is a, c, g, or t
  misc_feature (537)..(538): n is a, c, g, or t
  misc_feature (544)..(544): n is a, c, g, or t
  misc_feature (548)..(548): n is a, c, g, or t
  misc_feature (553)..(553): n is a, c, g, or t
  misc_feature (558)..(559): n is a, c, g, or t
  misc_feature (564)..(564): n is a, c, g, or t
  misc_feature (567)..(568): n is a, c, g, or t
  misc_feature (574)..(574): n is a, c, g, or t
  misc_feature (576)..(577): n is a, c, g, or t
  misc_feature (583)..(583): n is a, c, g, or t
  misc_feature (586)..(587): n is a, c, g, or t
  misc_feature (589)..(590): n is a, c, g, or t
  misc_feature (592)..(592): n is a, c, g, or t
  misc_feature (602)..(602): n is a, c, g, or t
  misc_feature (606)..(606): n is a, c, g, or t
  misc_feature (609)..(610): n is a, c, g, or t
  misc_feature (612)..(613): n is a, c, g, or t
  misc_feature (625)..(625): n is a, c, g, or t
  misc_feature (628)..(628): n is a, c, g, or t
  misc_feature (630)..(630): n is a, c, g, or t
  misc_feature (633)..(633): n is a, c, g, or t
  misc_feature (635)..(635): n is a, c, g, or t
  misc_feature (641)..(641): n is a, c, g, or t
  misc_feature (643)..(643): n is a, c, g, or t
  misc_feature (649)..(649): n is a, c, g, or t
  misc_feature (652)..(655): n is a, c, g, or t
  misc_feature (659)..(660): n is a, c, g, or t
  misc_feature (665)..(665): n is a, c, g, or t
  misc_feature (670)..(671): n is a, c, g, or t
  misc_feature (678)..(678): n is a, c, g, or t
  misc_feature (680)..(680): n is a, c, g, or t
  misc_feature (685)..(686): n is a, c, g, or t
  misc_feature (688)..(688): n is a, c, g, or t
  misc_feature (695)..(695): n is a, c, g, or t
  misc_feature (701)..(701): n is a, c, g, or t
  misc_feature (707)..(708): n is a, c, g, or t
  misc_feature (714)..(714): n is a, c, g, or t
  misc_feature (718)..(718): n is a, c, g, or t
  misc_feature (721)..(723): n is a, c, g, or t
  misc_feature (726)..(726): n is a, c, g, or t
  misc_feature (731)..(732): n is a, c, g, or t
  misc_feature (734)..(734): n is a, c, g, or t
  misc_feature (738)..(739): n is a, c, g, or t
  misc_feature (741)..(741): n is a, c, g, or t
  misc_feature (743)..(744): n is a, c, g, or t
  misc_feature (750)..(750): n is a, c, g, or t
  misc_feature (752)..(752): n is a, c, g, or t
  misc_feature (756)..(756): n is a, c, g, or t
  misc_feature (758)..(758): n is a, c, g, or t
  misc_feature (761)..(762): n is a, c, g, or t
  misc_feature (764)..(764): n is a, c, g, or t
  misc_feature (778)..(778): n is a, c, g, or t
  misc_feature (785)..(785): n is a, c, g, or t
  misc_feature (788)..(788): n is a, c, g, or t
  misc_feature (791)..(791): n is a, c, g, or t
  misc_feature (793)..(793): n is a, c, g, or t
  misc_feature (797)..(799): n is a, c, g, or t
  misc_feature (803)..(803): n is a, c, g, or t
  misc_feature (817)..(817): n is a, c, g, or t
  misc_feature (823)..(824): n is a, c, g, or t
  misc_feature (826)..(827): n is a, c, g, or t
  misc_feature (836)..(837): n is a, c, g, or t
  misc_feature (845)..(846): n is a, c, g, or t
  misc_feature (849)..(849): n is a, c, g, or t
  misc_feature (852)..(852): n is a, c, g, or t
  misc_feature (854)..(854): n is a, c, g, or t
  misc_feature (863)..(863): n is a, c, g, or t
  misc_feature (866)..(866): n is a, c, g, or t
  misc_feature (879)..(879): n is a, c, g, or t
  misc_feature (889)..(889): n is a, c, g, or t
acttttgaaaaaatactgtgttttgcaaaaaaagtactttgcttgtaattataaccctccaaaaatattctatttttaaagttatatacaaatgtttagacaaatctgtttgtattattttctatactcagcactctgatttagtgtaatgtctaangcctgantgccccngacatctctacngcnaatnattccctganatttacatagncttaattttggcttgnntatctttcatatttaatgtntcngcnanantanatntnagtntgcccncntcggcgnnttatcnttngtngtntttgccanantgtntttcccaattcattatacttgccgggntttcntaacctccctggngtncnacacaattttaacaactgcctgncgnccccnctctngtataagnngngtccnntaggntctgtggnaccagnnaagccantacagtccncntcnnntgngngnggggntggncagantagntgcncttctatactttggnggcntnctttcnggnnggncttcngngngggnngggggngggngggcnggggnngactntgnncctctncnnttttgngtnngnngngagccggtgncaanggnntnnttcctttgccangangnggncntggcgncnccgggngannnngccnncccgngcaannagggggngngcacnngncgaagcntggccncggtgnncacacnggtnagnnnccnccagnntngaannancnnccccgncngggngncanncnttaatgcttttcanttcttcnttntangntttnnngcgnatgatttcttaaantttagnncnncaaagcatnncgctctcnnagntananttttctccngtngataatctctatntatatagatngagg

SEQ ID NO: 318808 - DNA, 583 bp, Homo Sapiens
ttcattttttaaatatatttaattctcaaacctttaggaaatgtaaaaagagtcacataataataaacacatatcataatgtgaataatatcatacgggctgctataaaggtctgtggtcagcatccctctgaggtaggcattattatcttcattttatggttgaggaaattggggcttgaagaggttaagtaatttcccacaatcacacaagtaggtagtggcacgctagcatcccatttctgttctatgggactgcaaagcccgatgctcacactcattccactataccttgtgccttgagttgaaaaacttacaggagttgtagactttttaaactgacatatgctaatcaagaacgattttaagtattaagagttttctctgcttgattctgtttggaaaggaaaatatacgtcggatgaactgatgatgatgagactatgaactattgattgaaggctgtcttaatcgggactcaggaacattggctgaggcgttatttgtttgacagccttttttcattaaaatcgttatttaaaatttgacatctaacaatatatataatattctttctaaagacc

SEQ ID NO: 318809 - DNA, 1376 bp, Homo Sapiens
  misc_feature (54)..(87): n is a, c, g, or t
  misc_feature (927)..(984): n is a, c, g, or t
caaggctggtacggcccggaatttccgggatatcgtcgacccacgcgtgcgaannnnnnnnnnnnnnnnnnnnnnnnnnnnnnnnnngcattggctgtgcagcccgtgtgaggggccacccctctgtcctaccccagccctggccctcagcctccaggccccagctggacagccacctttgacccagtgcctacagatgccccgaccagcccccgagtctccggggaggaagagctgcacactgggcctccagccccacaggggcccctcagtgtgccccagggcctccccactcagagcctggccagccctcctgcccgtgacgccctgcagctcaggtctcaggaccccacacccccctcagcacctcaggaagccacagaaggcagcaaagtcacggagccctcagccccttgccaggccttggttagcatcggggaccttcaggccaccttccacgggatccgttctgcccccagctcctcggacagtgcaaccagagacccctctacctctgtcccagcctccggggcccaccagcccccccagaccacagaaggggagaagagcccagagcccttggggcttccccaaagccagagtgcccaggccctcacgcctcctccgatacccaatggctctgccccggaagggcctgcatccccaggctcccaatagctgcctggtgcggcagcggcggccaaatcttccgtcctcccgtggatctcccggggtgggggcagggcgggtcccacgatggcccccattgccctcatcaccctgacacccccacattctctcctctggacccccaggaggctggtgccagggagacaggcccaacccacccccatttgcactgagaagagaagttttggagcgttgcctcctagaataaagatacagagagtcaaatagagagaatgnnnnnnnnnnnnnnnnnnnnnnnnnnnnnnnnnnnnnnnnnnnnnnnnnnnnnnnnnntgaggacaccgaactgggctggcggctccaaagcacagccttccctgttccgtcccagcgggagctggtgttaggggtcccaaggttgccacccacgtgcccagctgtcccacgctgcagcgcagacggccacgcccacacccggccttttagctcaggtccaccatgggggacggcccagcgtgggtgggggtgccagagggtcccgagtgggggccgtgcctttgcccagaccctggactttcaaccaggccagtccggctctgggggagcaggggcctccccgggcaacagcccccaggggcccttgagggtcctgaggtcccagccctgttgccaagtgaccttgtccccagctccctcctcccaggctggtgtgagtgtgcgtgcgt

SEQ ID NO: 318810 - DNA, 1006 bp, Homo Sapiens
  misc_feature (6)..(6): n is a, c, g, or t
  misc_feature (12)..(12): n is a, c, g, or t
  misc_feature (28)..(28): n is a, c, g, or t
  misc_feature (30)..(30): n is a, c, g, or t
  misc_feature (36)..(36): n is a, c, g, or t
  misc_feature (43)..(43): n is a, c, g, or t
  misc_feature (48)..(48): n is a, c, g, or t
  misc_feature (53)..(53): n is a, c, g, or t
  misc_feature (81)..(81): n is a, c, g, or t
  misc_feature (108)..(275): n is a, c, g, or t
ttctanggaatnatttggtcatgccccntncttcanaaggcangtcgntcctnttacattcatcctctaccatctttactnttccctctcccctttaaagagacttgnnnnnnnnnnnnnnnnnnnnnnnnnnnnnnnnnnnnnnnnnnnnnnnnnnnnnnnnnnnnnnnnnnnnnnnnnnnnnnnnnnnnnnnnnnnnnnnnnnnnnnnnnnnnnnnnnnnnnnnnnnnnnnnnnnnnnnnnnnnnnnnnnnnnnnnnnnnnnnnnnnnnnnnntgcagttctgtatgatgatttagatttgaatcttgtattgctagttttagaaatttacaagaagagggtcagggaagaagtggtgagtaaagagttaactagccatccaacaagcacaatgacctcttgacaatcttgagcgtggtgtagactgttgggccaagagctgggccgttggggtaggcagttcacatcttcgaagaaatgctcatcaaaccatgaccggtggaaaccaggacaccagtcaccttagcggcaccacttcgagttaggccaaagcactgaacaggccctcttgcagttccctgttcccaggcgggagcccctagcccctctctcctctcttcctcaggcttcttaatgcctcacactcttcctttcattgaaaacccaagagggcccttctgcctagaaggactggcacctaagtcccccgtcgtgtttcaactacttggtcatccatggcgattcaagatggggcagtgtgggttgaaaccccccaccccaccttgtgttgtggggaggtcacccaaacgtcctttgtagctttcaatcctcccaaagtagctgcaaagaggacgtgatgtgaatattaaaagcccgaggctggaggacttgcctccccaactccagtgcggagccacagaacttcaaagcgaaaggaagcacaagcagtagggggaggaggtgtaaatttcccccgcggtcccttggaactgtgaacatttgca

SEQ ID NO: 318811 - DNA, 894 bp, Homo Sapiens
  misc_feature (4)..(4): n is a, c, g, or t
  misc_feature (7)..(7): n is a, c, g, or t
  misc_feature (39)..(39): n is a, c, g, or t
  misc_feature (42)..(42): n is a, c, g, or t
  misc_feature (69)..(69): n is a, c, g, or t
  misc_feature (83)..(83): n is a, c, g, or t
  misc_feature (92)..(92): n is a, c, g, or t
  misc_feature (117)..(117): n is a, c, g, or t
  misc_feature (126)..(126): n is a, c, g, or t
  misc_feature (135)..(135): n is a, c, g, or t
gccncanatagactgcaagtgtgctgggcctgctcctcncgntgccctgccacccagtacacccccacnactacagagcccangcggtgcancacgctggagggcagagacagacanccccggggntcgacttgntctgtgtctactgttagaagttgagtgggaagctgcaggcccgccaggaccactgggtccctacagagcaaaggcctgcgtgttcccaaacagccgttgcccccgtggccgtggtaggtaatccatattggatgtcataaggaccagggggatatttaaagagagaaacagaaaatatatagagatataaaattatattcacagtttatctacagatttttcgtaacaatctttcttttccagtttgatactgtaaatctatcagagcagagccgggggcacgggcacaggtgggagttgggagcaaagcggaggcccgggctgcccgccgtcccccttcatctccccacggactgtaccaggcagctgggccccgcaggacaggccgcagcgggtggccggttctgtcccgtcttggggttcttggtgtccacgtcttgtgggccgtgggcttctacctgcccttggcctgcagtgctttgctggagaagggactccctggtccccagggtggacggagccgctgtcaccgcccagagctgggccggggaagcacggtgtgttctgctttttttttcagattgttgaaatttcattgtcatgatttaatatatggatttttttatttaagaaaaagacgagggactctttgtccccgtggggtttgttttctgtctccgtgcctccggcttcccaaagagatccaggtctttgcggtttcccggggcgggggggaaccccggcccccttatgccggca

SEQ ID NO: 318812 - DNA, 969 bp, Homo Sapiens
  misc_feature (3)..(3): n is a, c, g, or t
  misc_feature (20)..(20): n is a, c, g, or t
  misc_feature (686)..(686): n is a, c, g, or t
  misc_feature (829)..(829): n is a, c, g, or t
  misc_feature (837)..(837): n is a, c, g, or t
  misc_feature (839)..(839): n is a, c, g, or t
  misc_feature (855)..(855): n is a, c, g, or t
  misc_feature (866)..(867): n is a, c, g, or t
  misc_feature (884)..(884): n is a, c, g, or t
  misc_feature (887)..(887): n is a, c, g, or t
  misc_feature (894)..(894): n is a, c, g, or t
  misc_feature (898)..(899): n is a, c, g, or t
  misc_feature (914)..(914): n is a, c, g, or t
  misc_feature (922)..(923): n is a, c, g, or t
  misc_feature (930)..(931): n is a, c, g, or t
  misc_feature (939)..(939): n is a, c, g, or t
  misc_feature (942)..(942): n is a, c, g, or t
  misc_feature (945)..(945): n is a, c, g, or t
  misc_feature (948)..(948): n is a, c, g, or t
  misc_feature (953)..(953): n is a, c, g, or t
  misc_feature (960)..(960): n is a, c, g, or t
  misc_feature (962)..(962): n is a, c, g, or t
cangccccggttttgcagtngtttttgctgacctaggcacatcgcttctgctgaatcgtaatgaaaacattcttgaacagggtatgagttacagatgctttcatgaaacccatttgagagctctgttggcccatgtcctccgtggatgcagcgctcttcccatgggcgcacgatggtcatttactcctggaaaaggacctgaggaagttaatgtctcatctcactttttctgccccatctctggctctactgcttttgtttttatcttgagacaataccacattctgctggagtcccttggggagtcatttttagcggcggggggagggggatatgaggacactggcacgaggaaaacctgctctaactgcattagtttttctagacttttttctattgtggattaagaagttggaaatgcagaaactcttgggaagacaggccatgtgctttcacggtacacaaatggatcttaaaaacatccaccctccagctcatctgttggagaaccgtgaagacaaacagcactataaaaagcatcctatgcagcaactccgcttgatgctgcagctgccagcgacccctctctggaagggcggctgctgagtgctggcatttgctgaggttactgagagccattactgttcgcttttgcacgcctcacagcacctcccaaaaagaaagtnctcagatgctaacgtttggcctctcctccttccctggccgtttccaggcctctgctgtgcgttttgttttacttccctttagaaccgagctggtgcttgtttgggcagccaggaagtgtggggcaccagatgcctaagcccanagagaggngntggatggagaggtgtncccctgcatcnncctgctgctttgtttcntgnttttttntggnntttgcgcatttgcanagagtcannacagggnnagtcaggnctnggnccncttgnaggtagngngtaggtg

SEQ ID NO: 318813 - DNA, 1044 bp, Homo Sapiens
  misc_feature (6)..(6): n is a, c, g, or t
  misc_feature (13)..(13): n is a, c, g, or t
  misc_feature (27)..(28): n is a, c, g, or t
  misc_feature (31)..(31): n is a, c, g, or t
  misc_feature (35)..(35): n is a, c, g, or t
  misc_feature (37)..(37): n is a, c, g, or t
  misc_feature (44)..(44): n is a, c, g, or t
  misc_feature (48)..(48): n is a, c, g, or t
  misc_feature (53)..(53): n is a, c, g, or t
  misc_feature (59)..(60): n is a, c, g, or t
  misc_feature (66)..(66): n is a, c, g, or t
  misc_feature (72)..(72): n is a, c, g, or t
  misc_feature (78)..(80): n is a, c, g, or t
  misc_feature (98)..(98): n is a, c, g, or t
  misc_feature (101)..(101): n is a, c, g, or t
  misc_feature (103)..(103): n is a, c, g, or t
  misc_feature (107)..(108): n is a, c, g, or t
  misc_feature (116)..(116): n is a, c, g, or t
  misc_feature (118)..(118): n is a, c, g, or t
  misc_feature (120)..(120): n is a, c, g, or t
  misc_feature (128)..(128): n is a, c, g, or t
  misc_feature (132)..(135): n is a, c, g, or t
  misc_feature (138)..(138): n is a, c, g, or t
  misc_feature (149)..(149): n is a, c, g, or t
  misc_feature (199)..(200): n is a, c, g, or t
  misc_feature (211)..(211): n is a, c, g, or t
ccttgnctctganaaaacaagggaaannccnaaantnttttcanattnccccncctttnngttccnggaaanactcannnaaaaaacactctccccanganantcgnnaaacccgntntnacggactnagtnnnnctnttaaaattcanatgtggagtccaaaaccccccagttactcagagtgtgaacgtatttggannggtctttaaanaggtgatgaaggttaaatgaagtcactagggtgggccctaatccaaacctcacaggtgtcctcataagtagaggagatgaggacacagacacatggaggaaagaccaacgtggggacacagggagaagatggctgaggggagaggccagaggagaaaccagccctgtccatgtgttgacctgggacttccagcctccagcatggtgagacgatgcatctctggttaagccccatctgtgcagtactttgttatggcagccctactagcacaccagtaggtccattcataaatgccgtatactcgttcttgtgatttccgtaacagtcatgggtgactgccttgtttccggcttaggtctttgtctctgacaatttgcctctgtgacgtggatgggactggaagtccatttggagccctgtcttctccacctagggagagagaccccatgagctcgtcaagctccttctgtgactgatcagagatcccaccgtgagtccagctcctggtcccatgctctggatatatcggtccctggcagcgtggtaaggatttgattttgattatttgcttgagtgcccttctggctttgtttcgtagttggcttctgtttaaccttggtgctatgcgaaattctcaatccacttctcaccctgccctttaaaaatcccttccgatgatacgtattccactgtgatgagaattcagttcattatcccaaaaaatggcaagatttccctgaggacaacttggaactgcaagttgatccctctgaggcacctggaatctccctgtgtccatctacagatccccctcaagatctgttctcttcaaa

SEQ ID NO: 318814 - DNA, 437 bp, Homo Sapiens
caggcccggttttgcagttgtatttgctgacctggcacatcgcttctgctgaatcgtaatgaaaacattcttgaacagggatgagtcacagatgctttcatgaaacccatttgagagcactgttggcccatgtcctccgtggatgcagcactcttcccatgggcgcacgatggtcatttactcctggaaaaggaccggcttaggtctttgtctctgacaatttgcctctgtgacgtggatgggactggaagtcattttggagccctgtcttctccacctagggagagagaccccatgagctcgtcaagctccttctgtgactgatcagagatcccaccgtgagtccagctcctggtcccatgctctggatatatcggtccctggcagcgtggtaaggatttgattttgattatttgcttgagtgcccttctggcttt

SEQ ID NO: 318815 - DNA, 1186 bp, Homo Sapiens
  misc_feature (215)..(266): n is a, c, g, or t
  misc_feature (277)..(309): n is a, c, g, or t
aagacaaaaaggccggaccggggactaaacccctgtaatccccaacacttggcaagcccaagccaggtggattcactttggtcaggagttccagtcccagcctggccaaaaggtcggatccccgtcttctcctaaaaatacaaaaattccgcgaaggtggtgccgggcgcctgtagtcccaaccactcgggaggctgaagcaggaaaagcgcttnnnnnnnnnnnnnnnnnnnnnnnnnnnnnnnnnnnnnnnnnnnnnnnnnnnnagacagtctcnnnnnnnnnnnnnnnnnnnnnnnnnnnnnnnnngagcttcaataacagaatcttctccttccacccgactgtccatcaaacacgtataatcaaatgatgcccactctccacagatgtcttttctggagaaaataatacgctcgttcctctaattagcccatcggtttcaggttcatcactctgctatcttctcctggagtttacacaagcccttcagagtgtaaacaccgatgtggattcaatcccacttccggagagaggatcaaaccaggaatctaatacaactgaaaacggagcctgagccaggtgtatcacgcgatgcactgggctccagaaggattacccctggaatcggcgtctgcacccactcccagccctcgtgctaactgcgtacgcttagcagaatttctctgatccttggacccagctgcgtaaaaataaacttcctctcctgccacgggcgcgaataactgtgttaacatcaaataaaaacgtctgggagaaataccaagttagggtcgctgtcattagctgctttcaagagagaggcgcccctaccgctctgctgaaacttttaaacgctccagctgggtcgccgttaaagtcacaaaaccagaaccggagccccattactaacccctacgcaggatcccgctaggctagggggatccctggggaagcggagtagaggacgggctgcaggggacggaggggcgcctccccgaaccctgctccgggccggccgggggactgcgggccgcagtggcacagacaccacccccttccccggcgaccacagcctccgtctcaccgcgagacccggggacgcgtggactcaccctgggggcagggacgacagatttgggggaccggacacggaccaggccctgttggaccctgtcacagatcc

SEQ ID NO: 318816 - DNA, 783 bp, Homo Sapiens
ggattctctgatgttgaataaggtctgaagttcgattaaagctcttgctacattcatcacacttatggggtctgtctcccacggggagtctctgatgtgagataaggttggaattcacagtgaagctgttcccaaaatcattatatttctcgcttctctctcccctgggggttagcttctcctcaactgtcacttgaccaaaatctggcattttcctgttcagtctttctccaggggagttccccagcggccttttcagactgacttctcgttcataggcttctttaaacttgagaccctgagaaatatccttttgaaatcttcccagtaggaccccatgtgatcttgtgtcttcagaaatttcttgatcattttcagtcctgggctcacgatccagtgagaacacattcccgtaattctccagcatcacatctctatagaggtccctctgaggcagggttccaaacggttccactccttccggatgaagtacacaggtacatcctcaaaggttaccagctcctgggacttggcctttaggagcgcagccgccaacatctcatcccccaggctgtccttgtcggaaaaggcaggaacttttgaaggaagagcactgtcaagcagggcctgaggttcctgagatacgagatcagcctgagtttccatggaagggcaaggtgctctctggtctcctgggtgcagactcagcgggaagcgggttttaaaagagaatgaggaagcactgcctgattctttccttccttctttgaagtcagtccctag

SEQ ID NO: 318817 - DNA, 398 bp, Homo Sapiens
  misc_feature (11)..(11): n is a, c, g, or t
  misc_feature (71)..(71): n is a, c, g, or t
cacccagcganttttgttgaaccaaggccataaactcccttaaccccagtgaagaaacacattcccccgtnaattcctcccagcatcacatcctcctatagaggtcccctctgagcaggttcccaaacgcttcccactccttccggatgaagtacacagctacatcctcaaaggttacccagctcctgaaacaacacgtgctggcatgcaatttcagggtgaggaatgtgaatggcggcaccaaaaaaatcactgaggatggggtgaaaaatgcacatttgggaagggaggaagggaggacagggtggaggaagagagacaggagtccaagatagaaggtgagggtccatgattcagcaggacagaaccatgggcctgatggaggagatcagggttta

SEQ ID NO: 318818 - DNA, 502 bp, Homo Sapiens
  misc_feature (67)..(67): n is a, c, g, or t
  misc_feature (426)..(426): n is a, c, g, or t
  misc_feature (449)..(449): n is a, c, g, or t
  misc_feature (490)..(490): n is a, c, g, or t
gacagggtccaacagggcctggtccgtgtccggtcccccaaatctgtcgtccctgcccccaggcatntggcatcaacaaaagtcagaattcccgggaacttgaacagaggctgctaaattcccagtaattgctcctttggccttctagggactgacttcaaagaaggaaggaaagaatcaggcagtgcttcctcattctcttttaaaacccgcttcccgctgagtctgcacccaggagaccagagagcaccttgcccttccatgggaaattcaggctgatcttcgtatctcagggaacctcaggccctgcttgacagtgctcttccttcaaaagttcctgccttttccgacaaggacagcctggggggatgaagatgttgggcggcttgcggttcctaaaagggccaagttcccagggagctggtnaaccttttgaagggatgttaggntgtgttattttcatcccggaaggaagttgggaagccttttnggaaccttgttt

SEQ ID NO: 318819 - DNA, 724 bp, Homo Sapiens
  misc_feature (3)..(3): n is a, c, g, or t
aancccattttagcataatataaatgttctaaaacatttgctcacctcttgccagtgacctttgcattgtctgtcttaaagcaaaaatataaaatttaagggtggtagtgttaatatattctgtgggtcctaagggatgctttgaatttgaagtatatatacttttaataaaattcagtatgacagtcgtcttctgcttaacccataaaactttatttaaaaaatttaactagatggtacaaaacattcattggtatgcacataattctgtatagttttgttattaaatgctaaatgacagtgataacaatggcttaagctttacagtattcttgtagttccctagtaccacttagtatttaaatattgtcatattagcttcagattatcatgtaaatgacggtagaggaataagagaaaaggctttcattggttatcagttttaaattctgaacaaaagagaccatacactgctcactacaagaatgcaattttctaagaaaatgtagtttaaaatgttattctgaatatctgccaaagaattatattgttattactagctagaaccaagatgttgaagaaagcagtttctacattctggatgtagtaaacaagcctgcctgtgtaatccaattatctcttcactaatgagtagataaggtgcctgttatagatgttctggtatataaagaaaaaatgtaggccaagtgtggtggctcacgca

SEQ ID NO: 318820 - DNA, 739 bp, Homo Sapiens
  misc_feature (300)..(314): n is a, c, g, or t
  misc_feature (330)..(389): n is a, c, g, or t
  misc_feature (401)..(574): n is a, c, g, or t
  misc_feature (602)..(611): n is a, c, g, or t
taaaatccagttttcgaattacattagccacattgtcaagtgttcaaatcacaggtggttagtggctactgtactgggcaacatacattatagaacattttcattataggaagttttattgggcagtgctgctcttaaatcctaccttccactcaactcccatacaactttcttttgtacattttgatactttctacctaatggcagctcttccaaaatagctgctttaaactctgatttaattttcaatatttggtttcatttttcaacaggccaagaggcttctggtaatgaagtgcnnnnnnnnnnnnnnngatggagtctcactgnnnnnnnnnnnnnnnnnnnnnnnnnnnnnnnnnnnnnnnnnnnnnnnnnnnnnnnnnnnngttttcaagcannnnnnnnnnnnnnnnnnnnnnnnnnnnnnnnnnnnnnnnnnnnnnnnnnnnnnnnnnnnnnnnnnnnnnnnnnnnnnnnnnnnnnnnnnnnnnnnnnnnnnnnnnnnnnnnnnnnnnnnnnnnnnnnnnnnnnnnnnnnnnnnnnnnnnnnnnnnnnnnnnnnnnnnnnnnnntgcgtgagccaccacacttggcctacannnnnnnnnnatataccagaacatctataacaggcaccttatctactcattagtgaagagataattggattacacaggcaggcttgtttactacatccagaatgtagaaactgctttcttcacatcttggttctagct

SEQ ID NO: 318821 - DNA, 405 bp, Homo Sapiens
  misc_feature (268)..(268): n is a, c, g, or t
  misc_feature (309)..(309): n is a, c, g, or t
  misc_feature (330)..(330): n is a, c, g, or t
  misc_feature (376)..(376): n is a, c, g, or t
aattttattacaatttcaaatctcattttaagcaataatataaatgttctaaaacatttgctcacctcttgccagttacctttgcattgtctgtcttaaagcaaaaatataaaatttaagggtggtagttttaatatattctgtgggtcctaagggatgctttgaatttgaagtatatatacttttaataaaattcagtatgacagttgtcttctgcttaacccataaaactttatttaaaaaatttaactaggatgggtacaaaacnattcattggggtatggcaccataaattctggtataggtttngttattaaatgctaaatgacnggtggataaccaatgggcttaaggctttaccggtattcttggtggntccccaggtcccccttgggatttaaatat

SEQ ID NO: 318822 - DNA, 1069 bp, Homo Sapiens
  misc_feature (977)..(977): n is a, c, g, or t
  misc_feature (1004)..(1004): n is a, c, g, or t
  misc_feature (1006)..(1006): n is a, c, g, or t
  misc_feature (1014)..(1014): n is a, c, g, or t
  misc_feature (1036)..(1036): n is a, c, g, or t
  misc_feature (1039)..(1040): n is a, c, g, or t
  misc_feature (1044)..(1044): n is a, c, g, or t
actttttaaaaatcctttttattactctttttaagaaatgcaacaagagccttacaaaccatccatctgaagagccaagcacaaagaccggatatttgtggtgccaccgcagttgcagaaaggaatgtcagtcagaaatgaattgtgtttcagtcactctgcatggttgctgccacgcatggaacatttttaggccaactttttaaaattcccagttaaggtaagcaggaaattagatgatcttcattaagactccatgggtgtatctgagctcctgctgccaaaagggccactaatagatgaatttcttgcactcccaagaacaagcctctctcgtcttccaaatgcttcatttactgaagagactgtgcttatatcccagacccgaagcccttctttttgacctccaaaggcataaataaatggcaaatcagggcaacatgaagaacagaagagaactcccattttcatgtccctagaatgaactagacttggcctatctcctaagatgtcccagatcttcacgtatttgtcagctgaagcagtcacgagacagcccttgatttgactgctaagatcaagaccagagatttcatcattgtgtgcattaagtgtaaaaattggcttatctgaacgtgcatccaaattatatacaaagccgtcatctgtactggccaagaaatgacaaggtgaaaagtgattccaagtcactctctctatctgcccactgaatcgccacattcgatggctttcatctggacttcggcagtcatacaaagccactgacttatcatatgagccagaaatcagagtctgtgcttcaaatggatgaaactgcagtgtttggaccttgtctgtgtgtacagcgaggctagctgctggtttccccaaggacatatcccacagaattacagtgttgtcagctgatgcacttgctaaaacatttctgattagcttattccatgaaaggtcaaggncagctcggtatgccctctgctgaggantnttctttcnttctttttctcttttttgaaanttnnttcnaattttaagatggctctaagagtcc

SEQ ID NO: 318823 - DNA, 1108 bp, Homo Sapiens
gaggagttccggggctttcaaaaatggattgaaacctgccaggtgtttggaccccttgtctggtgtggtccagcggagggttagcctgctgggtttccccaaggggccatatccccccagaatttacagtgttgtcagctgatgccactggctaaaacatttctgattagctatttccatgaagggtcaaggacagcatcggtatgcccttctgctgaggaactcttctttccctttctttttcttctttttgggaaagtttacttccgagtggggaagactggctctaaagagtccacctatatccaaggtcccacacttcaataacaggggtcatgtttcctacagcaatgtaatttccagtagaatcatctgggctaggatcaaaattcagccattccacactcagaggatatgcagacaagagtatatcatggtgtacataaaaagagtcttcttcttgattataaacatgcacctctaaattgcactggtcctgttcagctcggccacaaactataagattatcactgggcttaatcaagaaatcttcacgttcatattgttctgtatctttcagagtaacgtaaggatcttgatcattactcccgtagaccgtaagacccaagagagattcaccaagagtctcagcatctgggtcaccttcctcatcatatttatctaagtcgtactcagccagctcatcatcatcaagcgtcctgtcatcctctgggtcaccatcctccaggggctctcttgggcgtgcctgggtgcgtgcactctgcatgccatcttctgaaggactgcctgtctcctcttcatcactgccaccaccttcttcttgcaatttctcctttgcctcagcaatgaggcgttttacttcttctttactcagctctaccttgtctggtgtctctttggccacgccgcagcggacccaggccacgcacgtcacctggcggctgcggttcatggtcctcaagtcaagggcgtgtcacgctagaaaccaggctgcatagggagggaccacgaccgcactgctgccacacgctcagggatctgcacagggccgctgccagggcctcgtgccgaattcgccactcaggcc

SEQ ID NO: 318824 - DNA, 802 bp, Homo Sapiens
  misc_feature (419)..(447): n is a, c, g, or t
cattgtgtgcattaagtgtaaaaaatttggcttatctgaacgtgcatccaaattatatacaaagccgtcatctgtactggccaagaaatgacaaggtgaaaagtgattccaagtcacttctcttcttatctgcccactgaatcgccacattcggatggctttcatcttggacttcggcagtcatacaaagccactgacttatcatatgagccagaaatcagagtctgtgcttcaaatggatgaaactgcagtgtttggaccttgtctgtgtgtacagcgaggctagctgctggtttccccaaggacatatcccacagaattacagtgttgtcagctgatgcacttgctaaaacatttctgattagcttattccatgaaaggtcaaggacagcatcggtatgcccttctgctgaggaacnnnnnnnnnnnnnnnnnnnnnnnnnnnnngaaagtttacttccgagtgtgaagactggctctaaagagtccactatatcaaggtcccacacttcaataacaggggtcatgtttcctacagcaatgtaatttccagtagaatcatctgggctaggatcaaaattcagccattccacactcagaggatatgcagacaagagtatatcatggtgtacataaaaagagtcttcttcttgattataaacatgcacctctaaattgcactggtcctgttcagctcggccacaaactataagattatcactgggcttaatcaagaaatcttcacgttcatattgttctgtatctttcagaggtaacgtaaggatcttgatcattactcccc

SEQ ID NO: 318825 - DNA, 1059 bp, Homo Sapiens
  misc_feature (997)..(997): n is a, c, g, or t
  misc_feature (1004)..(1004): n is a, c, g, or t
  misc_feature (1016)..(1016): n is a, c, g, or t
taagtgggacaataaaaatttaaaaataattttaaaatagaacagcttagagatagaaactaaattatttccaattcctactgtgccccaaacaaggttcacaaaagggctgtcctcccaacaattttctgaattctatatattcagcattaaattccatgataaagttgggaaatccattcaccatttgtaatacatattgatgcatttaataaaattgcatgggccgtatcttttgcatttctgtatcctagtattaagtacagtgcctaccacaggccaggttctcaatacttgaataaatgacacaaaaatagccaggaccagcaagttttttctgggtgggcttcatagaatctctgtacttgctggaatcaccatgaaatccatggtcttcagctttgcattttcagcaacatagttatattgagttatcctcaggtgagcagtgagacccttgggacgcggattcatggtagggtggctttgtaatgtgtcaccttggtgaggctatgtttcccggaactctcttccagtaagatgggccacaagagacattttgcttgataaccggagggcggaagtgaagcagcagcacattgtttttacacttggaaggtttgtgctggggcaccaggcgttgttgcagttcacacgttgccatgtatctgctagatcacctcgttggtgtgggcagtagtcaggcctgcagccaggcctgcagctgctccaccttccccaggatcatcctttcagcttctctaattcctgggccagatgcatatttaactctgtgaggaagggcaccagcttcttctgcaggacacccacatcatcgaagctggaggtggtgagagactgacatgggttccaggccatcctcgtgggttccagctcgtgctcgtgggctccactgtgtcctcggtctcccacactttacatccatcttcccttcccgagtgcctgcccttgaatcctacagtctgtagaagcctcnagtctantgctttctagcnccaggttttttaaggtctttggaccttggcaaccagactgctg

SEQ ID NO: 318826 - DNA, 1016 bp, Homo Sapiens
  misc_feature (952)..(952): n is a, c, g, or t
  misc_feature (964)..(964): n is a, c, g, or t
  misc_feature (985)..(985): n is a, c, g, or t
  misc_feature (987)..(988): n is a, c, g, or t
ggcctgggtggcgaattcggcacgaggccatgggtccacgggcctagagtggcggaagataccggcctggtgccaaactggctactgctgcttcctgtggcctccatggctgaggactggctggactgcccggccctgggccctggctggaagcgccgcgaagtctttcgcaagtcaggggccacctgtggacgctcagacacctattaccagagccccacaggagacaggatccgaagcaaagttgagctgactcgatacctgggccctgcgtgtgatctcaccctcttcgacttcaaacaaggcatcttgtgctatccagcccccaaggcccatcccgtggcggttgccagcaagaagcgaaagaagccttcaaggccagccaagactcggaaacgtcaggttggaccccagagtggtgaggtcaggaaggaggccccgagggatgagaccaaggctgacactgacacagccccagcttcattccctgctcctgggtgctgtgagaactgtggaatcagcttctcaggggatggcacccaaaggcagcggctcaaaacgttgtgcaaagactgtcgagcacagagaattgccttcaaccgggaacagagaatgtttaagcgtgtgggctgtggggagtgtgcagcctgccaggtaacagaagactgtggggcctgctccacctgcctcctgcagctgccccatgatgtggcatcggggctgttctgcaagtgtgaacggagacgctgcctccggattgtggaaaggagccgagggtgtggagtatgcccggggctgtcaaacccaagaggattgtgggccattggccccatctgcctttcgccctccccggcctggtctcaggcgcccagtggaaatggtgtccagcgacgttgcctacgggggtaaccatgccccccgcaagggaggctgtcactccaagatggctgcnaggcggcgcccnggagcccagccactgcctccncnnccccatcacagtcccagagccacagagc

SEQ ID NO: 318827 - DNA, 1561 bp, Homo Sapiens
  misc_feature (203)..(211): n is a, c, g, or t
  misc_feature (290)..(364): n is a, c, g, or t
  misc_feature (411)..(449): n is a, c, g, or t
  misc_feature (458)..(475): n is a, c, g, or t
  misc_feature (1421)..(1421): n is a, c, g, or t
  misc_feature (1466)..(1466): n is a, c, g, or t
  misc_feature (1483)..(1483): n is a, c, g, or t
  misc_feature (1528)..(1528): n is a, c, g, or t
  misc_feature (1558)..(1558): n is a, c, g, or t
tgggaagccacaggttaattattggtgattttttgcgcggtgttcttggcttgagaaggccccaagttttccccttttcgggaaaaaaaggagagtggggtaagcctctcttgaattcccgggcaaaacccaaacccccacccgttgggtacgcgggtggctttttgttgttttgccaaggccagcaggatttacttcgcagnnnnnnnnnggatctccaagaagatcctttggatccccaaaaaaaaggcccgctcattaggcggggttaaattcccggggtactgcannnnnnnnnnnnnnnnnnnnnnnnnnnnnnnnnnnnnnnnnnnnnnnnnnnnnnnnnnnnnnnnnnnnnnnnnnnaccactttgtacaagaaagctgggtcaggaaacagctatgaccatgnnnnnnnnnnnnnnnnnnnnnnnnnnnnnnnnnnnnnnngcctcgagnnnnnnnnnnnnnnnnnnggagttctacacacttttattggaggggcaggcctgatagcaggctcacagctggtgaggctgctgatgtgtgcgcccttccagatgccccaggatccacaggctgtgttgggatgcaccttccccattcccagctgactacagtagtacagaaaaagggcccctctgagtgaggctgcaggcagtgctggccaagcagggctgtgtgactgaacgtggccgctgactcagaacagaggacatcctagggcagcaagcgaggatgggcaagagtattgggcatgccagccaccaccagccaaagctgcttccgtccttactctccgtgccacaataggtagcgtgtgcatgagccttgggcccagggacaaccccctcactctccatcttggttgggttggataagcccatattccactgctttgtccaggcaggctgcagcagcccttgtgacagggctgtggtcacccttagctagcactgacaagatctccatcatctcactctccatcagggtgctggcaatctccctcgaggcctccaccatgttcagcaccaccacagcaccccggtgctgcagctcctggttggagctcagaagcagggcctgcaggatctccagccagtgtgtggtcacttggggaatgcggctgcagagcgtgggccgcatggaggtaagcatggccaagcccccggcagctgcccgctgtagcagctcatcatcctctccactgtacagcaccagcagcttcagtcggtcattgccctgggcttcgaagaggtcctgcacctccttgctcatggccaagttacacatgcactccgtggctgcccggcggatcatctcatgctcctcaaacatgtagccttctatcatgggcacagccttctccttcaggatcttctgccggagcctctcgctgatcccagccaggtttgttagggncatgagcgcctcgaagttctgcaggcctgagcagttgaggtgcanaggggagacgaggggcnggacacctcatagatcgctcgccagggaaggtctctccgggttgnggtgatgtgagctggcaagggatgggtgcnttt

SEQ ID NO: 318828 - DNA, 960 bp, Homo Sapiens
  misc_feature (783)..(783): n is a, c, g, or t
  misc_feature (786)..(786): n is a, c, g, or t
  misc_feature (798)..(798): n is a, c, g, or t
  misc_feature (804)..(804): n is a, c, g, or t
  misc_feature (818)..(818): n is a, c, g, or t
  misc_feature (846)..(846): n is a, c, g, or t
  misc_feature (861)..(861): n is a, c, g, or t
  misc_feature (883)..(883): n is a, c, g, or t
  misc_feature (887)..(887): n is a, c, g, or t
  misc_feature (897)..(897): n is a, c, g, or t
  misc_feature (905)..(905): n is a, c, g, or t
  misc_feature (919)..(919): n is a, c, g, or t
  misc_feature (924)..(924): n is a, c, g, or t
  misc_feature (928)..(928): n is a, c, g, or t
  misc_feature (933)..(934): n is a, c, g, or t
  misc_feature (945)..(945): n is a, c, g, or t
  misc_feature (950)..(951): n is a, c, g, or t
ccacagccacatatatgtttattctgcgagtccgtgtcccacagtctgagactcttcttcccctccccttcccgccccgtgaagtggcccggggccgagccccgcctccatctcggctcagccaattcccacccagtttccaggagtctcatttgcatttccgggagcagctgtccaatgggaaggcagcaccctgcccccccaacaagggggcggcactcctggtggatcgcaccactcttgggatccagggatggggggaacgggcttccactgaggtccgggtgacaggagggtggtcttccctcaaggcagggttggagttcagtggaggagggagttctggccttggaagaggcccagcagtccgctgtctggggcgggctccttgatgagtttctggatctccttgaactgggggtggacggcatcgcccacaagctgcagaatgagcccttcgctggtggagaggaaggcaccactctgtctcatgcgggccagagccaccagccggtccacctggctgcgtgaggagcaggcgtccaccaccacatggacctgcagcccccggtctaggaggtccagggtcgtgttctgtgggtagagagaggtcagggccaaccccggataagaacgggggtcctgggtaaggaattggggatggtgagtcagaattaggggcccagaatggggaggagggaggctcggatcagaggaaggggccccaggtcaggaggggatccaagataggatggggcccacaggtgaggagagagggcccangtnaagatgggggtnctgcanggaagtggaggttntggtcagggaaggaggtctatttagganggggtcccaggttanaagaaggaccctggggtcagtnagcnttcacaagangcagcttntgcttaatgcacanagcgnacanaggcnngggggcgactntcagnnctgtgcagg

SEQ ID NO: 318829 - DNA, 871 bp, Homo Sapiens
tagggaagtttttgcccctgggaagaaggccccagccagttccgttgttttggggcgggcctccttgatgagtttctggatctccttgaactggggggtggacggcatcgccccacaagctgcagaatgagccctttcgctggtggagaggaaggcaccactctgtctcatgcgggccagagccaccagccggtccacctggctgcgtgaggagcaggcgtccaccaccacatggacctgcagcccccggtctaggaggtccagggtcgtgttcaagatgcaggcctgtgcctcaatgccacagagcagcacagagcgcagctggggccgactgtccagctcctgctgcagggcaggcaccatgctgaagcaggtcttggccagcggccgaaggccctcagtccccagctcgggcaccgtggggcccaggccttgtgggtactgctccgtcagcatgactggcacctcaagcagccgggccaccttgagcatgcgggcagccactgagacgatctgtgggaagtaggcgatgttgtggcggaacttctcctgcatgtcacacaggaacaggacagaggatcctgggaggactcggcccaggctgggcctggcagccgccattttccggaaggtgccgggttcgagcccggaacggcccctctgcaggtgaggcgggggcaccctcacctctcggctctcggacggccaccgctgaggcctcttgcgggcttcccagggctggttaccgtttcgttagggctggacacgtggcccaccccctgcaccgtccgttttccgcccacttgggcccagccgtccaatcgacactcatcatgctctgcctcgccgctctctccggccaatccgcccc

SEQ ID NO: 318830 - DNA, 2300 bp, Homo Sapiens
  misc_feature (252)..(253): n is a, c, g, or t
  misc_feature (255)..(256): n is a, c, g, or t
  misc_feature (258)..(259): n is a, c, g, or t
  misc_feature (261)..(263): n is a, c, g, or t
  misc_feature (265)..(269): n is a, c, g, or t
ccaggaaacgctcttcgggtttttccccgcccccggggcctttttttcctatttgggtggggagaattcccaaagcccccttagtttcatggccccaagggatttttcctaagggaaacccagccttattggacccaatgttccccctttacccttaactgggggccccgcggccgcccaaaacgaaatgggttctagaaaagacttcctccgaagggcccgagggcgggccgacaaagtttcttttttttnntnntnntnnngnnnnnttccaagagcaaacaaccaaactttatccagaaaagcatatttgtaatcaccactaaacaatgaggcacatcggtcccctctccccaaccaccctcactcttcccaaacccactctctcttttggcttttatagaacactgtagaaatcctttcctgagtctgcaaatggccccagactgggatgggagctgcccagagtagtcttgggctggactgagtcctggtgcccagagagggagacctatgcaactgcctccagtatccaaaagttctgggggcaggtcgggtggccacccctatggcacagggccttgagggagggtgagtgtggtggcggtcttacgtgttcttctcatacctggcagacagagtgagcacaagccgctggaagccaagcgggaaggcacatctagaagggcagtgagctctggaatgctacaggcacgtgtggatggatgaggctccatggcggccaaggagatatctgctcctgagtaaggtcacctgaccacagacagcaccaggggctggggggctaagaaggagatcttgagaaggatggacctgagctaaagatgtaacttagatggtgatctgaaaaaaggaaaaaagaataaacgctggaactcaaatccactgtttagggtacaggagtacacagctaagttccaggtatccagaatcttgtgtccaaatcatagcacaaggagaacaggaattctcttgagttaaggcaaaatcaatcttcacccatctgggctcttccattgcatggtttggaaaggaaggggctgggcagagatcattcctctccccatctccccctactgccagtgaagactctgaaagcttctgcaggccaaggccagaatggtgttgccagcccagggcagcgggccctgagagcggtcggtgtgaccagctctgggaatctccatggcctcagcaacatggaaaccttacaggcccagccagcaggtcaccccagcgccagagagtggttcttctctttggtaagggagacccaccctgtcagctgctccagatcagtgccgggatctcttgcaggtgactttcctttagcctgggaaaaccatctgaataactttggcttcatttctccaacaatgtaaaggaatgttcaaattccccagttcaggtctctggctagaggcagcaatctacttcctcactggggtgggtcccctccctctgctagagaattccctggggaagaaagagaaggcgccccccaaatcttcaaacagaacacagccaatgggttgggcccttcggcatgaatgagagccgggacagcacagggatgctgggaatcttaaggtgggaatactgctccaggcccaggagcagttaatacagcaaactaaattatttctgtaacagcgggacttctcagtctttgataagctaatgagcatctccaagaaagggagacagcaccgttgacaaacccatttggccttgaaaccctcttttaggagaggcggctcctgagccaggggtcctgactcacccacccttttaatgcaaacagcgctggactgcaagtctgggttccaatcttactctggctgttcccaagagcaggctctgggtccccatctgtaagaaggggtggggttcaccttaacattccaccatggtcgtggaactcctaatgcaaacagatatgggggagggtggagatgaggggggcggcagaagcctgtgaggaaggcctgggaagagacttgtgtcacggagaggccaggacagttagtgtgtgtttggcactggcctgcaaaaaccttaaggacaaaggcggagtaggtagaggcaagaggagactccacaagtgtaagggtacaacccaccggcttctcctatcggtccccacctcggcggatgggccccaccccaagacaaccgagcacagagagaccggctgggaggagttcgcaggatgccagcacaatccccagctaaaaccaaactcgtcgctcatcctgggaccagccaaggcctgatcc

SEQ ID NO: 318831 - DNA, 1181 bp, Homo Sapiens
  misc_feature (847)..(847): n is a, c, g, or t
  misc_feature (878)..(878): n is a, c, g, or t
  misc_feature (1133)..(1133): n is a, c, g, or t
ttttttggcattcagagagcgcgtttatttacaaagcgctttacaaacatcagcttatgcctccccacagccccctgcgaggtaggtcagtagtcatatctacagtttacagatggggaaattgaggcacggaatgggggtgtggcctgccccattttaaagagaccttcccacccacccaaccaaaaataacaaaagaaacaaaaaagcactggtcctacctcttcctctgaactccagagggtatgaccagccctgctctaacactgcccctccccacaacgggcagcctgaccaggagccacaggggcctcaaccccaggggctgttgttcagccttgcagattgtcactggcccaagctgagcaggacaggccagtgaggcctgaagattaaaggaagaggggggcgaggtgacttcattctgcaacagtgggtcaggcagggaaggagccccccatggggcacagcagttataggcagatcctggttcagggaagctcagagcacatatcagggaagcaagtggggagggatagtgagcaaaatatctcaggggctgcagggggcagtggggaggagggcgctgcagttcccctggggaggacagtcagtgtgccccactggctattcagaattgagacctgcttccccaggaccttcaggggctgggccagatggaatcctaaatgccaagtcccagtacatcctctacccacatgcagagggggcaggctgagtgggaaccttggcctgggatgctctctgcagggcctcactcatccctgccaaaagccaggatggtgccaaggggcttggcctgagtcccccagagccagccgtcctngagcctttgtcactctgccaggcagcaccanggcctctcagcacaggcctgcaggaccctatggaggtggggctgggctgcaagacttgctaagctcctccttggccaaccacccgcccatgggacaagcgaaaagccctgcccacagtggaagggggagcaagatagcccagcatccactccagtgcttgccccatgggagtgtgtttgggcagagcaggaggcactgatcttcctcgccagtccaggatggtgggtctggccctgagtgtgcagtgggtgcccncagccagggccccgctatcttgactccagcccctccaagtactccagg

SEQ ID NO: 318832 - DNA, 1052 bp, Homo Sapiens
  misc_feature (18)..(18): n is a, c, g, or t
  misc_feature (38)..(38): n is a, c, g, or t
  misc_feature (46)..(46): n is a, c, g, or t
  misc_feature (48)..(48): n is a, c, g, or t
  misc_feature (51)..(51): n is a, c, g, or t
  misc_feature (54)..(54): n is a, c, g, or t
  misc_feature (69)..(70): n is a, c, g, or t
  misc_feature (80)..(81): n is a, c, g, or t
  misc_feature (84)..(84): n is a, c, g, or t
  misc_feature (104)..(104): n is a, c, g, or t
  misc_feature (120)..(120): n is a, c, g, or t
  misc_feature (148)..(148): n is a, c, g, or t
  misc_feature (206)..(206): n is a, c, g, or t
  misc_feature (214)..(215): n is a, c, g, or t
  misc_feature (230)..(230): n is a, c, g, or t
  misc_feature (243)..(244): n is a, c, g, or t
  misc_feature (810)..(810): n is a, c, g, or t
  misc_feature (961)..(961): n is a, c, g, or t
gaaaatttgattcctgtnggcctcttttcagcagtgtnaacagcananagnagnaatagccaatgcgcnngagcaccaannaancaaaagccacggtcctgtgngcggtggcacggcttnagacacaccgggaatgtgccacgggtcntgtgggcggtgcacggtctcaggcacaccgggaaatgtgccacgggtcctgtgggcgntgcacggnntcaggcacaccgggnaatgtgccacggnncctgtgggcggtgcacgggctcaggcacaccgggaatgtgcccatgggtccctgtgggcggtgcacgggctcaaggcacagtggggctgtcagctctggcttgcagggtcaccggcctcactgtcgctgctctgagacagctctgtggggctctcgaggcagtgcagctcccaggaagctggtgatgagcttggcgatggcttccacatcactgcggtggcccatgactgcactctgcgtgagggggtgggagaagcccgtcgcaagccggagcaccaccatgtagcctttcccgaagtaccggaccttctcctcctccacgctcacatcacggacatcatggagcaggaccaccacctggtcgtggccagctctgaaaagagtcagcagcttcttgtagaggctgaacgtcttcaaaacaaccttccctgtgctcttgtcgaagatggcttcctcccagtcctccaagttctgcacagccacaaacaggcagcctgtgacgtagaagagcttccagcccaggctatcaaccagcagggaccaggaccggatgcctggagccctcntcagatggaggcgggagctggtgcgggtctccacctgcaggtacatcccgggagggcagcaccactctctacaggaggaggggtctggtctctgtggttgggcacgtcactggatcccccagagaccccgtttcctgtgtaaggaaggccnttttccgttcacagcgacaccgactgcgcgggggctgtttcccgctcagactcacgagctacagctgcatcaccacctgccccgtcctgtc

SEQ ID NO: 318833 - DNA, 618 bp, Homo Sapiens
tatcccggaagtgcgcgcggccccgcccccgccggttcgcgtctctctgctgcggcgcggggaccgctgtgctctcggaaacggggtctctgggggatccagtgacgtgcccaaccacagagaccagacccctcctcctgtagagagtggtgctgccctctcgggatgtacctgcaggtggagacccgcaccagctcccgcctccatctgaagagggctccaggcatccggtcctggtccctgctggttggaatcttgtcgattggcctggctgctgcctactacagcggagatagcctgggctggaagctcttctacgtcacaggctgcctgtttgtggctgtgcagaacttggaggactgggagagctggccacgaccaggtggtggtcctgctccatgatgtccgtgatgtgagcgtggaggaggagaaggtccggtacttcgggaaaggctacatggtggtgctccggcttgcgacgggcttctcccaccccctcacgcagagtgcagtcatgggccaccgcagtgatgtggaagccatcgccaagctcatcaccagcttcctggagctgcactgccttgagagccccacagagctgtctcagagcagcgacag

SEQ ID NO: 318834 - DNA, 1028 bp, Homo Sapiens
  misc_feature (15)..(15): n is a, c, g, or t
  misc_feature (30)..(30): n is a, c, g, or t
  misc_feature (37)..(37): n is a, c, g, or t
  misc_feature (39)..(39): n is a, c, g, or t
  misc_feature (42)..(43): n is a, c, g, or t
  misc_feature (48)..(48): n is a, c, g, or t
  misc_feature (50)..(50): n is a, c, g, or t
  misc_feature (52)..(52): n is a, c, g, or t
  misc_feature (62)..(62): n is a, c, g, or t
  misc_feature (73)..(73): n is a, c, g, or t
  misc_feature (76)..(76): n is a, c, g, or t
  misc_feature (78)..(78): n is a, c, g, or t
  misc_feature (96)..(96): n is a, c, g, or t
  misc_feature (108)..(108): n is a, c, g, or t
  misc_feature (309)..(309): n is a, c, g, or t
ctccagtttttttgnagccataactcttcnggttgtngnttnncaatncntnaggcagcccntcaaatccagnttntngaattcaggaacagctcntcggcttgctcngcttgcaaatggctgagggcagtgaggtggctgatttcgggacaggttcagagtttccacgtgcacccactggtctatgcacagggacagctccgtgatctggttgctgctgaggttgaggcggcgcaggctggggagggtgtacagacactcgggcacccgtgtcaggtcattgcaggacagatccacgtctgcgaggtngctcagaccctccaggctggtgggcaggttgctctgggtgcgctggttctccgcaggtgcaggttctgcagggccgtcatcgctgggagctgccggagctgtgcatgcagcagggggtttccattgagcacgagcgtctgcaggtgcaccaggcggcgcatctgcgggggcaggctctccaggcggttctcgctgaggtccaggtatagtaggatcagttgaggttgatgaagagctgtttggggatggtgtcgatgctgttgtggctgaggttcagcaccagcatgttcttggcgttctccagctcccgcgggcactctgtcagctggttgtggctcaagtccaggactgagagatcatctagcttgaagatgtcatcggggactccggaattcttcagactgttggctcgggccacgatggcgcgcagcgatggcaggctggacagctccccatgaagcgtggtcaggttgttgtggctcacagacaagtgttccagcttctgcagggcggccagctcctcgggacaggatagcagaggccagtgcggttcagcttcagccaccgcaggctggtcatggccttgacattctcagggaagtagccgtcctatgaagttgttgccgctgaggtccacgccacgcacgaacggcagcacccggtggctatccatgacgcgtacgcgtggtcgacatatcccataacttcgggaccggtaa

SEQ ID NO: 318835 - DNA, 438 bp, Homo Sapiens
ttgtccatgactggtgagtttcaatattttattaaaatagcatatttaaccatggttaaccaagaatatgttaactttgtgccccccaacctgcccccgccccagatacgcagcaaaacacagtagtgatttcaaatatccttgatcatgaccaacaggaatatttcaaagtcaagtttgcaactcaaaagtagaccttggaaaaactctgaattaaaagagaaacataaagctctcacacagaattcttttatctgccctaaaatcaatgccggcgcaccaccacctgacaatactgctaggatttttctttatgcatagtataacgactcatttattaagtacccacttttataaataaaatcgggcattttttgtcccgcttaatgttccttttcagcttcacaagggaaccagtaaataaaactgtcaacggca

SEQ ID NO: 318836 - DNA, 670 bp, Homo Sapiens
  misc_feature (22)..(22): n is a, c, g, or t
  misc_feature (56)..(56): n is a, c, g, or t
  misc_feature (80)..(80): n is a, c, g, or t
  misc_feature (92)..(92): n is a, c, g, or t
  misc_feature (102)..(102): n is a, c, g, or t
  misc_feature (133)..(133): n is a, c, g, or t
  misc_feature (174)..(174): n is a, c, g, or t
  misc_feature (182)..(198): n is a, c, g, or t
  misc_feature (210)..(210): n is a, c, g, or t
  misc_feature (220)..(220): n is a, c, g, or t
  misc_feature (225)..(225): n is a, c, g, or t
  misc_feature (387)..(387): n is a, c, g, or t
  misc_feature (396)..(396): n is a, c, g, or t
gaccaccaccggacaaactgcnggatttccttaaggcaagtatacgcctcattatnaagtccccactttaaaaaataaancggccattttgncccgcctaangtccctttcaccttcacaagaaaccagtaantaaaactgtcaacgaacagtcacaaccataaggccctcacnccaagatnnnnnnnnnnnnnnnnntacgcagagagncatctacgcnatttnacataaaaagagagattcaaaaaagtgcaaggcaaaaacctgcagttttttgaaggggagcttttaggccacatcccattccattaaaagcaagcttcagaatgaaatcccagtttgttcttcatgacacctgttaaagtctttctttaaacgacaacaaangaaagccanaaatacatcccatcaagtgtacaatggtagtcttgtgtcctaaaagtgaggagttcagctgtggcgagtccgtcctttctttattctggcaggctttggtttggggatgtactgattatttgcctggtactcgagttctttacggaagtagtgaattgctttgtttaaaccttcctccagcgggaccacgggctcccaccccagcatcagctttgcttttttgatgtctggttttcttttctgtgggtcatcctgggcttcggagagaaactga

SEQ ID NO: 318837 - DNA, 1420 bp, Homo Sapiens
  misc_feature (2)..(2): n is a, c, g, or t
  misc_feature (10)..(10): n is a, c, g, or t
  misc_feature (14)..(14): n is a, c, g, or t
  misc_feature (23)..(23): n is a, c, g, or t
  misc_feature (38)..(38): n is a, c, g, or t
  misc_feature (42)..(42): n is a, c, g, or t
  misc_feature (72)..(72): n is a, c, g, or t
  misc_feature (98)..(98): n is a, c, g, or t
  misc_feature (954)..(954): n is a, c, g, or t
  misc_feature (956)..(956): n is a, c, g, or t
  misc_feature (1056)..(1056): n is a, c, g, or t
  misc_feature (1109)..(1109): n is a, c, g, or t
  misc_feature (1315)..(1315): n is a, c, g, or t
  misc_feature (1322)..(1322): n is a, c, g, or t
  misc_feature (1371)..(1371): n is a, c, g, or t
  misc_feature (1410)..(1410): n is a, c, g, or t
  misc_feature (1413)..(1413): n is a, c, g, or t
gnagattgtnaaanaactttggntttgtgtgaattaantgtncattatcatgatggagaatcaccagctgcnaagttttgataccaggaaaatgagtncttttttctttttccagctgacactctgacatagattccttagttttcacaatgtcaaaagatggagtggagatgatagttatcctttgtacctgatgggcccgtttttggttcagtcacctcagaagtatttttttctttagccaaataaacttttctcattttttcaactttcatttgagcttgcttggatcgacgacccagaaatttaacttgattttgctgtttgtagggccgatatagaggttggacagttaagtatggacccctaatttcagaaacaatccgtagctggtgcttatggatctcttgcgttactggtctctgtaacagaaacttcatttcatttcgtagacggtttgagatcactccagactctgaataatgaactatttgatacattagcattgtcctgggaatattttcaagatttaatttgcgccagctgttatttctgccgccagaaaatgcaggggcctcatcgaaaaaactgcgatattgtacataatcttgcatggtgacaacatccattatatcagttactttggacttcgggaaaatacgttcatcttccataattatacggtgaaatttcctttccccccattagtttgcaagcatcatccactgccttacttgacggcattaatacattttttccactaaaatacttgtaaccatggccatcagtatgaagaaaaattttaaacacgatgaaaggtggaaacgtttcacctctaaatctgaatctaattttacactgcatagtaggatccttaataagcttagcctctaagggggccactctcttcagtatctcatgtgttacatagaattccgctgcacaaattgcgtntnttaggagtcgaaatatcattttgtttgtatgagataaccaagccctctgtattatttgagctgaaatgtctttaagcattgatagtaatgatcttgcatntcgtgcatttgcgaaatgtactctgcaaactttttgtaaggatcttgtacctnatttcagaatacctttacgtggtacatttgaggaacgattcattttccctccaatgaagtaatcgcttgtttcttaacgggaaaaaataaggtcagagccttttccgattaaaggacacagcatattagtttaaatttaaaacctgagaaacctcaagtccttggttaaaacctttcgtaaggtaaatccaggccgccaaccggcngcttccngctgcgaagctttcgaagccgccggtggccctccaagcgccccctctcnacagcctctgctcacagaaatcccagtacacgccgctgngcncccagtc

SEQ ID NO: 318838 - DNA, 1507 bp, Homo Sapiens
gctttatttacaaacttccacagaatccctcaccctccaccccagggtcctccctctctggaactcaggcagcagacaagcttgggtccacccacctgcccaacctaggacagctgggcctgagctgggcgggcaggggattccatctcctgggtgcgcctgccagaggggagaggctggaggcggcgggaatgctgttctcccccaggagtcagtcctcagggcttctgccgtgggacgtggggccgagggacctggggcactgaccaggtcggggtcgggggcagcatctgcattggtgaggccgggtgaaaagggctgctggtgccggacagcttctggtgctgggcctcagcggagacagaggaccagaggtccaggttcctgggggctgagcttttctcagacttcggaggaaaaatgtcccagcccagcaggcagtgccggggcagggccagtgtgtcagaggcgtcaaagctctttcgccggtggatgtggtaccggtgcgggggctccaggatcgacagcgggatgctcaccctgacgtgcgctggctgcgccagggtcccagggccctgctggtctcgcggtgtcctgcacaggcggcagggggtaccgggatccacaggcaccgggaacaggcgccggttgacacggtaacagtacacgcattcatggtcttcctccacgccgctgccactgctctcacgcaggcctggcaactggggttcaggatggctgcagatacactcctccttgttggtttcccgaaactcctgcagcttggagaagaaggcctcaggctggctggtgatggaagagctggtgtccagagaccctgcaatccagtcatagcccaggtatggcctgaggcgccagctcctctcaggaactgcagactcctcagagaaggtcaccctgggcttggacagcttgctctgttgagccaggatggacctcggggtctgtgcctcctggggtcctggatcacccagcctccctgagggctctgggtccctcaggcttgaggtgcccagcgagggtgctgagtggggtctcggtcggcccagggactcctggtgctggcaattggcaggtgggagagaggccacccccgatctggccacatcacggaggtcccctcgacaggcatctggtgggccccacacggaggaccggccccgtgggcaggaggtgctcaaggaagttgaggacgtctctggggtcgatggagtctctgagttgtagctgctgctggattccaggcttgactccgaggctgccctggccactgaccgccgcacagcatcctgccccacccacagctgcctcaggagctccagattgagcagccgcagctgtgccagttcctcagcctccaccatcctgggcctctctcagcaggtgtcacttgcccctgggccgcaggatgtcctcagggctgggttccaggcccagctcttctacccggcagaatcccctagcatgcgccgccgtagcagccgca

SEQ ID NO: 318839 - DNA, 712 bp, Homo Sapiens
aatcttttggttcctttattcaccactgacagtcacgcgtcttaaacaatcagtaacaattttaaggtacacaatgggtttatgaagtgtcattcacagtgttttatgtaactggtttcagtagaggtaccactcaatttttatgccaggtaagcaaagctgttttaaagccacgacggaagtcatgccctgaaggctttatccccaccaagaaagcagcagcagaactccagccctgaaggagagctgcttttccagggtcttggttaaactggaggccagtcactgtatgtatgatacagctttcctgttgtttcatggaaagaatgctatcacaagagcatttagtcttgtctttgaataaaatagaataagatcctagaacaaattaataaatagaacaatctgtcatttgttctcactgctaataagcattaattctaaataagtcattctatttttattcttaagatttaatgacccagtacaatgacgcacacatatctctaacgaaagcacctgctattttattggccttaccaaatgttattcctagatgtaatcgcctactaatgaaatcactgcttttcactttgggaatcagagacacaaaactacagctccccagaaaaaacacattattgtcttaagctaggagcacaagcgctttccttctatcccctgaaaatttcataagaaacatttgataatt

SEQ ID NO: 318840 - DNA, 500 bp, Homo Sapiens
  misc_feature (325)..(325): n is a, c, g, or t
  misc_feature (406)..(406): n is a, c, g, or t
  misc_feature (430)..(430): n is a, c, g, or t
  misc_feature (458)..(458): n is a, c, g, or t
  misc_feature (469)..(469): n is a, c, g, or t
aattatcaaatgtttcttatgaaattttcaggggatagaaggaaagcgcttgtgctcctagcttaagacaataatgtgttttttctggggagctgtagttttgtgtctctgattcccaaagtgaaaagcagtgatttcattagtaggcgattacatctaggaataacatttggtaaggccaataaaatagcaggtgctttcgttagagatatgtgtgcgtcattgtactgggtcattaaatcttaagaataaaaatagaatgacttatttaggaattaatgcttattaggcagtgaggaacaaatggacaggattgttctatttnatttaatttgttactagggatccttatttctatttttatttcaaaggacaaggactaaaatgacacttgttggataggccntacttttccctgggaaaaccaacnggggaaggccgttatcccttaccttacngtggaccgggnccctcccggtttttaaccccggacccggggg

SEQ ID NO: 318841 - DNA, 1261 bp, Homo Sapiens
  misc_feature (32)..(32): n is a, c, g, or t
  misc_feature (216)..(216): n is a, c, g, or t
  misc_feature (410)..(410): n is a, c, g, or t
  misc_feature (1193)..(1193): n is a, c, g, or t
cagggccccagccaggccccagggagtaaggncggctgaggccgcccagggctgtaaagccccgagggaggtaaagccagcccgctccaagcccccacggagcacacgccatagccccagggcgataccagtgcaggcaaagagcacctcgaagccggctgtagataaagaaaggcacgaggtggcgcaggcggtagtcacgcacgtgctgaaggngcagctgaagatgtttgccccagcccacgctgcgcagatcgatctcctccgtgggccggtaagcggctccgcacaaacccagcaccagcagcatggccaggaaggccactgccatgagcacgctctccaccacaatgaggtttccgctccgcgggagcgtccgcagaaccgtcttgttgaagccgctgaggatncccgtggctgttggtgccgcagctctgcacattgtacagcgtgtggttcaggtcatacaggtagtggttcaggaaataaatcatgggcagctgggcgcaggcgaagctcagatggaagaagctgtagaagatggcttggaagaccaggagatagggcgcgtgggagccccgcggaggccgctgcttcatcccctgcccatcctgctccttgtagtgggagtactcatggtacttctgcgccatcctggtgatgtagttgcccatggaagcccaaagaggcacgatggccatgcccagggccacagccgagggcacaagcgtgtagtagcgctcccagtagttggtggagacaaagagggcgtagatgcccacagcgaggaacatcatccacttcgttccaaaaaacctgatgagcacaggtgtgtagagcagggcggcgatgggagtcacgttgatgcccatcagcattttgctgtcgatgtcgggcagccccatgttgccatacttcacctcgcggtaggtctcgtcgtagtgcaggatcagctgcatctgcaggaggcccaggtagacgccgtaggtgagcatgcccccggcgctggcagccagcacgttcttgagcacgcccaggcgcttgcggcggtagtagcggcgctcctcctcctcctcgttgtagttggggtacgcgcccaccagctcgtccagcggggcctcgggcccgtccgggaccccgagcaggtcctcgtcgccctgcggccccgcagcccccgccatcgggtagagcgnggtccgcctccatggcccgaactactgcggactcgcggcggtcgccccggagtccctgcgatcccggg

SEQ ID NO: 318842 - DNA, 1507 bp, Homo Sapiens
ccgttcatcaccatcacgttcgttgttgtcgtcctcgttcctcctcctcttctgactcattcaggtcttcctgggtcctctccccccctgcaagagccagcagcttcagcttctcaaggtggaacgttatctccgtgccttctcggtcactatagggtgaaagttgttggggtcagctgcaccccagagaagtactctgccaacggggagaaggagcctggcgttcactgagtcaaacacccactggggctgcacgtagcccctgccaatgactgaggtttgctgcccagggccggtcgaccatttgatgggtgatgcgggagtctgtgacgtcataggtggccccaatgcacaaagatttgtcccaggacacttccccaccaaaactcctgatgatgaaggccagggcctcacggggcacctctcggttcaggaagaacttcaggccctcaaaaagcttcttgtgcttctcctgcgcctccagctccttcctgcggtcttcctcctgcgctgacatctccccatcggtgggaaactcatccacctcggcctcctcctctgtggcaggcaccaccacgcgggccaggctggcactgagggctgccagtttctccatacaactctcggagtccaacgcgtaggtgccctcaccggcctttgcctctgcttgggcctgaccctcgagcttcgggggatagtggaggttgagcaactggtaaaggcggaagttgacaaagcccagcagcgtggtgtagaactcggtgaaggtggccatgaccctgtagtccacgtctgtcgggtggtcatgggagaaggcatagggagtgatccacacgatgggctgccccagtacctcggcctggtagtaaatgcctttgatggacaggaagaccttgcgcagggcacgggcagcgataatgtagtgcatgaactccacagtgagccggcggcacagctgaatggtctgcacgtggcacttgccagtccgcgggaaggtggaaaacaggaagcacatggagagggcatcgtccaggtcccgcagggcatcgatgaacgtgggataccgttccttgatgatgtggtcgagtttgtagttgggcttattgtcctttaaacgctctacagtgttccactcgctcttcccataagccttccggagcttccggacgaacaccttgtattcacggaacttgttgacaatgggttcgtggaggagaaacctgatgtctttgataaggtaaaacgttcgggctgctgtagaacccttgttaaccttcttcttgtgtttgggttcatggggataaatgcccttcagaatgcacagccgcctaaagtcagccaagctcagctggagcttcttccgggctttgttccgggtgatgtagttggtggccgagcctcgttcatacttcttcttctcaaggcctcccatcgctccacgttgaggagccgactagggccgcgcgtacagggagctccacttcctcccgcacgtgccctgccaagg

SEQ ID NO: 318843 - DNA, 996 bp, Homo Sapiens
  misc_feature (724)..(724): n is a, c, g, or t
  misc_feature (784)..(784): n is a, c, g, or t
  misc_feature (813)..(813): n is a, c, g, or t
  misc_feature (849)..(849): n is a, c, g, or t
  misc_feature (854)..(854): n is a, c, g, or t
  misc_feature (880)..(880): n is a, c, g, or t
  misc_feature (901)..(901): n is a, c, g, or t
  misc_feature (903)..(903): n is a, c, g, or t
  misc_feature (914)..(914): n is a, c, g, or t
  misc_feature (976)..(976): n is a, c, g, or t
  misc_feature (978)..(978): n is a, c, g, or t
ccacagggtaatgggtgtcccgatgtcacgggggactctgtgatccgtgttcccctgaccctcctagtgcacaacttggccgggctcactgggctcctgcaccactgcctgtcaggtccgctgccagccccaagccccccaccagccatgagctcctccagaaaggaccacctcggcgccagcagctcagagcccctcccggtcatcattgtgggtaacggcccctctggtatctgcctgtcctacctgctctccggctacacaccctacacgaagccagatgccatccacccacaccccctgctgcagaggaagctcaccgaggccccgggggtctccatcctggaccaggacctggactacctgtccgaaggcctcgaaggccgatcccaaagccccgtggccctgctctttgatgcccttctacgcccagacacagactttgggggaaacatgaagtcggtcctcacctggaagcaccggaaggagcacgccatcccccacgtggttctgggccggaacctccccgggggagcctggcactccatcgaaggctccatggtgatcctgagccaaggccagtggatggggctcccggacctggaggtcaaggactggatgcagaagaagcgaagaggtcttcgcaacagccgggccactgccggggacatcgcccactactacagggactacgtggtcaagaagggtctggggcataactttntgtccggtgctgtagtcacagccgtggagtgggggaccccgatcccagcagctgtggggncaggactcagcccctcttcaggtgagcgnttctgacaggaacaggccagagccttctcgtgtggncgcangtggtctcgcacaggacgttcgacanccgcccgctgggatcccgggngnctgccttatcnacatgagtgtctgcctgaggcgcacaaggtggggcgggcccggctagacctgtctatattgngngggtgtagggcgagggtc

SEQ ID NO: 318844 - DNA, 1244 bp, Homo Sapiens
  misc_feature (609)..(609): n is a, c, g, or t
  misc_feature (614)..(614): n is a, c, g, or t
  misc_feature (627)..(627): n is a, c, g, or t
  misc_feature (642)..(642): n is a, c, g, or t
  misc_feature (655)..(655): n is a, c, g, or t
  misc_feature (700)..(700): n is a, c, g, or t
tcgtgggaacatttattctgtgtttattctgacattttgaacacaaactagacagcacagacatggggcccgatcccagcctgcacagaagcctctctgcgtcgcgacagtgcagcgtgcggcctctggctgcagcgccggctttcagaaggctggggccaatgccaggggaaccccaggctcagcagggagggagcaggatctgggacagaagatccgaaaagtgaggcctcagggctctgcgggacccacctgctggaatttccaccaccacctgcttctacaaagactgatagaaacaaagacgcagtagtgtggggggtctggtcccagagccccttccccacccacgccccgtctgctttgatcctgatgatggtcgcacctcgccctggggttttctccaggggctttggtgccttgctgtgctcagtggctccctccactcagcatccagaggctgcttcccaggatccacctgagcgctgcaccctgcacagcccccacatccctccaggcgggctctgcactgctgcggctgggaggaagggaaagtctgtcttctttagcatcagctcgggaagcttgcctttgcctcaaatggccaanctgtnaggtatccctgtntcatcatccggttcnctggtgggggctnagcaaatttcccatgaagatgaactgctgaacttcgaggcaaatnacagccaatccagggggcaggctcagcaggacgcggtgtggggggaccagctgcctccagaaacatcccccactggcagaaatccaacctcctcctggtgttccaatcagcaatgagtccagagtcttcagtctgcaggagaagtgctgagagcagcccgggacttcagagccttcctggtgacgcccaggagatgcagaggtgcggcgggaccaccagggaggacctgtgagctcctcactggccagggcttcctgctgcgctcatcggccctgagcagctccctccgagtcttcggggctccgggccaatcgcacagtggagacgccgtgaagcagcagctactccccgactctggcccaggccgcagcctctgtctgacaggggtagcatcgggctccagggacaaagctgggccgagctagcaagaggacagttgtgggggacacaacgatgacagtgactggcagaggcactgccaggacaaagacccaaattaacgtcacagagtcttggtcgtttcaacaagcctgaagtgcatata

SEQ ID NO: 318845 - DNA, 1288 bp, Homo Sapiens
gaatgaacaaaagagcttccatttattgagcatgcttgtgctaagcccctgggctggcctttgtttcattggcacaacagccttgagaggttggtccattatcacccctcagttcagggtaagtggactgaggctgagagaggtgcacgggtttgtcagggtcacatagcacatgaggacagagccagaccaggagccctgtgacatcctcggccaggatgctaaccctaaggacagtgacggtcactcttcacaccgctgtgaagggagaggctattgctctgcacccacagctcagcaatggggaccatgaacgcctctagggcagcccatgtatggggccgctacctacctggtaactgtccacggctgtccatttggaagagatattgatgtgttgtgttttctcctccccagcctgtgggctcctggagccaaaggaccccacctaattcatcactaggcacaaaacagctgctcaataaatgtttactgaatgaatgaacgcatgaagaatcaatgaaggaggcggtgaaggaatgaatgagtcagtggagaacctgaattggttcctcaagccagccttccactgccctgcatgccctggcatcttggacatttctggcactaggctgctcctgccacctcactgccaggggtgatacagggctgccggcctctgcaagccggggaagcctacggctgtgccgaggcagggaacagtgtgctgtactcctcctggaagcttaggtccttgaatctccgcacggccagggctgcggtcaggctccaggtgaagatggagaaaaaggagaaggcgatggcggcccgggctgcgtccgtcccttcgttcagtgggttgtccttgggcttggagacctgccactggttggccaggtagcagaatcccacgaaccagaggaaagcccagaaggccgagacaccgatgtcggacaggacggctttcttgcggtccttgacgctgctgatctgcgggaagtacacgtccagggccaggtacagcaggcaggtgaggaaggcgagcacgcccacggccacgccatagctgcaggcgttggggttgcggttgtagatgcagaactcctccccctcggaggcgctgttgaggtagccctcgttcacgatggagccgaacaccactatggagaacagccaagacacgacgcgcaggatggtgtgcggctgccggaccagggtgtaggggtcgaaggcgcccccggctttgcccgctccgtacgcacccccttccatcgtggctgcacccgcg

SEQ ID NO: 318846 - DNA, 538 bp, Homo Sapiens
  misc_feature (28)..(28): n is a, c, g, or t
  misc_feature (33)..(33): n is a, c, g, or t
  misc_feature (60)..(60): n is a, c, g, or t
  misc_feature (116)..(116): n is a, c, g, or t
  misc_feature (151)..(151): n is a, c, g, or t
  misc_feature (237)..(237): n is a, c, g, or t
  misc_feature (294)..(294): n is a, c, g, or t
  misc_feature (297)..(297): n is a, c, g, or t
  misc_feature (304)..(304): n is a, c, g, or t
tccgccagggctgcggtcaggctccagntgaanatggagaaaaaggagaaggcgatggcnggcccgggctgcgtccgtcccttcgttcagtgggttgtccttgggcttggagaccntgccactggttggccaaggtagcaagaatccccantgaaccagaggaaagccccagaaggccgagacaaccggatgtccggacaggacggctttcttgcggtccttgacggctgctgatcntgcgggaagtacacgtccagggccaggtacagcaggcaggtgaggaagcgagcacgnccnacggccnacgccatagctgcaggcgttggggttgcggttgtagatgcagaactcctccccctcggaggcgctgttgaggtagccctcgttcacgatggagccgaacaccactatggagaacagctcacatccgggcctgctcctccagctcacccacgacctctgtgtccagctgcctatccatgaaggatcgaattccagaatcccaaactctaaggtcaacatgagaccaaggaggcat

SEQ ID NO: 318847 - DNA, 1715 bp, Homo Sapiens
  misc_feature (1677)..(1677): n is a, c, g, or t
aggtccggaattcccgggatagaaaaaccagcaagaaggcggcgggggaagatggcggtcctggggtagagtttgcaagctttctgactaggctagtcgagtaactattcgggtcatggcgtcaaactcaactaagtctttcctggcagatgccggctatggcgaacaggaactggatgccaactctgcccttatggaattggacaaaggcctaagatctggcaaacttggtgaacagtgtgaagcagttgttcgctttcccagactttttcagaagtatccattccctattcttatcaattctgcattcctaaagttagctgatgttttcagagttggaaataatttcctgaggctatgtgttcttaaagttacccaacaaagtgagaaacatttggagaagattctaaatgtggatgaatttgtgaagagaattttttctgtgattcatagtaatgatcctgtggcaagagccatcaccctccggatgttgggaagtctggcatcaataattcctgagaggaagaatgctcatcatagtattcgtcagagtttagattcacatgataatgtagaagttgaagctgctgtttttgctgctgcaaacttctctgcacagtcaaaggattttgctgtaggaatctgtaacaaaatcagtgaaatgattcaaggtttagcgacaccagtagacttgaagctaaaattgatacccattctacagcacatgcaccatgatgcaatcttggcttccagtgctcgtcagcttttacaacagctggtcacatcctatccgtccaccaaaatggtgattgtgtctttgcacactttcactctgcttgcagcgtcatctttggttgatacacctaagcagattcagcttctgttgcagtatttgaagaatgatcccaggaaggcagtaaagagacttgctattcaagatctgaaattacttgctaataaaacaccacatacttggagtagggagaatattcaggcactttgtgagtgtgccctccagattccttatggcagcttaaaactagggatgttgtctgtcctttccacactatcagggaccatcgccatcaaacattacttcagtatagttccaggaaatgtgagttcttctcccagatcttctgatttagtcaaattagcccaagagtgctgttaccataataacaggggcattgcagctcatggagttagagtcctaactaatataactgtttcttgtcaagaaaaggatcttttggcactggaacaagatgctgtctttggcctggaatccctactggtactttgtagtcaagatgatagtccaggtgctcaggccactttaaagattgctctaaactgtatggtgaagttggccaagggcaggccccatcttagccagtcagtagttgagaccttgttgactcaattgcacagtgctcaagacgctgcccggattttgatgtgccattgcctggcagccattgccatgcaactgccggtgctgggtgatgggatgcttggtgacctcatggagctgtacaaggtgattggacgatcagccacagacaaagcacaagaacttctggtgagtttggctactgtgatttttgttgcaagtcagaaggcattgtctgttgaaaagtagggcagtattaagcagcagctttgaagtgtctncaatggatggactgtataccgtattgccagacaggctt

SEQ ID NO: 318848 - DNA, 1335 bp, Homo Sapiens
  misc_feature (128)..(128): n is a, c, g, or t
  misc_feature (179)..(179): n is a, c, g, or t
  misc_feature (997)..(997): n is a, c, g, or t
  misc_feature (1255)..(1255): n is a, c, g, or t
gggaaaactttttttcggtccaatatggcctgtctgaatgggaaggaagttcattctgcatttccggtatcctctcccttattcttccctgttcgctgtcatcatctgacttcgggcttccggtttgngtccggacgcatcctccgtttctgagtcactgccaggcccccctctgaggncccctcactctcagagtcactgactcggggtttggggtagctcctcattttccgaatcactggcctggttccttgggggatcctcactttccgaatcactgattcggggtttgggaagctcttcatttttctgagtcactggcctggtgcctcggagggtcctcactttctgagtcactgatacgaggtttgggaagctcctcattttcagagtcactggcctggtgccttgggggttcctcactttctgaatcactgacctgaggtttaggaagctcctcactttcagaatcactcattcgaggtttgggaggctcctcattttcggagtcactggcttggtgccttgggggttcctcactctcagagtcactgatttgaggttttagagcatcttctgtttcagagtcactagcaggactcttctggagctcctcaatctcagaatcactggcgggatgcttcccaacatcttcgttttctgagtcacttgcatgcccattaagaagttcctcattttcagagtcactaccaggtaatttcctggtctcttcactctcagagtcgctcccatgctgattgacatcctcattttcagaatcgcttgcaggaggctctgcacgttcctcagattcagagtcgctgtccttttgcctgtgaagctcctcactttcagagtcactagcattaagatttaagggctcatcgttctcagagtctgtcacatgatgtcctttggggaggccatcttctcgatcactagtttcattctctgaatgacgttctacacttccagtgtctgatccggagtgttgctnatttacatcatcctcaccgtctgaccctgaatcccgttcatcctgtactggggtagcaccaccatcatttgactggtcgccgctgtaatattccgagtccatggcaggcggactctcagcggggagtgtccgcgccccgcgccgcccccgtcacctccttccaggcggtgtgaccccggatggcgcggctaagtgttcagagactgccgcccgaccggagaacttaacgggtgcggagggtaagaaagcggtagcggnaaaggcgaattctttgacctggaagccccggcggaaaaggccgtacccggcaggctggcgggcgggcaggcatgcgatcc

SEQ ID NO: 318849 - DNA, 1718 bp, Homo Sapiens
  misc_feature (1583)..(1592): n is a, c, g, or t
  misc_feature (1655)..(1655): n is a, c, g, or t
tgcagctcctactgttggacacacctggccggtgcttcagttagatcaaaccattgctgaaactgaagaggacatgtcaaatattacagatccacagatgtgggattttgatgatctaaatttcactggcatgccacctgcagatgaagattacagcccctgtatgctagaaactgagacactcaacaagtatgttgtgatcatcgcctatgccctagtgttcctgctgagcctgctgggaaactccctggtgatgctggtcatcttatacagtagggtcggccgctccgtcactgatgtctacctgctgaacctggccttggccgacctactctttgccctgaccttgcccatctgggccgcctccaaggtgaatggctggatttttggcacattcctgtgcaaggtggtctcactcctgaaggaagtcaacttctacagtggcatcctgctgttggcctgcatcagtgtggaccgttacctggccattgtccatgccacacgcacactgacccagaagcgtcacttggtcaagtttgtttgtcttggctgctggggactgtctatgaatctgtccctgcccttcttccttttccgccaggcttaccatccaaacaattccagtccagtttgctatgaggtcctgggaaatgacacagcaaaatggcggatggtgttgcggatcctgcctcacacctttggcttcatcgtgccgctgtttgtcatgctgttctgctatggattcaccctgcgtacactgtttaaggcccacatggggcagaagcaccgagccatgagggtcatctttgctgtcgtcctcatcttcctgctttgctggctgccctacacctggtcctgctggcagacaccctcatgaggacccaggtgatccaggagacctgtgagcgccgcaacaacatcggccgggccctggatgccactgagattctgggatttctccatagctgcctcaaccccatcatctacgccttcatcggccaaaattttcgccatggattcctcaagatcctggctatgcatggcctggtcagcaaggagttcttggcacgtcatcgtgttacctcctacacttcttcgtctgtcaatgtctcttccaacctctgaaaaccatcgatgaaggaatatctcttctcagaaggaaagaataaccaacaccctgaggttgtgtgtggaaggtgatctggctctggacagggcctatctggcccctggggggacgctataggatggttggaagtttggcgcctgctgtgcttaggtttcccacccactccttcatggagctgatgtggttccttcctagggccgtgcctttgcacctttatgggaacctaacgccgattgtgtcctgttggtcggggcatgtgtaacccactaaccgggtaatgagcatggccacatatgagccccgaatccgacattagctgagagcaccaggctgaagcctgtgccccatgagggcctggatgctcttgttgcccctcacaggagcaatctctcaactctgagtgttaagcggtgagccaccagctgggggctttgggggctttgatcccagttannnnnnnnnntttcccatttaatgtgttttgcaagcctggttggagacactggggagggcacttgcaaaaaanaaccttgccaattgcccttgggaggaggttgataaccattttctcccttggggagtgtgatga

SEQ ID NO: 318850 - DNA, 2944 bp, Homo Sapiens
  misc_feature (79)..(88): n is a, c, g, or t
  misc_feature (113)..(127): n is a, c, g, or t
  misc_feature (135)..(141): n is a, c, g, or t
  misc_feature (143)..(265): n is a, c, g, or t
  misc_feature (2532)..(2584): n is a, c, g, or t
gggggggacccaacccccttgttctggccccggtttttttggggaaaaattaagcccgggttccttctcccttgggggnnnnnnnnnnaaaaaagggtttaaaaagttttttnnnnnnnnnnnnnnncccccccnnnnnnntnnnnnnnnnnnnnnnnnnnnnnnnnnnnnnnnnnnnnnnnnnnnnnnnnnnnnnnnnnnnnnnnnnnnnnnnnnnnnnnnnnnnnnnnnnnnnnnnnnnnnnnnnnnnnnnnnnnnnnnnnnnaaatggttctttattcataaacttgatgcaagtttacaaaatttactgtacattgccaaataaatctgcaattaaaaataaaatccattaaacaaagcatgccaaatgtgcagctatcagtctgcttgccatcaggatattaaagaattcaacaatgtattcaagatttagccttaggcttaaggaactttactgatttaaagaattctgccttgtcacttgttatctgagcaactggcaatcagaactttatacaaatgtaatcaagtgaacaagaataccagaaaatctatttactgctctcttaaccaaaatggaatcaaaagaaattaaacacacacaatgtagaaatgacaagtctctcagatgtggtttacaaagttaaaaactgaatctcaaagctaatgcacaagaaacacttttgaactttgtaacttgtttgtgcagaaaaatgtgcttctggatttcttgttaaaagtgcttaagaactagaatttacttttaaatcaaacgtgggtgtataaaaaaatctattaccaaccaaaaaggactgattcaggtaaggcaataaaatggagagtaccttgatttgagtcaggttctataaaaaaattaacatatgtagagtttctattaatctttcaatgtaaaagccattgttttgacatggcaaaaattactgtaagaagtctccaaattaagtatctttttgtacttaactgcacagcttttgctcaaggagtctttgtgccaatcactttataagtttattagtttacaaacgattgcaacatcccgttaataaaatggaaacgtaagatgacttagtattttaaataacttgaagctctgtactgtggctcttgttcataagaaacactgaaccaacaagcagcagattcagcccagccaagactctgatgccccagtggaaatcactactcacaagccttaattgatacagttttacactgctttgcctaagaagtacaatacaactcaattaagagtattatcttcaggaaacaattcatatcttcacatagtcattaaaaagtttaacaatttaatgagtaggtttcctatcacattttggcaatatcataaaatggttttagacatgaaagagctattatgatttagaaggccttaaatttcctaaaccaatattgaacatcgattaaacctgtattggctgtaaatggaacaaatatattgcaaatccttgttaacccatgggctcaatataggaaagttaccctaaagcctcaacttcagtagcctgatgttgacttggctgctttaaaaagttcacttttcaagaaaaagagataaggagtggccagtatgtgtatttatcaggaaaaatacagtaaaggccccactgctcagtccaagatatctaaaatgagcaaaatgcgaaggctgtaacttatactggatgtcagatgacagattatccactaaaatatctattaactaacatcttcggtactgctgtaataggggcactcaaagcttttgtctgcatgttggaaagattttctttaaagcaacattagtccaaacatacaacagtcaacatatttagccatcttcctttggaggggtgtaccagccatttttctcatgtatctgtacaatggaattataggattgttgggctcttgctagattatattgattcttatttgctccaaactgcactctggctttgcctttgactaaggtggcatttatttgcatgatgaccgattctattgagtaggcactgctccagccctgttttgtgaaaagttccatacataatgctcctccacccaatacataccctcctgagagaacaggtaacaccactcgaacaaatggaggatcaaatggaaagttatccttaaaagagaagttaagcaaaatatattctatgccttctttttcttttaagatctgaagatcactgtgcaaaggactatcagggtcaaccttctgcagtttaacatgccagtcatataaactgtcatttatgagttccactgaataaatccctgttttataactctgtgatctgtatatgtccctgagctctttcataagtctatctgaagcttgcactgacccagacactgcaccatttaaatggtcttgcctttgagtcttcctaattttctctaatattgccaaattttctttttcaattccttcatcctctgactttttcccactaataggctcttcttccttcatctcatagtgatctaagtcttctatannnnnnnnnnnnnnnnnnnnnnnnnnnnnnnnnnnnnnnnnnnnnnnnnnnnntgtcccattctgacccgtgggtagtggttgatctagcatctcaacatccaggtgcttaggaaggttatataaactgcagagttcacatatcaaccacttcaattgctgacgaagcaaattgttgttcttagtatcttctagacgttccagaactgatgtcagatttgggtcttcagaatccacaaaccatatcggtgaagaagatggataggattccgtgatgttgcagtggagcgtgagtggcggcggcagcgagtgcgggctgccctgctgcggcaccaggaactggcagtgcagctcgtccagcttccaactgacgatgcggaatcgctcgtggttcttgtcgaagatggacgccag

SEQ ID NO: 318851 - DNA, 454 bp, Homo Sapiens
tggccttgcctttcagtcttcctaattttctctaatattgcccagttttctttttcagttccttcatcctccaacttcttctcactagtaggctcttctttcatctcacagtgatctaagtcttctatatcttcatccatctcttcttcttcctcttcttttgaagtcacttcttctgttgtcccattctgacccatgggtagtggttgatctggcatctcaacattcgggtgcttaggaaggttatataatctgcagagtccacatatcagccacttccattgctgatgaagctgctgcatccagggtacaatgtgcctttccagaacacagcagcgacccgggatagagggatcgctcaaacagcaccagaggctgcattccaacttttcctccatcaacaagcccgttttcattgttagtttctccttaaacacgattggctgaacatgcg

SEQ ID NO: 318852 - DNA, 1856 bp, Homo Sapiens
  misc_feature (153)..(153): n is a, c, g, or t
  misc_feature (220)..(220): n is a, c, g, or t
  misc_feature (233)..(233): n is a, c, g, or t
  misc_feature (240)..(240): n is a, c, g, or t
  misc_feature (242)..(242): n is a, c, g, or t
  misc_feature (244)..(245): n is a, c, g, or t
  misc_feature (248)..(250): n is a, c, g, or t
  misc_feature (254)..(254): n is a, c, g, or t
  misc_feature (258)..(258): n is a, c, g, or t
  misc_feature (287)..(287): n is a, c, g, or t
  misc_feature (289)..(289): n is a, c, g, or t
  misc_feature (295)..(295): n is a, c, g, or t
  misc_feature (299)..(301): n is a, c, g, or t
  misc_feature (303)..(305): n is a, c, g, or t
  misc_feature (307)..(307): n is a, c, g, or t
  misc_feature (315)..(318): n is a, c, g, or t
  misc_feature (327)..(327): n is a, c, g, or t
  misc_feature (338)..(338): n is a, c, g, or t
  misc_feature (345)..(346): n is a, c, g, or t
  misc_feature (363)..(364): n is a, c, g, or t
  misc_feature (372)..(372): n is a, c, g, or t
  misc_feature (374)..(374): n is a, c, g, or t
  misc_feature (389)..(389): n is a, c, g, or t
  misc_feature (392)..(392): n is a, c, g, or t
  misc_feature (402)..(433): n is a, c, g, or t
  misc_feature (441)..(441): n is a, c, g, or t
  misc_feature (495)..(495): n is a, c, g, or t
  misc_feature (501)..(501): n is a, c, g, or t
  misc_feature (514)..(514): n is a, c, g, or t
  misc_feature (516)..(516): n is a, c, g, or t
  misc_feature (553)..(553): n is a, c, g, or t
  misc_feature (557)..(557): n is a, c, g, or t
  misc_feature (566)..(566): n is a, c, g, or t
  misc_feature (638)..(638): n is a, c, g, or t
  misc_feature (642)..(642): n is a, c, g, or t
  misc_feature (903)..(964): n is a, c, g, or t
cagtacaaatcaatacaatgcattttttaacacaccaacagcttgaatgttcttgaagcttttaaacaatgagtttactgtgagcaaacagaagcaaggactcaaagagataattagctcatgcatctggtgctggctaataattttcacatnaatgaagaaaccactctatgttaactgtatttatttttaaaaaatagtttgaaatggtaataaaatncaattttcagaancatcttntntnntcnnntagnactncttaatttaaaaaataattcagttacttncntcttgncttnnntnnntnacatttannnnaaacttccntccctactatnttcttgnntatggttttatctttcnnaatatatntntttatatatattttnctncatttcttcnnnnnnnnnnnnnnnnnnnnnnnnnnnnnnnnctgttttngaaaagagattgtttggttcacacggtatactttggtttatttaaacaggtaanaaagcngtccctacttctnangagaaaatgtggtttctgacttttaggtacatcacgntatnaccagtctnaatgagtttccttttctgtaaagcagaaagtgtcattttcttttcctccagtgttcagttgctcctcttcgnaaanactcttcagagaaagtatctgtacgtctgtattagtacaaaccattccttccctatgtctcaatgcctgacattcagtgcctgacagaatcagcatttggcatgtccttggatatggcatcaatttgatgctttgaactgaaagttctcataatgcatctcaaagtatcttcttaaaaaatataaaaatgtaggccaacttgtgctctcttgtaaggcttgcaaagtggtaattaaataagcagactataactcacaaggnnnnnnnnnnnnnnnnnnnnnnnnnnnnnnnnnnnnnnnnnnnnnnnnnnnnnnnnnnnnnngataagcagattatttttggttaatcttggggaaaatatgacacgatatttatggtttcttttcttttctggtccattttattttacttaatgtactcactagtatcataataagcctatctcctctcctgccttctgatattttagcattcctagaaactagagccctgctgataggctcattcatatgaggagaaatatgcttgcctttcatgctaatgaattttttacaaaactgctcttaaatcatgaatatttcaatgagcacacaaaacaacaggtctcagtgtattgtaaacaccatcaaaacctccacaccattaggcttataatctcacaagcattctgcctttgtcagacacttcacagggtgcaactgggttacttttgcaggcaaagcggagattttgatttctgttgtaaaaagcccaacagagagaaatcggaggctttctcatctctgacccatcagtccaattcttttgtcgtcctttatggaagtcttttctctgttgcagccactttcagtaattgcaaaaggaaagaaaaagtgtctcccacaatccttctctgggagttcatgtttttttgctacttgtcttctgtttctgtttgcgaaggtgagcctctatctcgtgcctgaacaccagcatgcccagctggccgtgggatgcctcgttcatggccttggactgcatgcacatcttgtactgctcgggggtcagctcgtccatgcagcgcttctcatgccagaggtggaagagtcctcgcacaggcgtccgtaccactatgaggttgctgtggagatacttgcgataaaggtgcacatcctctccgccccagcctttgatgtccagatcaaacccacctatattgatgaagtctgaccgcc

SEQ ID NO: 318853 - DNA, 1347 bp, Homo Sapiens
  misc_feature (225)..(225): n is a, c, g, or t
  misc_feature (299)..(299): n is a, c, g, or t
  misc_feature (330)..(330): n is a, c, g, or t
  misc_feature (433)..(433): n is a, c, g, or t
  misc_feature (437)..(437): n is a, c, g, or t
  misc_feature (562)..(562): n is a, c, g, or t
gggtcaccgggaggagacgccatgacgcccgccctcacagccctgctctgccttggtgagatttcaagatgggcgagggggagatccgagtcttggaggaaccccaccccacacacaagccctggtccatcaggagacctcaaaagctcaggaggcacccgggcggggacctgctcaggcttcagggcaaatgcctcacagggaactctcttccagggctgagtntgggccccaggacccgcatgcaggcagggcccttccccaaacccaccctctgggctgagccaggctctgtgatnagctgggggagccccgtgaccatctggtgtnaggggagcctggaggcccaggagtaccaactggataaagagggaagcccagagccctgggacagaaataacccactggaacccaagaacaaggccagattctncatnccatccatgacacagcaccatgcagggagataccgctgccactattacagctctgcaggctggtcagagcccagcgaccccctggagctggtgatgacaggattctacaacaaacccaccctctnagccctgcccagccctgtggtggcctcaggggggaatatgaccctccgatgtggctcacagaagggatatcaccattttgttctgatgaaggaaggagaacaccagctcccccggaccctggactcacagcagctccacagtggggggttccaggccctgttccctgtgggccccgtgacccccagccacaggtggaggttcacatgctattactattatacaaacacccctgggtgtggtcccaccacagtgaccccctggagattctgccctcaggcgtgtctaggaagccctccctcctgaccctgcagggccctgtcctggcccctgggcagagcctgaccctccagtgtggctctgatgtcggctacgacagatttgttctgtataaggagggggaacgtgacttcctccagcgccctggccagcagccccaggctgggctctcccaggccaacttcaccctgggccctgtgagccgctcctacgggggccagtacaggtgctacggtgcacacaacctctcctccgagtggtcggcccccagtgaccccctggacatcctgatcacaggacagatctatgacaccgtctccctgtcagcacagccgggccccacagtggcctcaggagagaacatgaccctgctgtgtcagtcacgggggtattttgacactttccttctgaccaaagaaggggcagcccatcccccactgcgtctgagatcaatgtacggagctaagcagatccagcgcagcacgacacggtgacgtacactgtgtcc

SEQ ID NO: 318854 - DNA, 929 bp, Homo Sapiens
  misc_feature (591)..(591): n is a, c, g, or t
  misc_feature (739)..(748): n is a, c, g, or t
cgggtaaggggcccactcccagtgttgaagctccagccggaggcgctggagcccatctactctctggagctgcgcttccgtgtggaaggaccagctgtatgcacccctggaggctgtccatgtgccctgcctgtgtcctggccgccctgcccgccctctgctcctgcctctgcagccccgatgcccggcccccgcacggctggatgtccatgccctttacaccacatccactggtctcacgtgccatgcccacttgccacccctgttcgtgaactttgccgacctctttctgcctttcccgcagcctccagagggggccgggctgggcttctttgaggagctctgggattcctgcctgccagagggtgctgagagtcgtgtgtggtgtccacttgggccacagggcctggagggcttggtgtcccgccacctggagccttttgtggtggtggcccagcctcctaccagctactgtgtagcaatccacctgcccccggactcaaagctgctgctgcggctggaggcggccctggcagatggagtgcctgtggccctgcggaccgatgactgggccgtgctgcccttggcggnggactaccttcgtgggctggcggctggtgtctgagccccgggagaccaggtgggggcaggacctgtggccctgtggggggcacaggacacctcctgtagctttggcggcaaaaaccctgcatttccgacaggccccgcctggcttggnnnnnnnnnnggcccccggttgggagcacggctcctggggtgggggagacggcccgagaccgtttttcttgttcttaaaagaaccttcgacggggtatgttatataacaaaaatgatgggtctaatcttgggggccggaagacccatgtgaggccactgctcacagagaccctccgcttttcccaaacaga

SEQ ID NO: 318855 - DNA, 1353 bp, Homo Sapiens
ttcattaaagtccattgatcatcacaaaaacccaggaaatgcaactaaggagaaaacaaacgtccaaccaagatctaagaacccagagctatggaggagacgttgcactggactgctgggtgtgcacaagggggcaggaggggcgatccccatggggcatggccactgggcatggggaaacacaggagggaggccaggcagctggctgggcggttatgttaaccgctgcacgatgacagcattgagcaggttggcttccttcagggtctggctctcatcagccagctctttgttcgggaaagtagtcatgaggataaagctggtggcagccatggctggccgggcatccacgatgaagagtcggatgtcgctgatcctgtggctgtggttaaatttctgcaccagcctcccgccgtctgcaagccgaatttggatgtttgtggtaggctctgattcgtcgattaagatggaagagctggctttggcttcattttctgcctgttgggctggagagctggtactcaacacctggggggcagtgctgcccagtttctgaccctcgccagtgaaggctttgaaggctcctttgggcttcacaaagtcctcgtcccgatggtcctccatatccaagttcacctgtccaccgtgagctagcctccgaagctctgctggcacctcccctctgcggatagactccagaaactgggcattggatgggtcttggtagcttctgagttctccattatccaggctgaatccactcttccagagtttcaatactacatgaacatcttggctggaatgctgcctcttttctcctgccacataggcagactcttcctctggtgctgccccaaggcggtagccacctcctgcaaatggtctcggtttactggtctctccagggctcttggtcactcgctccacagctacagctccatgctctttggcacctttaaagagatcatccaccagctcgttgggacttttcttcctgggagggccaacaatctgctgtccacttctctctgagcccccagcataaaacctctggccttcctcttcctcctcatcttcatcttggtcatgaatgaggtctctgaaggatgtcactctattatcactgggggctgtgcctctggacactgaactgggggttgcctgcgaaatggtcacaatgtcttcatcccctccgtcctcataaaagctcgctagcgcgatctgcaagtcccagccggccgactcgagaaagaagcgggcccggtcctcctcggcgcccgtcaccgccacgaactccctcagcgcctcctgtcgctccgccgccatcttcgccccgtgcgccttccaaagccc

SEQ ID NO: 318856 - DNA, 2082 bp, Homo Sapiens
  misc_feature (101)..(115): n is a, c, g, or t
  misc_feature (1112)..(1112): n is a, c, g, or t
  misc_feature (1255)..(1255): n is a, c, g, or t
  misc_feature (1509)..(1509): n is a, c, g, or t
  misc_feature (1515)..(1515): n is a, c, g, or t
  misc_feature (1591)..(1591): n is a, c, g, or t
  misc_feature (1999)..(1999): n is a, c, g, or t
  misc_feature (2023)..(2023): n is a, c, g, or t
  misc_feature (2060)..(2060): n is a, c, g, or t
gagaaaataattcacagaaagagctagagtgtcgaggtagaggtagcaattttaaatggagatgttagggaaatcctcactgagaaggtaacatttggtgnnnnnnnnnnnnnnngtggcaagcaagggaaccatccagatagggggcttgtaggtggtgggagatacgtgggatgaattgggacactttgagttgcatgtttgagaagtaatatgaaggcagagagcggataggagctgcggaacagatggaccaaatggacgggcaagatgccgcaaacacaggcaggggcgggggcagactgagggtgaagtgagtagcaccgcagatcgggtgtgaagccgcactggctggaaggtgccactgttagcagaggagcgggggctgctcgtgggactccagagcccatcttgtctttcatgcccacagatggagatgggtgtcgtgagctggtggtgggctacacagaccgtgtggtgcgagctttccgctgggaggagctaggtgagggtcctgaacatctgacagggcagctggtgtccctcaagaaatggatgctggagggtcaggtggacagcctctcagtgactctggggccactgggtcttcctgaactgatggtgtctcagccaggttgtgcgtatgcaattctactgtgtacctggaaaaaggacactgggtcccctcctgcctctgaagggcccacggatggtagtagggagaccccagctgcccgagacgtggtgctgcaccagacatctggccgtatccacaacaagaatgtctccactcacctaattggcaacatcaaacaaggccacggcactgagagtagtggctctggcctctttgccctgtgcaccctggatgggacactgaagctcatggaagaaatggaagaagcagacaagctgctgtggtcagtgcaggtggatcaccagctctttgccctggagaaactggatgtcaccggcaacgggcatgaggaggtagttgcatgcgcctgggatggacagacatatatcattgatcacaaccgcaccgtcgtccgcttccaagtggatgaaaatatccgtgccttctgtgcaggcctgtacgcctgcaaagaggngccgcaacagcccctgcctcgtatatgtcactttcaaccagaagatctatgtgtactgggaggtgcagctggagcggatggagtctaccaatctggtgaaactgctggagaccaagccggagtaccacagcttgctgcaggangctgggcgtgtatcctgacgacctccctgtgactcgtgccctgcttcaccaaacgctctaccatccagaccagccaccacagtgtgctccctcaagcctccaggatcccacctagctgtacttgcctcatagctggtgaaggattcttctgaacccccaccctaccccctaaaggtatctgtggtattggcaggatagggaatatgcataaaagaaatgcaggattagactctgggcatgaaagatggcagcanccctanggtgaccgtgaactatagacctcgcagtcttttcggtgaaagaagagacaagttgaccctctgcccatttccttanagacctcacccatcatgccagcagggtcataggaccctggccttgttccaaatcatctgggacatgacccactccccactgtcactgtgttgaaaacagagacttgtttgtgtggccccaacacccataaggaaaccaggctttaggcccaggggagcagtggaggtaagggctccaccccatcttaagctctgtcttccgtggcacaattccaagttcttgacgttagtaattgttaaaggaatggcaaactgttttgttttgaaggatctttctacagtctggtcttacccatgttcctagcaaccctgagatgattttcttccatttaccaaagcagccgggtcagtgctttctcacgttgccgtattcttcaggtattagtcagcttcagaagccctgctcccntttttccacccacccattcccctntaaaacagcttattgtctccaagacaatagacatttnaaatgtgattcgggtttatgat

SEQ ID NO: 318857 - DNA, 1776 bp, Homo Sapiens
  misc_feature (416)..(416): n is a, c, g, or t
  misc_feature (545)..(545): n is a, c, g, or t
  misc_feature (1533)..(1533): n is a, c, g, or t
  misc_feature (1576)..(1576): n is a, c, g, or t
  misc_feature (1580)..(1580): n is a, c, g, or t
cggccctggcggtttaaccaaaatgcctttttgtcctataacagtttatagagttaatgcccgcccacaaaggctttgtcccttttgcccgtgaggggtggcttttggaaccttccccctggaaagggtgcccgcgggcccccagttaaaggagcctttcagaagcctgccttcctggggcctggttccacacttggcttttttggggtgtaaactggattgccccccaaaggtccaagggcccagcccccttttttgtgggaccccctggaagcctcccaaaaacaaaaggctttggagtcggggcacggccagccccatgggcatgtgtgttcaaaggccggaatcccggggcctcctgtgtaaagaaaaacaaaagagtggaagtcggaaggtcgaaccagccccctgactgngggcatccggcctggtggcgtcggtggtaacggcggacctttcggatttgcgcgagcgccgcccgcgtcccgttggtggccgaggtcctggcccggtgcggagtgcccaggccgcgcagggtgttgcgnaagccctcggcgctaaagtagtacaccagcgggtccagcacgcagttggcgccggccagcagcaccatcaccatcagcaccccgcgcacgcgatcgcgggcaggcacgctggccgccaccagcttgctccgcagcagcccgtagaccgccagcgtgctgttgtagggcacgaagcacagcaggaagatgacgaggttagccagcaggaggcgcacggtcttccgccgccgctggctctgcgtggcgtcggggcgcgccagcgtccagaagactcggcccgacgagtagaccaccgccgccaggggcagcaggaagcccagcgcctcggccagcagcacgaggggcagcagcctgcctttccacagctcgtcgctgaagctctcgaagcataggcgcacctcgaggtcccggtagcggcaacgcgagggcctgtgcacgcgggcggcgggcacggcaagcaacaggatgagcgcccacacgcccaggcagagcagccgcgccacgcggggccgccgcaggtggcgcagtcgcagcgggtgcacgatggcggcgtagcggtccacgttgatgagcatcaggaagatgcagctgccgtacatgttcatctggaagatggcgcccgtcgtctggcacaggaggtcggggaagggccagtggtgcagtgcgtagtaggagagacgaacgggcagcgagagggtgaagagcaggtcgctggccgccagttacacatgtacacgctcaccaccgagtgcacgcagcgcgcgcaggaagacccagagggtagcgcgttgagggggagcccggcagccagcaccaagctgtagaccaccaagtgcaggcggtgggtaggtcggtagtcaggacacgggagaacagaactgttggttgaggagctgttggctaacatcgtgccaaagtgggattgggagctaggctggggatgccatggagcacaccagaatcatggcatggcattcacctccggggntggggcctagaggctgtacagacatggtcccaaaacaagcagngggnggtcatgggaatgtgggctatggctgcagggacagatggctgccaagggttgggtgcgtttggtcacagcttcatcagcagcagagaccttatgttttcaggactctgcctttgtatgtggtgtttcttcaacttggaatgccctgcctcccgttctccaactggcaagcctagtattttctcaggactctgcaaa

SEQ ID NO: 318858 - DNA, 1816 bp, Homo Sapiens
  misc_feature (872)..(885): n is a, c, g, or t
  misc_feature (907)..(907): n is a, c, g, or t
  misc_feature (1570)..(1570): n is a, c, g, or t
  misc_feature (1695)..(1695): n is a, c, g, or t
  misc_feature (1720)..(1720): n is a, c, g, or t
ttaatatataaaatgcatttttattatgtaaaataagaaatatttgtatcagcaaatttacttctagaaggattatcctcaataaataaagtaattgccattgaggtagggagaaggtgtctttctcctatttttaactcttcattcactgttaactttactgtttgtttggttttgtatttagagcgtgcttgttggcccactgggtatgctcagttactggaagatgttttggctgtggcctcagacaggcacttgaggcatagatgtacatacaggtctgccacctgaagaggcaaactgacttgacttggcccaacctctcacctctgttgaggggacctcttcctactcactgcagaggggttcacttgttcccaccacaagcgcagaatgccttgtacttcacaaccctttgctccccagggagctctgcaagtcccccagaaatacttgcccaaccacggggacccttggaagggtccagctgctgaccaccagcatcatgtgactcccagtgccagtgacatctggaggaattgagcaatggctgaggtggaatttcatttggcacttaatgcaatcctctgcttctgccagaggcggtgaattctatataaagctgccaaacctggccgtcttctcactgagccttgaccccttccatccaagggcaaggcaatggattgctgtgcatgactcacgcgcagtaactgtggcattggggcctagcccagctgagctgagcagagcaggccggcctggcggaagtgggtcctctccgctctaacctctggctctgatgagcagctacataaactgagacaggatatagacacatcctgcctgagttagcagcaagaaatagccgnnnnnnnnnnnnnntgcagttctcgcacagcagggnatcctgccataaatcaatccgaagtctaatgtggaatggcttgcaagcaagggctgcaccgctgtttgtctcccaaggccagtgttgaaggtctgaaacctgagtcctggagaactgcttgggctgctgggctgggctgggcacgggggcgggggtcaggcaagcccatcctcttcagacatgagaatgcctctcagcctcacctcctcagtgactgaattggaataatgacagtggctcctgtccctttaacccaggacctgccgtatacacacacataaacatatgctcaagttacgtgctccgggaaccacagtctcatgtgcaattatataaacatgcccagcacggatccagcacttaggatgtgtcagactccgtgccgggacatttatacgcacttcgtgctgctggatgagttatctcctgttattattcctactttcctactttgcagatgaggaaactggagctaagagaggctgccttgtttataggcagtgcagatgatcccagtgcagactgaggggcctcgctcccaagcaccactgatgcctgcgcactcccaggctgacgcaagcacaaccacaggcacatggagtgccgtgtacacacgtagaccgaagcagcactcctccacgccaagctccaagctcaggcggngtgaggggtgaggcctcacaaccccctggatttcaaagacttataaaagagttggtgtctccaatacccatatcattatcatatcaataaggtatcattgtcacatgataggctcaggatatctnctctctgacagactctaagaatcanaccgcggcaggttgggggtagaaaagggatgtacattaggtttttttggggaaaatcaaaggttagtttttattggcaaagtccaacggcagaaga

SEQ ID NO: 318859 - DNA, 2211 bp, Homo Sapiens
  misc_feature (27)..(27): n is a, c, g, or t
  misc_feature (1544)..(1544): n is a, c, g, or t
  misc_feature (1621)..(1621): n is a, c, g, or t
  misc_feature (1729)..(1729): n is a, c, g, or t
  misc_feature (1733)..(1733): n is a, c, g, or t
ctgggaatatttatttatttatttggnctattaacaccaagatctgcaaaaaacaacctctaaacacaagataagaaaactcgaacattaacattcttcaattttgtgtaagctctgcagtacggaaaatatacaaacttcaaacagctgcaaaaatagtgtctttgggagaaaatagagtctctacatcgatacaagaaaaataggcatttttctaatccatccagccctggggcgggcggagagtatagagtcgccatttgccacctggaggaatgccagctctcctccccactacccacctggggctgggcgggctgggctgctacttaagacaatctttagtcagggtgaaagcgagatgaaaatgccacttgggaaaacacttgtttcctccctctgccagcagctgaattggtcaagtgttatggcccgttagggctgctttggtcagctcctccaatgagagggaggcatgggaatagggctgagaggatgggggatctatcttatggtctcctggaggagagggaaggaaatctgtggcgtcttctctccttcgttcatggccagcttgctctgtgacaaaaataagggcctcctatacagtcatttggactgacacccaggggtgggggactcaagaccttctgggtgttttccaccaagtgagggatgtggcaggtacacaggtgtgaattgtgagctgcccagctactagtggagaaggcaggtcccatcacgttcagagggccggtgcccatcaaaaagaggacccagggctttgacacagtaagtgaaagaaagtgctcgaaggccgagagggaagggcccctccataccccatctcaggggacctggggagggacctgccaccaaggcactggtctctatggtaaagtggggcaggggtgggaccctcagaccatcagggagctctggaaaagcacaggctcttctgatggtggggtgcgctgccatggctcgaatggcagtggggaggccttggaggcttccggatccttccgaggtggtggcctggggctggccgggggaaggggagatcccgggtttgaggggcagttacggaagatgaagcccatgccggggaagaggggcttcatcaggttgacggggcagaaggctgagccagtcgggttgaaatggactttgttccttgtcaggacaggaagtcaggaaaggcccggtcaggaccctggagacgtggcttcttcaaacacacgcactttctcacagccttctgggggctcccgtttgaagatgtagctatgattaggtcgaggggaggcagcaaaggcaaggactggagatgggctgccatcttcaagaaaggctgggtgtcctggagaggaggctttgtcgttgggggtggatgccagctcctcggcggcaccccgatgttcctcatgactggccaggccacaaggctggggagatgccaaggacatggaaggagagctggcaaggttgccaggctccaggaggaggaggggatgatcacagctgccactcttgggaggagnctggggcccggtgcccatcagggatatcaaggatccttagcagctcctccttctccctgctcctttacaaatacctntctccagctctttgtttgagccctttcaggctcctgtgcaggcaggggctgagtcgcaagacaggggaccctgaggggaagctgggaggggacgccctcagtgctccnccgntgcgtggtcccctaggagtggtgaacctcgctccttctctttcccactgcggctcagcttcgtcctctgcagttgttgcttcaacttggaaatctcttttcggtggtctgtgctgccccaggatgctgagcgcttgtgtgcacaggaactggcacgctcaccttctagctcttgccaggacaggggcgtctgggtggccttgtcattggtgcagcaggtgaaggccccatcagcatctcgtggccactggcccagaaggtaggagctgaggatggtgtccagggagaatgtacgccggacctgaagtggctgaggcctacacactgacttttctggggccaccgagcatgggacgctggctgcacggccacccccgtcccggcgctggtgcggctgctgcagctggaaggggatcgtggccctgagcggctgcagcccagcccggggggagccggcgggggctgggggagagcagccc

SEQ ID NO: 318860 - DNA, 966 bp, Homo Sapiens
ctaactaaaatgcgtaactgatttattaaactttacaaatatcatttacatttagcctgagattaaacatgagaaagttcaacctgaagttagacttcattgcccagttaagcatctgaaaataaagctgagaatgaacatacatcatcaaacaaagcattccaatgaagtctggcaatgaattgtgacacaaactgaactttaatttgctctggtccacatgatcttcagagcctaaaagttcctgttttttaataatgatgggaaaaatatctgcaaatgataaatgcatgaaggtatgaccagatgcaaaattttagttcaacattcctatagcagctgctttaggtgaccattaaaaaacaactccccaatccttactgttcaacatgtacttgaaaacatgcagcagcatggtacagtttattaaatttataaatatcagtacctgtaataaaatataaaatactgactattcctttttcaaatattaagtctctgaatgcttcattcatcctttggtttcaaacccatacaatgcactcatattacattgtagatttcgaatggagacagaacactgtacatctgttggggaaggtggggtgctgtaggaataccaaagcactgcattatagaaagtaaacgttgaagcaaaaatactttctgaatatatactgtacattatgtaaacacactttccgaataagaatcaccccaggccataattttgttttctaggaaaccagaatcttctttcttttaaatcacacactgaagatgcttttttgttaagaaaaagaatgaagtctgttcctgtatttgcttatgtgcttagatatcttggaaatgagtaattattacattcatttgctaacggtttatcctctgcttagttggctggctgttgcaaacacggaatacagaactatttcagtccctgtttttcatttaatactagttaat

SEQ ID NO: 318861 - DNA, 648 bp, Homo Sapiens
  misc_feature (466)..(466): n is a, c, g, or t
  misc_feature (477)..(477): n is a, c, g, or t
  misc_feature (518)..(518): n is a, c, g, or t
  misc_feature (567)..(567): n is a, c, g, or t
  misc_feature (575)..(575): n is a, c, g, or t
  misc_feature (606)..(607): n is a, c, g, or t
  misc_feature (611)..(611): n is a, c, g, or t
  misc_feature (623)..(623): n is a, c, g, or t
  misc_feature (625)..(625): n is a, c, g, or t
  misc_feature (643)..(643): n is a, c, g, or t
tttggatggttaaatactgcactctattttttaaggactctgtgcatggtatttccggtggcagatgtgtaagattttttatgtaaatcgtgttgttttagcagaggactatcagacctgacagcagctggacatcgaggtcctcactggggtggtgactgccacgctgatgctgagtggaagccaagccccttcagtcagagctgggccgatctcagacccaaatgctaccaccaccaagccctgtgtcacgacggcagcggctgcagtcaccagaaacaatccttcctgcctcgacacccgtgccagccccagccaccctgacggcgggctgtccacggaaatgccacggccaagagcccaggtccttcacgctggccttttccctgccgggctgggctccccaatgccttcagagttcgttgtgccgagctctggagatcctgccggacaggtcctgcagacngccttcctacncccgtgctagccccagcccccttggctccgccccctcccanaccgggcgtgtcttttcgcggtctgccgtctcaaacgactcgccgtcgncccacgcnctctgcgtgccttaacttctcgtgcgcaaanncccnaagcttctggtngnagttgttcttctcgtatnttggc

SEQ ID NO: 318862 - DNA, 1666 bp, Homo Sapiens
  misc_feature (1627)..(1627): n is a, c, g, or t
ttttaaaaatgatttccactttatccctttacaacagagtaaattaagcacacagcttgattgaaaagatactaagaactaaactgaacccggtactaaccattttcaaaggctcactacacaaatcacacggtctcctgcaagtctcctgttagcataagccttgacaggtcactggaggaattaccctaaagattcacattacaatccagatacagggggctgccgtggctcgctgaaccacctgcccttattgacccagctgagattgtccacaacagtataaagaaaggactttggaatctgaccatcagtgacatgtggccagcgcccctccctcagctgctctgccttcagcatctgctgtaaggctgggcagccttttggggaacctgctgaaccctgtggtcttagctgttctaggctaccaggtggccactcgaagagaagacgactcaagtaaggcaaagtggtgctggctttgataaggcacggtgcatccacgctcaggtgctggacatccagatgtgcatctgcttggccacctggtgcacgtatccgatgtcaggtctctggtgggggtcagggcagatgcacatgctgaccagttctcgtaacttctcggagtagtgctccccggggagtggggggtagtcacactgctcgatcttctggcacagggagaagagattcatcttatctccatagaaggggctctggagggctgcccatctcgtaacagcaagacagcccaaggaaccagatgtcggacttgaagttgtagccgttctcatggatcctctccggtgaacatgtagtagggcgtccccactagggagtgggctgcggtggtctcagagctgaagaagcggcccagaccaaggtcaccgagcttcacgtacgcccgtggctgtgatgaacacgttggcaggcttgatgtctcggtgcatcacccggcgtgaatgcatgtgctccacggcgctgcacagctgcacaaagtacttccatactgtcctctccgggatgagccgcttctgcttcttaaagtacttgatcatctgcgagaggtcccctgcgtcagccaactccagcacaatgttcagctcgttgtcttcgataaacgagtccaaatacttgatgatatttgggtggttcagttgcttcaagaggccgatctccttgacacagtcctgcctcgccttggcgtccatcatgtcaaagatctgcaccttcttcagagccactgtcttcctgtccagcaggcaggtggccttgtacacctcgctgaactgtcctcggcctatcttcttttcgatctggaagtccgccagcgagcagcgaaaagacagcgtgttgggatgcctctgtgggtcaggaggatgcacaggccccagggtgtggcagaggttgttggaactccctccatggggcatgtggccgggctgtcctgccatcctgcatgccagcctcacgagggcacgaacggcgcgcgggcgggctcggctgccgctgggggaccggtgcgctggcccgcgggcggctggagcggtgcctcccacacgagtttgcggcgcagcggccgcacgcccgtcagcctcgtgccgaattcgccacccgggcggggaangaaaagggtaatacgacgggaaaaagggggggcgagggg

SEQ ID NO: 318863 - DNA, 1126 bp, Homo Sapiens
  misc_feature (228)..(237): n is a, c, g, or t
  misc_feature (882)..(882): n is a, c, g, or t
  misc_feature (885)..(885): n is a, c, g, or t
  misc_feature (911)..(911): n is a, c, g, or t
  misc_feature (946)..(946): n is a, c, g, or t
  misc_feature (976)..(977): n is a, c, g, or t
  misc_feature (988)..(988): n is a, c, g, or t
  misc_feature (991)..(992): n is a, c, g, or t
  misc_feature (1002)..(1003): n is a, c, g, or t
  misc_feature (1037)..(1037): n is a, c, g, or t
  misc_feature (1050)..(1050): n is a, c, g, or t
  misc_feature (1056)..(1056): n is a, c, g, or t
  misc_feature (1065)..(1065): n is a, c, g, or t
  misc_feature (1073)..(1073): n is a, c, g, or t
  misc_feature (1078)..(1078): n is a, c, g, or t
  misc_feature (1087)..(1087): n is a, c, g, or t
  misc_feature (1091)..(1091): n is a, c, g, or t
  misc_feature (1101)..(1102): n is a, c, g, or t
  misc_feature (1108)..(1109): n is a, c, g, or t
  misc_feature (1120)..(1120): n is a, c, g, or t
cctttttgagccataggatccaagccataaaattctttatgcatgttgaattcagtcagaaaagagcaaggctttgctttttgaaattgcaactcaaatgagatgggatgaaatcctatgacagtaagcaaaaacagaaccatgaaaaataattggacatacaccttttcaattgtggcaataattgaaagaatcgataaaagttcatctttggacagaaagcctttnnnnnnnnnntcactccctcttccccctcctcccttattgcagcagcctactgagaactttgactgttgctggtaaattagaagctacaataataattaagggcagaaattatacttaaaaagtgcagatccttgttctttgacaatttgtgatgtctgaaaaaacagaacccgaaaagctatggtgatatgtacaggcattatttcagactgtaaatggcttgtgatactcttgatacttgttttcaaatatgtttactaactgtagtgttgactgcctgaccaaattccagtgaaacttatacaccaaaatattcttcctaggtcctatttgctagtaacatgagcactgtgattggctggctataaccaccccagttaaaccattttcataattagtagtgccagcaatagtggcaaacactgcaacttttctgcataaaaagcattaattgcacagctaccatccacacaaatacatagtttttctgacttcacatttattaagtgaaatttatttcccatgctgtggaaagtttattgagaacttgtttcataaatggatatccctactatgactgtgaaaacatgtcaagtgtcacattagtgtcacagacagagagcacacacctatgcaatatggctaatctatatnttntttgtaaaattccagcatagtttaanatatgatgtcgatattactagtcttgagtttctangagggttcttaatgttatacaaggtaagtnnataaagagatnagnnctttttttcnncacttgatattttctttaaaacagctatacaggnattttttatttanacatgngtttttatnaaaaaaancacgnagttacaanttgnttaaaaggtnngagatnnagatactaacngggttt

SEQ ID NO: 318864 - DNA, 965 bp, Homo Sapiens
  misc_feature (4)..(4): n is a, c, g, or t
  misc_feature (9)..(9): n is a, c, g, or t
  misc_feature (14)..(14): n is a, c, g, or t
  misc_feature (16)..(17): n is a, c, g, or t
  misc_feature (19)..(19): n is a, c, g, or t
  misc_feature (21)..(21): n is a, c, g, or t
  misc_feature (31)..(31): n is a, c, g, or t
  misc_feature (43)..(43): n is a, c, g, or t
  misc_feature (51)..(51): n is a, c, g, or t
  misc_feature (54)..(54): n is a, c, g, or t
  misc_feature (67)..(67): n is a, c, g, or t
  misc_feature (69)..(69): n is a, c, g, or t
  misc_feature (77)..(78): n is a, c, g, or t
  misc_feature (146)..(146): n is a, c, g, or t
  misc_feature (149)..(149): n is a, c, g, or t
  misc_feature (162)..(162): n is a, c, g, or t
  misc_feature (168)..(168): n is a, c, g, or t
  misc_feature (171)..(172): n is a, c, g, or t
  misc_feature (194)..(194): n is a, c, g, or t
  misc_feature (207)..(209): n is a, c, g, or t
  misc_feature (214)..(214): n is a, c, g, or t
  misc_feature (221)..(221): n is a, c, g, or t
  misc_feature (227)..(227): n is a, c, g, or t
  misc_feature (234)..(234): n is a, c, g, or t
  misc_feature (237)..(237): n is a, c, g, or t
  misc_feature (247)..(247): n is a, c, g, or t
  misc_feature (260)..(261): n is a, c, g, or t
  misc_feature (263)..(263): n is a, c, g, or t
  misc_feature (270)..(270): n is a, c, g, or t
  misc_feature (272)..(272): n is a, c, g, or t
  misc_feature (275)..(275): n is a, c, g, or t
  misc_feature (278)..(278): n is a, c, g, or t
  misc_feature (284)..(284): n is a, c, g, or t
  misc_feature (291)..(291): n is a, c, g, or t
  misc_feature (294)..(294): n is a, c, g, or t
  misc_feature (302)..(302): n is a, c, g, or t
  misc_feature (305)..(305): n is a, c, g, or t
  misc_feature (322)..(323): n is a, c, g, or t
  misc_feature (621)..(623): n is a, c, g, or t
  misc_feature (626)..(628): n is a, c, g, or t
  misc_feature (631)..(631): n is a, c, g, or t
  misc_feature (645)..(645): n is a, c, g, or t
  misc_feature (651)..(651): n is a, c, g, or t
  misc_feature (665)..(666): n is a, c, g, or t
  misc_feature (674)..(674): n is a, c, g, or t
  misc_feature (677)..(677): n is a, c, g, or t
  misc_feature (701)..(701): n is a, c, g, or t
  misc_feature (710)..(710): n is a, c, g, or t
  misc_feature (712)..(712): n is a, c, g, or t
  misc_feature (715)..(715): n is a, c, g, or t
  misc_feature (726)..(726): n is a, c, g, or t
  misc_feature (731)..(731): n is a, c, g, or t
  misc_feature (738)..(738): n is a, c, g, or t
  misc_feature (744)..(744): n is a, c, g, or t
  misc_feature (750)..(750): n is a, c, g, or t
  misc_feature (762)..(762): n is a, c, g, or t
  misc_feature (768)..(768): n is a, c, g, or t
  misc_feature (770)..(770): n is a, c, g, or t
  misc_feature (774)..(774): n is a, c, g, or t
  misc_feature (785)..(785): n is a, c, g, or t
  misc_feature (795)..(795): n is a, c, g, or t
  misc_feature (799)..(799): n is a, c, g, or t
  misc_feature (811)..(811): n is a, c, g, or t
  misc_feature (814)..(814): n is a, c, g, or t
  misc_feature (816)..(816): n is a, c, g, or t
  misc_feature (820)..(820): n is a, c, g, or t
  misc_feature (829)..(829): n is a, c, g, or t
  misc_feature (834)..(834): n is a, c, g, or t
  misc_feature (847)..(847): n is a, c, g, or t
  misc_feature (884)..(884): n is a, c, g, or t
  misc_feature (895)..(895): n is a, c, g, or t
  misc_feature (915)..(915): n is a, c, g, or t
  misc_feature (927)..(927): n is a, c, g, or t
  misc_feature (942)..(942): n is a, c, g, or t
tagnaatgngtgangnntntngaaatcccanagcatcattcantcctcctnttnttggcatgtttcngngctctctnntttgcgttcttctcatctactttgctgataactatatatcgctccttcttttcagtttctaaagtctnaanatgaatggctttnggatanttnnagctcaaagtctgataaattanttttctttggaannnggtanatggctntaaatncaagttnttnttttcttcantttgtaataaatnntntattttntntancanttggtnaataaanttnttttgatnctnaggaatcgtgacaggannttttgaagtgttaggagatacataggacagagctcctgcaccattcgcctgtgaacgtttttcatcatactgctctcttaactgtctttcttcttcctgatttaaatatggaattccatttcgaaaaactttattaaaatcaaatccctggcttgctataaagtcaatgctggagctctgacaaacaaatttgacatctggtgaggatctattgaagggtttcgggaaagcatagaagttaaatgacttcgttatatactttgattctgtgtattcttacttaaaattgcaaaggccnnnttnnnttngcaaaaattccttngattgntttttaagcttctnntacttttnttntggattttcaaaacctttttttantgcagagantnaanttccttcattntttcntgaaaantccccntcgttngcgaagaattcngcttcntntttngctttttacantttttgaagnttanttttaaattttntcntntttntttcctttntgcanattggcctgaacntttgccccacccgtgcccgcgcccgcctcagcgtttntactcgccganttccgcggcgactgctgcantagctgaggcanccgcagcggtgacgntcccgggaattccggaccggtac

SEQ ID NO: 318865 - DNA, 1041 bp, Homo Sapiens
  misc_feature (23)..(23): n is a, c, g, or t
  misc_feature (28)..(28): n is a, c, g, or t
  misc_feature (31)..(31): n is a, c, g, or t
  misc_feature (51)..(51): n is a, c, g, or t
  misc_feature (59)..(59): n is a, c, g, or t
  misc_feature (84)..(84): n is a, c, g, or t
ccttgtcgatgaccaagaggtgnagctnttntggggccttgagagactccngggcaccnctttaatcaggagggtcaggcattntctcgccttgccagagacccccacctctgtcagcagatctaagaggttactgatgaggaccttcagctcccgggcaggatccacaatgatggcaccttctttgcctcggaagccttttttgacaccttccttgagggcatcaaacataacctgcagcaggtggcaggcagccagggacacagcctggctttccacgcccaggatggagactactcgccgagttcccagtatgctcagggttgccactgtccgtgactgatgctcagagcaaatgccaaccagcgtacgcagagccgccagcatgaggtcagtctctcccatgtccagtaaacgttgcaagagctgaaccccattactccggaagatcttctccgctccagcatcctccctggccagcaccaccaggttctgagaagccttttgctttttctcagtgcccttctcttctgggtccaacagtatctgaaacatctgttccactttggcatccgtcgaggacatgtatcgcaccttctcctgaatctggcccccgatgttccgcaaggcctcctggaaaactttgttcttgggctccaagctcacacatctctgcaggtcaaggacagcctggtccaggcggcccagcttctctagggcttggctccgccggtagagtgctttgacatccccaccatccttttcaatggctttggatgcctctgtttctgctttgtcgtaatcttccagcttgaggtggcaggcggcccggttccggtgcagaacggcctggtcctggggcgtcgcgtccagacccagggcctgagtgtaggccgccagggcgcccccgtagtctccacatttgaacagctcattgccctccttccgcagctgctccactgagctggccccgggggtggccggccggggctcgggggtccctggaccactcacagtcatcgcggagagggtgtctcgtgc

SEQ ID NO: 318866 - DNA, 1611 bp, Homo Sapiens
  misc_feature (1540)..(1540): n is a, c, g, or t
  misc_feature (1581)..(1581): n is a, c, g, or t
gtaaaattttcaacatttcatttatttcaaaatcgattttattgcagccaaaacagtagaattaactgtacataataaactattatatatatatacacattttaagttatagggaataaagtttattttggcagatagtgttaaacaaaattaaagttgcatacattagtaacataactcaacatcctcaatttggtatagatgtgacacattttcttgctctcttgtgttctgctaaatcaccatacctaaactgctttataaaactgatatgctgaaatttaactttactgttttcgcttacgctctgattccaaacaaaacttttcataagcttcttctatctctgggtccatctcatcatcaatatcatccaagtatggatcaccagccccggataaatctgttccattttcttcataatctggaaaaaagtcctctctttcaagtaattcttggtatttctcttggtaatctggatcagctgcagtgaaaggaacaccatcagatgtataaaatgttggttcattcataaagtagttaggatcattttctggtgttgcttctctatatgttgaagttgcatggactctgccccagttacttgaccggagttctacaagcttcaagagcatctgttttacatctctactgcagtttgcatctaggacaacgttttcaattctctgaataatttcttccatatccatctttcctttttccttccaagcatcttccaaaactgatcctgtcaactttaacaattttactgcacaaattaaattgtcatccataggattagaaaacagggcattcagcaattctcgaagaccaacctgaagaatatctgctcttgtaacctgtccatttgttcccttgatctccaggttaagataaagttctcccagaaagagtacaaatgcatgaaatcgttttcgagtaacttcatccccttttgcagcttgatctttaacttcatattcagtccgacatctttgaagtagcaattggcggaagttgccactctgtgggctaattgtcagatgatgggacaggtaattacacaggcgagctcccatataagagaaatttgggatagatgtggcctgttgatagatgagttccacaagttcttgcaaagcatcatctgttgtaacacaaccattcagggtctctgcaaactgttcaatttcagtttcaaaactgccaggctgctctgtaagatgattcaaaaaatcctgaacatattctgatagagtaggataatcctcacaaccatcctcataggattctgtgtaactggaagaataacctgaagggtaaaattcaggggcattcacagacagcttagacattaatacaggagctacaaccacctggggcttagccattgctgactccgagttctgctgtgggattttatcctgtgaactaggtggagcttttaggggccttgtttgctctgggagcgccccgggccgggaaggccgctgggggctggcggggacctcgaactgggcccctggcggcggggtcgtcnctgggtggcgcagcggcggtggctgcaggaagcccggatcnccgggaattccggaccggtaccagcctgct

SEQ ID NO: 318867 - DNA, 1651 bp, Homo Sapiens
  misc_feature (181)..(181): n is a, c, g, or t
  misc_feature (350)..(350): n is a, c, g, or t
  misc_feature (438)..(438): n is a, c, g, or t
  misc_feature (518)..(518): n is a, c, g, or t
  misc_feature (1624)..(1624): n is a, c, g, or t
  misc_feature (1637)..(1637): n is a, c, g, or t
  misc_feature (1646)..(1646): n is a, c, g, or t
cggctaaaaagagagaggcaagggcaggagtaaaggagagagctgaagcctggggctccgagatggtcagaggatgggagacggggcagtgaaacaaggcttcttgtatcttcagcagcagcagacgtttggaaagaaatggcgccgcttcggcctccactgtatggagggtcggactgcnccttggcccggctggagctgcaggagggcccggagaagcctcgtcggtgtgaggctgcccggaaggtcatccgcctcagtgactgcctgcgggtggccgaggccggcggagaggccagcagcccccgggacaccagttccttcttcctggagaccaaggagcgcctgtncctcctggcggcccctgcagcggagcgcggcgactgggtgcaggccatcttcctcctggccttcccctcggcccccacaaggaatttnctgtgaccatgagacctacagaagccagttagaggtgccacctgcgggggtcctataccctccgggctggggagagttcnctggagctgtggggtgggcccgagccagggacccagctgtacgactggccctacaggtttctgcggcgctttgggcgggacaaggtaaccttttcctttgaggcaggccgtcgctgcgtttctggagagggcaactttgagttcgaaacccggcaaggcaatgagatcttcttggcccctggaagaggccatctctgcccagaagaatgctgcaccccgctacaccccaaccgcagccagccacaatcccccgcctcgctgccccggcctgatagcccctactctcggccgcatgactcactgccgccgccttcacccaccacaccggtgcctgctccacggcctcggggccaggagggggagtatgccgtgcccttcgatgcggtggcccgttccttggggaagaacttcaggggcatcttggcagtccctcctcagctcctggccgaccctctgtacgacagcattgaggagaccctgccccctcgacctgaccacatatacgatgagcccgagggagtggctgccctgtccctctatgacagcccgcaggagccccggggtgaggcatggaggaggcaggcgacagctgacagggaccctgctggcctccagcatgtccagccagctgggcaggatttctctgcttctggctggcagccaggaactgagtatgacaatgttgtactaaagaaaggcccaaagtgacagaggcagcagagggatggtccaccgccccttggcttctgctggtgactcctcctggccactgcatcagaagaacctcctctgccccttctggagcccgaggcctggcctgtcttcgttggggctgataaattgcctctcccagggcctgctgggtgagtcaccatcccaaagcaggaagggtgccctggagagaaccaccctcctcctactctttttccacttcctcctctttctttccccagctgaggaggaacctggggcatttagggcagaggacaaaaggatgtcagcaattgcttgggctgcttggctatgcaagcctcctgcctgctgatggccacttcagggacagcctgggccaaggcacccagggggatggcggcagcttcctgcancctttcagatttnattggtggnattaa

SEQ ID NO: 318868 - DNA, 1346 bp, Homo Sapiens
  misc_feature (113)..(122): n is a, c, g, or t
cactgccaattacttttgaacagagaacatcatatgtaattagaggaggcgggatattgttggtgcagctatatcattcaaaattggcagaagtcctgaagctggtggggctnnnnnnnnnnttggtggaacggcgtatgttgagacctggaatagcttctctggaaggtgctctaaggcagggggtagagtagtacataggtagtcaaatgatgaggctgagggtgtctaccaataacacaacgccacagagcttccttggcacacttcccgctgctgctatgtgggatcctgtctggctcgcttaggattctgcaggtcaccaggtggtgaggccttgcttgctgagatgctccggagagaatgcaagctctgcgtctgctgcaggcgcagggcgagctcccgctcacaggcctcctgaacagtctccgtcttctttatgtcccagttcaaggcaacagccagtgctttggggtcttccttggtaaccaactccaaatcctgactagataagctcagctctggagcctgcttctccctcagtgcagtaaggatgtggctcgccagcgcaacgtccgaggaggtctctctgctgatacccgtgtctactgcatccacctcctcaccaaaggcagctttggactcttcctgctttgacaagaggctgccctctttctccaaagcctggaggtacagctgcaggagctgcttggactgacgcacttcctctctttggtcaagcacctgttggagtgtgtgctgcagccgctggacggtggcacaactctgacgtagttcctgagccaggtctgagcagggagcgtcaacaagcatctggaggtcctcctctgataggaggatgatgctggacagatcttctttcagctgcctggccacattcttccacttcaaccctgccccgctgtctgtttcatctacatcaaaggactcttgggaaatccaagctgtacctccatctgaattgttgtatgcccatttctcattactagccaatgccacaaacttagtattggaaggtagacacagaaagtaatcgtcatcatccactatggtgccatcctctgccaggaccagggtgactggtgtcagggacttatcaatggccagaatgtcacaggccttgctcctcaggtcttcgaggcaggaggcggccacgccgtgctgttcgcggctgtagttgcggcgcagcagacacggctttagagtccggatctcgccagattctggtaccccggcgtccccggtcacctccatcctccacaaggtgggacctgcccaccttcgagaagtcgcgggaggccggagcggcggtccttctactcgac

SEQ ID NO: 318869 - DNA, 1074 bp, Homo Sapiens
  misc_feature (184)..(184): n is a, c, g, or t
cctgttgggtttcgcttaggaatttttgccaggtccacccaggtgggtgaagggctttgcttggtggagatggctcccggaggaggaaggcaaagcttttgcgttttgctggcaggggccaggggcgagtttcccggttccacagggcctcctgaaccagttctcccgtctttctttaggtccncagtcaaaggcaacagcccagtgcttttggggtcttcccttggtaaccaaactccaaaatccctggactaagataagctccagctctggagcctgcttctccccttcagtgcagtaagggatgtggctcgccagcgcaacgtccgaggaggtctctctgctgatacccgtgtctactgcatccacctcctcaccaaaaggcagctttggactcttcctgctttgacaagaggctgccctctttctccaaagcctggaggtacagctgcaggagctgcttggactgacgcacttcctctctttggtcaagcacctgttggagtgtgtgctgcagccgctggacggtggcacaactctgacgtagttcctgagccaggtctgagcagggagcgtcaacaagcatctggaggtcctcctctgataggaggatgatgctggacagatcttctttcagctgcctggccacattcttccacttcaaccctgccccgctgtctgtttcatctacatcaaaggactcttgggaaatccaagctgtacctccatctgaattgttgtatgcccatttctcattactagccaatgccacaaacttagtattggaaggtagacacagaaagtaatcgtcatcatccactatggtgccatcctctgccaggaccagggtgactggtgtcagggacttatcaatggccagaatgtcacaggccttgctcctcaggtcttcgaggcaggaggcggccacgccgtgctgttcgcggctgtagttgcggcgcagcagacacggctttagagtccggatctcgccagattctggtaccccggcgtccccggtcacctccatcctccacaaggtggcctcgtgccgaatcgccacccaggcctcgctac

SEQ ID NO: 318870 - DNA, 373 bp, Homo Sapiens
cctttaaagctattttgatttagattaatgagatttttgcaaatgccttggcatataataggcaaactggcagctaggattcacagtctgcagaggtgaacaaaagggcccacacacctctgcatgatactactacatcccagggcatgtcctcctctgtagctcagtgaccctggtttccgcccacctccaaatcctgactagataagctcagctctggagcctgcttctccctcagtgcagtaaggatgtggctcgccagcgcaacgtccgaggaggtctctctgctgatacccgtgtctactgcatccacctcctcaccaaaggcagctttggactcttcctgctttgacaagaggctgccctctttccc

SEQ ID NO: 318871 - DNA, 1210 bp, Homo Sapiens
ttactaaggcacatgacgtagaaatattgaggtacaaaatgcaaatttctgcataagatttttaagatattcattttggaaaatgaaggtgaacatcatctcccagaatattcagcttttagcttgttttttcttttggaccagttcaaccagcaacttgtacctagcgatacagtcttccttgctcttggacgggacacatctggctattttgtcccagcggtcagaggatccccttgggtactgctgcaacgccagttccagaagtttctgttgattttgagtccacggctcctctgcagaccgagctctctcttttctcaggctctcctcgtcgctggactcgttttgttctgctatgtcaaagtccttctgccgcttggctctggacttctcctctggctccggcttcgctgtagcctccagcagcctggcctggcttccgcctccgaggccgggcatcagtggccccggtctcctgctcaccggagtctccctcctgctcctcctccgctgccaccccctctgcgtcctctcgctgggtgatcatgtcatcgggcaaggtggtggccgttttgatgggcctggaattctgaactgtcgatttgagttcggagagtctaaccattcctggggagcaggtcactgaatccttcagttgcttggctttggttgtcacatctgtcacagatcgacccaattcgtgggcaatcttttcccatcgacctggagtccctcctgggaacttaaccatacttcttgtcagttggctgaggtcctcttctgtccattcaggtgcctgttttttctgtgttcggttcctgttttccaaccaatcatccatttgttcctcaatttcttctatggaagttccatgatcataagactgaatatatgtagtttctaaaggtgtgtatacaggaaattcaggttttggttttttaactttcttctgtttttgaagtgtttcaagttcagttctagtcagtgcatcttccttttccttcaatcttgtttctttatatttagcataaaactgcccagcatcctggatgaggtgaggtaatgcttttagtgtaaggcaaaaccaaatccccagtttgcatggaagcaaatcatgccactgtggtttcatcagcaatctttcatttttttctgaagcaccgagttttgatacatccacactcttgctgccagtcttttttttctt

SEQ ID NO: 318872 - DNA, 1037 bp, Homo Sapiens
  misc_feature (16)..(16): n is a, c, g, or t
  misc_feature (28)..(28): n is a, c, g, or t
  misc_feature (75)..(75): n is a, c, g, or t
ggcgggcccccgcgcngcagggccctgngacccgcgcggctcccggggatggttgagcaaggcgctgctgcgctncgtgtctgccgtcaaccgcagaggatgaagctgctgctgggcatcgccttgctggcctacgtcgcctctgtttggggcaacttcgttaatatgaggtctatccaggaaaatggtgaactaaaaattgaaagcaagattgaagagatggttgaaccactaagagagaaaatcagagatttagaaaaaagctttacccagaaatacccaccagtaaagtttttatcagaaaaggatcggaaaagaatttttataacaggaggcgcagggttcgtgggctcccatctaactgacaaactcatgatggacggccacgaggtgaccgtggtggacaatttcttcacgggcaggaagagaaacgtggagcactggatcggacatgagaacttcgagttgattaaccacgacgtgtgggagcccctctacatcgaggttgaccagatataccatctggcatctccagcctcccctccaaactacatgtataatcctatcaagacattaaagaccaatacgattgggacattaaacatgttggggctggcaaaacgagtcggtgcccgtctgctcctggcctccacatcggaggtgtatggagatcctgaagtccacccctcaaagtgaggattactggggcccacgtgaatccaataggacctcgggcctgctacgatgaaggcaaacgtgttgcagagaccatgtgctatgcctacatgaagcaggaaggcgtggaagtgcgagtggccagaatcttcaacacctttgggccacgcatgcacatgaacgatgggcgagtagtcagcaacttcatcctgcaggccgctccagggggagccactcacggtatacggatccgggtctcagacaagggcgttccagtacgtcagcgatctagtgaatggcctcgtggctctcatgaacagcaacgtcagcagcccggtcaaccctggggaaccccagaagaa

SEQ ID NO: 318873 - DNA, 1260 bp, Homo Sapiens
ggttccaggggcggcccccaaacccgaaaaaaaggcccggggttcccaaggaaggttcccacccctgttttggtggcgtgcaattacccttaaacttggggttttgggctgaaaagccatcccagctggtttcagaaggctcccagcattttccttttccgcccttcccggtcccccagcctttctcactgtcaaagcgcttggtgccgatggcatccaacttcatcaatgaagatgatagagggcgctttctccttggccagggcaaaggcatcccggactagcttggcaccatctccaatgaacatctgcaccagctgggggccagccagctttaggaaggtggccttagtctgtgcggcacaggcccgggccaggagggtcttccccgtccctgggggcccatacatcagcaccccttttggaggttggatccccaagttctcaaacttctccttgtggttcattggcaagacaatggcctccaccagctcctggatctgcttgtccaaacccccaatgtcactgtattgctccgtgggcctctcgtctacctccatggccttcacccgcgagtcatactctgtgggcagcgtctccaggatcagataggagtctttgttcacacccaccaggtctcctggctttagcttttcagcatccaccaacccaatcacaggaaggaagtacgtctgtcgtgtagaggttttgatcacagcacacttgcccttcctctgggagtccaggtcaatattggcaccatcctcctcttggtcattaggatcaacatccaggagctcgatgacgttggagacaaggtacggcagggtcttgttcactttgattttctcactgttctcttttatcttgtccttcatggcttggagctcatgggtgactctcaacacttcactcttcatgatcttgatctcactgtccagcagccgtgtgcgctggatgatctcctccgtggacatcttgagcacctcctccccaattccatcttgctcggcctcatcccacacggtcgccatcttctcctgccgagtcactggactctcaatattcggcagcagattcatttcctggaggagcgggcagaagatgggaccaggcgggagccgcaacgggagattaataccgtctttcttaaagccttctcttgaccagtggaaaacctctccccacaaatcccgactcttgacccgaccagctccggccgtgctgcggagcagcgaatctgcctctccgattccaaag

SEQ ID NO: 318874 - DNA, 1603 bp, Homo Sapiens
  misc_feature (64)..(73): n is a, c, g, or t
  misc_feature (114)..(186): n is a, c, g, or t
  misc_feature (233)..(271): n is a, c, g, or t
  misc_feature (280)..(301): n is a, c, g, or t
gtttcaaagcagcaggattattcgcagaaaaaaagggatttcaagaaagatcctttggatcacnnnnnnnnnngcccgctcattaggcgggttaaatttcccggggtactgcannnnnnnnnnnnnnnnnnnnnnnnnnnnnnnnnnnnnnnnnnnnnnnnnnnnnnnnnnnnnnnnnnnnnnnnnaccactttgtacaagaaagctgggtcaggaaacagctatgacccagnnnnnnnnnnnnnnnnnnnnnnnnnnnnnnnnnnnnnnngcctcgagnnnnnnnnnnnnnnnnnnnnnngaccctaaaccgtgttttattgcgcacttcagccgtgagactggggctggcctgtgtgccctaggcgtagtattgtaggttggctttcttcttggcctgcacctccaggatgccttccatgtagtcctcgtgggtgagctccgtggcacccctgcgcagtgcgatcatgcccgcctccacacacacagccttgcactgggccccattgaagtcatctgtgcagcgggccagctcctcgtagttcacgtcaggactgacattcatctttcgggagtggatctgcatgattctggcccgggcctcctcattgggcatcgggaactctatcttgcggtcaaggcggcccgagcggaggagggcggggtccaggatgtccaccctgtttgtggctgcaattaccttaacttgggtgttgggctggaagccatccagctggttcagaagctccagcattgtcctctgcacctcccggtccccagccttctcactgtcaaagcgcttggtgccgatggcatccaactcatcaatgaagatgatagagggcgctttctccttggccagggcaaaggcatcccggactagcttggcaccatctccaatgaacatctgcaccagctgggggccagccagctttaggaaggtggccttagtctgtgcggcacaggcccgggccaggagggtcttccccgtccctgggggcccatacatcagcaccccttttggaggttggatccccaagttctcaaacttctccttgtggttcattggcgagacaatggcctccaccagctcctggatctgcttgtccaaacccccaatgtcactgtattgctccgtgggcctctcgtctacctccatggccttcacccgcgagtcatactctgtgggcagcgtctccaggatcagataggagtctttgttcacacccaccaggtctcctggctttagcttttcagcatccaccaacccaatcacaggaaggaagtacgtctgtcgtgtagaggttttgatcacagcacacttgcccttcctctgggagtccaggtcaatattggcaccatcctcctcttggtcattaggatcaacatccaggagctcgatgacgttggagacaaggtacggcagggtcttgttcactttgattttctcactgttctcttttatcttgtccttcatggcttggagctcatgggtgactctcaacacttcactcttcatgatcttgatctcactgtccagcagccgtgtgcgctggatgatctcctccgtggacatcttgagcacctcctccccaaattccac

SEQ ID NO: 318875 - DNA, 1867 bp, Homo Sapiens
  misc_feature (293)..(305): n is a, c, g, or t
  misc_feature (313)..(356): n is a, c, g, or t
atacaccttaagatattataaaacttgaaataatgtcaggtgctatggaatgggaaacaagagttctgaatccccccacccccaaaaaaaactgttaacaggttttaagggaaaaacaaaaccagaactccgaatatgaacagcaatacacagactctatagcacagaacaccacacaagaatgagttttatagcagtactatcatgagagtaactggctggagactatacttccagcaacagggctcctaggtcaaaaatgtgttaaaagcttgttatgtcaacaagaaccnnnnnnnnnnnnncaacaaannnnnnnnnnnnnnnnnnnnnnnnnnnnnnnnnnnnnnnnnnnnaataaggaggaaaggctgcatgcccgggtctattatagacatgatattcagcagcataaaaaataataccctccaaagaatccctctactggggcaaaacctgtttttcactgctaagcatggaaaagattaagaaagcagaacaaattcacttctaactatagcatcttccatatatcaatgacaagcatgttcaacctgatgctacatgttaataaaatattcagtatacataagaatctaagccacataaaaacaaaaggctaaattatgaaccttaaaaaaattggagaaaacatgttttaaagccaagtagaatgattctgataattattatatatgacataatccacagaaaggccaagaaaagaatcttcatattgttcagtatttaggcttgatgttgtcccaagaaaacagtgataataattcaatgaatgtgttacacatacaactaaaaagtccccttctggtttcaaatgaatttaaacaacaatcttccttggctaatttttctcctctgtcaaacaaaccttctatgtacaggaccagtttaaatccctcctccccttcaaacactagatatgaacatccaggaacattctacaatgcaaagtgccttaagaaagagaaggattctgtagtgccagtgatagaactgatctgaggaagctgagatgctattaacactgataagagccagtcaggcaatggtggtttgtttctcctcaggtgtttcctccaacaactgcatgatcagttcatgcaggggtttgcagatctttgcatagccccctcctgtcagatgcagaaaatcaaacatgtcgtggcaggagatggcaccgtccgagtgcacaaaacccccgtcggtatccaggagctgcacgttggcaagcttcggcagcgaaaccttgaggagttggttcaccttggcgttcttttgcctcaaaggattgggtttctcacctcgaggtaacaaacccaatacaatgattttggcctgtggctgccttgtgttgataagttgtacaatggcctcgatcccacctgctacttcttctgctgtattttcgtggttatttgttcctacccagacaacaatgaccttaggcttaatattctccagttctccattctttagtctccacaaaacatgtcttgttgtatctcccccaattccaaaattcagtgcatgaagtggggaaaaaagctctcgccatatctcatattgctgcattaactgcaccatggagtctcccacgaacagtacatcaggctctttgtctttacagtccaaaacaaatctgttgtgctgagacatccatcggtcatctccttgaatatcttctgctgcatgcggaatagctgctgggtttgagtctccttggctcattctacactgaagtagagggtccgtgcgggccccaagcggctgaggcgtcggcgggtggcgcgtcggtcgctcgctcggtcccgtcggtcccgctccggcgcgtccctcctccgatccc

SEQ ID NO: 318876 - DNA, 898 bp, Homo Sapiens
  misc_feature (891)..(891): n is a, c, g, or t
gtcgtacctgatggtaggaggcagtagttccccgcttcccttccgcgggagggagagttagctagccatccaagaacacaccatgaaagataacgatatcaagagactactgtatacccatcttttatgcatattttcaattatcctaagtgtcttcattccatcactcttcttggagaacttctcaatattggaaacacacttgacatggttgtgcatctgttctggttttgtaactgctgtcaatctagtactatatttagtagtgaaaccaaatacatcctctaaaagaagttcattatcacacaaggtaactggatttttgaaatgctgtatctactttcttatgtcttgtttctcctttcatgtaatttttgttctgtatggagcaccactgatagagttggcgttggaaacatttttatttgcagttattttgtctacttttactactgtgccttgcttatgtttgttaggaccaaacctcaaagcatggctaagagtgttcagtagaaatggagttacatccatatgggagaatagtctccagatcactacaatttctagctttgtaggagcatggcttggagcacttcctattccactggattgggaaagaccatggcaggtatggcccatctcctgtacgcttggagcgacctttggctacgtggctggccttgttatttcaccactctggatatactggaatagaaagccacttacatacaagaacaattaactggagcaaagggagatatttctttgtgcagattctgtaagggctgggcagaaatgtgtatggtcaaagccaagcagttccatttacagctctgttttttacgtagttacaacatgatgtgattgtagctttttaaactatgaaacccntgagaga

SEQ ID NO: 318877 - DNA, 2842 bp, Homo Sapiens
  misc_feature (65)..(156): n is a, c, g, or t
  misc_feature (324)..(324): n is a, c, g, or t
  misc_feature (331)..(331): n is a, c, g, or t
  misc_feature (333)..(333): n is a, c, g, or t
  misc_feature (396)..(396): n is a, c, g, or t
  misc_feature (486)..(486): n is a, c, g, or t
  misc_feature (1645)..(1656): n is a, c, g, or t
  misc_feature (2002)..(2020): n is a, c, g, or t
  misc_feature (2164)..(2164): n is a, c, g, or t
  misc_feature (2177)..(2177): n is a, c, g, or t
  misc_feature (2189)..(2189): n is a, c, g, or t
  misc_feature (2196)..(2196): n is a, c, g, or t
cggcagcgccccgggcccgccgccccctcccctcctgcgaggggagccgctgcatggggccgggnnnnnnnnnnnnnnnnnnnnnnnnnnnnnnnnnnnnnnnnnnnnnnnnnnnnnnnnnnnnnnnnnnnnnnnnnnnnnnnnnnnnnnnnnnnnaccatgcccggaggccggccggcagcagcatggctcacgggcccggcgcgctgatgctcaagtgcgtggtggtcggcgacggggcggtgggcaagacgtgcctactcatgagctatgccaacgacgccttcccggaggagtacgtgcccaccgtcttcgaccactacncagtcancntcaccgtagggggcaagcagtacctcctaggactctatgacacggccggacaggaagactatnaccgtctgaggcctttatcttacccaatgaccgatgtcttccttatatgcttctcggtggtaaatccagcctcatttcaaaatgtgaaanaggagtgggtaccggaacttcagggatacgcaccaaatgtaccctttttattaataggaactcagattgatctccgagatgaccccaaaactttagcaagactgaatgatatgaaagaaaaacctatatgtgtggaacaaggacagaaactagcaaaagagataggagcatgctgctatgtggaatgttcagctttaacccagaagggattgaagactgtttttgatgaggctatcatagccattttaactccaaagaaacacactgtaaaaaaaagaataggatcaagatgtataaactgttgtttaattacgtgagaaacatcttcagtggccaaggaaactgtccatttctctcagaaagcaaatgaaatgctacagctatacccagaccttttataggtaatgaagcagttcaaaacttgaaagaaaacaaaacctgtcctcagaattctataaagtgtattaagaatgttccttaaaggtttaagaagcagtaagcagcatctgaagccacaatctattataaatactttatttcaactagaaggtacaatctctcaggggtttcatagtttaaaaagctacaatcacatcatgttgtaactacgtaaaaaacagagctgtaaatggaactgcttggctttgaccatacacatttctgcccagcccttacagaatctgcacaaagaaatatctccctttgctccagttaattgttcttgtatgtaagttgctttctattccagtatatccagagtggtgaaataacaaggccagccacgtagccaaaggtcgctccaagcgtacaggagatgggccatacctgaggagagaatgtatgagatcaaaaaagaacaaatgttttattattacttgagcacaagtgtaacctaaatatttctatattaaagcttaatgtgctttcttaaagaatgccaaaagtgtaataaggtcatagctgcatttatcatgaacactaaaaatgtacacattttagttaatgtgcattaaactgtaacaaggcttctggcaattgtagatttagtttgacgctccccaaagtgcatgagacacatgctaaaattacaaattaaaattttgggtcagactttgccataatgatagactcaatttagctctctgaactagttggtaannnnnnnnnnnnaattcccactttggctgtgtacatcaaatgaaatgagaagtgtgtatgctgaccaaaccacaagaaactttctttaagttgtgttaaagaggaaagacctagaatccaagcgtgttacatgaaaattgtaacagagcagctgcttccacctttcagatatagatgttggaaccacagcagaagttatagagcgacaacttatatacacacctagaatgtaagttaaacaaaataccggcttccagagaccccttttctccagccatattacatcaggctagaagtaattaatgttgatttatttcatctacaagcagttggtccctaagtgaaaggctctgcttgnnnnnnnnnnnnnnnnnnngttggaggaaaattttcatgttcttctgtgaagcttatttggtacactggagccatttctaatctttctctggggggaacaggccacagaactgtgttagaggtgaaccatcttaattactagttctattacctaattcagctnccttgtttggtcngctgtggatctnccctatngcatatgccatgcatcagataatggatgcatcagataatggtgttagacaaagcttcattgtgaacaacctaatgcattttagagaaacaatctcatcacattttttctagcctttcctacatttaaacttgctgttgcccaaattataattttttaaatgtctttggtgggcttctgttaattcacatgacttgagcttatagctatgtctactgcacagattgggtaatggaacactaaacttttatacttgaaaatgacagccttaaatgctcatatcagtcacaaatctaggatgtactgtcttgttgtatgtgagctttgtagagatttttaaaaatataagcatcaccttcccattgaagagtggagagagtctactggatgactggccaggaactttctctctgaatcggacatttggatgtcttctttcttccaagaaatggtggttcacattaaagtatcatggccttatgtatgctcaaatggaatcttatgtaactttcttatttaattttggtctgcttatttttagataaaattgaaaggaattgtataaatcaattaacatattagctgagttgtccaacacatggtataaacgaattacaacagtaaactattacacatttccaaaaaaaa

SEQ ID NO: 318878 - DNA, 1057 bp, Homo Sapiens
ttttattataaatactttatttcaactagaaggtacaatctctcaggggtttcatagtttaaaaagctacaatcacatcatgttgtaactacgtaaaaaacagagctgtaaatggaactgcttggctttgaccatacacatttctgcccagcccttacagaatctgcacaaagaaatatctccctttgctccagttaattgttcttgtatgtaagttgctttctattccagtatatccagagtggtgaaataacaaggccagccacgtagccaaaggtcgctccaagcgtacaggagatgggccataccttgcactacggttgtcaggattaagttactcatttcacagtaccaagccccctgcagggtacatggagagatctataagtgctacgttttctttctactgtcatctgccatggtctttcccaatccagtggaataggaagtgctccaagccatgctcctacaaagctagaaattgtagtgatctggagactattctcccatatggatgtaactccatttctactgaacactcttagccatgctttgaggtttggtcctaacaaacataagcaaggcacagtagtaaaagtagacaaaataactgcaaataaaaatgtttccaatgccaactctatcagtggtgctccatacagaacaaaaattacatgaaaggagaaacaagacataagaaagtagatacagcatttcaaaaatccagttaccttgtgtgataatgaacttcttttagaggatgtatttggtttcactactaaatatagtactagattgacagcagttacaaaaccagaacagatgcacaaccatgtcaagtgtgtttccaatattgagaagttctccaagaagagtgatggaatgaagacacttaggataattgaaaatatgcataaaagatgggtatacagtagtctcttgatatcgttatctttcatggtgttttcttggatggctagctaactctccctcccgcggaagggaagcggggaactactgcctcctaccatcaggtacgacgggcggcccaggcccc

SEQ ID NO: 318879 - DNA, 1797 bp, Homo Sapiens
  misc_feature (58)..(58): n is a, c, g, or t
  misc_feature (105)..(105): n is a, c, g, or t
  misc_feature (1083)..(1083): n is a, c, g, or t
  misc_feature (1123)..(1123): n is a, c, g, or t
  misc_feature (1125)..(1125): n is a, c, g, or t
  misc_feature (1156)..(1156): n is a, c, g, or t
  misc_feature (1331)..(1331): n is a, c, g, or t
  misc_feature (1336)..(1336): n is a, c, g, or t
  misc_feature (1367)..(1367): n is a, c, g, or t
  misc_feature (1454)..(1454): n is a, c, g, or t
  misc_feature (1479)..(1479): n is a, c, g, or t
  misc_feature (1510)..(1510): n is a, c, g, or t
  misc_feature (1514)..(1514): n is a, c, g, or t
  misc_feature (1540)..(1541): n is a, c, g, or t
  misc_feature (1578)..(1578): n is a, c, g, or t
  misc_feature (1652)..(1652): n is a, c, g, or t
  misc_feature (1778)..(1778): n is a, c, g, or t
cctgtttttatctttacctgtcattactagggatttggagtagaagggaacgcttccnggtttgaacttacagcatcttgattggaagtctgcagttgcttttcngagtacataggtaaaaatctaagtctttggaggcaaagaaaaaacgagaagataatgatctaattttcctgaggggcttccaagtatgtgtgcatcttttacccagtgtcagccgtctgtggagcaggggatctatatcttcttttatcacagagccttctatgaagagagattgagtaggatcattgtgaaaatgtatccattctggaaacagtttaataaatggttctgtagtggggagaagccttaataaacttctcattccctgatgctacaattctcagcctacttcctcttagtttcttctgtaaatataaagcaatgttaatttttgtctctggtaattatttcagcttctttttagaaaaactctttttctgcaacacagaattgccttccctcgtttccttctgagaccctccacgacacctatgagttacacagccctgaagaagcccagcttctaccaagaaatgactttgtgctggtgctgtgtgggaactgccttgattcccatgtgggctgtacatcacctgggctatgccctgtcaaccgtgaaaaccggggaacagaggcaggtttgagttaaaggaagaaacaatgattgtctgaagaagaagaaatgaaagaatgttagcgcaaaagttatattcaaaggaattgagagttctcagcccaagaaagtttttatggtactgagtctatttgaaatgggagcacttacttaaaggtcactaggaaaccaagatttttttctgctgccttactctattttgctagataaattgtaagcagaactttctcctggtgggatgatgagccccaaccagctctgcgttgttctcaattttaacaatctaagcagaatgtttcccgtttctaaagttttcatcataaccaaactatgttgtcctcaggaagatttgacagggaactgaagaagtgtgtgcgtgcgtgtgcgtgtgttcattcccattnttaattagttgaaacctaacattgctgtatgttacctgtntnttgcttctccagacaagcagaaaaatgggtntcccccagagtgaatgactgtctgagttcatgtttaatcaaggaaaggagttactgacttcataatcacataatcccgtctgcagtgtggctatgacatacggggagaggcttctgggcatgctacgatgggcggtaaagttggctgagagataaacaatgtagctattgtgttngcctnggactggggcgttcaccacatcacaggatgnggcacttcttctctgccttctccccagaggacaggcagctgtgctcaccaggctccttcacgtggccctgttatgtccacctcgggnaaaagatggtctctccacaatttgnggtgtcgtgaattctgtctcacctttccagntctngaacacacattcttttctaccgtctnnggggcttcataagcctccaactcagaggatagattgngggatggcagctaatgtgatacagagtatgtgctcttgtgtaccaagtaccatccccagcccaacacatggtcnacaggtacgcagtagtgttcaggaagtctagtacaataaggtgattcttcctcagatactactggaaattagaatacctgctaaagcttatgggggcacttattgtgtgctagtgtgtccagagtnggttccatcccgggaattc

SEQ ID NO: 318880 - DNA, 1194 bp, Homo Sapiens
  misc_feature (431)..(446): n is a, c, g, or t
gcaagatttgaaaagtttattatatgtaatgatatatgtttatggaaaagcctctaaaaacataagacaatggagctttaaaaaaggttaggttttacatctttaaaactcattaataagataccaaattcaagagattatagttacattgtaaaacgtaatcttcttttaataaaaagctaataatgactgatgaattacaaatgcacttatttattggtgattacaaacaatacttaagaacttaagcagcttgagtagtagtttaagctagacagagcaaagaaaattcttgtttaatatatatatatttttaattccagtcatattttcttaaattcctgttaaaaatataatcaatattaaagtcagcaaaatgcctttgactgacgcctggattattttaccacttaacctggttacacagtgannnnnnnnnnnnnnnnctgtcagatgtaactgacaaccagtttagtctttctttaagataaatgaagtgataactcacattgcagcatcttgtggaaaatattcaaactacatttaaaatgcttctgtaaaatggagaactctattgctccacaagaaaatgtatatgtaaaactacaggttggctatggtaatagtaactaaactacatccaaccctgaaggtagaaaaatccctgaaaagaaatacacagcctagtcatagtatatcatataaaggttattttcttattttgaaaattctcccagatttggagaaatccaaacctttccatagttcccttactaggcagtgccacataaagttatttagttaacattatgatcatggcttacgattaaattccatatgacaaacacttatatatagcagccgtcattttggatgttggttatgacaatatttgcagtttgattacagaacacgcgttcattaaatttggtacaaagcatgaacactcaggacagattggcacaatacatgcagttcgagaattctcttatcatctcaagccagtcatcactgaataagccatagtcccagtctcgttttccaaatctttctcatattgtaactgacatttaaaatgcttcttaaaacatcttccagaatacggaaaaatacactttaaaaatcaattatctggaatgcatgatggggaaatgagggcagggatgggcagagccagttgcccagctgagggac

SEQ ID NO: 318881 - DNA, 942 bp, Homo Sapiens
  misc_feature (598)..(598): n is a, c, g, or t
  misc_feature (600)..(600): n is a, c, g, or t
  misc_feature (630)..(630): n is a, c, g, or t
  misc_feature (643)..(643): n is a, c, g, or t
  misc_feature (678)..(678): n is a, c, g, or t
  misc_feature (680)..(680): n is a, c, g, or t
  misc_feature (685)..(685): n is a, c, g, or t
  misc_feature (689)..(689): n is a, c, g, or t
  misc_feature (694)..(694): n is a, c, g, or t
  misc_feature (721)..(721): n is a, c, g, or t
  misc_feature (727)..(727): n is a, c, g, or t
  misc_feature (734)..(734): n is a, c, g, or t
  misc_feature (772)..(772): n is a, c, g, or t
  misc_feature (786)..(786): n is a, c, g, or t
  misc_feature (812)..(812): n is a, c, g, or t
  misc_feature (816)..(816): n is a, c, g, or t
  misc_feature (818)..(818): n is a, c, g, or t
  misc_feature (820)..(820): n is a, c, g, or t
  misc_feature (825)..(825): n is a, c, g, or t
  misc_feature (829)..(829): n is a, c, g, or t
  misc_feature (835)..(835): n is a, c, g, or t
  misc_feature (840)..(840): n is a, c, g, or t
  misc_feature (850)..(853): n is a, c, g, or t
  misc_feature (865)..(865): n is a, c, g, or t
  misc_feature (886)..(886): n is a, c, g, or t
  misc_feature (895)..(895): n is a, c, g, or t
  misc_feature (898)..(898): n is a, c, g, or t
  misc_feature (922)..(922): n is a, c, g, or t
  misc_feature (926)..(926): n is a, c, g, or t
  misc_feature (928)..(928): n is a, c, g, or t
  misc_feature (932)..(932): n is a, c, g, or t
  misc_feature (935)..(935): n is a, c, g, or t
  misc_feature (938)..(938): n is a, c, g, or t
acaggagaggccgctgctgccagccgctcatataaaactatttattcataaatattttccaaaatgaaaataggtttaccaaaaaatgtccctcactggggaggggaggagggggcagccctcgcccccgggcccccagggtggggctgagaggaaaacctcccggccccctccctgcttcctgggagagggggatgccccgtggcttggggcctccctccagtcttccagggcagggccctcacctgggcagggggatcagcatgcgggggaagggggtgggtagagggaggggccggtgtcactggaggtcccggtcctccaggtagcggtactcaaaggtgaagccttccttcttccgctggccccacttctcgtagtcaaagtagatgtaggtgccctgctcaaactcgtcagtgatggtcttgggctcctcgtgcctttggaaccacatcatgtacttggtgtggaatcgccatgactgcttctttagggccttggctgccagatactgtgccttagtgccctccagatagtagaagatgaagaagagtgtttcggtcgacaggcgctggtagaattccacagtgtccgagtntnggggtggcatctggtggtggtaagggggcntcggacaggggtnccgggggaggtactgccgaatacgcccagagtcanangggtnaggnatgtngtgccaggcggcctcttccatggcctnctgatnagacgcngcctccttgggtgaggggcacaggggcccagttggacnagacacccaagcgnacacggttcatgttccacctctgganagcngncnggggngggntggggntgaangccggaagtnnnngatgttctgccncagggtgatgtctcgctccgncagggtgcngcnttggcacagggtcctcaatgccanaacngnaggntgnccnttcc

SEQ ID NO: 318882 - DNA, 1144 bp, Homo Sapiens
  misc_feature (129)..(129): n is a, c, g, or t
  misc_feature (338)..(338): n is a, c, g, or t
  misc_feature (525)..(608): n is a, c, g, or t
ttttttcatataaaactatttattcataaatattttccaaaatgaaaataggtttaccaaaaaatgtccctcactggggaggggaggagggggcagccctcgcccccggggcccccagggtggggttgnagaggaaaacctcccgggccccctccctgcttcctgggagagggggatgccccgtggcttggggcctccctccagtcttccagggcagggctctcacctgggcagggggatcagcatgcgggggaagggggtgggtagagggaggggccggtttcactggaggtcccggtcctccagggtagcggtactcaaaggtgaagccttccttntttccgctggccccacttctcgtagtcaaagtagatttagggtgccctgggccgggggagaaggcggtcagtgagtgggacgaggaggtggtctgggatcttgggccggaccaacagacaaaggggacaattcttagggctgtggatgtgtcaggcaccgggccagctgccctgcacgcacacactnnnnnnnnnnnnnnnnnnnnnnnnnnnnnnnnnnnnnnnnnnnnnnnnnnnnnnnnnnnnnnnnnnnnnnnnnnnnnnnnnnnngttccaccgaagccagctgccagagacgggccccagccccaggtgtgagtgcacagccttcgtttcctcgagggctgtggcttttgagcacctctcacgtgagtacaggatgcacagcctagcatttaatcttcacaaagacctcgaggcagtgggtactgtcacccttgttctagagaatggaacagtctcagagtctaaatccaagcactctgcagggacattttattggtgacggaagtggtgtgggaatttctgaatgactggatgccctgaaatgtactaacttggaggatggttttgggccaaaccaggaaaggacaggaagtctgtggttaacatctgaggacacaatgggagaggacctaggttctaaatgaatgtcttaagtgcttcaaagatggcaacctgggagaaccaggagaggggactgagttctctgaggacaaggaccttgtactacttcatccccatgaaggggctcggcatcagggaagtatttggtggaaaaaaacatcactgtagaacacaccaac

SEQ ID NO: 318883 - DNA, 738 bp, Homo Sapiens
  misc_feature (105)..(105): n is a, c, g, or t
  misc_feature (119)..(119): n is a, c, g, or t
  misc_feature (123)..(123): n is a, c, g, or t
  misc_feature (188)..(188): n is a, c, g, or t
  misc_feature (215)..(217): n is a, c, g, or t
  misc_feature (223)..(224): n is a, c, g, or t
  misc_feature (226)..(269): n is a, c, g, or t
  misc_feature (440)..(440): n is a, c, g, or t
  misc_feature (485)..(485): n is a, c, g, or t
  misc_feature (515)..(598): n is a, c, g, or t
  misc_feature (623)..(623): n is a, c, g, or t
ttcatataaaactatttattcataaatattttccaaaatgaaaataggtttaccaaaaaatgtccctcactggggaggggaggagggggcagccctcgcccccgngcccccagggtggnatcnagaggaaaacctcccggccccctccctgcttcctgggagagggggatgccccgtcggcttggggnctccctccagtcttccagggcagggcnnnacctgnncnnnnnnnnnnnnnnnnnnnnnnnnnnnnnnnnnnnnnnnnnnnnccggtgtcactggaggtcccggtcctccaggtagcggtactcaaaggtgaagccttcctttcttccgctggcccccacttctcgtagtcaaagtagatgtaggtgccctggccgggggagaaggcggtcagtgagtggacgaggaggtggtctgggatctgggccggaccnacagacaaaggggacaattcttagggctgtggatgtgtcaggcanccgggccagctgccctgcacgcacacactnnnnnnnnnnnnnnnnnnnnnnnnnnnnnnnnnnnnnnnnnnnnnnnnnnnnnnnnnnnnnnnnnnnnnnnnnnnnnnnnnnnngttccaccgaagccagctgccaganacggccccagccccaggtgtgagtgcacagccttcgtttcctcgagggctgtggcttttgagcacctctcacgtgagtacaggatgcacagcctagcatttaatcttcacaaaga

SEQ ID NO: 318884 - DNA, 1035 bp, Homo Sapiens
  misc_feature (757)..(772): n is a, c, g, or t
ctggctttaacatttattacaaagataagagcagaggctggtgagttacacttcttcctccccaccaggtgctctctgcagctctggaaaaatggtgtcctctttgttgtcccaccagggggcgccacctccagccccgccccagcctcatacccagttcttcagctcggccagcggtaactgaagcctcccagaatcctggatccgggcccctagtaccctctttcccagggacccaggagtcctgcctccagtcgcctgcacttgtaactgagagctggaggtcgtccatagcagcatagtgagagtgtttttgatgagggtatgcagagtgggggtgaccatgttcccacctggggcctcaggtgggccaaggcctacccactttagccagcgtcccctccagcagccatcagcaagccaacccactccaagccagggccccctttggtccttgcacttgaggtgctttgttcagggctgggtcaggagtgtcagagccgatgtccaccacctcagtactggggaaagtagcctggttcctcctcgtgggtcctggagagccagagagactgatgtataggcaggccagtaagagggagagtgagagtgggacacaccgaggtgcagccagtaatccggtgggcagaagtgggagacagggggcaggtgtttccgggctccgaggccagggggcaggagggcatttagacagagccattggatgggcagccagccaatgtgcccaggacaggcnnnnnnnnnnnnnnnntccaagcaaagagggagaaggccatcaagggtcagtgaaggggagagggtacaccatcttccttcactgccagtccagccccgaactgagtcctttcctccagacagtgccagagctgatgagaaaaggcggccttgtctcccagccatcccccgcccccttagccacatagggtgctggccacaggaacccttcctccaggatgccttcctgcccaagtcccagccccctcaccagctactggactcgtgcgggttggaagc

SEQ ID NO: 318885 - DNA, 897 bp, Homo Sapiens
  misc_feature (75)..(75): n is a, c, g, or t
  misc_feature (78)..(78): n is a, c, g, or t
  misc_feature (90)..(90): n is a, c, g, or t
  misc_feature (169)..(169): n is a, c, g, or t
cctgcaagcttcaaggacaattcctctgccacagggagaaggctgacctctgtcatattcttctggcttaggtanaanacacacagcacncacacacacgcatacgcactctagggcttcaaagaaggaagtgatgtggcagagtgaccgctggcacgtgtcaccactnccactgaaggatccactgaagaatgagcttgcacaaggggccgtcagtcatggctgccaacaattgccccatggcccaactatatgacctctattcttggctgaccacagccctgcccacgggcgagtatccatggtgctgattcttccagttgtcccaaaacaaatcttcaatgaattctgaggccccaaggcttcccttgttggccaagtcactgataaggttccacttgcctcaaccagcctatagctcttggacagggggagacagagtcagacgcaacacctgtcctgtgtcccagacagtgggggagggaggacacctggggcctcagtgctcacccgtggcacaagcctgagtacgttagctcttctatactaagtgcaccaggcttgagccccacacagggaagaagggagtgggtgggctgaggccttcagctacctgggagcccagcagtgttctcggccagagatgagaaggctcctttaaaccaaaaatgtcatggctctgcccccaccctgcttaggcagggagggtgaagcctggaggggggcaattcctatgctccacaataaaaaaaggttttttaaatatattcatcaaaatagttttcttttaaaaagccccccactgctgacagccccactggctggctctccatcatatccctccccagtccgacacagccagaggggttcctgagtggccccaaggcacacccttga

SEQ ID NO: 318886 - DNA, 1798 bp, Homo Sapiens
  misc_feature (1094)..(1123): n is a, c, g, or t
  misc_feature (1126)..(1145): n is a, c, g, or t
  misc_feature (1150)..(1150): n is a, c, g, or t
ccgctttctttctgcagcaggaaccgcggctgctggacaagaggggtgcggtggatactgacctttgctccggcctcgtcgtgaagacacagcgcatctccccgctgtaggcttcctcccacagaacccgtttcgggcctcagagcgtctggtgagatgctgttgccgctgctgctgctgctacccatgtgctgggccgtggaggtcaagaggccccggggcgtctccctcaccaatcatcacttctacgatgagtccaagcctttcacctgcctggacggttcggccaccatcccatttgatcaggtcaacgatgactattgcgactgcaaagatggctctgacgagccaggcacggctgcctgtcctaatggcagcttccactgcaccaacactggctataagcccctgtatatcccctccaaccgggtcaacgatggtgtttgtgactgctgcgatggaacagacgagtacaacagcggcgtcatctgtgagaacacctgcaaagagaagggccgtaaggagagagagtccctgcagcagatggccgaggtcacccgcgaagggttccgtctgaagaagatccttattgaggactggaagaaggcacgggaggagaagcagaaaaagctcattgagctacaggctgggaagaagtctctggaagaccaggtggagatgctgcggacagtgaaggaggaagctgagaagccagagagagaggccaaagagcagcaccagaagctgtgggaagagcagctggctgctgccaaggcccaacaggagcaggagctggcggctgatgccttcaaggagctggatgatgacatggacgggacggtctcggtgactgagctgcagactcacccggagctggacacagatggggatggggcgttgtcagaagcggaagctcaggccctcctcagtggggacacacagacagacgccacctctttctacgaccgcgtctgggccgccatcagggacaagtaccggtccgagggcactgcccaccgaccttccagcaccttctgcccctgacttgacggagcccaaggaggagcagccgccagtgccctcgtcgcccacannnnnnnnnnnnnnnnnnnnnnnnnnnnnnctnnnnnnnnnnnnnnnnnnnngttgnggttcgtgtttggggctggtgggtctcgtggggctttgttgttgatccggcgcccggtgctcgctttccgtatttttcttggcgttgaacgcatcagtgcccgcgaaatgcgccctcgaccggtgtcaggaaatttcgtgcttttcaggggccgtaacgccatggcctgctctgcttgcctgcaggggactccgccgccagcttgggcccgtcggttttgtacttcccttggcggacgcatcgccttgaatatcatcactccatcgtagggtcatgtgaatacccgtatggcccgtcgcgcggcactgcggttcttcttttattctctctttgcctacgtctgctcgctgtgttttgtaggctgatgcactttattcccggatctctctcgattcgtccaatatgcattatttcctatctctcctcgccgcccggcagccggcgacggttgacatgttcattatcactccactctctgtcccccatcttattcgcccgccgcgcgggtgaggaccataataacattctccgactacgatgttgggtcccgccctaaccgacgcaccgggcgaggatcgtgatatagaggcttaacggaggtatagatatgagattacgtcatcccccgcacgccggccatttcgcttg

SEQ ID NO: 318887 - DNA, 970 bp, Homo Sapiens
ggcctgggtggcgaattcggcacgaggagaggctgaagaagaggaggaggaggaggattccgaggtgcagggggagcagcccaaggaggccccaccgccactgtcacccccgcagccggccagccctgctgaggaagacaaaatgccgccctacgacgagcagacgcaggccttcatcgatgctgcccaggaggcccgcaacaagttcgaggaggccgagcggtcgctgaaggacatggaggagtccatcaggaacctggagcaagagatttcttttgactttggccccaacggggagtttgcttacctgtacagccagtgctacgagctcaccaccaacgaatacgtctaccgcctctgccccttcaagcttgtctcgcagaaacccaaactcgggggctctcccaccagccttggcacctggggctcatggattggccccgaccacgacaagttcagtgccatgaagtatgagcaaggcacgggctgctggcagggccccaaccgctccaccaccgtgcgcctcctgtgcgggaaagagaccatggtgaccagcaccacagagcccagtcgctgcgagtacctcatggagctgatgacgccagccgcctgcccggagccaccgcctgaagcacccaccgaagacgaccatgacgagctctagctggatgggcgcagagaacctcaagaaggcatgaagccagcccctgcagtgccgtccacccgcccctctgggcctgcctgtggctctgttgccctcctctgtggcggcaggaccttttgtggggcttcgtgcccctgctctggggcccaggcggggctggtccacattcccaggccccaacagccttcaaagatgggtaaaggagcttgccctccctgggccccccaccttggtgacttcgccccaccacccccagccctgtccctgccacccctcctagtgggactagtaatacttaccttacct

SEQ ID NO: 318888 - DNA, 954 bp, Homo Sapiens
  misc_feature (660)..(677): n is a, c, g, or t
  misc_feature (691)..(693): n is a, c, g, or t
  misc_feature (701)..(702): n is a, c, g, or t
  misc_feature (705)..(706): n is a, c, g, or t
  misc_feature (713)..(713): n is a, c, g, or t
  misc_feature (718)..(718): n is a, c, g, or t
aaaatgccgccctacgacgagcagacgcaggccttcatcgatgctgcccaggaggcccgcgaacaagttcgaggaggccgagcggtcgctgaaggacatggaggagtccatcaggaacctggagcaagagatttcttttgactttggccccaacggggagtttgcttacctgtacagccagtgctacgagctcaccaccaacgaatacgtctaccgcctctgccccttcaagcttgtctcgcagaaacccaaactcgggggctctcccaccagccttggcacctggggctcatggattggcccctgaccacgacaagttcagtgccatgaagtatgagcaaggcacgggctgctggcagggccccaaccgctccagcaccgtgcgcctcctgtgcgggaaacgagaccatggtgaccagcaccacagagcccagtcgctgcgagtacctctatggagctgatgacgccagcctgctgcccggtagccaccgcctgaagcacccaccgaagacgaccatgacgagctctagctggatgggcgcagaggtgggcggggaggtggagtctcgtcggtctgccccagcaaggggaggcggcgggccctgaggaagatggacccacatggccactctatcaacctgtgtccccatgttccctgcnnnnnnnnnnnnnnnnnnggaggtggagtctnnnttctttgnnccnncttgganggcantgttgggtacctcagctgactgcaaccttcaacctcccggggttcaaacaatttgcctgggtctctaacccccccaagtaagctcggaattacacggtggtgcacccaccatggccggggcgtaatgtttttgagaaaaggattgggggtttgcacgctcggctggggccctgggaagaggccttgagaaggccccgcgaccctggggaaggtagcccactgctggtccgcgcggg

SEQ ID NO: 318889 - DNA, 354 bp, Homo Sapiens
  misc_feature (26)..(26): n is a, c, g, or t
  misc_feature (292)..(292): n is a, c, g, or t
  misc_feature (304)..(304): n is a, c, g, or t
  misc_feature (313)..(313): n is a, c, g, or t
  misc_feature (328)..(328): n is a, c, g, or t
  misc_feature (338)..(338): n is a, c, g, or t
ttgtaaaatttttttgggtgggggancacatttattgtattgaggtcacaggtcaagtcattcactagtccccactaggaggggtggcagggacagggctgggggtggtggggcgagtcaccaaggtggggggcccagggagggcaagctcctttacccatctttgaaggcttttggggcctgggaatgtggaccagccccgcctgggccccagagcagggcacgaagccccacaaaggtcctgccgccacagaggagggcaacagagccacaggcaggcccagagggcggngttggacggcantgcaggggntggcttcatgccttntttgaggttnttttgcgcccatccag

SEQ ID NO: 318890 - DNA, 489 bp, Homo Sapiens
  misc_feature (66)..(126): n is a, c, g, or t
  misc_feature (195)..(195): n is a, c, g, or t
tgggtgggggatcacatttattgtattgaggtcacaggtcaagtcattcactagtccccactaggnnnnnnnnnnnnnnnnnnnnnnnnnnnnnnnnnnnnnnnnnnnnnnnnnnnnnnnnnnnnnagggcaagctcctttacccatctttgaaggctgttggggccctgggaatgtggaccagccccgcctggngccccagagcagggcacgaagccccacaaaggtcctgccgccacagaggagggcaacagcagccacaggcaggcccagaggggcgggtggacggcactgcaggggctggcttcatgccttcttgaggttctctgcgcccatccagctagagctcgtcatggtcgtcttcggtgggtgcttcaagcggtggctccgggcaggcggctggcgtcatcagctccatgaggtactcgcagcgactgggctctgtggtgctggtcaccatggtctcttttccgcacaagaggcgcacgg

SEQ ID NO: 318891 - DNA, 2569 bp, Homo Sapiens
  misc_feature (326)..(326): n is a, c, g, or t
  misc_feature (1821)..(1821): n is a, c, g, or t
  misc_feature (1887)..(1887): n is a, c, g, or t
  misc_feature (2195)..(2196): n is a, c, g, or t
  misc_feature (2236)..(2259): n is a, c, g, or t
  misc_feature (2441)..(2441): n is a, c, g, or t
  misc_feature (2452)..(2452): n is a, c, g, or t
attcccgggatcagggcgggactgttgtggttgagatgaaggctagtaaatggtgaagtacttcccggccagagggcacctgcgctcgggaggtttgggcggcttggcgtcggaggagagccccacccgcggaggaacccagccttgccaacggagctggcggactcactcctcaggtcaggcgggcggcgtagaaaacgcagcggaccaggtgaaaccaaggcaccgccgtggctggcccccgacagttcctctagccgggaggttggaggagctgaaaacgccgcggaccctcggccgcccgagtcatgtgggctggaccccancccttgcagcctcccttctcctggcacccaagtgcagtcctggctgcagaaggggccgcgggcgcactgagtttccaacctccatttcagcctgtctgtctcagggtgcagccttaatgagaggtgattcctaagctgctgggaacctgaggttgtcaaaggggcggcaggaaatggacagcagtataaaacccagaagcagaacttgaaggttaaaccactagcccatttcacagaatgtttcatccatttgtggaccaaaagatggagttggtttttatttttaaaaagataatgttaatgatctgataccactacaaatatttacgtgagaagattcatggacttgtcttttggttggactgtcactcatttctgaaagtttcttcagccacaatttctatttgaaaattcaagtatcaaaggataccaggtttagaatggtataatgatgtattttgtctgaggactgcaaattttatagagaccacagttggattccagtgatattctgcaatccaaagtgatttgataaacctatttttgaagcattttatatttataagcgacatcaaaagatgggagaaaaaaatggcgatgcaaaaactttctggatggagctagaagatgatggaaaagtggacttcatttttgaacaagtacaaaatgtgctgcagtcactgaaacaaaagatcaaagatgggtctgccaccaataaagaatacatccaagcaatgattctagtgaatgaagcaactataattaacagttcaacatcaataaaggatcctatgcctgtgactcagaaggaacaggaaaacaaatccaatgcatttccctctacatcatgtgaaaactcctttccagaagactgtacatttctaacaacagaaaataaggaaattctctctcttgaagataaagttgtagactttagagaaaaagactcatcttcgaatttatcttaccaaagtcatgactgctctggtgcttgtctgatgaaaatgccactgaacttgaagggagaaaaccctctgcagctgccaatcaaatgtcacttccaaagacgacatgcaaagacaaactctcattcttcagcactccacgtgagttataaaaccccttgtggaaggagtctacgaaacgtggaggaagtttttcgttacctgcttgagacagagtgtaacttttttatttacagataactttttctttcaatacctatgttcagttggctcggaattacccaaagcaaaaagaagttgtttctgatgtggatattagcaatggagtggaatcagtgcccatttctttctgtaatgaaattgacagtagaaagctcccacagtttaagtacagaaagactgtgtggcctcgagcatataatctaaccaacttttccagcatgtttactgattcctgtgactgctctgagggctgcatagacataacaaaatgtgcatgtcttcaactgacagcaaggaatgccaaaacntcccccttgtcaagtgacaaaataaccactggatataaatataaaagactacagagacagattccnactggcatttatgaatgcagccttttgtgcaaatgtaatcgacaattgtgtcaaaaccgagttgtccaacatggtcctcaagtgaggttacaggtgttcaaaactgagcagaagggatggggtgtacgctgtctagatgacattgacagagggacatttgtttgcatttattcaggaagattactaagcagagctaacactgaaaaatcttatggtattgatgaaaacgggagagatgagaatactatgaaaaatatattttcaaaaaagaggaaattagaagttgcatgttcagattgtgaagttgnngctctcccattaggattggacacacatcctagaactgctnnnnnnnnnnnnnnnnnnnnnnnntcaataataatcccaaggagcttactgtggaaacgaaatatgataatatttcaagaattcaatatcattcagttattagagatcctgaatccaagacagccatttttcaacacaatgggaaaaaaatggaatttgtttcctcggagtctgtcactccagaagataatgatggatttaaaccnccccgagagcntctgaactctaaaaccaagggagcacaaagtaggctttgtttcttctgtgaatgcctacctcttctgcctgtttctctgtctcttgctcaatacctgtagctcattttcttagattc

SEQ ID NO: 318892 - DNA, 1681 bp, Homo Sapiens
  misc_feature (1194)..(1276): n is a, c, g, or t
taaataaacgtcctctttattttaccaaatataatttatcagttaagttgacatttgtcaattcagttatagtaactataaataattctcttaagacacagttctgtaactttttaaggatacgagagtaaaccaatattgctccttgcagccaggccaaaagtacatgcagttggtacaatcggggaaaagaaatgaaacttccatgaaagtcaccttcattttctttccctctcaccctacagtcctcctctgctcactcagggcctggggcatgcctatctgtctgctttttaggcaaaggaggtcactccagagtcttctgggactgcctggccaaattccagagatgaggaaggggcgagtgactggggtaggggtggctggagaccacagggacacagccttaggggcagaggagttggttttgatgcctgtacaagaagaatctgtgtgtaagtattttttgaggtggaggaaaagatgaaaaaagtccagagggaggaggaaaaacaagcccaggctggtgttaatgaattctgttggacacaactccaactagaaaacctctaaaattccttccaattgtacggttctatgattcctgaaggtggcctggaggtctgggtagaaatggagggagagaaaatatggtctctggaggtctagggcaggttcctgggataaggtgcagtgttggtagaaacaggatcattgcctaagccttcccttggaggtgggcccttgaggctacagatggaagggtttctgtagaagcttctgagagagaagttagaaaaagcctacatccaaatccccagatctgtacacgtgtgactgcggatggaggctccagttttctcccaattttgtgctaggcagagaaaagtagaaaccaccagatgatgtccaccctgctagttctaaatcctcttttgggtgcttggtaaggagaggtggagggaggggaatgtgaggaagggtcgtttagggaaataaatactggttgagcaatggggcggtggctctagctgtggtcagcactgcacagagtaggggtctggaaaggagaaagaggcagaagaatctggcttgaagtagatgcaaatacttacaacgaggaaactttctctgccagattcaaaggggcacatggcctttgtaacctggagaatgaggtgaggttagagctgnnnnnnnnnnnnnnnnnnnnnnnnnnnnnnnnnnnnnnnnnnnnnnnnnnnnnnnnnnnnnnnnnnnnnnnnnnnnnnnnnnntttcagaccatgcttgtctgcaggagagctcatcttgcggaggctgcatatttgcttaatgaacgaataaatgattggtgtatgtttgtgggttgcagcctaatattgatgaaaaccggatctttttggtctgacataactagcttatttaggaagtgacagggtccaaggcgaccaagttatttttgttcctcagtagaaatggcgccaatgagacaccccgtgggtttgttatattttcaaaccatttttccattacaccatgaacttgatcctaattataaaacctctatctggccaatctttggtggaaaggcgcctcttacgaagactattttcgaatcaagggtttaagcgaaatcaatctatttttgggcccagggtacaacactctcctttgggccc

SEQ ID NO: 318893 - DNA, 735 bp, Homo Sapiens
  misc_feature (111)..(111): n is a, c, g, or t
  misc_feature (114)..(114): n is a, c, g, or t
  misc_feature (605)..(605): n is a, c, g, or t
  misc_feature (614)..(614): n is a, c, g, or t
  misc_feature (641)..(641): n is a, c, g, or t
  misc_feature (663)..(663): n is a, c, g, or t
  misc_feature (669)..(669): n is a, c, g, or t
  misc_feature (692)..(692): n is a, c, g, or t
  misc_feature (708)..(708): n is a, c, g, or t
  misc_feature (725)..(725): n is a, c, g, or t
aaggacatggggttccagtacagctgtattaatgattaccgaccagtgaagctcttacagtgcgtggaccacagcacccatcctgactgtgccttaaagtcggcagcagcnctnactcaaagaaaagccccaagtctttatacagaacaaagggcgggtcttatcattcccctctttctggtgctggcttccaggactcaactgtaactggaaactgtgttgctctaaccctcctccagccctgcagcctccccttgcagtcatcattcgtgttctgtgtataccaaatgattctgttatctaaagaagctttttgctgggaaaacgatgtcctgaaaatggtatttcaatgaggcatatgttcaggatttcagaaacaagaagttagttctatttagcaggttaaaaaatgctgcattagaattaaaagcaagttattttcttatttgtataatgacacaaagcattgggagtcagactgcttgtatattatcaaacattttaagagaattctaataaagctgtattttacatcatctatattttcctatatctccagcaggcacggacactggcatgcttgttgatttgcttaaggacatatngtattactnttattaaaatgtatggcatatatgggnctggcaaaggttttcatttttncatttnatttggggattaaagatggttcnggttaatggggtcccntttggttttgagggggncggaggtttt

SEQ ID NO: 318894 - DNA, 857 bp, Homo Sapiens
  misc_feature (154)..(154): n is a, c, g, or t
  misc_feature (589)..(590): n is a, c, g, or t
  misc_feature (596)..(596): n is a, c, g, or t
  misc_feature (610)..(610): n is a, c, g, or t
  misc_feature (644)..(644): n is a, c, g, or t
  misc_feature (646)..(646): n is a, c, g, or t
  misc_feature (651)..(651): n is a, c, g, or t
  misc_feature (659)..(659): n is a, c, g, or t
  misc_feature (678)..(678): n is a, c, g, or t
  misc_feature (680)..(680): n is a, c, g, or t
  misc_feature (685)..(685): n is a, c, g, or t
  misc_feature (695)..(695): n is a, c, g, or t
  misc_feature (711)..(711): n is a, c, g, or t
  misc_feature (723)..(724): n is a, c, g, or t
  misc_feature (733)..(734): n is a, c, g, or t
  misc_feature (766)..(766): n is a, c, g, or t
  misc_feature (780)..(780): n is a, c, g, or t
  misc_feature (806)..(806): n is a, c, g, or t
  misc_feature (808)..(808): n is a, c, g, or t
  misc_feature (826)..(827): n is a, c, g, or t
  misc_feature (837)..(837): n is a, c, g, or t
  misc_feature (841)..(841): n is a, c, g, or t
  misc_feature (852)..(852): n is a, c, g, or t
gggaggcagtgacgtaacttgctgccttaggtggccttccgctctggcggctgtcgcgacgggggttcagggaatatttactgggcctctccgctccctctgctcttggaggtgccatgaggtcagttagctacgtgcagcgcgtggcgctggnagttcagcgggagcctcttcccgcacgcaatctgcctcggagacgttgataacgatacgttaaatgaactggtggtgggagacaccagcgggaaggtgtctgtgtataaaaatgatgacagtcggccatggctcacctgttcctgccagggaatgctgacttgcgttggggttggagacgtgtgtaataaaggaaagaacctgttggtggcagtgagtgctgaaggctggtttcatttgtttgacctgacacctgccaaggtgttggatgcttctgggcaccacgagacactaatcggagaggagcagcgtccagtcttcaagcagcacatccctgccaacaccaaggtcatgctgatcagcgacatcgatggagatggtgtgtcgtgagctggtgtgtgtggctacacatgacctgttgttggtgctatgccgnncctgcntggtgaggagccanggtgagtgtgtccttgaaacatcttgacatttgnanctttngtgtcccntcaatgaaaatttgattgntntgatntgtcattgtntgacagccctcttcangtgacatctttnntgccacttnntgtcttgccttgaacttgatttgttgtctcangccattgtttgtgntgtatggaaattgttacttgtgtacntnggaaaaattgacactttnngtcccctccntgcnctcttgaattngccca

SEQ ID NO: 318895 - DNA, 1758 bp, Homo Sapiens
  misc_feature (233)..(244): n is a, c, g, or t
  misc_feature (1146)..(1146): n is a, c, g, or t
  misc_feature (1549)..(1549): n is a, c, g, or t
atttcaaaaagtccaagaaccaaaggaaggaggaataggtccccaccaaggaaaaaatagatgggaggttttctttctccgcggtaggccgggtcataaaaagcgattgccaaattatctccagaagtttctttaggatatttattcggatttctatggctctggatgagaccttctcattgacaataggatggatcctagctccccaacttctgggtggctggcattgtctnnnnnnnnnnnncatacgtgggagagcaatgtctcctaatagttacaatcattgcttaaaagagttaggggaaaaaaggggggccctgtatctgggaaggtaactattgccagagccaattttttggtatttatttataatgcatatcttaataattagagctaaccccacggttggcttggccacctcttccctacattccccccagggttggggtgtagggttcctctagtgcaagggttctcacctagggcagaagacacatgataaagtctcaagacacttttaattgtcacaactgggtggcatctactgggtacaggccagagatgctgctcaacatcctacaatgcacaagagagcctccaaacaaagaactgtctagccccaaatgtgagtaagtatcaaagttgagaaatcctgctttaaagaaagaacctggtggagagaaccaagtatatctggagggaggatatcctggtggaatatatcaggtatatcttggtaggtagggagggctttggagaggtgtggcagacatccttgggtggccagtgcaacccacgtccacagtcatctttgtagccaccttcaagttacaggtaaccacatgacatttctgagcaatgaaatggaagaaaatttgcggatgaaacttctaataaaatcactgtgttcttgacctttgggtatcttttccttcttcctgcttggattgcaaacctgccatctggaggcaccgtggccgctttcagggccataagtactcaaattaacagctaaagagggtggagccaaaagccaaaggcagaaagatctgtgaacccaggggaacgtttgacaatgtctgaagacttttggttgtcactgggagaggagggctagtggcatctactgggtagagactagggatntgcgcagcaccctacagtgcatgaatctggggttacctgcctgaggatcacttgtagtgggggcttagggggctgaccagctgtttaagctcctgtgagctgggtttcctttatttgtgtctgagttaatttcaggttgctacagtaggagaagttctttgattcaagcctgttacagggctatttccagacaacgcctcctttagatgacttttaccggcactttccaaggtggtattgggtttccagtcccatccttgaagcagggagaggataaccattcctttgcttcttttgccagaagatgccaacaccaacggtcccctccacccacgtcacctgtgggttcggctgggtccaagatcacaggcctggttttctgcaactggctcagtagaaactncctcacggtctcatcttcaaagttgtaattgaccttccagaagatgcagagctgctgatattgtgtgaccagctccaggactgtccggaaaccttctgcagtgtcaaaatccggcactccactcccctgctcccaggcatagatggtgagcagctccaaggcatactttgggggcaaagacccctttggcttcagtttcctttcacact

SEQ ID NO: 318896 - DNA, 937 bp, Homo Sapiens
  misc_feature (186)..(227): n is a, c, g, or t
  misc_feature (381)..(381): n is a, c, g, or t
  misc_feature (823)..(823): n is a, c, g, or t
  misc_feature (830)..(830): n is a, c, g, or t
  misc_feature (848)..(848): n is a, c, g, or t
  misc_feature (853)..(853): n is a, c, g, or t
  misc_feature (862)..(862): n is a, c, g, or t
  misc_feature (870)..(870): n is a, c, g, or t
  misc_feature (887)..(887): n is a, c, g, or t
  misc_feature (899)..(899): n is a, c, g, or t
  misc_feature (904)..(904): n is a, c, g, or t
  misc_feature (911)..(911): n is a, c, g, or t
ggccgaggacggctgaacaccccgaatggggccgcgccggtcagggaataaaaagggacaaacgcacgggccgcggcgattcggagtcgccgcgtactgccgagggggggcgggcgcaaaaggaggccgcgaggcggaaggagtaaagcgcgaagagtcgccggggggccgcggcaaacaacccannnnnnnnnnnnnnnnnnnnnnnnnnnnnnnnnnnnnnnnnnggtttgcagtgcgggattcaagcgtagaatcccgcagcacatttaacggtagttctgggacataggtatggtcaggacaacagagcagaagttgataatgctccgaggaatcaggtaagtaaacggttgtcctgagaatgagatcactccaccnccaaggagaaagatcggaacctttaaactttgggttattaaaattaagcttattagtaccttgatgcaagttagagtttcttacaatgactctaaaagtagagccagggtcctggcaagtaaatgaacaagcttttaatacagcttagttatgtaaaatactgtacactgtaaaagatctagaaaactagagcttcaagtcatgttttaaaaaagccattaagcttaattgaaaaaccaagtatagagtacaaaactgcaacaagagccacagtgattccatggcatccagaccccgagtccttcatgcagagctgcagccggtcagtggaagtatcacattggtgtgctgtgtggacacaagcatgtctagcctggggagtgggttgggagctgcatttgggtcctgctgttcgcttttattcttgaacttggaacagggnggcagantatccaaggaacccgggngggtnttgaagggnttacgctngcaacatttcccccctntttttaccccgnccttnaaccttnggccattgttactttccggggattgt

SEQ ID NO: 318897 - DNA, 1042 bp, Homo Sapiens
  misc_feature (82)..(82): n is a, c, g, or t
  misc_feature (184)..(184): n is a, c, g, or t
  misc_feature (454)..(683): n is a, c, g, or t
  misc_feature (697)..(728): n is a, c, g, or t
atgtcgttacaaatataattacaaagttgaaaaacaggttgacaattgcatttcacaatatctcgtgtagagggcagcaganagcttagattttgttttctctttgcctgtagtatggcttccctagtctaatttccaattgcttgtaattgttccaggtaaaagtagataataatgcctaganccaaaaaaagtaatgattattcctaagctctaatttatttctaaattccaagcagtttttcacttgaaagggggagaacaagtaacctaacactccttttctatacataagagaaacatctttctctttacctttacataactcagttacgtttataaattctagatgttctatagaaagaaaagacgctaaccaatctgtgcctcagttacgccgtttgtagaaagttatacaaatagttgctgttggccaggcagggtggctcatacnnnnnnnnnnnnnnnnnnnnnnnnnnnnnnnnnnnnnnnnnnnnnnnnnnnnnnnnnnnnnnnnnnnnnnnnnnnnnnnnnnnnnnnnnnnnnnnnnnnnnnnnnnnnnnnnnnnnnnnnnnnnnnnnnnnnnnnnnnnnnnnnnnnnnnnnnnnnnnnnnnnnnnnnnnnnnnnnnnnnnnnnnnnnnnnnnnnnnnnnnnnnnnnnnnnnnnnnnnnnnnnnnnnnnnagaccctgtctttnnnnnnnnnnnnnnnnnnnnnnnnnnnnnnnnctcttctaaacttacacaactggaactattttattatctttttacctaccccatgtcttgttataaaaaggctataaggcagctaatctctcaaccgtttttatggtttcctcctctataaaagtattggcaatttagtgaatactgctagcctgggactcaggagactttggttttaaacttaggtctactgttaacttaggtcactaacatatactgagcacctagtgtgtctcagaacatgtgctaaaggttttatatgggttatcttcatctggacagtgtcacaacagctgagcaggacagagtcatca

SEQ ID NO: 318898 - DNA, 500 bp, Homo Sapiens
  misc_feature (24)..(24): n is a, c, g, or t
  misc_feature (38)..(38): n is a, c, g, or t
cacttctgaagtcctttattgggncggcaaggccgggngctgccctcgaagtggggtcccagtccggagtcttcaggttagtggcagctctgcccgttctggccggggcaggcggcccctgctgactcgctacttggtgcgcgcctttacatactcccagccctccttggagtactcgcgggccttggagggggccaccgacagagctgacatcaccgtcatgatgcctgcattccaggagtcacggatgggaaagtaaatctttggaggggctgggagctggggtatctgcaggcctttttgctgacacacgtactggctgaactggtacatggcgggggggaccacctccccagccttctgtagggctgcctggctcttgtggctgggccccagcagctcctggtcgtacaccaggtagacggcgcccccagccacacttcccttgatgaggaacctcatcagcgaccacacccgggccaccatggtcgctcgaaccc

SEQ ID NO: 318899 - DNA, 555 bp, Homo Sapiens
tttcacttctgaagtcctttattgggccggcaagggggatgctgccctcggagtggggtcccagtccggagtcttcaggtcagtggcagccctgctcgttctggccggggcaggcggccctgctgactcgctacttggtgcgcgccttcacatactcccagccctccttggagtactcgcgggccttggagggggccaccgacagagctgacatcaccgtcatgatgcctgcattccaggagtcacggatgggaaagtaaatctttggaggggctgggagctggggtatctgcaggcctgtctgctgacacacgtactggctgaactggtacatggcgggggggaccacctccccagccttctgtagggctgcctggctcttgtcgctgggccccagcagctcctggtcgtacaccaggtagacggcgcccccagccacacttcccttgatgaggaaccttctagaagccttccagccctggagaaaccaagtgtccctgggcgcctcctgcccgctgtcactcgcagctccgagcacgcattcacttctcatcc

SEQ ID NO: 318900 - DNA, 2192 bp, Homo Sapiens
  misc_feature (199)..(199): n is a, c, g, or t
  misc_feature (1693)..(1708): n is a, c, g, or t
  misc_feature (1937)..(1946): n is a, c, g, or t
ctgaatatcttaagccactttctgcaaaagctgtttcttacagatgaagtgctttctttgaaaggtggttatttaggttttagatgtttaatagacacagcacatttgctctattaactcagaggctcactacggaaatatgtaatcagtgctgtgcatctgtctgcagctaatgtacctcctggacaccaggaggggnaaaaagcactttttcaattgtgctgagttagacatctgtgagttagactatggtgtcagtgatttttgcagaacacgtgcacaaccctgaggtatgtttaatctagggcaggtacgtttaaggatattttgatctatttataatgaattcacaatttatgcctataaatttcagatgatttaaaattttaaacctgttacattgaaaaacattgaagttcgtcttgaagaaagcattaaggtatgcatggaggtgatttatttttaaacataacacctaacctaacatgggtaagagagtatggaactagatatgagctgtataagaagcataattgtgaacaagtagattgattgccttcatatacaagtatgttttagtattccttatttccttattatcagatgtattttttcttttaagtttcaatgttgttataattctcaaccagaaatttaatactttctaaaatattttttaaatttagcttgtgcttttgaattacaggagaagggaatcataatttaataaaacgcttactagaaagaccattacagatcccaaacacttgggtttggtgaccctgtctttcttatatgaccctacaataaacatttgaaggcagcataggatggcagacagtaggaacattgtttcacttggcggcatgtttttgaaacctgctttatagtaactgggtgattgccattgtggtagagcttccactgctgtttataatctgagagagttaatcctcagaggatgcttttttccttttaatctgctatgaatcagtacccagatgtttaattactgtacttattaaatcatgagggcaaaagagtgtagaatggaaaaaagtctcttgtatctagatactttaaatatgggaggccctttaacttaattgcctttagtcaaccactggatttgaatttgcatcaagtattttaaataatattgaatttaaaaaaatgtattgcagtagtgtgtcagtaccttattgttaaagtgagtcagataaatcttcaattcctggctatttgggcaattgaatcatcatggactgtataatgcaatccagattattttgtttctaggacatcctggaattacccccaaagaacatgaaatttagttgtggttaaattatttatttatttcatgcattcattttatttcccttaaggtctggatgagacttctttggggagcctctaaaaaaatttttcactgggggccacgtgggtcattagaagccagagctctcctccaggctccttcccagtgcctagaggtgctataggaaacatagatccagccaggggcttccctaaagcagtgcagcaccggcccagggcatcactagacaggccctaattaagttttttttaaaaagcctgtgtatttattttagaatcatgtttttctgtatattaacttgggggatatcgttaatatttaggatataagatttgaggtcagccatcttcnnnnnnnnnnnnnnnnttgactcaagaaagtacaagtaaactatacacctttttttcataagttttaggaactgtagtaatgtggcttagaaagtataatggcctaaatgttttcaaaatgtaagttcctgtggagaagaattgtttatattgcaaacggggggactgaggggaacctgtaggtttaaaacagtatgtttgtcagccaactgatttaaaaggcctttaactgttttggttgttgnnnnnnnnnnaagccactctccccttcctatgaggaagaattgagaggggcacctatttctgtaaaatccccaaattggtgttgatgattttgagcttgaatgttttcatacctgattaagacttggtttattctaatttctgtatcatatcatctgaggtttacgtggtaactagtcttataacatgtatgtatcttttttttgttgttcatctaaagctttttaatccaaataaatacagagtttgcaaagtga

SEQ ID NO: 318901 - DNA, 1092 bp, Homo Sapiens
  misc_feature (8)..(8): n is a, c, g, or t
  misc_feature (11)..(13): n is a, c, g, or t
  misc_feature (18)..(18): n is a, c, g, or t
  misc_feature (31)..(32): n is a, c, g, or t
  misc_feature (38)..(38): n is a, c, g, or t
  misc_feature (41)..(41): n is a, c, g, or t
  misc_feature (46)..(46): n is a, c, g, or t
  misc_feature (56)..(56): n is a, c, g, or t
  misc_feature (64)..(64): n is a, c, g, or t
  misc_feature (67)..(465): n is a, c, g, or t
  misc_feature (474)..(509): n is a, c, g, or t
  misc_feature (512)..(639): n is a, c, g, or t
  misc_feature (646)..(646): n is a, c, g, or t
  misc_feature (662)..(670): n is a, c, g, or t
  misc_feature (678)..(678): n is a, c, g, or t
  misc_feature (681)..(681): n is a, c, g, or t
  misc_feature (696)..(696): n is a, c, g, or t
  misc_feature (723)..(726): n is a, c, g, or t
  misc_feature (730)..(730): n is a, c, g, or t
  misc_feature (739)..(739): n is a, c, g, or t
  misc_feature (1041)..(1041): n is a, c, g, or t
atctaaangannnaagtnggataaaagagtnncgaaanaanggccngaaaataccntttggcangtnnnnnnnnnnnnnnnnnnnnnnnnnnnnnnnnnnnnnnnnnnnnnnnnnnnnnnnnnnnnnnnnnnnnnnnnnnnnnnnnnnnnnnnnnnnnnnnnnnnnnnnnnnnnnnnnnnnnnnnnnnnnnnnnnnnnnnnnnnnnnnnnnnnnnnnnnnnnnnnnnnnnnnnnnnnnnnnnnnnnnnnnnnnnnnnnnnnnnnnnnnnnnnnnnnnnnnnnnnnnnnnnnnnnnnnnnnnnnnnnnnnnnnnnnnnnnnnnnnnnnnnnnnnnnnnnnnnnnnnnnnnnnnnnnnnnnnnnnnnnnnnnnnnnnnnnnnnnnnnnnnnnnnnnnnnnnnnnnnnnnnnnnnnnnnnnnnnnnnnnnnnnnnnnnnnnnnnnnnnnnnnnnnnnnnnnnnnnnnntctgcctcnnnnnnnnnnnnnnnnnnnnnnnnnnnnnnnnnnnnatnnnnnnnnnnnnnnnnnnnnnnnnnnnnnnnnnnnnnnnnnnnnnnnnnnnnnnnnnnnnnnnnnnnnnnnnnnnnnnnnnnnnnnnnnnnnnnnnnnnnnnnnnnnnnnnnnnnnnnnnnnnnnnnntgacagngtgagactctgtctcnnnnnnnnntcaaatanatnatcataacctctcanaaatgctgtgtgcattttcatgttctnnnntttngcatcactntcactctccctaatgaaatgtacttcagagaagcagtattttgttaaataaatacataacctcattctgaataatgtccctcattttgactataactgtgcttggtttcaaaagcaaaattaaacaaaaatctcagtcccctccgaagtgaactttgtgttaccctgcgtcagaaatgccaagttgtgtttacttttcattcagattttgtgaatatgaacatgctgttataggatctacagatgaatatttaactcaatagaaaaattattttagaacacattgtattggtattacaaccnagattatattcttgatgttgacttcattaaaattatctacaatttcctaat

SEQ ID NO: 318902 - DNA, 1299 bp, Homo Sapiens
cttctcttcctctttttttggaaacttcatggttcaagtggggagagaggaggaggaacatggagctaggtctccaggcctctccagagaagtcctcaccctcgaagcaccctcttgggggacagcagagccaggacagccccccccacgcccagcctccgtctgaggaagatggcagagtcacagtggtgcgagggccagaagggttggagggggcaggggccgggcggggtcacaggaagtagtcggccacgggcttcttggaggggatgccccgtgtctcttggggagcagcctcaaagatgatgaaatctttctggagatgctcgtccagctccaagatggctgccacattcccacagcggtagcagtagttgggtgccgaccacacagtgagcaccgtctcattgaagtgccacttgtaaccttccatcaccagttggtgggcacggcagatcatgtcaatgtcattggctgcgttgaactgggccaccacgtcactgccaaataggtagccggctcctcgggggctcacgccccagcctgtggtgtcttctgggtcagaccagaggaggtcacacatgggcccatcatgaggcacctcttgctttcggtcgattgtccgaatctgatccagggtctggatggagggggagaggcccccgtgcacgcagaagatcttgccatcgatgatggctgacaggctgaggtagtcaaagatctcagtgcagtagcgccacacagtcaccgagccgtacttgcgcaggcactcatcgtagaagccatagacctgcgtgatctggcgactctcatggttgccccggatcagtgtgatgcgatcaggatagcgaaccttaagtgccagcagcaggaggaacgtttcgacgctatagaagccacggtccacaaagtcccccatgaagaggtagttggtctcagggacgtcgccacctactctgaacagctctttgaggtcatagaattgtccatggatgtcgccgcacactgtgactggcgagtccaccctctgcacgttgctctcctctaccaagatctctctggccttagcgcacagggccttgacttcgctctccttgatgagctcgcagcgacgcagctgctcgatctgccggtccaggtcgctgatctccgccatggcccacccccggcgcgggtcagagtcggggccgccgccccctccgcaccgcacaggggtctctattaccgccgctgcgactccggttccggctctccggctccctgcctccctcttcactccgctttcgaccgccgccgccg

SEQ ID NO: 318903 - DNA, 933 bp, Homo Sapiens
  misc_feature (10)..(10): n is a, c, g, or t
  misc_feature (43)..(43): n is a, c, g, or t
  misc_feature (46)..(46): n is a, c, g, or t
  misc_feature (71)..(71): n is a, c, g, or t
  misc_feature (75)..(75): n is a, c, g, or t
  misc_feature (132)..(132): n is a, c, g, or t
  misc_feature (141)..(141): n is a, c, g, or t
  misc_feature (146)..(155): n is a, c, g, or t
  misc_feature (181)..(181): n is a, c, g, or t
  misc_feature (262)..(263): n is a, c, g, or t
  misc_feature (273)..(274): n is a, c, g, or t
  misc_feature (276)..(276): n is a, c, g, or t
  misc_feature (285)..(287): n is a, c, g, or t
  misc_feature (292)..(292): n is a, c, g, or t
  misc_feature (298)..(298): n is a, c, g, or t
  misc_feature (302)..(302): n is a, c, g, or t
cccctgtcgncgcccgcggccttccttgtcgccccctgccccnctngctcgctgtccttgcccccccgggngggngcccccgtgcctccgcctcccctcctctctgtcctcgcggggcgcgctttccccgcncggcccgcnggggnnnnnnnnnnttccttggcggcgcccgggccgtctntcgccgctcccgcgcccccggcccccccgtctcccgctcggcgggctggcggtctgcgggccccgcccggcctctgccctnnctgtggctgnngnggtgtggcnnnggtanggttgngggntatggtgagggaagaggcatcagcattcccttgaggctcttgggagagagacagcccctggtccactccctgctgaaacactgacagtctcagcctctgtttcctcctgccaggggccagcagacctggagccagggttgtggggggctcgagctcaggaagttgcagctccaggctgccgcaactgctctcttgtctggagggttggaccgcctgcggtgctggcactggcttcactaccgactcaggcatcaggatggaagattctggggcagttagtaggatgttcttcagcagcgtccgaggtgtctgttcctccaagtgcccactggcctgaatatgggccgatctgccaacagacctggctccatgggaacgccctctggctatcgtccttgtttggccactcaacttcctgggggaagccgtttcaagcagggctctccgggctccagcccgagcactccggggtcgccgcggggtgcgcgggtccgctgtatccagcacgcgtcgcagcagcgtgcgcggcgtggagtcgctgtcagggttgtggtcagccatcgtctcggccccgggccctcctaaccgcccagccagctgcaggctccgccttcccgccgccacagttaat

SEQ ID NO: 318904 - DNA, 1105 bp, Homo Sapiens
  misc_feature (584)..(592): n is a, c, g, or t
ccgccgggcagtggaggtgactttcctgcgcagccgcttctgagggcggagaacccacagggagtgcgacccctttgcacgctgtgaatgggcaactgtccgagggactcgagccgatcgaaggctggacgccctatagggctcttggcagtccacgaaagacctggagtccgcctccccatttctccggtcggtgagtggcaggaggaaatcgccaaacatgttttcccgctttgcctcccccaactcggaaacttgcaacttgccgtgtcctggaggttgagacaatttggggtctctttgctgccgtccaacagatttatctctgagggcagtgtccttggtgagaggtccaagtaggtgtgggcgacattgtcctccatctcatgagggagcagccctgcacactagggcccaaaactctgcgaaggagcttggaagttcttcatccgttccacttgttttgctactccacacacccttctaggacatgttgattgccaactgctctgtgcagctttcccatagctgtctgttcccgtgcatttcggagcaccaagcaaatacgagcagagagacctggnnnnnnnnntgatgaagacagtattaatgataaaattaacatggctgagtgaattgtcaatgcaagttcctttactaactctttgttaagttttgctttgtactccttacatcctctttctcttaagccattgttttaatttcttctcgttatcatttttaaaagtaacagaaatacagctttcttcctaccttcacgattgacttggtggaggttgggttgcaaagaggaagcagtaagaaaaaataattattctatacattcacaagtccttcaaggcacaaaataaaagtaagaaatagaaaatatgtcctttctcctaataaaggtctttataataaaatttaaatgaagttttgtgtttcatgacagcttcccaaatactgttgtagatactaaaatgtgcctgtatgtatttccttccacaataataatagtaataataaacttttttaggtccaaattaaacatttctcagcttaaatttctatcctcaatccaacatttattatatacacactt

SEQ ID NO: 318905 - DNA, 1964 bp, Homo Sapiens
  misc_feature (15)..(15): n is a, c, g, or t
  misc_feature (25)..(25): n is a, c, g, or t
  misc_feature (1953)..(1953): n is a, c, g, or t
acaatttttgtattnggggggggangggtttttaccgtggttgaggcattttattggacctttggcaattggtggtggggaggcatctgctccaactggtgcggggccctgcagatgggaccatctcaggctgggtccttgtagcccaggagcacagactggactaagcctcctgggccttgtatgaaaaaggtgttgtacctggccgtttttgccagtaataatcaataaaataaccataataaaaatcaaaggctctgttctgaccactcttcaggtcttccgctgaaacggaaaagtgcaaagcaattgaagtacatatgcagtttgtcttaacctcaaatagtgccagtcccacttcctttcctctgatagtttgttcagttcagcagatgcagaggggctggcctgttctccttttgatttcctccacaaggtcttctcttcggacatccacctcttccctgctcgtcactgaacggagcttgatgaccccatccttgagttcctgctcgccgatgatagccaccagtgggatgcctgcctcctcacagtactgtaactggttcagtagctttgggttcttcttgtacagcagctcagccttgatcccagcatcccacagttctgagacaagctttagtctttcctctagcagcttcttctgtgcagatgccacaagcacctgtgtctccgtggtccgtatcttctcctccaaagcctctagtctctgttccacgatggagaaaatccgctccaccccaatgctgagccccacacatggcaccttgcgccctttggggtcgaacatgcccactagcccatcatagcgtcctccagcagccacactgcccacacccaggggctcttcccctgcctgggctggggtctgtagcagcactgcctcatagatcaccccagtgtagtaatccagccctcgagcaaggctcaggtcaaaggagattttgtcatcaatgccaaatagggtcaggtactcaaagagcaacttcaggtctcccaggccctccaaggcctgcttgttttgggatagtttaggatcctggagcagctgttccaccagggataccccaccatgttgctggacatagtccccaatgcggtcagccacctcaggtgcaaggcccttctctcccaccatctcattcttcacctcttcccaggacaccttgtccagcttgtctactgaggagcagatggtacggaacttgctgtcagaaacaccacagatagcaaacatcccatctagaatgcgtcgatcgtttaccttgaccaggaagtcgcctatctgaagtgaactcaggatctcgcacatgatcttcaggcactctgcatcagggatcatgggatcaaagttcccagcaatgtcaaaatcacactggtagaattcccggtatcggccacgggtcatggctgggttatcccgccgatatacctttgctatgtggtagcgtttaatgttggtcagtttattcattgccaaataccgagcaaaaggaacagtgaggtcatagcgaagggacaggagctccccgccctggtccttcaggtcatagataagcttggagtcttccccatactttcccatcagtgtttcctttagttcaaatacaggtgtatcaatgacttctgcaccgtggcgcttgaagcaacggatgattacgtcaaacaccttctcgcgaactgccatctgccggggactatagtctcttgtgcccttgggggttttgagcacaaatttctgtttgctttcatcaggacccagctgtgccttcagtttcaggagtttcgccacctcctcctcgatcagctcggcgctggccttctgctgcttgaggcctcgcacgcgctctccctgaagtttcaccagctcctccagcgccgcacgctctgccatcccggctgtccacttgagccgcctgctgtctcgactgnggtggttgccc

SEQ ID NO: 318906 - DNA, 913 bp, Homo Sapiens
  misc_feature (318)..(329): n is a, c, g, or t
  misc_feature (532)..(532): n is a, c, g, or t
  misc_feature (707)..(723): n is a, c, g, or t
tgcgagtaacagtgagctttattttcatgtcaccgctctaggttcattcacctgttgccaacaacatgagggagtttctccacagcccttgattcctgaattgttcaacaaatcaacagtcaccaatacattgacttaaggagtaaacaagcagcttttctctacacaccaccgggcaccccaggaaggcgcagctccctgctccacccccgcctcttggtgcctgtatccagcagaaggacccagcaggaggctgaatccaagcactgctctcaggccactctatcctcatccctggatcctccagggaacaagatnnnnnnnnnnnntcctgttttcctgctttccaaaatgagagggccttaacatcaaccaaagttacaaaacaaaaacaaaacacaggagctagctgggcgcggtggctcacacccgtggtcccaacattttgggagaccaaggtgggaggaatgcttgagttgtaggagttcaaaccagcctggcaaatttggcaagaccccatctctctaaaaangtaaacaaaaattcggccgagcatcatatcacatgcctgtaagtccccagctactctggaggctgagatgaagactgcttgagcccgggagggcaaggctgccgtgagccaagatcacaccaccacaccctagcccgggagacagagcaagactctctctcaaaacaaacaaccnnnnnnnnnnnnnnnnncccacatcatctgcaaagctatgttgggagcacagccatttcccataggctttctttttccttgccccattgccttccgggaagttttccccttacccatcatcacgatttttcccatctttcacgatggtgcaattcaacaggatgaattaactgaactagaaaaggataaaaaaaatctaaccctatg

SEQ ID NO: 318907 - DNA, 802 bp, Homo Sapiens
agaattgggttcttggctgcccggaaagggcccagggagcctcgaaggagccacgccgtccatggagggccccagccgcagcttttgccatttcttgacagaaaccaccttgaggcttgatggtaccgaccgattccgctcagaagggacgctgccgttgccattgaccagcaggttgacagactctatgacatcaatgaagacctcgttcttcttatacttgataccctcggagcgccaggacacagcgttggtgacagtgggtggcaccccgtgacttgcccgtctccagcttgttgctctgctgagtgatgtactcctgcaggatcttgctgtcggtggtctgcgggaagccaaagtccatgagctcgtccagcaactcgtagacgatgacaaagttgtcccggatgctctcctcctccagctccttgaagtattcgcagaatacctctattgtcttatacaggaaggagtacaccagggaggcattggcattcttcgatgtggtggccaccaagtagaggttgctgtgtttgatccataggaagtggacctggccgtggctcagcagcggggccagggcgccttcctcctcccgctgtaccagcaaaggcatgaagtgctcaatcttgctcatggccacatcgcccttgtagttgcggctgatcaatggcttgcccttaacgtccagaatgaagacagccgaggcggacatggtggcggccgaaggacttaggagtcggggagggagcgccgggaggcgatggcggcgccgcttccttcttcctgtataagacaatag

SEQ ID NO: 318908 - DNA, 2332 bp, Homo Sapiens
ttttggagtattcaatgaatggaatttaatgtaactatgacataaacacacacagggtggggaggacgggtgaccaagcgcagacgtgggtgacacgtggccccgctctctggaccctcagtgggaaaaagtctgaggctggcgtctctcaccaaaccccacctcccctggtgggtcaatactgatctggctgagtgacagcatctcgtgacccaggctggccctgggaaggcgccacagggagggcctgcgagtccagggagcaggcagacgctacagtggcccccgagcgcgccaggtgccagcctcgacgtgtaaatggcccgctgcgggcgctgccgggaaggaagacaagaagggtgagggctcgtcctcaccaagtgcttcctgagtgccgtaggacgtgggtgggacatggggacagtgagggtaacacaaacagcaacgaatgcacaaagacaagttccaggaacacccataaacccataacgttcaacaaaatggcaacaaaacgacgcccctgctggcctggcgaggctggcgcttccttcgtggcagatgccacctgcagctggctggctggcaagcgttggccaagctttttggtacctgggagctcaacagcataaaaggctgtaacctctacacggaaaaatttcacatccttcccctgaaactgacttcaggggcaaagaaacgagacttcttgaagaccagcctcttctgggaaaggggcttctgagacgagtgtcgacggcagagcagatggcctggggaaggcaggggtccctgggcagaggctgggagggtggccagagaccagggagggcccctccatctggtgggtttggcaggtgtgtcccctggtgctgccaccaggagccccgaggccggggtgttggctgcgacagcccctcactgggtccggagctggtaatctccattctgcgtgatataacgcacccagggcagggcctggtacccactcttctcaatgatcttcaggtagcgcacctggatgccggaggtagtgaagtaagggatctcgaacttgacactgatcgggggcttgccctccttgtcttcggcctccacactaggcaggccgaagtgggcccgcatcaggtactccttgccgcccgggaaggacttgatggaccacacgatctcgctgttctcggggacccacttaacgctccccaccgtcgtcttgaacttgggtgagtcggcatcattgggcacgggaatgtggatctccacgttgttggctgttgaccgccgcttgaactggcttttggccttgatcatgtactcgatgcggctgtgggagtgcttctcgatcaccgactcgatccatatcaaaggcttgacgtgggtgttgagacggtaggacatgagctcgaactcgccgtcgggtgggatgaaggagatggtgcggtcattctcgaagcgtgatagccgcacacactggtggaactttcacatccttccagttccaggggatttgcttttgccgcggcccgtgttgtcaaagaggaccttgtcgttgaggcccaggcgcagctcgggcatgcccgagaggaagactcgcatcttgatggagcccacgatctcgctgcgcaggacattgccgttggcgctgaccaagaggttgacagactcgatgacgtccaagaacacctcattcttccgatacttgatgccttcggaccgccaggacaccgcgttggtgacggtggctggtggccgcggggcccctgtttccagcttgtggccttcctgagtgatgtactcctgcaggatcttgctgtcggtggtctgggggtagccgaagtccatgagctcgtccagcagctcgtagatgataacaaagttgtcccggatgctctcctcctccagctccttgaagtactcggaaaacacctgcaccaccttatagaggaaagaaaagaccagcgacacgcacgcgttcttcttggatgtggcaaccagatacaggttgttgtgtttgatccacatgaaacggacccccccgtgggccaggatgggcgacagcatcccctcctcctccttctccatcaggatgggcatgaagtgctccacctctgacatgtccacgtcgccacggtagttccggcagatgagcaccttgcccttcaggtccagcacgtagacggcgctggcggacatgatggctgcaggaggcctcggcagcggccgagggcggtggcggcggcagcgacggtggggactgctgggcgttgagcaaggccgggcgccgcccgcgacagctcacctcgtgccgaattcgccacccaggcctcgctaccta

SEQ ID NO: 318909 - DNA, 1188 bp, Homo Sapiens
  misc_feature (209)..(209): n is a, c, g, or t
  misc_feature (228)..(228): n is a, c, g, or t
  misc_feature (230)..(230): n is a, c, g, or t
  misc_feature (883)..(883): n is a, c, g, or t
  misc_feature (890)..(890): n is a, c, g, or t
  misc_feature (1020)..(1021): n is a, c, g, or t
  misc_feature (1037)..(1037): n is a, c, g, or t
  misc_feature (1041)..(1041): n is a, c, g, or t
  misc_feature (1067)..(1067): n is a, c, g, or t
  misc_feature (1073)..(1073): n is a, c, g, or t
  misc_feature (1084)..(1084): n is a, c, g, or t
  misc_feature (1101)..(1102): n is a, c, g, or t
  misc_feature (1104)..(1104): n is a, c, g, or t
  misc_feature (1108)..(1109): n is a, c, g, or t
  misc_feature (1112)..(1112): n is a, c, g, or t
  misc_feature (1129)..(1129): n is a, c, g, or t
  misc_feature (1157)..(1157): n is a, c, g, or t
  misc_feature (1160)..(1160): n is a, c, g, or t
  misc_feature (1187)..(1187): n is a, c, g, or t
ttttttgttcacggaaacgctttcggttgtcccaccggggggtgtttttttatttggtggaggaatcccaaggccttagttccatggccccgggtttttccttgggaacccagcctatgccccatgtttcccttaccttactgggccccgcgcgcacaaaggaaatggtctggaaaactttttgagggcccgaggcggccggacagggntcactgtcgacggattgtngngttttgcagatgatttctttattgtaaagacagcagttacaaaagagaataaatatgacattaggatatatttgttaaaaatacaacaaaaacccctagtatttgtgagcaaccccaataactcacaagtatgggggataagaacatctacagctggataccctgaaacagatgttagaaactggctaatggtgagtatggccatgactttggggatgtttgaaaggccctggatctgtcacttgggaacgtcagcggtctactgtaatacaatttgcacagagtcagagtgaacaggaacccttttactcattggtatcctaactattctttcgttcttacagtgaagtagtacagtatttaagagtggggaaaaggctgagctgggaagacatagacggagcaaggtgaagagggagggactgggggaatgctaaggggccaggagaaaggtggcaggaaggagcagacctctgtcctttctctaatgtgtgttactgtggtggcatgctgttcctcctgttgaagagtggacgggcagtggtccacccagcctccattaagaccccccattacccaggaacagaagatgcaaaagcgactggcagaatcctaccaaagatgagaacagggaagttgaatgtgaagcaganaggagtncagagaattctccgagaaaatgggcattttctctgaggacccaaaaagacagacatatctacacaaattgatatagcagactactctttgatggggaatggtaaagggacaaggacaaagtgaaggttgnngagaagataaaagttntggntataagaagggaagaggagaagaggnaggggnaagaggtgggnaggcatatggcaaaacnnangacnntcntggaggggcttggacantgggaggaatgaaggctggcaagggagnagncacagggtggtggatagagaacaggcnc

SEQ ID NO: 318910 - DNA, 1691 bp, Homo Sapiens
  misc_feature (155)..(155): n is a, c, g, or t
  misc_feature (1356)..(1356): n is a, c, g, or t
  misc_feature (1461)..(1461): n is a, c, g, or t
  misc_feature (1465)..(1466): n is a, c, g, or t
  misc_feature (1568)..(1568): n is a, c, g, or t
  misc_feature (1588)..(1590): n is a, c, g, or t
  misc_feature (1597)..(1597): n is a, c, g, or t
  misc_feature (1619)..(1619): n is a, c, g, or t
  misc_feature (1624)..(1626): n is a, c, g, or t
  misc_feature (1628)..(1632): n is a, c, g, or t
  misc_feature (1646)..(1646): n is a, c, g, or t
  misc_feature (1676)..(1676): n is a, c, g, or t
gccagaaagcagattttcacttgggaagagacgacccgtagtatgggatgtggtatgataccagcaactggtctattatatcatttaaaccacatggctatctaaagaggtatttggctattataaataaaatagtgatgaacacgtgtacaggngtttgtacggacataagttgtcatttctcttgagtaaatacctaaaagtgggcttgctggagttttactacccttggatgctgctgttgacatggaaaagattgaggaacaatttggtaatctgcacattgttaaatgttccttaggaaccaaagagcccacttaccttcttggtatagacacatcaaagactgtccaagcaggaaaggaaaacttggttgctgttttatgttctaatggatcaatcagaatatatgataaagaaaggttaaatgtactacgagaatttagtggatatcctggacttcttaatggagtcagatttgcaaattcctgtgacagtgtatattcagcatgtactgatggcactgtgaaatgctgggatgctcgagtagccagagaaaaacctgttcagctcttcaagggttacccttccaatatttttatcagttttgatattaattgtaatgatcatattatttgtgctggtacagaaaaagttgatgatgatgcattgttggtgttttgggatgcaaggatgaattctcagaatttatctacaactaaagactcacttggtgcatattcagagacacatagtgatgatgtcactcaagtacgtttccatcccagcaatcccaacatggtagtctcaggttcatctgatggcctggtaaatgtatttgatattaatattgataatgaggaggatgcactggttacaacctgtaactcaatttcatcagtaagctgtattggttggtctgggaaaggttataaacagatttactgcatgacacatgatgaaggattttattggtgggatcttaatcatctggacactgatgaaccagttacacgtttgaacatccaggatgtcagagaagtagttaacatgaaagaagatgctttggactatttgattggtggcctatatcatgaaaagacagacacattgcatgttattggaggaacaaacaaaggaaggattcatttgatgaactgcagcatgtcaggactgacccatgtgactagccttcagggagggcatgctgctacagtccgttctttctgttggaatgtgcaagatgattctttgttgactggagggagaagatgcacagttgttactttggaaacctgtagctatagagaagacttttacaaagaaagagagtatgaaaatagcaccctctgtgcnccaacgagtacgagttcatagtaatgattcttataaaagaaggaaaaagcagtgataatgccatttgccgcactttgtttggtaggttttatagtttcaaatagncctnncttgtttactacccatggtagacatgtttaaagctttatgtaaaaacaagccagttagcaaacagtcctgaaaaaatatggtgagaatggtttaattccggncttcacatattcaaaaaaannntaaaccntctaagtataaaatcagtgagntgaannncnnnnnccttatttaaaganccctgctgttaatgtagtaaatggtggctnaaagaaatagctccg

SEQ ID NO: 318911 - DNA, 1637 bp, Homo Sapiens
  misc_feature (380)..(380): n is a, c, g, or t
  misc_feature (492)..(493): n is a, c, g, or t
  misc_feature (500)..(500): n is a, c, g, or t
  misc_feature (519)..(520): n is a, c, g, or t
  misc_feature (524)..(524): n is a, c, g, or t
  misc_feature (626)..(626): n is a, c, g, or t
cggtggagagcgcgcccatgttctccgctaaggtggctgtgacagtgcaaggtgggagagaccaggggccccgggagggaggcaaatgagcattgagaaattctgggacaggagctcggcgagaaaagaaggggcggaagttcaaatagctgccacttggagggtttctcttagactatggacgctgtctcctctcctttgccgtgaagcagcgcttgatccgccgcctgcttggaggctggtccctttccccgacgcacaccctggcttctcactctggctggggactcccacagagagggcagctctggcaggggcaggggccactgtgggactgggacgaaggagcgactccctagcgtcctgcaaggcaggcgcangtctcctattctaggctgcagaacccgagctgagtgtcagtcgggatgtgacatgaagcgtctggcctggtccctcttcctttcaagctttccccgtccctcgtggactcgnnacccctnccccacatttcagaaggcnncctnccccctccacgtggacacacggcctcctcccctccccccttggtctgtgggtctgcaaggagccctcgcgggaagcaggaaggagcggggtcgcggaggtgngacaagccggcgccgttgctccccgccctctccgtagagctgttccgggcgccggtgctgagggtgatgggtccgcgggaggcccgcgcgcgccgctgggtggggtggtgctgcgctgcgacacgcgcctgcacccgcagaagcgcgacacgccgctgcagttcgcgttttacaagtacagccgcgcggtgcgccgctttcgactggggcgccgagtacacagtcccggagcccgaggtcgaggagctcgaatcgtactggtgcgaggcggctaccgccacccgcagtgtccggaaacgcagtccgtggctgcagctcccggggccgggttctcccctggacccggcctccaccaccgccccacctccatgggccgcagccttggctcctggtaataggccgctttccttcagaaagcccccggtgtccagatcggtccctttggtcacctccgtccggaacaccacctccaccggactgcagttcccggcgagcggcgccccgactgcggggccacccgcctgcgctccgccgacgcccttggacaatcggctggagccctgaaacccgacgtggaccttcttgctccgagaaatgcagctgctcaaaggccttctgagccgggtggtcctggaattaaaggagccccaggccctccgggagcctcaggggaacgcccgagacccccacctctacttttgcttgggagcccgggaaccccagaaaccattcctgttgaagagcctgagggggcgggttaccggtccccttttgaaaggctcattccctcccttggtcctccttgtttccccctcacgcgaaattttttttacaaggccaccggggtggaacccttggggtttggttgggggtttttaaagggggcgcccccaaaagtggaggggctgcccgatttccacacctaaacacagcagtttgtgacacccaagggaattcttttctgaatttcttaacgattctcaaaggagagttttaaacctggtattttct

SEQ ID NO: 318912 - DNA, 1100 bp, Homo Sapiens
gaagtggatgtgtacgtgaacggggagtgggtgaccaacatcagtgaggggggcagcttcggggagctggctctcatctacggcacccccagggctgctaccgtgaaggccaagacggacctcaagctctgggggatcgaccgggacagctaccggcgcatccttatgggcagcacgctgaggaaacgcaagatgtacgaggagttcctcagcaaggtctccatcctagagtccctggagaagtgggagcgtctgaccgtggcggatgcgctggagcccgtccagtttgaagatggagagaaaattgtggtccagggagagcctggggacgacttttacatcatcacggagggcaccgcgtccgtgctgcagcgccggtcccccaatgaggagtacgtggaggtggggcgcctgggaccctctgactacttcggggagattgcactgctgctgaaccggccccgggcggccactgtcgtggcccgggggcccctcaagtgtgtgaagctggaccggccccgcttcgagcgtgtgctggggccctgctctgagatcctcaagaggaacattcagcgttacaacagcttcatctccctcaccgtctgagcacagctcccgccctgcagccccagctccccagtgtggtggccgtgccctgctcgtctgtgtcgggggcccgggagccgctgtggtgaggtgtgggccggggtggggctgggtcccggcagcgtgaggactgccccttccccggactcactttttggaataaatgatcaccttgtgcatttccaaatcaaaggacaagcggacaaaatgcatcccaagatcaagggaagggacaggccagcttcctccccacacgccttcccggctgcctctgtgggctttctgctggggggcccaccccacccctgccagtctcctggagatgcttgaggatcggtcctccccagaccaggccaggacgttgcccctggggcctggtgaccctgtgagttcaggtcccccagattgaggtctgagtgtgggcaagtgtgtcaaaaggggctgccccccagggagatgaggctggagcaggaagtgtggccaagaagtaagcc

SEQ ID NO: 318913 - DNA, 1765 bp, Homo Sapiens
acccggatctcaaatagcttaaataagtaggaaatttattggctaatacaactggaaatgcggagatagggcaggctgcagggctggtggctcagggctcagggggccccaactctctgtgctgctctgaggcactgccttcaatctcaggttggcagcacaaagctgctgagagtcccagtgtcacgcccagaccccacaatgccagggaaggaagacaggttctatctaaggaagagatcttccatccccacctctgcggacttttactcacttctcagggacctgcatgggatctcaggcccattcctgaagcagttgttggcagacagagtggaatagtgtttacagcaggcaggcagccttggagtggaggcacacagctccaagtctatcaggaagaaggggaaatgggagctgcacagacagcaagcagcatgctcgatagaccacgaggatctgagtctgaattggtgattattagaacaatgactccatggggtgatacattagaagtgctccagggtccagagatttaaatgtaatgaaagatgaccagaaaaataatgaaaaaaagtatgctgcacaacaatagaaaaacaaaaatctcataatgcaaaagcatcaagtgtttgactctgagaagcgccttgtatgcccagttactctcgttctccctcagctcttgcttgtgcttctccacctgccattccactttggcctggtactgcctgtagtcttcctggcaggccccagctccagttctttggagcagctgggcatccaagaagaggtcattgctgtggaaggagccctctcgctccctccccagcctctcaatcacagccaggagctctgcctgctgctgcctctgctcctccacagagccccagttgttgaaggcacagtaccttctctcacactcccgcaccaggtctttcaggctgcagttgtccgtgtttgctacatagtcatccagggcctggccccctaagtcctctttgtgggtgaagaggatgaccacatgtctcatggcccctgtcccaaagacctctttcaccttcctgatggccactgtgtcctgagcagtgaaacgccccagctggatcaccagaagcaggacgtggggccccggggcagagagcaggtagcagtccccgatgttcttgtacagctcttgggtatcagcctgtgactcaaagatggagggcgtgtcaaccaccaggactttcctcccgttccatgttcctgttttcacctggcacgtcctggtcactgactgggccctcagcttggactcaaacacgggctggccaaggatgctgttccctgtggcacttttcccgcagcctgttttgcccactaggataatcctcaatgccggtggtgttgcagacaagttatcttctgatctaccttcagccatagttccatatttgcccctctggaatcctcccattctctccagaaacggttgttgtgccctgtcctccagggtggcagtcactgaggctctggccgctggtcctctctcaggaaggtgaagtggcagcagagagagtcctgctctgcgtctgtgtgcggggatgctgttcacagggctgagggaggttgagcagacgcagttaaggaggagccatgtgctggggctgaaagctccatgactcagctgcacaaaaagaaaagtagagattatggagtgtgtcccccacacctctgcggactaggacaccctggtgttggctggaaactgattgggaacaag

SEQ ID NO: 318914 - DNA, 2238 bp, Homo Sapiens
  misc_feature (1715)..(1749): n is a, c, g, or t
  misc_feature (1967)..(1967): n is a, c, g, or t
  misc_feature (2013)..(2013): n is a, c, g, or t
  misc_feature (2089)..(2089): n is a, c, g, or t
  misc_feature (2186)..(2188): n is a, c, g, or t
  misc_feature (2217)..(2217): n is a, c, g, or t
  misc_feature (2230)..(2230): n is a, c, g, or t
agccaagagtaaagatgggcacctttccagaggtcaccagctccaggctgtaggctgaacaggaggcccagggcgcaggttataatgtcatggggccaagggtctgggcagaccccaggaggggcgctgggtctaggggcaggggacagccaggctgaagtctagacccagagggcacccgacgtggggctgggtgccaggcctgggctatgggccctctgttccagggtgctggcccaccccacgctctccagaggaccagggcggctccctggagagcagttttgctctctgcccactctcggtaggggctacagctccaagggcgtttataaacagatgagcctcccttctcccaccaccccaagacttgcttgagctacaaaataaggatcttcataaaaatagcaccatctgaaaggaaggcaagttggcccaggccccagcagcaccagggccacagagtgagcttggatggcagcccccgaccctgtccagcccggcccggcccggcccttcggcccttctcaggacttcgccgggggaggctgcacctgccctcccgcagaggggcagccgctgtgtagcagccccggcctcagcgtgggcacaggggccaaggcctgcggcaggactgctgggagctgaggtgccggggaggaggaaggggctgggctctgggggaagcggcccctctgtggggaccccaagcccctctgtggggaccccagccctgcagcctcctcagcccaagcctgtgcccgcctttgcctgcctttgcccctaggagattgtggactggttcaatgcactccgagctgctcgcttccactacctgcaggtggcattcccaggggccagcgacgcagatctggtgccaaagctctccaggaactacctgaaggaaggctacatggagaagacggggcccaagcaaacggaaggcttccggaagcgctggttcaccatggatgaccgcaggctcatgtacttcacagaccccctggacgccttcgcccgaggggaagtcttcattggcagcaaggagagtggctacacggtgctgcatgggttcccgccgtccacccagggccaccactggccacatggcatcaccatcgtcacgcccgaccgcaagtttctgtttgcctgcgagacggagtccgaccagagggagtgggtggcggccttccagaaggcggtggacaggcccatgctgccccaggagtacgcagtggaggcgcacttcaagcataaaccttagcgagtgcggctggaggaccacggacattggactcactgtggctggacggaggggacccgtggatgggggggctctggcgtcctgaggccacctggccccacctgctcctcagggcagcccggcgcggccaggtagggcccgagcttcagcttccaggatgcttctctggaacctcaaggcaggcagcccaggccctgggcctgatctctaaccccgtcatgctgctgctgaccacacccagccaacctgcccctccctgacccggggccccctttcctccagggcccagtctggctcccgagctcagacacagcccccaggagccgcccaccacggctgtgggaacttccaggcctcagcgcagagccctgcttggggccagcacggtgggcagctgccggccgctggggactgggccctgctcgcatgccgccccgccctccccccaccnnnnnnnnnnnnnnnnnnnnnnnnnnnnnnnnnnncggggctatgagggccgtggggtgtttgggtggattatccacacaggtcccggcccctgcccgggctggagttgccacagcctgtgctcctggtcctcacctggaggggccagcaggctgccgtcccaccacacgtggcctctgcgcccagcacggtgctcgccgacagtggtgtctgaacccttggggacgagggcctgggccgcggtgaggccacnagaggcaggagtggccctgggggtcccgggcactgtcgcgcttgcngcaggcggcccagccgtgtatttatttttcacctatctccttcctgtcaaggcaggccgggctccagggctccccnagcgtggggcatgtaggtgggggaggcgtctgcaggtcacctggggggcccagccctctcccagccttgcctggctgagctgtgttccaggggagcnnngacaagccctcataggcagggagggggtntccgaggccagcntccgccgc

SEQ ID NO: 318915 - DNA, 1888 bp, Homo Sapiens
  misc_feature (27)..(27): n is a, c, g, or t
  misc_feature (263)..(263): n is a, c, g, or t
  misc_feature (286)..(287): n is a, c, g, or t
  misc_feature (300)..(300): n is a, c, g, or t
  misc_feature (345)..(345): n is a, c, g, or t
  misc_feature (381)..(381): n is a, c, g, or t
  misc_feature (403)..(403): n is a, c, g, or t
  misc_feature (431)..(431): n is a, c, g, or t
  misc_feature (1672)..(1672): n is a, c, g, or t
taaatcattattttacatcaatccttntttaaacctaaagaactgccttaaaatctccttctccaatgtctctgtatcaatacaatctgttttatttaggtttatatatatcaaagcatttacttacacttattcatagaaaactctttagtggcttaatgtcagctttcatagtggcatccatagataatacaaaagaaaagtgatttgctttattttatactcacactgatccatcaaacacaacttatacagcatagcanggcttcagacagcttatacaaannccaaatacctganattattcataaagtcatatatgatagtctatctgtcatgtaaganctaaacacaccaacaaaagatacccgttaacaaganagagggttctgaggaagtgcgngtcttttctagcctttctttttccgganaagcatcctcagaagtgaatactccgtagcttatgtttctcctgtccattcagaaaaagcatgacagctacgcatctccatgtttcagctactacaacaccctaagagttagtgtattttacaattatccatgtatctttatttgaaaaattatcagcaaaaaactgaggatgattccagcttacataaacactgatacaatataatctctatggaaatgaaataccaaggcatacaaaaattgcttaaataaataaatgtggccagaaaaagaaaagccacagaagtcaagcaattcagtgttaaactgggacctatctttgaattgcatcttttagtaattttttcttactgttaagcttctttaaaaatatgtttcctttacatacttacgaggattggtaacaaggtgaagagcctgagacaagagactggttacagataacttcctaggattttaagtatatagcacatcaatttagagcttgaacttgtctgattcaaagaaaaattctgtttgacaatgtgataaatacaggttattttctcaaaaccatccaagctattactaaagttataaaatatttagttcacttttagaaggctttataacgttaaattgtctcttgagaaaatcctatctgacaggaactactttaccaagttcccttattaaaaaacaaacaaaatgaaacaatttgtcccatatcatgtatggtcatttgaccaaagaacagaaatgtaagtcgttttaagtcagtgcttcaactctaaaggcctaaatttgttgcaacatgtagccaattagttgagtcattccctctgttcagtaattacagaactgggcaactttttataattaatgaaatctgatattatatctatgtgaaaaagtcaaataagatgaaacattaaatgaactgtgcaacaaacactttaaatattcaactggatctaattgcttacttgctaacaatttaactttttcagtgtacaaagggatgaaaggggccctgagtttttaagtaacatgatgtctgtagaatgcatctaaaacatgaagatgtttctgaaatctaaaggtataaataaaatggataaaacccacatgttgccttttaaaactgaaaaccaaatcaagttgtagtttcaaatacagtaatttgcttaaaaattcaatcataaactggacaccctaatgatgtgattttgttctgaagattccttctctcttacccagnttttaaaatgggtttcaagttgttttaaaaatgtgtatgttcacaatgtttaatagtaacactacaaacatcacagtaataacagaattggacttttaaagatacgatagatttattttgagcctagttttaatatacagcataaattcttctgaagtactttcaaatgtatctgccatgagataaatttctaggtttttctctatatgcacaatc

SEQ ID NO: 318916 - DNA, 2557 bp, Homo Sapiens
  misc_feature (2087)..(2087): n is a, c, g, or t
ggcaccgcggcgctcgggtgtttttgggggcccgggtggagggcccgggtgccggggcccaaggtgcggcctcgctagcgggagagggagcgggatcaccggcccggagagagctctcagggccagagcggggcaggaggatgctttcccagccccaccatggagctgcgctgtgggggattgctgttcagttctcgctttgattcagggaatctagcccacgtggagaaggtggaatctttgtccagtgatggggaaggggtaggaggtggggcgtcagccctgaccagtggcattgcctcttcccctgactatgaattcaacgtgtggacccgaccagactgtgctgaaacggaatttgagaatgggaacaggtcatggttctacttcagcgtccggggaggaatgccaggaaaactcatcaagatcaacattatgaacatgaacaagcagagcaagctgtattcccagggcatggccccctttgtgcgcacactgcccacccggccacgctgggaacgcattcgagaccggcccacctttgagatgacagagacgcagtttgtgttatcctttgttcatcgtttcgtggagggccgtggggccaccaccttcttcgccttctgctaccccttctcctacagtgactgccaggaactgctaaaccagctagaccagcgctttccggagaaccaccctacccatagcagccccctggataccatctattaccatcgggagctcctttgctattctctggatggacttcgtgtagatctgctgacgatcacttcctgccatgggcttcgagaagatcgagagccccgtctagagcagctatttcctgataccagcacccctcgaccattccgtttcgcaggcaagaggatattcttcttaagcagtagagtacacccaggggagactccatctagctttgtcttcaatggctttctggacttcatcctccgacctgatgatccccgggcccaaaccctccgtcgcctcttcgtctttaagctgattcccatgttgaaccccgatggtgtggtccggggacactaccgcacagactcacgtggagtgaatctgaaccgtcagtacctgaagcctgatgccgtcctgcacccggccatctatggggccaaagctgtgcttctctaccaccatgtgcactctcgtctgaactcccagagttcctctgagcaccagcccagttcctgtctccctcctgatgctcctgtttctgacctggagaaagccaacaatctccaaaatgaagctcagtgtgggcactcagctgacaggcataacgctgaagcctggaaacaaacagagccagcagaacagaagctcaacagtgtgtggattatgccacaacagtctgcggggcttgaagagtcagcccctgataccatcccccccaaagagagtggcgttgcttactatgtggacctgcatggacatgcttccaaaaggggctgcttcatgtacggaaacagctttagtgatgagagcacccaggtggaaaacatgctatatccaaagctcatctccttgaattcagcccacttcgacttccagggctgcaatttctcagagaagaatatgtatgcccgagaccgtagagatggccagtctaaagagggaagcggccgtgttgcaatctacaaagcctcagggataatccacagctacacacttgaatgcaactacaacactggacgctcagtaaacagcatccctgctgcctgccatgacaatgggcgtgccagcccccctcccccgccggctttcccctccagatacactgtggaactatttgagcaggtgggacgagctatggccattgcagccctggacatggcggaatgtaatccgtggccccgaattgtactgtcagagcacagcagccttactaatctacgggcctggatgctgaaacatgtacgcaacagccgaggcctaagcagcactctgaatgtgggtgtcaaccagaagaggggccttcgaactccacccaaaagtcacaatgggttgcctgtctcctgctccgaaaacaccttgagtcgggcacgaagttttangcaccggcacaagtgccggtggtagcagcagcagccaacaaaattctccacagatgaagaattcccccagctttccttttcatggcagtcggcctgcagggctgccaggcctgggctctagtacccaaaaggtcacccaccgggtgctgggccccgtcagaggtaagccagtctgggagcccctgcaacatgtgttcggttgtctggggcattgctgggggaagtaagagcttgaagatatactgttggcccaggaccaaggggtgaatcaataaaattagtttgtagcagaacctgtggcctctcctacgaccttggtgttccctgcggcatgattccagagcggtattgtgtgtggccagagggggaagtctgggtatctgggcttcagtgcatgctaggagccagggaagtttccaaggatgaaacactagctgaagcagtgccaaacaggacatggagcctccacg

SEQ ID NO: 318917 - DNA, 746 bp, Homo Sapiens
tttaattacgggatatttttactggaatgtagacattacttttgaatatataggacaatagaaattgcatcaaagcaatgctgcctaacagacacagcaggaaacttattggcatggccaggctagtatattttctcattagtatatcaactaattataggaaaagtactgtttctaaagtgcttgaaacatttgcctacgtcactgttctctttttcaatgacctccttcataaagtcaaactctagcccaaacttaagcccatctcactgcatattgtaaagaatggattctgaatgaattaacagaaatgcttttatataggaggttgcagagattctcttgcagtcaatgtctagaggagctgaccctcaggcatcactcagaggaagtcccagccaagattcacagatctgtatgtagccttcggtcaatatcacagtgtacatcaggagtctcaagttcattgcacagaactggtcctgtagcagggaagactcagaattcctgagttttctccttatggtgactcctcagggatagccaccatcttaaatcccaggaatggggcccagctgggaatggagaaagttgcaggcccacatgctccctggacggaagtcacacggagcctctgtgcgggcacctgagaagctgccagaacaacctgcccagcagcagtgcatcctccccactcagtgtccatctgccatcacaccgctgagaaggagaggaatgtgagaatg

SEQ ID NO: 318918 - DNA, 1053 bp, Homo Sapiens
ccgacttaagatggtttgacttatgatttttcgactgtacaatggtacaaaagtgacattcagtagaaatagtactttaagtactcatagaaccattcttgtgtcacttttagtacagtatgcaataaattacatgagatattcaacattgttattataaaacaggctttctgttagatgattttgctcaactttaggtgttctgagcatgtttaaggtaggctaggctaagccatgatgtttagtaggttaggggtattaagtgcattttcaaattaccatattttcaacttacaatagtttcaacgggaggtaaccccatcgtaagtggaggaacatctagtgcctggcacagagccggttctcaataaatataactcttctccatcttcttcaaacctcaggccaggtttcagtgacctcctctcactttctaagattatttttgcttgctggtgggtttactgtcatttttaaccacatctaacctaccttaaaaaagtgtatggatgggggtgccaggtacaaagacttagcataaagaaaacgaccatttactttgaaacataaacaaaggccaattaataatttatgagtctgttccttgtccctcgagtttttagcaggcatggaatcattccacaggtcattatttcagtttggtctctgttcctaaggggtgaaggttttctgagggctgtggatcccaaactcacctggctcagaggctcaaacagcctctctttgtccatcaacccgatttagacagcattctgggcctgaaaaccttctgtgctggcttccagtgaaaatagttcactgggtcaaaagtaggctggtccaagacgcagggacggtcagtaaacgttggcttgtgttcagaaactgccggtttggctggtttcttacattgattttatgggtttgtttccatgaaaaccgaaaaatgattggtgcccaccttggcaacttgccttggcttggcttggaaaactggaggcgctttttttgtccttgcctggaagggcccttgctcacttttgtggggccttt

SEQ ID NO: 318919 - DNA, 2095 bp, Homo Sapiens
  misc_feature (31)..(32): n is a, c, g, or t
  misc_feature (42)..(42): n is a, c, g, or t
  misc_feature (59)..(59): n is a, c, g, or t
  misc_feature (71)..(71): n is a, c, g, or t
  misc_feature (73)..(102): n is a, c, g, or t
  misc_feature (116)..(116): n is a, c, g, or t
  misc_feature (119)..(119): n is a, c, g, or t
  misc_feature (161)..(161): n is a, c, g, or t
  misc_feature (190)..(190): n is a, c, g, or t
  misc_feature (200)..(200): n is a, c, g, or t
  misc_feature (209)..(209): n is a, c, g, or t
  misc_feature (212)..(212): n is a, c, g, or t
  misc_feature (221)..(222): n is a, c, g, or t
  misc_feature (237)..(237): n is a, c, g, or t
  misc_feature (241)..(242): n is a, c, g, or t
  misc_feature (244)..(245): n is a, c, g, or t
  misc_feature (249)..(249): n is a, c, g, or t
  misc_feature (252)..(252): n is a, c, g, or t
  misc_feature (255)..(256): n is a, c, g, or t
  misc_feature (263)..(263): n is a, c, g, or t
  misc_feature (265)..(265): n is a, c, g, or t
  misc_feature (267)..(267): n is a, c, g, or t
  misc_feature (279)..(279): n is a, c, g, or t
  misc_feature (281)..(281): n is a, c, g, or t
  misc_feature (294)..(365): n is a, c, g, or t
  misc_feature (367)..(367): n is a, c, g, or t
  misc_feature (375)..(375): n is a, c, g, or t
  misc_feature (396)..(397): n is a, c, g, or t
  misc_feature (400)..(400): n is a, c, g, or t
  misc_feature (413)..(413): n is a, c, g, or t
  misc_feature (416)..(416): n is a, c, g, or t
  misc_feature (420)..(420): n is a, c, g, or t
  misc_feature (426)..(426): n is a, c, g, or t
  misc_feature (435)..(635): n is a, c, g, or t
  misc_feature (1251)..(1251): n is a, c, g, or t
accattgactcttactattctcttttttacnntttctatctntttttttataaaaatantattataagttntnnnnnnnnnnnnnnnnnnnnnnnnnnnnnnatactttctttctnttncacttatttccatacttattcatttcctttatttcatttttntcacttttttctttacctccctctttatntttccattcntccattatntgnttttttttnntcttcttttcttcantttnncnntctnttnttnntaatttntnantctttcatttcntntttatggtgccannnnnnnnnnnnnnnnnnnnnnnnnnnnnnnnnnnnnnnnnnnnnnnnnnnnnnnnnnnnnnnnnnnnnnnntntcctatcntcattactttcatttttcttnnttntttcttctttatnttnttcntcttcntcctctccnnnnnnnnnnnnnnnnnnnnnnnnnnnnnnnnnnnnnnnnnnnnnnnnnnnnnnnnnnnnnnnnnnnnnnnnnnnnnnnnnnnnnnnnnnnnnnnnnnnnnnnnnnnnnnnnnnnnnnnnnnnnnnnnnnnnnnnnnnnnnnnnnnnnnnnnnnnnnnnnnnnnnnnnnnnnnnnnnnnnnnnnnnnnnnnnnnnnnnnnncagggtctgcctgttcaatggcttcttcaaagaattcctccaaagtgggcatgtgttcccttgtctctgatttacaggcttccatattatcagggcaaagattccaaagccttgttaactcctcatttcccatcagaatttttttggtgggtcctttccctaggaagtcctcgggtgctgttctcttccgaattattctcgtaggtttggtatctgatgttctttctttcacaaaacttgggcaaccttcatttttccacgagttccagttttcttcagtgtttaatatatgctctaccatctttgaaaatctttctccatcgggggggttttcagatagtagttgataaactgattttgtagtatcttcaatccaaagtgattgctcatcagttaaaacatagtttgaacttttgaatttgacctgccccttgagatattggaataaaatgagatactgcaacaggatgtgtcgacgaaagttactgtcactcagttgtaaatccatcagcttttcacttgttaaaattttgcaaaatatacatgttctcctcctgttttcaattcttccatcttttttcttgaggcctgagtatcatctaatttataactcttnaaaaacagctaaaacttcttcagaatacttgagaaaagttttccatgaaatcttctcatagcattgcacagggttcctgaagtaatcctgaagtgaccagaattttcgatacaggttgtaatcaattggaatagagcacgttgttggagcttcctcatctcccatttcgccttcttctacatccattccttcttctctatcttcagtgtgcttctgacccagggtgctttcctgctcatttgtattgaaaacagtgacattttccagattaaactgactctgcaagttaagacctgatttctcagacagagggaaaagcctggccaaaaagagctgaatccgtccacagaagactgtattctgggatttagacaatcttcttaggagatcattgcacatacgtagtaagtaatttttcccagcagaataggatgtatttgatttccaagtagcaacatttttttccacaaaagtgaatattgtgtcacactgatccaaaggaagacaatccaaaacatctcccaacaatacaaaaggtgtagatgcggtacaaataccttcagttactcccccaatagcaagagaaataatagctaaaacgttttcacatgatgaatgatttataatttcttcttctagaatacctctgaaagcttggtcaagggtacattttttttcattttcactgccaggtacctggctgaaggtacttaacaatggcttgatgtttttgttgttcaaggcctctttggtagacttcgtaaaccgcgtccgcgcttcgggcaaactgaagagcggcggcgtcggagacatcttctcggctgcgcgtgcccgccactgcccc

SEQ ID NO: 318920 - DNA, 1651 bp, Homo Sapiens
ttttttgccagtggttaaaaagaaatctttattttacaaaattaaaaacataaatagtatttacaagcatcttaaataccagcttataatacttgacattttctaatcatttcaaattgagtttcccataagcttttaaaatgcaagaccattcattcacttgagtgagttaccagtttttacttccaccaatccaaagtgggttttggtttttgaaattgtccatactgtagtcattcaaaaaaatacaatatgcttttgaaatgactagctttaaagaaaaaagtcctgagcttcctaccccagttgtgggatattactccaaaacaactcaagaacccaaattatcttactgcctgattaaatgtaaccactctagctttttaaagacacattcctgttactcacattaatccatctccctcacgtttcaggtttgctggaaggaaaagtagagaaataatggagtagagaagtgggagaatccagatgaccatctgaaatcacattactgaaaatacaacagacatgacccaaaaatctgatcttactagtttccttcaggatcaaatccaggatattttattgtacaaaaatttcaaatgatttcagatgatgcatatgtgacagcaaacctgaatggcacaatggaacacagacttaaaagatgcttcagtggtcaacactcattctggagttctcatgaatgaagggtagacagattcagtaaaattgtttgcttttcagtttcattatctggtcttcaaatttcagcacagagcaattcatttccatatagtaatatgtaaagagagactacaaaagtgtgaggaaagcaaatgtcctcgagaagggtcagaaaaggaaaggaaagactcagtatctacaacccattacctaagaacaccattttgttccattttccctggaagccctcacagctcagctgagaatcagagtaagaatcttcattatcagagattagcaacaaatttaaaagaaaaagaatgacaacaggtaagagttatatacattttactactttgtttcagacttgtcctgatatttaaaaaggtgtcaaatgagccatggatgctggtggcaggaggcaaccagagaggagaggctcgagtatgaggaatggggaagacttatttacaaattcagagcaaactcctctcttctgggtctaaaataaaaacatcttttgtcttcagtaaaacaaaagtctttctgctcaatgcagatggtaggtacagtgtgctcaaaaagaagcattttctcttggggaagataagtacacagtcagcacagtaagcaccactctgggatcaggcccaccctgcagagcctggcgcccatcactgctgcatgttgttgataatcgcccaggatgctcatcttctcctgggcagagtccacatcctcattctgcttctgggccactcctgtgcctaagccatagagccgcccacagtacttggcatcatcaatgctgtcctcaaaaaacaactctttcatcctaaagaaagccattcctgtcagcagtgagtctgagcctgcctggtgctgccttccaatcctctgcaaatccaactgatcagcaacttcctgaagacctcccttaagatttttgcagctcttcatcacc

SEQ ID NO: 318921 - DNA, 1981 bp, Homo Sapiens
  misc_feature (9)..(9): n is a, c, g, or t
  misc_feature (12)..(12): n is a, c, g, or t
  misc_feature (42)..(42): n is a, c, g, or t
  misc_feature (47)..(47): n is a, c, g, or t
  misc_feature (214)..(214): n is a, c, g, or t
  misc_feature (422)..(422): n is a, c, g, or t
  misc_feature (625)..(625): n is a, c, g, or t
ttctgtttntgnatacacaggctgggtcaggagcagttaganttgcnaccactcagggttctaagggtcttgggccagcactggatggaggaagagccccacatgcccagagcaaggccccccattaagggactgcagccacctccaagggctcctccctccacccaccggctcccaaatgccagagggagcctcttcgccctccctccctgcncaccatccctcaaccatcagcctggcgttcaaagcctttccaagtcccacctcacttttccctctcccaaaggtgcccaggctctgggcaggccctgctcatatccctgatcatggcacattctctggaggaccctcctgttctcgggtaggggccgtgccccacctaggtagccgtcccatgtgggatcctgtaggatctctaaaanctagctctggccccaactttctgtctgccttggaggtttctcagcctcctgagagctctgctggggcccggtctgggcagaacctgggcctaaacaaacaagaggcagggcagccagggtctctgcgtggctgggcccagggcttgccctcagagctcacctgttcaacagaagaggagtgttcctccaccttccctactgcncgcccctttttcagggtcttagggcctctagccctgtggtgggggtgctgggtgccccaggtggagctgaagtcatggggctgttgaggagttggtgtccacctggagtctgtccagtgagtttaggtcaacaggtgtgcagtctgtccttcgaggctgagccacctcccaacagcctgaacaactccaggggccttttgagggaggggcaggcaggcccagtgggtggtcagcccaaggtgaacccacccaccatggccagggttccttaggttgagcctccagtgggtgaaacctgggagtcctcaaccttcctggcagatggggccattgacaagaggaggtgggcggggcctccacagactccgccctgtggtgtcacacagctggcagccaatggaaagcaaccagccaggaagccccggagctacccttgctgggtacccttgctgggggacctgggccatcccagtttgtgcagagcggccggaggcagttaggagcccacgttcagtccaaggccgtccactgagccccgtgtgactctgacagagctggggtgtccatgtcctctctggacctcagttcctgtaaaaaggcccgttggccagatcggccgccgggctgctcacaggtgcacgggctgcacgtaactccgtgggaagaagccaacgcgcccgcaggaccggccccgccaccagtgggggtctgggcgctccaggacctcaatgatgtcgccacggcgggaagctgagctgcgaggggtcctgggctgagaagtcaaactgggcctgggcaaagcaggccccaggtgacttgagacaagggctcctcgtcgcgcaggaagatctgccgcttcttggcgatggtggtggtgcggtagaagtcgaccagctcgttgagggagttgaacttctcctcccacaggaagtacttccccgaggcctcacgcagcaccttgaagtgctgcacctggtctccatagttcacagacacagagaactcccctggggagctctcactctcccggatcaggaaggctcccatgatggttccgcttcatcagaatctcttcggccagctgccgggaaatcctgcccgagtaccacggatggggcttgacgcggatgtagttcttgggaataaatccctcgacaccccggagctcggccttgtaccagttctggtcatcctccatgttcaggatcttgagtgtgtctcccttgttgaaggccagctcgtcgctctctgtagcctgaaagctgtacagggccacggactccatgccgctgctcggggctccagcagctgggctcagagctgggccgacagcttcctgcttcctctgcagtcgag

SEQ ID NO: 318922 - DNA, 1052 bp, Homo Sapiens
  misc_feature (17)..(17): n is a, c, g, or t
  misc_feature (20)..(20): n is a, c, g, or t
  misc_feature (38)..(38): n is a, c, g, or t
  misc_feature (46)..(46): n is a, c, g, or t
  misc_feature (52)..(52): n is a, c, g, or t
  misc_feature (56)..(56): n is a, c, g, or t
  misc_feature (58)..(58): n is a, c, g, or t
  misc_feature (67)..(69): n is a, c, g, or t
  misc_feature (77)..(77): n is a, c, g, or t
  misc_feature (80)..(80): n is a, c, g, or t
  misc_feature (98)..(98): n is a, c, g, or t
  misc_feature (101)..(101): n is a, c, g, or t
  misc_feature (119)..(119): n is a, c, g, or t
  misc_feature (125)..(125): n is a, c, g, or t
  misc_feature (142)..(142): n is a, c, g, or t
  misc_feature (189)..(189): n is a, c, g, or t
  misc_feature (194)..(194): n is a, c, g, or t
  misc_feature (215)..(215): n is a, c, g, or t
  misc_feature (835)..(835): n is a, c, g, or t
  misc_feature (837)..(837): n is a, c, g, or t
  misc_feature (839)..(841): n is a, c, g, or t
  misc_feature (852)..(983): n is a, c, g, or t
  misc_feature (1049)..(1049): n is a, c, g, or t
ttaccttttctcagtcnagnattcctgttgaaagtaanctttcaantagtcnactncncctccacgnnnatgtatcntcnagtttttcctagatagangcnccttctttatggccaaanacagtnatgctggtgatcagtgnacaaactgcaccttggacataaaagctctaggtctttctgacagaanaaagncaaaacctgattatgcttctnacacacatgcttctcttcctgcctcttcctcttgcttgcttcttatctggagttgcttagcaatttcagtcaaactacccagctggggattgcttataaatttcctttctggacagcaaaagtggcaaaaggggcaggggaaactatccatgtagatccttccagggccataatgatgcaggagagacagaagttatgcccacagctgatggtcactgggtctttcaagtagtccagacagatgggacagctagcctctgctcggaggtcagccaggggccgtaacaaattccattgagacttgaacaaagatggtaggtaaggtaattcttttattttagcaaggcctagctctctagagctcaagacccagtacacagtggatatactccccagaccttgaaatctgatcaactatcagttttacatgacttaggcatgttgatggcagcttctagaaacttgttaagccctcagctccttagcttcagagtctactgccacgaacacttcacagcctgcagcctattgcatattagaacttaatagctgggctgctgctcttcccactaaatgaaataaagtcaagttttcttcaagaaagcagcctcaggtccaananannnaatccttcctnnnnnnnnnnnnnnnnnnnnnnnnnnnnnnnnnnnnnnnnnnnnnnnnnnnnnnnnnnnnnnnnnnnnnnnnnnnnnnnnnnnnnnnnnnnnnnnnnnnnnnnnnnnnnnnnnnnnnnnnnnnnnnnnnnnntggagcagacggatcagcaaatccggccaaagaaaactcaggacccaccgagcccccgcgaggaangac

SEQ ID NO: 318923 - DNA, 845 bp, Homo Sapiens
atatccaaggatttatttttgcccttagtaaaggtccagttccccgtggcatttcaataaaaaataatttctagtatttacggttaattctgggaaagatcccccattgatgaggggaggcattgaaagggacgaccaccattggctatcatagataactggatacaggggtttgttttcaatgatatgtaaataatgtttcaggtgatggtcagtcttgtatatgttcatcagttcacagggctgtatactcttgggtcttatttagaggcttgaatttgatatctgaaggacgctttgcagtataagtaaatgggcccgacaaagtgtccaaatcatgggtaccaatggcaaccagtgctcttttcctgcaaatattctgatgtaatttctcctgaagttcaatgaagctgtcatatcgatctttagtaaactttatattacggagaactgctgctaccgcaaaaggacgtatcttagctgtctcttctgtgataatcaatttctggatttttccatcaggcattacccgtttatacactggagcctttatcctttctttgaagacctgaagtcctcgaaccaatccttccagacacaggagatcatatctattggcagggacgtcaattttgtaaagaacaacatcagaggctcctgctgcctttacattaccttgttctttacttattatttccttctcagatgtaatttcatcaagctccagaccaaattcaaaacatagttcatcaaattcttcgtcagtgtaggtgcggcccagggcttggaagagcagatcacgcttcacgctgacagtcggcatggtgtgtcgaactcactgcccc

SEQ ID NO: 318924 - DNA, 1217 bp, Homo Sapiens
  misc_feature (4)..(4): n is a, c, g, or t
  misc_feature (19)..(19): n is a, c, g, or t
  misc_feature (21)..(21): n is a, c, g, or t
  misc_feature (28)..(28): n is a, c, g, or t
  misc_feature (35)..(35): n is a, c, g, or t
  misc_feature (39)..(39): n is a, c, g, or t
  misc_feature (43)..(43): n is a, c, g, or t
  misc_feature (54)..(54): n is a, c, g, or t
  misc_feature (71)..(71): n is a, c, g, or t
  misc_feature (73)..(73): n is a, c, g, or t
  misc_feature (75)..(76): n is a, c, g, or t
  misc_feature (91)..(91): n is a, c, g, or t
  misc_feature (93)..(93): n is a, c, g, or t
  misc_feature (106)..(106): n is a, c, g, or t
  misc_feature (119)..(119): n is a, c, g, or t
  misc_feature (123)..(123): n is a, c, g, or t
  misc_feature (127)..(127): n is a, c, g, or t
  misc_feature (130)..(130): n is a, c, g, or t
  misc_feature (142)..(142): n is a, c, g, or t
  misc_feature (147)..(147): n is a, c, g, or t
  misc_feature (152)..(152): n is a, c, g, or t
  misc_feature (162)..(162): n is a, c, g, or t
  misc_feature (166)..(166): n is a, c, g, or t
  misc_feature (168)..(168): n is a, c, g, or t
  misc_feature (175)..(176): n is a, c, g, or t
  misc_feature (178)..(178): n is a, c, g, or t
  misc_feature (180)..(180): n is a, c, g, or t
  misc_feature (182)..(182): n is a, c, g, or t
  misc_feature (184)..(184): n is a, c, g, or t
  misc_feature (188)..(188): n is a, c, g, or t
  misc_feature (190)..(190): n is a, c, g, or t
  misc_feature (202)..(203): n is a, c, g, or t
  misc_feature (207)..(209): n is a, c, g, or t
  misc_feature (213)..(213): n is a, c, g, or t
  misc_feature (229)..(229): n is a, c, g, or t
  misc_feature (235)..(235): n is a, c, g, or t
  misc_feature (237)..(237): n is a, c, g, or t
  misc_feature (245)..(245): n is a, c, g, or t
  misc_feature (252)..(252): n is a, c, g, or t
  misc_feature (255)..(255): n is a, c, g, or t
  misc_feature (258)..(258): n is a, c, g, or t
  misc_feature (263)..(263): n is a, c, g, or t
  misc_feature (268)..(269): n is a, c, g, or t
  misc_feature (325)..(325): n is a, c, g, or t
  misc_feature (329)..(329): n is a, c, g, or t
  misc_feature (335)..(335): n is a, c, g, or t
  misc_feature (347)..(347): n is a, c, g, or t
  misc_feature (357)..(357): n is a, c, g, or t
  misc_feature (361)..(361): n is a, c, g, or t
  misc_feature (382)..(382): n is a, c, g, or t
  misc_feature (387)..(387): n is a, c, g, or t
  misc_feature (405)..(405): n is a, c, g, or t
  misc_feature (418)..(418): n is a, c, g, or t
  misc_feature (438)..(438): n is a, c, g, or t
  misc_feature (444)..(444): n is a, c, g, or t
  misc_feature (454)..(454): n is a, c, g, or t
  misc_feature (500)..(500): n is a, c, g, or t
  misc_feature (503)..(503): n is a, c, g, or t
  misc_feature (522)..(522): n is a, c, g, or t
  misc_feature (877)..(877): n is a, c, g, or t
  misc_feature (1048)..(1067): n is a, c, g, or t
  misc_feature (1138)..(1138): n is a, c, g, or t
  misc_feature (1173)..(1173): n is a, c, g, or t
gaanattaaattttttcanantatttangaaacgnacgnaaanatatttttaanaaataatttacgttatngnanntaatatcaaacgttnanggtgaataagtantgtttttgattcntagngttnaangggaaaatagancggtncgatnataatcgaanacgncngtttttnntntncncnaatncnaaacttaaggtnnttcnnngacnctatcgttcagagccngcatcncngttatttncgtttcntanatnaatantcccnnaataacgatgaccgtaggaggggcgttcgtgtgcgtgtgtaagggaatttaacccnactntcgagntggttcgagggngctcgaaacntatnatgtaaaaacgaagttttagnaatgntatgcgtatcgtagcgcnggttatcgttcgngatcgcgtcgtcgtaaaacngatctngaaaatagcnttcgattggatcgaacgatttcgataaaatgcgatcgtgtgggtanganggtaagaaaagcgagcacnctttccttaatttggcgaaatggatcgagactaaatgtgtgcttaatgttttttcttcgcaatgctttcagtcgagattcaactattttatcgcgtcgcgacgagtggcttaacttggtgttggaggagggtttaagcattaagataggaagcaggaaatttgattgctctaaatttagaaattatatccctaaaaattaaaacatgaatactgggtggtaatgataattgaggcaaatgtatttattttggtgacgattttgcatatatgaagattttctgaaataggaccttcaagatcctagggggttttgtttggtttttaattgtgaggaataaaaaatcttctgcccanactggcattttaaggtgactgaggtcaaacgttgtttccttaggttgaaatagcagccaaaacattcttcacgcaggggcttgggatatggctgctggcaacacattttgttgtgggctccttaatttaatgataaaatttaagctaaacacaagccaaaaatgaataggnnnnnnnnnnnnnnnnnnnncactaaacaggcaattgaaatacatggtacaaaaataagtggtaagataattgtaaaatgaaatggacagnatattcaattttccatctatgaaaatttcacaatnaaaatcatagtttactttgtattcataggcgtgcttggtggatc

SEQ ID NO: 318925 - DNA, 1071 bp, Homo Sapiens
cagcactttgtagcctgtgtcacagctgacgagcacttggtctttgaagaaatacttggcttgggagggctcgattttcccatggacaggaggctgtagctctgggcactcatttcctgcagccctgtatgagagcctccagccccggttctctcccgagttgtcactatggaacaggatcaggacactgtggctctgggtgctgatgggttctggggctttctctccacagaaaggccccaaaacttttggaccaactttgatcttgatgtagtcataggggcagggcacctcaggatggtcctcaatgtcaaatatgtcctcaaactgcaggttgaccatgaaaccctcctccagctcgatggtatacaggcattcagagctcttggggtaagggtttgggaagtcagggctggtgatcaccccagtcctttgagtgaagaggttgtcactgcactccactcggcaggtcctgttgtctgtgtggaggatgtagccgaagcggcaggagcagtagtagccgccaatgtagttgtggcagtagtggtcacaggacagctcctcgtcctccctctccttgcactcgtccacatccacagccatgtagtgggcatcaaagcctgtgaaacgctcctcattggagaaatctgaccggaaagtgatggacatgaaggagccaggggagaggaccacctcctggccgggagtctgctctgtgtctgtggtctccctgcccacagaaggttgccagcacctggtcctcagtttctaccttcacatagtcatattcacaaaggtaggaggattccaagttgaagtgcatgaagtaaagcttgatccgaaacccatctgggacagtgatattccaagtcacctctgaatcactgggataggagtctggataaccaggcgactggatctggccaaacatattgtttagctccacggtgtgggctgaagcctttgacagggagaagcacagagcataatagagaagcagccacctcattttcctgccttgggtgctcccggctgcccggccttggtcctcccagcttgacttgcctgtga

SEQ ID NO: 318926 - DNA, 1098 bp, Homo Sapiens
  misc_feature (1039)..(1039): n is a, c, g, or t
  misc_feature (1050)..(1050): n is a, c, g, or t
  misc_feature (1061)..(1062): n is a, c, g, or t
  misc_feature (1081)..(1081): n is a, c, g, or t
  misc_feature (1083)..(1083): n is a, c, g, or t
  misc_feature (1085)..(1085): n is a, c, g, or t
ttaacagtcttaatattcatgtatttattctcagaacatacaaacttatcttctcagagaatagaaaacagagatttcactcagtgacaaagatggacacagccagttcaccgtgtccccccatctacttagaaaatcccctgggggaggggatgcctagagcatacagcaccccttggtggggggctgtgcacaggtctaaagactctcaacttcctttaccatccaaacaggaaaacagctgtccagatgacagtaagattccactgtctgtaatcctcatggtgccaggtctcctggggcatctagggcaatgatgctactgcagtttatgcagttacacagtcaagtctgtgccaaaggaggtcccatccggcggccaggtttctgttcagtctggggagcaatgccaactggctgcccccatagcctggcatgagctgatggcccagtgcaatcccaaagcaaagaagggcagaactgggccaagaagctgtggtaatttgctctccctgcctccgacagcgtcgtcctctccttttgcagccccacacgcaggcctcctgacctgagggtctgggctagggagttggattgttttcctaagcccccatatcccaagagtgaggacctggaaagagggatgtgagggttctgaaaaacaggcatcaggcagctttggagatgccctcagcccacaggaagagtgctgtgtcaggcaaagatggtctcttcccggcgcttcttggtgaggatggtgcctggcttatgctgggcatctgggtggttggctagttcggggggacaggaagacactgggctttccaggatagcttgcttcagctcgtagaacacagcagagtcctcttttgtgaggaaggtgatggccaccccactcttgcctgctcgtcccgtgcggccaatgcggtggatgtaatcttcaatatttttggccatatcatagttgacaaccatagacacatcttggatgtcaataccacgaccagccacatctgtagcaccaaatatcttggcccancttgaggtggnaacgcaactcnngtgctctggcttttcacgngngngtgaagattgtac

SEQ ID NO: 318927 - DNA, 431 bp, Homo Sapiens
  misc_feature (400)..(400): n is a, c, g, or t
  misc_feature (410)..(410): n is a, c, g, or t
aacagtcttaatattcatgtatttattctcagaacatacaaacttatcttctcagagaatagaaaacagagatttcactcagtgacaaagatggacacagccagttcaccgtgtccccccatctacttagaaaatcccctgggggaggggatgcctagagcatacagcaccccttggtcggggggctgtgcacaggtctaaagactctcaacttcctttaccatccaaacaggaaaacagctgtccagatgacagtaaggttccactgtctgtaatcctcatgggtgccagggtctcctggggggcatctaggggcaattgatgctacttgcagtttatgcagtttacacagtcaagtctgtgcccaaggggggtccccttccggcggccagggtttttntttcagtctnggggagcccattgccccaatt

SEQ ID NO: 318928 - DNA, 1793 bp, Homo Sapiens
  misc_feature (941)..(941): n is a, c, g, or t
  misc_feature (1277)..(1277): n is a, c, g, or t
  misc_feature (1318)..(1318): n is a, c, g, or t
  misc_feature (1331)..(1331): n is a, c, g, or t
  misc_feature (1339)..(1339): n is a, c, g, or t
  misc_feature (1361)..(1361): n is a, c, g, or t
  misc_feature (1363)..(1363): n is a, c, g, or t
  misc_feature (1369)..(1369): n is a, c, g, or t
  misc_feature (1371)..(1371): n is a, c, g, or t
  misc_feature (1373)..(1373): n is a, c, g, or t
  misc_feature (1376)..(1376): n is a, c, g, or t
  misc_feature (1378)..(1378): n is a, c, g, or t
  misc_feature (1381)..(1383): n is a, c, g, or t
  misc_feature (1392)..(1392): n is a, c, g, or t
  misc_feature (1394)..(1394): n is a, c, g, or t
  misc_feature (1409)..(1409): n is a, c, g, or t
  misc_feature (1419)..(1419): n is a, c, g, or t
  misc_feature (1435)..(1435): n is a, c, g, or t
  misc_feature (1448)..(1449): n is a, c, g, or t
  misc_feature (1451)..(1451): n is a, c, g, or t
  misc_feature (1453)..(1453): n is a, c, g, or t
  misc_feature (1457)..(1457): n is a, c, g, or t
  misc_feature (1459)..(1459): n is a, c, g, or t
  misc_feature (1470)..(1470): n is a, c, g, or t
  misc_feature (1480)..(1481): n is a, c, g, or t
  misc_feature (1483)..(1483): n is a, c, g, or t
  misc_feature (1487)..(1487): n is a, c, g, or t
  misc_feature (1489)..(1489): n is a, c, g, or t
  misc_feature (1504)..(1504): n is a, c, g, or t
  misc_feature (1515)..(1515): n is a, c, g, or t
  misc_feature (1532)..(1532): n is a, c, g, or t
  misc_feature (1535)..(1536): n is a, c, g, or t
  misc_feature (1538)..(1538): n is a, c, g, or t
  misc_feature (1542)..(1542): n is a, c, g, or t
  misc_feature (1545)..(1545): n is a, c, g, or t
  misc_feature (1548)..(1549): n is a, c, g, or t
  misc_feature (1554)..(1555): n is a, c, g, or t
  misc_feature (1570)..(1570): n is a, c, g, or t
  misc_feature (1575)..(1576): n is a, c, g, or t
  misc_feature (1590)..(1590): n is a, c, g, or t
  misc_feature (1602)..(1602): n is a, c, g, or t
  misc_feature (1604)..(1604): n is a, c, g, or t
  misc_feature (1609)..(1609): n is a, c, g, or t
  misc_feature (1616)..(1616): n is a, c, g, or t
  misc_feature (1622)..(1622): n is a, c, g, or t
  misc_feature (1632)..(1632): n is a, c, g, or t
  misc_feature (1646)..(1646): n is a, c, g, or t
  misc_feature (1650)..(1650): n is a, c, g, or t
  misc_feature (1667)..(1667): n is a, c, g, or t
  misc_feature (1670)..(1671): n is a, c, g, or t
  misc_feature (1678)..(1678): n is a, c, g, or t
  misc_feature (1682)..(1682): n is a, c, g, or t
  misc_feature (1685)..(1685): n is a, c, g, or t
  misc_feature (1692)..(1692): n is a, c, g, or t
  misc_feature (1694)..(1694): n is a, c, g, or t
  misc_feature (1698)..(1698): n is a, c, g, or t
  misc_feature (1701)..(1701): n is a, c, g, or t
  misc_feature (1703)..(1703): n is a, c, g, or t
  misc_feature (1710)..(1711): n is a, c, g, or t
  misc_feature (1713)..(1713): n is a, c, g, or t
  misc_feature (1717)..(1717): n is a, c, g, or t
  misc_feature (1724)..(1724): n is a, c, g, or t
  misc_feature (1734)..(1734): n is a, c, g, or t
  misc_feature (1736)..(1736): n is a, c, g, or t
tggccgtagacaaggctccaacatgtgccccataacttcagccatccttcggttgaaaactgcggaagttaatgcattggggtgggtacaactggaggggcccttcccttctagcgggcagtgtagtagctgtcgtcggcaaccagtgcttgaagaggccaaagtcgctgatcttggcgtagtgccggttaaccagcaggacgttgcgggccgccaggtcacggtgcacaaagtttttctcctccaggtacttcatccccatggacacctggtgcagcagctcggccacattgctcacagggatctcctccctcttgccgaccaggaccttgtgcagcggcccggccccagccatctccatgaccagcatgagggcctcggcctggcagacgccaatgagccgcacgatgtaggggttgtccagctggtgcatgatctgcgcctcgcgcatcatctcttccgtgtctgccttctccgtgccctgcttcagcaccttgatggccacgtcgatctgcttcttgcgcatgcggtacacgccctggcgcactgagccaaagttgccgcagccaagttcaatgtcagctatgaggaggttatcgcgcttcaggaagagcttcttgtccttgagctcctctgggtcgctgtaggggctctcatacacgctcgtgtccatgggcatcggccgcggtttgtctggggacgttatgcgtgctggctcaggggtgtatccatctgagttgagggtgtcgattcgtctctgaggatgagtcaacgtggatgggtgggctgggagtgtgggagcagcagcccctgaggcgttgctggcactgctgttggggcaggcctccttcagggcagtagatgagcccgtccgctttcagcttcagatactccaccaggctgccagagcgtgtcaaactttgtgccctcgggaatgcagnacttgcccgccttgtcttggctgatgaggtagtggtacaccgtcttcccatagatgagggacagggcgtatgtgccctgctccttccgcggcctcagcaggaacttgccgtcggtctgcgccccagagtaaagtttgcgctcggcctcctcacgcgtcaggctgctgtggtaccagggcatccgctcgtgggccgtcatagcaatgagcttctcccactgcggggcctggctgatgatggcctgctccagggcctcgccctccagcttccacgtctggcgcacgtagtcacgcaccatggcgtctcgcaggcagtcgaagaccccccggctgcggntcgaggccgcgacggcgcggttggacggttgcgcaggttgnagggcagcccgtnggggtcgngcgagtagaaggtcgcagagcncngccggncnanagngngcnnngccgccggnantggcgtaggtgccgntgagtggcgntcgatgggaaagtggnggaagcgcgacanngngnacgngngagcagcacanagccgcgcgnngngagngnagggagtggggcagnaggaagagccnggccgccaggcccgccngcnngnaggnggnccnnggccnnggcacgcgagaggcngccgnngaagaagggcaggngcgccgcggggncnggcancgccccngggccncccgaaaccnggggacggacaggngganggccaggcaaacaggcnacnngcggggngtcnggngcccaangncaanggngnggccggnncngaangcgcccngcagcaggcncngagggcccacggtgggccagggcctgcccggagaggcctggtgtctgctgagctccg

SEQ ID NO: 318929 - DNA, 1694 bp, Homo Sapiens
  misc_feature (220)..(220): n is a, c, g, or t
  misc_feature (226)..(226): n is a, c, g, or t
  misc_feature (228)..(231): n is a, c, g, or t
  misc_feature (236)..(238): n is a, c, g, or t
  misc_feature (240)..(240): n is a, c, g, or t
  misc_feature (244)..(249): n is a, c, g, or t
  misc_feature (346)..(346): n is a, c, g, or t
  misc_feature (368)..(368): n is a, c, g, or t
  misc_feature (590)..(649): n is a, c, g, or t
  misc_feature (1579)..(1579): n is a, c, g, or t
cgggccggtattgagggcggatgagttacgaagccggatgcagagggtagcgttaagccggggggtgggagcgcacatggtaaattcgggtgtgcgcatgtcgagttcgcggtcgtatcagagaatagcgcgagggggggcgatagttccgggtgtagctgaggtcggtggggggtggggagtatgtgcgtggtggagagtttgtgtgtgttttggtgtngcggtngnnnngtcgnnncnagtnnnnnnacgccagttcaagccgcgtgcacataagatcatactgacgcgcgcctcgagctctctcaaaggttgagtcatgcacgcgggaacgccctgcgcgtcncattcaggggggcatgaggcanccggcccgctggcgctgcagaggacccccgggtaccctggctctgcgagcagctcgcgatgagccggatgactgcaggttcctctggcccagcagcagcttgcgctcctccagcttgatcttctcctgcagctgcttctgctcctccgcctgcagcttctccagcttcttctgattccggcgcagctcacggtccctctgcttctgctccctcttgcgaagnnnnnnnnnnnnnnnnnnnnnnnnnnnnnnnnnnnnnnnnnnnnnnnnnnnnnnnnnnnngctcgctgcctctcctccgcttccttctctctgcgcttttgttcttctctttgctgctccagttcctgaagcttctgcctctccagctgccgcttcttaattgaggcatcactcaggtgtttggtcgaatcaaaagaaaccttgatgttgcaggccacggccttgccgtcctcgcccttgtacatgagtttcatcccgcgcagggcgctcatggcctggatgaagcccatgtactcgcggtactgcacataggcctcgaagttcaagtgccccccgaaactgaaggtgtggaagttgcggcccgtcatctcctcccggtaggggtccagcatggggatgtccacattccggatctccccgaacttctcaaacaccttgaccaggacgtcctcgctgggcttctcggagcccgactccttcagggcgaaccacttgcagggcagcccctccaggttggatggtgtccggccgctcccccggcagggtctcgttcatgtccttggcgtcgcggaagaaggagtcccagtcgtggcgggtggggaagtcgatcttgaactcggccgcgcgcaccttcaggatgtcggagaagccgctgagcttgatggtcttgccgtccaggcaggccagaaaagacttgaccaggctcttgttctccacctccccctcgaagcggatgaagtccatggtgctcttggaaatacgcagcgtggagaactggtggttctgcaccatgcccttcagcctctccatcacctcccagttggagatggacttccccggctgcttcagctgcgggagtgccacgctgatggtcatcttggtgatgggcttcaggtacaagccgtaagcagggcagagctccacggcctcagacgtttcgtgcacgatggtagccgctgccatagcctccgggaccttgggcctgcgcgnggctccgcctgcgtcccaggccgccgccgccgctggcccaagtcccgccgtccctcgacgatccccggacaggcgcggcctcaccgccgggagccgccaccgtcccccggaggcg

SEQ ID NO: 318930 - DNA, 1052 bp, Homo Sapiens
  misc_feature (508)..(527): n is a, c, g, or t
  misc_feature (761)..(761): n is a, c, g, or t
  misc_feature (840)..(840): n is a, c, g, or t
  misc_feature (883)..(883): n is a, c, g, or t
  misc_feature (889)..(889): n is a, c, g, or t
  misc_feature (897)..(897): n is a, c, g, or t
  misc_feature (960)..(961): n is a, c, g, or t
  misc_feature (965)..(965): n is a, c, g, or t
  misc_feature (971)..(971): n is a, c, g, or t
  misc_feature (973)..(973): n is a, c, g, or t
  misc_feature (985)..(985): n is a, c, g, or t
  misc_feature (988)..(988): n is a, c, g, or t
  misc_feature (993)..(993): n is a, c, g, or t
  misc_feature (995)..(995): n is a, c, g, or t
  misc_feature (998)..(999): n is a, c, g, or t
  misc_feature (1005)..(1006): n is a, c, g, or t
  misc_feature (1029)..(1029): n is a, c, g, or t
  misc_feature (1043)..(1043): n is a, c, g, or t
  misc_feature (1046)..(1046): n is a, c, g, or t
ggggcttccgttgagcaccaagcaagatggcagcttccgagacggttaggctacggcttcaatttgattacccgccgccagctaccccgcactgtacggccttctggcttctggtcgacttgaacagatgccgagtcgtcacagatctcattagtctcatccgccagcgcttcggcttcagttctggggccttcctaggcctctacctggagggggggctcttgcccgccgccgagagcgcgcgccttgtgagagacaacgactgcctcagagttaaattagaagagagaggagttgctgagaattctgtagtcatcagtaatggtgacattagtttatctcttagaaaagcaaagaagcgggcatttccgttagaggagggtgaagaatctggaacccgattgcaactattccaagacgcatgtggaagagtcgcgagaaccataacaataatcgagaaggtcttggatcctggaaccaaaagctgtcacagatcagactgtcagcnnnnnnnnnnnnnnnnnnnntaaagcaacctgtggcacagtgggtgatgataacgaagaggccaaaagaaaatcaccaaagaaaaaggagaaatgtgaatataaaaaaaaggctaagaatcccaagtctccgaaagtacaggcagtgaaagactgggccaatcagagatgtagttctccaaaaggttctgctagaaacagccttgttaaagccaaaaggaaaggtagtgtaagcgttttgctcaaaagagagtnccagttcctcctcggagtctgaatcttgtgatgaatctatcagtgatggtccagcaaagtcactttggaggcagagatnctcagagaattacaactgagtatcaaggaggacctctaccaanatacanctgcaganaactggctataaacttggcttagcttaccccagcaaggcaagactctggacacatctccagtnngatntagtgngnatagacgacatnctnatgtntnagnnccgggnnttgcgcggtttctaagaagtggnctttgcggagagtntcngccagg

SEQ ID NO: 318931 - DNA, 1336 bp, Homo Sapiens
cgccctgtaattcccagcgcgcccacccacgctgggggacggagtaagactcagtctcaaaggcatgacgaaaatagcaaaaatgctttagtgttatacctgttacgaatttaatggaaattacaagtaggagcccattacaatctctagccttaaaatgctgaaaacatacacagtgtgacaataagtaaacttcgagacccaataagggggaaagtccaacgtggaaagtatttggtaggagtgaagaacagagtgacaactgcttagtcccactggatatttcgctcctcttcaggaagaatactccagtttggggaggccatatcccgggccagccagttaaaatcgtcaacatcgttccagttatttttgctcctatctaaaccagagctctcgaagtccttgtcgatctccgggtagctccaggtgtaaggggcgaactggatcccactgcagtcctccacgatggccctgctggtcacctgcaggaagatgcgggtgtctttcgtactgtgtatgcggagctgttggcaggccactgccagcacgcagtcactgcagtcctccaggaaaacagaggtagacaccggaccgcagagcagcttgcagctgtgggccttggttagccgcagggtgttgggatttccatacagtctgaccgtgcagttgctcagttcggtcaaaagaacgtcgcgctggtgcaactcgctggctctcttctccaagacttgggactccaggttggagaaaccgcagacccagctggggccgaggtctccttccgccttcttgggcagcggggagtcctgtatgctttcaactgccggggggatgccaggagccgcgtctactttggtagacgaagcagcatcctttccccgggtcttgaaagcgaaacgcttcttgggctgcagcccccggcgccgctcggccaaggccgcctgcagccgcgccagcgcctcttgtccctgccgcaggtcgtaagcggctaggaaaaaaactgagtcgttgattagtttctgcagccctggagccgagaggccgcctcctccagccgctcgaccgactccgcgcgctccagaagctcttccacggccgctcgctcccgagcaaaggtggcgacgaaaaagtggctgttctccttctctacctcctggttctgccgcttttgtttccgcctttcaacttccagctgccgttcttgttcgcgtctctgaagccgctcaggcaccaggctcaggtcccgctgggactccatgtctccggtcctgacagcagcagcggagcaactgacggactccatatggatcccgggaatccggaccggtccagc

SEQ ID NO: 318932 - DNA, 1052 bp, Homo Sapiens
  misc_feature (277)..(612): n is a, c, g, or t
  misc_feature (615)..(615): n is a, c, g, or t
  misc_feature (695)..(695): n is a, c, g, or t
  misc_feature (779)..(779): n is a, c, g, or t
  misc_feature (806)..(806): n is a, c, g, or t
  misc_feature (812)..(812): n is a, c, g, or t
  misc_feature (836)..(836): n is a, c, g, or t
  misc_feature (863)..(863): n is a, c, g, or t
  misc_feature (865)..(865): n is a, c, g, or t
  misc_feature (869)..(869): n is a, c, g, or t
  misc_feature (879)..(880): n is a, c, g, or t
  misc_feature (888)..(888): n is a, c, g, or t
  misc_feature (906)..(906): n is a, c, g, or t
  misc_feature (914)..(914): n is a, c, g, or t
  misc_feature (924)..(924): n is a, c, g, or t
  misc_feature (933)..(933): n is a, c, g, or t
  misc_feature (951)..(951): n is a, c, g, or t
  misc_feature (957)..(957): n is a, c, g, or t
  misc_feature (963)..(963): n is a, c, g, or t
  misc_feature (966)..(966): n is a, c, g, or t
  misc_feature (968)..(968): n is a, c, g, or t
  misc_feature (978)..(978): n is a, c, g, or t
  misc_feature (983)..(983): n is a, c, g, or t
  misc_feature (990)..(991): n is a, c, g, or t
  misc_feature (995)..(995): n is a, c, g, or t
  misc_feature (1001)..(1001): n is a, c, g, or t
  misc_feature (1003)..(1003): n is a, c, g, or t
  misc_feature (1009)..(1009): n is a, c, g, or t
  misc_feature (1011)..(1011): n is a, c, g, or t
  misc_feature (1015)..(1015): n is a, c, g, or t
  misc_feature (1018)..(1018): n is a, c, g, or t
  misc_feature (1027)..(1027): n is a, c, g, or t
  misc_feature (1029)..(1029): n is a, c, g, or t
  misc_feature (1032)..(1032): n is a, c, g, or t
  misc_feature (1036)..(1037): n is a, c, g, or t
  misc_feature (1039)..(1039): n is a, c, g, or t
  misc_feature (1041)..(1042): n is a, c, g, or t
gtttgcgtgtattgttttctatttaaagagtaaacatttacggtataaattatgcacacataatagtagacacagagtaatgcataacggtgtgacggggcgaggggacctcaaggtgacaagaaagctggtcctgggctggtcaggaggagtcatcaccaagatactcactcataaagttcacccatgataatctaattactgcacatgtaatatattaaaatatattaaaacataagaaaataggacaggcatggtggctaatataataaaatannnnnnnnnnnnnnnnnnnnnnnnnnnnnnnnnnnnnnnnnnnnnnnnnnnnnnnnnnnnnnnnnnnnnnnnnnnnnnnnnnnnnnnnnnnnnnnnnnnnnnnnnnnnnnnnnnnnnnnnnnnnnnnnnnnnnnnnnnnnnnnnnnnnnnnnnnnnnnnnnnnnnnnnnnnnnnnnnnnnnnnnnnnnnnnnnnnnnnnnnnnnnnnnnnnnnnnnnnnnnnnnnnnnnnnnnnnnnnnnnnnnnnnnnnnnnnnnnnnnnnnnnnnnnnnnnnnnnnnnnnnnnnnnnnnnnnnnnnnnnnnnnnnnnnnnnnnnnnnnnnnnnnnnnnnnnnnnganattatgataccaattaatatggcactgttaagggccccacaaccctgtattggactgaacaaagggcgaacgtgggaatnaagagaaagacaaaagagtatatttggaacaaggggtcagggggcttcttgcttctcgtgaacaagggctctgatcttccacancccttcgtatttattggtataggaganagcaanaagaggggtgggagaaggagttanctgctgggtccaaagtaggctttttanantgcnttcctcaaannatagggcnctagatgacccagtaganaactccantgagcgccanggagttgantccctcaacaaacttctnttggcnggagcnttntngatttgccanatccngcttcannaaanaaattngnggtttntnatangcnccatggaantngantggnnanannccttgctggc

SEQ ID NO: 318933 - DNA, 1098 bp, Homo Sapiens
  misc_feature (67)..(104): n is a, c, g, or t
  misc_feature (253)..(253): n is a, c, g, or t
  misc_feature (449)..(449): n is a, c, g, or t
  misc_feature (462)..(463): n is a, c, g, or t
  misc_feature (474)..(476): n is a, c, g, or t
  misc_feature (673)..(696): n is a, c, g, or t
agacattttaataccatatcaaaacaccttgactaatgaagaaagcttttctcccaagctttgaacnnnnnnnnnnnnnnnnnnnnnnnnnnnnnnnnnnnnnnaatatataaatacagaaacctatcttgcatgggctgatgccacgtgtgaacatcaatggctaaaatgttctcaaacatagtgcctgaaaacaggggtagctgtacatatttcttagtaagtctttttttgtttaagttttctgaaaaanaaaatccacgagggcctaagaataatgttcaggcatttttgcaggacacttgtgattgttaaatcctctgaactgaccggaaccaggaggaaagaagggaaaagagatgggatcagtaggaagaaagttctcaatgggttgttttttggcaatgaagtcaagatattagggtctcaaggggagaaaagagcaaaanacccgccagaaanntagagggaaannncccaacaaacccaaagtagagaagttggtggtggagagggccagttggggcaggggaagagaccgtgtgctcgcccgccgtcagaaggctggcagcgaggccttagctgtgttcgtctgtcactgagtgggttatggctgggcagcaaacagcaagctgtaaacatcacgagggaaaacaccagtcgacactagacnnnnnnnnnnnnnnnnnnnnnnnngtaaacactttaaagacagacccacaatgcctttcaaagatgaaaaagaaaatgccctttccctcctgggctgaggggtgaggggaaggatagcagttgattcattcttctctcaaacttgctctcatccaatttggtgtcctcagggaggaagggagaaccatgatctggaagtcagtgcagaaggggtgccctgttcccgctggtgtcccaagctcagctctgccccagggtccggtgagcctcctccctggagcaggggcgctctgtccctttgagaggagtcagcaagcaagcccgcaggtcagtccgcagggtgttccggacaagatctgttcacttcaaaccacgagtctatgcagctgggaggagggggccgcaagggaaaccacgttacctgct

SEQ ID NO: 318934 - DNA, 1039 bp, Homo Sapiens
  misc_feature (16)..(16): n is a, c, g, or t
  misc_feature (25)..(25): n is a, c, g, or t
  misc_feature (30)..(30): n is a, c, g, or t
  misc_feature (34)..(34): n is a, c, g, or t
  misc_feature (54)..(54): n is a, c, g, or t
  misc_feature (96)..(96): n is a, c, g, or t
  misc_feature (130)..(162): n is a, c, g, or t
  misc_feature (242)..(300): n is a, c, g, or t
gcccctttgcaaaagntttttcatncaccnaggnggactaaatactctctgatncctgatgaggaagaggaaaaggaagaggcaaagtcagcagantttgagaagcctgaccctacaaggaatccttctnnnnnnnnnnnnnnnnnnnnnnnnnnnnnnnnncatagagataggaagtcatctgactctgacagctcagactctgagagtgatacaggcaagagggcaaggcacacatcaannnnnnnnnnnnnnnnnnnnnnnnnnnnnnnnnnnnnnnnnnnnnnnnnnnnnnnnnnngagtgagagtataaagagtgtagggggtggttgagagtaagaaaccaggagccttgtgccttgagactcctggaaagactcaatagtgagaatatagcctcccaccccattaacttcgctcccatgggagatggcttcccctcatgcaacaggcaggtttgggagttagaggtcaaaagcagctgcctgaatgagttgttgtttccttatcactcctggtccctttgcaagtgagccctgcagctcacccattcattcacccaacttccttcattcagcaggaggccctattaccctctccagctgccactgccagagctggattcctgtaaaggagtccaggctagagccacagagactgttgtggaggtgagttcggctgtagttagagtgattggacccttcctattggtctgtcctgggccaactggtgggtgatctctgctgcatccaacatgggagcagagactggcagcaggaggggggaacatggtgagaagtggtgctcacttttcccattcctcctaacatagttctactatgctagaagtggcatccagcggccacagctagaaaacagtctgcagtgtgacttaacttgtgtattgcattccagcagaccactgaaccagacagcgaagccaagatcattgttactactttgtatttactaactgtgtgaatcagttgattctacttcaggtccttgcttaaattcctgtcactaaatggaaatgtg

SEQ ID NO: 318935 - DNA, 1114 bp, Homo Sapiens
  misc_feature (686)..(718): n is a, c, g, or t
  misc_feature (795)..(850): n is a, c, g, or t
  misc_feature (884)..(884): n is a, c, g, or t
  misc_feature (903)..(903): n is a, c, g, or t
  misc_feature (918)..(918): n is a, c, g, or t
  misc_feature (940)..(940): n is a, c, g, or t
  misc_feature (1009)..(1009): n is a, c, g, or t
  misc_feature (1038)..(1039): n is a, c, g, or t
  misc_feature (1060)..(1060): n is a, c, g, or t
  misc_feature (1064)..(1064): n is a, c, g, or t
  misc_feature (1067)..(1067): n is a, c, g, or t
  misc_feature (1073)..(1073): n is a, c, g, or t
  misc_feature (1080)..(1080): n is a, c, g, or t
  misc_feature (1084)..(1084): n is a, c, g, or t
  misc_feature (1086)..(1086): n is a, c, g, or t
  misc_feature (1089)..(1091): n is a, c, g, or t
  misc_feature (1093)..(1094): n is a, c, g, or t
  misc_feature (1103)..(1103): n is a, c, g, or t
  misc_feature (1108)..(1108): n is a, c, g, or t
ggggtgggtggaaacgcgctggctgactggggtcggcgtttagttcagcgcagcgactcggggacctggagctgacgcctagacacttgtattagctttaatagaagagaaatggaggagccatagaatattaaggatgaattcaggaaggcctgagaccatggaaaacttgcctgctctctacactattttccaaggagaggttgctatggtgacagactatggggcctttatcaaaatcccaggctgtcggaagcaaggtctggtccatcgaactcatatgtcatcctgtcgggtggataagccctctgagatagtagatgttggagataaagtgtgggtgaagcttattggccgagagatgaaaaatgatagaataaaagtatccctctccatgaaggttgtcaatcaagggactgggaaagaccttgatcccaacaatgttatcattgagcaagaagagaggcggaggcgatccttccaggattacactgggcagaagatcacccttgaggctgtcttgaacactacctgcaagaagtgtggctgtaaaggccactttgcaaaagattgtttcatgcaaccaggtgggactaaatactctctgatacctgatgaggaagaggaaaaggaagaggcaaagtcagcagagtttgagaagcctgaccctacaaggaatccttctnnnnnnnnnnnnnnnnnnnnnnnnnnnnnnnnncatagagataggaagtcatctgactctgacagctcagactctgagagtgatacaggcaagagggcaaggcacacatnnnnnnnnnnnnnnnnnnnnnnnnnnnnnnnnnnnnnnnnnnnnnnnnnnnnnnnncacaaggagtgagagtataaagagtgtagggggnggttgagagtaagaaacangagccttgtgccttnagactcctgggaagactcaatngtgagaaatatagcctcccaccccattaacttcgctcccatgggggatggcttccctcatgcaacaggnaggtttgggagttagaggtcaaaacagcnnctgaatgagttgtgtttcttnttantcnggtccnttgcaantgancntgnnntnnccattattnccaanttcctt

SEQ ID NO: 318936 - DNA, 1257 bp, Homo Sapiens
  misc_feature (64)..(64): n is a, c, g, or t
  misc_feature (611)..(648): n is a, c, g, or t
acattgcagacctgttttcctagcctgtggcccgctggaatgccccttctaggcatagtagaanctatgttagggaggaaatgggaaaaagtgagcaccacttctcacccatgttccccctccctgctgccagtctctgctcccatgttggatgcagcagagatcaccccaccagttggcccaggacagaccaataggaagggtccaatcactctaactacagccgaactcacctccacaacagtctctgtggctctagcctggactcctttacaggaatgccagctctggcagtggcagctggagagggtaataggacctcctgctgaatgaaggaagttgggtgaatgaatgggtgagctgcagggttcacttgcaaagggaccaggagtgataaggaaactaacaactcattcaggcagctgcttttgacctctaactccgaaacctgcctgttgcatgaggggaagccatctcccatgggagcgaagttaatggggtgggaggctatattctcactattgagtctttccaggagtctcaaggcacaaggctcctggtttcttactctcaaccaccccctacactctttatactctcactccttgtgnnnnnnnnnnnnnnnnnnnnnnnnnnnnnnnnnnnnnnctgccttgctgtcttttgatgtgtgccttgccctcttgcctgtatcactctcagagtctgagctgtcagagtcagatgacttcctatctctatgtttctttttcttcttctccttctttctttttctagaaggattccttgtagggtcaggcttctcaaactctgctgactttgcctcttccttttcctcttcctcatcaggtatcagagagtatttagtcccacctggttgcatgaaacaatcttttgcaaagtggcctttacagccacacttcttgcaggtagtgttcaagacagcctcaagggtgatcttctgcccagtgtaattctggaaggatcgcctccgcctctcttcttgctcaatgataacattgttgggatcaaggtctttcccagtcccttgattgacaaccttcatggagagggatacttttattctatcatttttcatcttgcttccgacagcctgggattttgataaaggccccatagtctgtcaccatagcaacctctccttggaaaatagtgtagagagcaggcaagttttccatggtctcaggccttcctgaattcatccttaatattctatggctcctccatttctcttct

SEQ ID NO: 318937 - DNA, 1023 bp, Homo Sapiens
  misc_feature (646)..(646): n is a, c, g, or t
  misc_feature (825)..(825): n is a, c, g, or t
  misc_feature (835)..(835): n is a, c, g, or t
  misc_feature (899)..(899): n is a, c, g, or t
  misc_feature (911)..(911): n is a, c, g, or t
  misc_feature (920)..(920): n is a, c, g, or t
  misc_feature (925)..(925): n is a, c, g, or t
  misc_feature (929)..(929): n is a, c, g, or t
  misc_feature (935)..(935): n is a, c, g, or t
  misc_feature (969)..(969): n is a, c, g, or t
  misc_feature (989)..(990): n is a, c, g, or t
gagcaggagctgggcctttgagggcccctgctccaaccccaagctgcatttatgatataacccatcacagctggattttaaaaatacacaaaaaaatatataatatacattataaaacctaggtggggtttggaggtggcctgagcgatatgcaaacagtgaggaccttcaggaagctcgggcagggtcgggatgaggaagggaaggggcacagtacttcatatgaaactcataaatacccacaggtggctgctggacaggcccagctggctctgggggcctgggtgttaagaagggacagcaggtgaagggttaaccttcagtcccagaactgggtctgggagctgctactctaggcaggtagattgaggtggggaagaacctaagggagcagtgcccaccaagggtttgtcagattcaagcctcaggcaagaaaaaaatcaaaagccttctgctactctctccctctgggcctctggtctgcccagaggctgggactccttcctctaccttgctctcaatctggagggtgctggggggtgcccatcttcctggggcccctggctggcttgtgggctaatgaggtgctaatggggtctagtagctgctgtgctcccttcttcatgcccagtctgaaacaggtgcncccctaacccagcgcccctcgatgaggctccactccacactgcagagcctctcccctaccctgcggccagcccccgccccagggaggtagtataaacctgggctctggggacaagcagccctggatgagaactccagctctgcccacctctcctgtgggtccctcaacttcctggagcntgggcacttnatctgaaacccagagacctacgctcgctgtggggagtctgaggaccacacaagccatgcaaggngtctgggcaccngcctggganacaangggnaagganttttgggccctctgtctcagtcaacccaaccggnactccagggctttgctattnntccttggttcatctgcctactgccatatgtccc

SEQ ID NO: 318938 - DNA, 1229 bp, Homo Sapiens
  misc_feature (3)..(3): n is a, c, g, or t
  misc_feature (12)..(12): n is a, c, g, or t
  misc_feature (15)..(15): n is a, c, g, or t
  misc_feature (21)..(21): n is a, c, g, or t
  misc_feature (25)..(26): n is a, c, g, or t
  misc_feature (28)..(30): n is a, c, g, or t
  misc_feature (33)..(33): n is a, c, g, or t
  misc_feature (37)..(37): n is a, c, g, or t
  misc_feature (42)..(43): n is a, c, g, or t
  misc_feature (59)..(59): n is a, c, g, or t
  misc_feature (63)..(67): n is a, c, g, or t
  misc_feature (75)..(76): n is a, c, g, or t
  misc_feature (81)..(81): n is a, c, g, or t
  misc_feature (91)..(92): n is a, c, g, or t
  misc_feature (95)..(95): n is a, c, g, or t
  misc_feature (106)..(107): n is a, c, g, or t
  misc_feature (110)..(110): n is a, c, g, or t
  misc_feature (113)..(116): n is a, c, g, or t
  misc_feature (123)..(123): n is a, c, g, or t
  misc_feature (131)..(131): n is a, c, g, or t
  misc_feature (133)..(133): n is a, c, g, or t
  misc_feature (177)..(177): n is a, c, g, or t
  misc_feature (210)..(222): n is a, c, g, or t
  misc_feature (829)..(947): n is a, c, g, or t
aangacttattntgntgtgtnaagnngnnnttntctngcagnnatacagaagtgaatgngtgnnnnngtgaactnnaattnatccaataanntcnggcatcaggannccnttnnnnattttcnccctgtcngngctcagatttgctagagaactctggtagtggcaagaaccagagntgttactcagaattggacagaggcattgtcccnnnnnnnnnnnnngcccaaatcagagcagtggcaatgtaagtgcagggaggacatgatgtgggattatttagaaaacaggccaaatgacatgcaactactctgcggatacagacgaagcaggaatcagggacccaataagtctcaggtgcttttcaagtaagagcttgtaggtggaaaaggggcaggactctgggttccattctaagtaactgagactgaagcaacagtggaacctcccagatacagataacccctgacagactgaaatacgatctggcgacagcaaggaggtggcagcttgagagaggtctacaacccacctaatggtttagagcccacctgactaccaggcctgtgtgtggacgggaaagtcctgaggattggactctggaaaaccatcacacttaagagacagaggaaaaagagcagtcacggaggtaggtcacgaaatgggtcaacaggacccccgaagagttcaagatactggaaagcactggccatgagtgccagatctccagcacacacatcatgaatttgcttctccccagaggaaaagaagctccttcagggtggtgcctggctcagggtagctggtcaacaactagcttttaaaaaaacnnnnnnnnnnnnnnnnnnnnnnnnnnnnnnnnnnnnnnnnnnnnnnnnnnnnnnnnnnnnnnnnnnnnnnnnnnnnnnnnnnnnnnnnnnnnnnnnnnnnnnnnnnnnnnnnnnnnnnnaactacttgttaagtgaatgaagaggtaggagctgggctctaagtggccactggacttgctgattagaagggagtgatgccataaaccacagccactttcaggacagcagcctgcctcctctcctcctacccctatcctgtccaacacctaagcatagtagtaccactgggagtctgtctcctcaaaagcaagaatgttcaggtacacatgtgtgagttcacctcctaactataggggagaaagcctgtctttatgtataagtctcattcacccattttgac

SEQ ID NO: 318939 - DNA, 2123 bp, Homo Sapiens
  misc_feature (546)..(559): n is a, c, g, or t
  misc_feature (580)..(580): n is a, c, g, or t
  misc_feature (589)..(734): n is a, c, g, or t
ccggggggcaaaatgttgtggcccaccatttgtttctgtatcagaacgcgccagccacaggaaatgtaagcccgagattccgtcgagccaatcccggatttgtttatcggcggcggcgggggcagaattaatttattacgcccaagggggcgccaagggtatttgagtgtatagcgcacgagtgcggtggggcacgggaaggtattaccgtgcccgtaggtgcacaggtggttttatccccacagaagggcgaagccagggcgttggatgggtatttattcaggcacacatcgtttccgcgataccgccgccccgcaggtgtgtggagaatggaaattaccaaaatctgggggcacagagggggtttcggtcttgtttgtcaggacaggtcccgcggaggagggcgggcgcagaagtccaatttttgtgattgggtgacaaggcgccttccgtttggaccctcccgggattttttttcggggggagagaccccagagcgttgtgttgtggatttggtttctgcgcgggaaggacgaagccgcgcgnnnnnnnnnnnnnngtgggtccacggcgcagatgnttgggttgnnnnnnnnnnnnnnnnnnnnnnnnnnnnnnnnnnnnnnnnnnnnnnnnnnnnnnnnnnnnnnnnnnnnnnnnnnnnnnnnnnnnnnnnnnnnnnnnnnnnnnnnnnnnnnnnnnnnnnnnnnnnnnnnnnnnnnnnnnnnnnnnnncatgcctcaaactattttttatttgcaactacatgatttcacacaattctcttaaacaacgacataaaatagatttccttgtatataaataacttacatacgctccataaagtaaattctcaaaggtgctagaacaaatcgtccacttctacagtgttctcgtatccaacagagttgatgcacaatatataaatactcaagtccaatattaaaaacttaggcacttgactaactttaataaaatttctcaaactatatcaatatctaaagtgcatatattttttaagaaagattattctcaataacttctataaaaataagtttgatggtttggcccatctaacttcactactattagtaagaacttttaacttttaatgtgtagtaaggtttattctacctttttctcaacatgacaccaacacaatcaaaaacgaagttagtgaggtgctaacatgtgaggattaatccagtgattccggtcacaatgcattccaggaggaggtacccatgtcactggaattgggcgatatggtttattttttcttccctgatttggataaccaaatggaacaggaggaggatagtgattctgatggccattccctcgatacattcctggcttttttctgggcaaagggtgccacattggaagaggtggaaatataagttctgaaatctggtacacaggacttgcggctgcagtcaccgaactgggtttcacttccatttccttacttgtttcttcatctgaagaagaggatcctgaatgataatcagaggtaaccttatcaagggccctggtaactttcctggagatctcatccttgttctcatctttattttcaaagctggcaacaatgaatgcattgtttttctctccataccgacagcacacctcacatgggtccacccagagagtgagctcctttggcaagcccaggtcactatacaagatgcagctgttttcacaggctttcaggacatcaggatcaactctctgaaatttattgacacgaatacatctgtaggcctgtcctttcgatggtttttctggataccagtgatttttatatttttcttgaagtattagggtcaatttctcagcaaacctctcaactgcctcttttttcaacttatcatgttttcgaactagccttgtgaaaaagaagacaacggcagcaatttcattcttcatttttttcccgccgctgccgccgccgctcttcggccggagattcggcggcccagaccgtgtcctggccgggaactgaggctccgcctcaacgggcccgcgctgggcaacagggagcgcagcgagcctcgtccggcgcgtgcggctcccgcgtcgtcgggcggccaagcgcgcgttgagaggactggcgggcg

SEQ ID NO: 318940 - DNA, 834 bp, Homo Sapiens
  misc_feature (252)..(252): n is a, c, g, or t
tttgggaaacgaaaggggtggggaaaaattaattaaagttttctgggaaaattactgggttacccccaggggaccttggcgggcgtggcagttccccccgaagctggggttttccatttcccattttcctttaactggtttttttccatctgaaggaaagagggatccgtgaaatgattaatcaggaggtaaccttatccaagggccctggtaactttcctggagatctcatccttgttctcatctttattnttcaaagctggcaacaatgaatgcattgtttttctctccataccgacagcacacctcacatgggtccacccagagagtgagctcctttggcaagcccaggtcactatacaagatgcagctgttttcacaggctttcaggacatcaggatcaactctctgaaatttattgacacgaatacatctgtaggcctgtcctttcgatggtttttctggataccagtgatttttatatttttcttgaagtattagggtcaatttctcagcaaacctctcaactgcctcttttttcaacttatcatgttttcgaactagccttgtgaaaaagaagacaacggcagcaatttcattcttcatttttttcccgccgctgccgccgccgctcttcggccggagattcggcggcccagaccgtgtcctggccgggaactgagggctccgcctcaacgggcccgcgctgggcaacagggagcgcagcgagcctcgtccggcgcgtgcggctcccgcgtcgtcgggcggccaagcgcgcgttgagaggactggcgggcggacgagcgcgcacacgagtgagcgcagccccaaagc

SEQ ID NO: 318941 - DNA, 917 bp, Homo Sapiens
  misc_feature (15)..(15): n is a, c, g, or t
  misc_feature (24)..(24): n is a, c, g, or t
  misc_feature (47)..(47): n is a, c, g, or t
  misc_feature (49)..(49): n is a, c, g, or t
  misc_feature (54)..(54): n is a, c, g, or t
  misc_feature (65)..(65): n is a, c, g, or t
  misc_feature (77)..(77): n is a, c, g, or t
  misc_feature (176)..(176): n is a, c, g, or t
  misc_feature (178)..(178): n is a, c, g, or t
  misc_feature (181)..(181): n is a, c, g, or t
  misc_feature (189)..(189): n is a, c, g, or t
  misc_feature (198)..(198): n is a, c, g, or t
  misc_feature (212)..(212): n is a, c, g, or t
  misc_feature (218)..(218): n is a, c, g, or t
  misc_feature (222)..(222): n is a, c, g, or t
  misc_feature (228)..(228): n is a, c, g, or t
  misc_feature (230)..(230): n is a, c, g, or t
  misc_feature (239)..(239): n is a, c, g, or t
  misc_feature (243)..(243): n is a, c, g, or t
  misc_feature (252)..(252): n is a, c, g, or t
  misc_feature (263)..(263): n is a, c, g, or t
  misc_feature (271)..(271): n is a, c, g, or t
  misc_feature (894)..(894): n is a, c, g, or t
gtagacctgtgtgtntgcggtctncctggaaattgccctgcagccangntgtantgaactccacnacgtgatccacnaggacctcccgacgcgaggcactcaggactgaaccgagagaaagggatggatcccagctctgtacaaggcttcattcttaatgatgttccctagccctnanaantatctctngtccagcantgtatagcagacangctcancctnccctanancttctaacncttntcctcgatngaacttctcanacaggatntcacaggtgggtgtgaccactggggaagagctccaagacaactgacaattataaaatgccaggaagccaccaccaccaaagtgcaggaccaacctcggggaagggtccctccagtcccccctcttgttggctttcttggctctggagaaatcgttcacccaaacgctgccaaacaaaccaaagctgacacgcagccacctcccagcatctcctgcaggggcgtctctctccaaatactcagaatcatcctcgccctgggggacgagctctgcagaccgtgaggatccatcaagggtcttctgcccgctgggctccccgacctgctttgggtccgcagccccttccttctgcacttctttttgtggaggctctggtgttgggctgctgccagggggccccatttcttcatctagatcaaatctaaggaataatttctttccatggacctgggtgtcctggagccacagagactgcaggctggcgggctgtagcttcttactgctgccccctgtcttgaccacctgctgacccacaaagggggagaccaaatggtgaaatttcctcaccaacggcccttctggcatcccggctccgggtgggtggcacgtcggcccgacccagcnaccgctacgcagcccgcacatcc

SEQ ID NO: 318942 - DNA, 928 bp, Homo Sapiens
  misc_feature (790)..(790): n is a, c, g, or t
  misc_feature (818)..(818): n is a, c, g, or t
  misc_feature (832)..(832): n is a, c, g, or t
  misc_feature (834)..(834): n is a, c, g, or t
  misc_feature (924)..(924): n is a, c, g, or t
accctcccaccgccgggtccccgccgcctcggcggagtgttgtagagcctcgagcctgcgaggagcgcgccgcccgccagctccctgcgtcccgtcccgcgtccccgcgttcccgcgtcctgcgatccgccgccatggccagtgaggagctggcgtgcaagctggagcgccggctgcggcgcgaaggaggccgaggagagtggcccccagctggctcccctcggcgccccagccccggagcccaagcccgagcccgagcctcccgcccgtgcgcccacggccagcgccgacgcggagctgagcgcccagctgagccggcggctggacatcaacgagggcgctgcgcggccccggcgctgcagggtcttcaacccctacacggagttcccggagttcagccgccgcctcatcaaggacctggagagcatgttcaaactgtatgacgctgggcgggatggcttcatcgacctgatggagctgaagctgatgatggagaagctgggggccccccagacccacctgggcctgaagagcatgatcaaggaggtggatgaggacttcgatggcaagctcagcttccgggagttcctgctcattttccacaaggccgcgggcggggagctgcaggaggacagtgggctgatggcgctgggcaaagctttctgagatcgatgtggccctggagggtgtcaaaggtgcccagaacttctttgaacgccaaggtccaagccttgtcatcggccagtaagtttgaagcagagttgaaagctgagcaagatgagcggaaggngtaggaggaggagaggcggctccgccangcagccttccaganantcaaggccaacttcaatacatagtcctgctgaccttgccctctgcccacagctgtgcctcacagatgccccgagaagagatgactagggntctt

SEQ ID NO: 318943 - DNA, 1680 bp, Homo Sapiens
tcagaccaaacatttttaatataaaaacattttgataatatacaaacagcaatcacaacagcatccacatggcagcaaggggaccagggcacagagagggggagcgggctggggagggacagttttcagggtcccagttgcttccctggcttgaaatcaccctggtcctagcagaggacaggttaaggctgccagaggcagagggtccctgaccctggcccggagacagactgcccaggcaggccctctgataccatcttccaaccatggcagcctccaggaaaagccagatccatttaggagataacaggaaggtggctgtgattgacaggaaaggcaacatggttcctcagcatcctgctgatcacacctctgggaggggctgctggattgaagaggacctaagaatcttcctgggagcaggacagaaatgggatctaagtctacctactaactaacattcccggcctgtgacaccagaaagctggagttggtctgctcagatgtacaggaagagaaaggaatgacaaagcctttggctcagcaggactggagccttgacaggcactgaccaagaaagcctctaggtgggccagggaggtctgtgggaaagctttggatcaatggtactcaagggtgcacagtggcacagtggccttagttagaatttatgaagacgaaaagaacacaagtcagaatttagaactgaagtacctgcttcttataggcctgtagaggaaaagcgagatcatccttctggccaggactaggggagacccaaggcctgttctttcctaggggctgagtttgacagacctggattgcagctgatggcccccaaagtcctctagatgggccctgcaggactcgctgggaggcctggttgcccctcccggcgtgctgggacactctgggttcctgcagttagatgcagtccatggagttctcagggaggaggccagggatgcagccagggagccccaagcccttgataggagtgcagttgagtgggaggccgcagcccagggaggggtcctgggtctctatggcctccagcctgtccatgttgttgtcccagttgatatggaagcgggtcacccgggggttcgaggccaagatgttccgctggagctgggagaaatctggcttcatgggcgggttctcacgcagctcagggttgaggtactcgttgttgacgtagtagcccactcggatgaactcctgtccatggtaggtgcaggtgatgaggaccacagtcacacccacggcatcagtctctgggatgagggatgggttgggggcgtcggcctgaaagacaaacatgtgtctccctgctggcacagggcccaccagcaccgagtctaggatctgatcaaattcctcactctcagccgagccaacataaatgatcttccactccaggtcgtccgccagggcttcactgcactcgaagctgatctcgaaccggaaggggctgtggaaagggctcgggttctccaggaccgccacgttcagcaccgacaccttggccatcgcctcgcctcgccgcgccgcagcaggggcaggggctgtggctgtggcggaggccgcgcctgggtccggtggggtcagtggggtagggctgaccaggtccactcccgcctcttctctccgagaactgaagtgcgcacctagtccgcg

SEQ ID NO: 318944 - DNA, 1570 bp, Homo Sapiens
  misc_feature (74)..(74): n is a, c, g, or t
ggcttccaggctggttctctagtcaagtctaaggtatgtgaggctcactcaagtcatagctctgtatccaacgntctctttggggtgggtgaggcagggatcaggcagggtcaggctcatcccaggagcatccacaggagagagatgggttgggaggaaggggcctcaggtttttttgatgcggagtttgaaggccacgcgatcggcagaacttgtctcgctcatcgtctgtggcgatgttggcggcgttaatgtgccattctacattcacctaccacgttgggggtcacattcaggagcttcacagccaccagggcctgtgtgtagttcacgtgaaactttttgccatagtaggggaagtacatgaggtcgatgtttccgttggcggggaacatgacgaagttgccgagattctcagcatcttcatctcgcttcccagcacaggtaacattcatgctctggtttgctcctgcatagaagttgatgacccggttcatcttgatgaagacacagggctgcccagtgctgtaaccatagtgggtggagtccccaatgccggagcagttgcccagctgggtccggttgaattggcaggcacgtttggggtagttgaggactccattatctggctgttcgtaaatacgcccagggcggcagacatcattcttttgggcttggatagagtcgttgtaaggctccaagaacttgttgagcttctgaacatgctggtccccagctttcaggtgtcactgacattgacaatgacatcaaggttctcagtcttggggcgaatcatcaagcccggtgtggccagtcggtcctggtacttgggggtatggtcggagacagtctgcagcatcacccacatggtgagggtgaacatggcggtgaggaacccataaaaaacgaggtagaagaggaggataaaggcccagctggtcccggtgcggcccataaactggtgcgtcctcgggttccacacgaactccttccactcctcaaccacctgcccgcagctcttcttctctttctggatgaccatcttggtggcgcggggcgagtccgggcgcggggcggggggttgcggagaagcgggggcgccgcgcgctgaagccctccacacacccaaaagcacggggagcgaaggcggcgcgggcaaaggagacccccctcagatatgcagctgctgcagattccggggtgcacgaccacgcgctgcggggtgctggcagcgcggcggaagatgcaccgatcctaggccccccaactgcgatgaaaaggggtgctgtcagagcaggggagaataacaagaggaaggggtatgaatgcagcttcaccccccaccaaaccgtctagaaacaaaacgaaatggggtgcaaaaacagacggctacaaaaaccgagcagaacgcagaaaaaaagcggggtacaaaaaggcagagagaggtgggggagggggccgccccgaaatccaagatgcaaagaagctgtggaacgaagctcaaggctcgctccgccaagcggagaccactgcaccggtggtggctcagccgcgggggtggggcggggac

SEQ ID NO: 318945 - DNA, 1594 bp, Homo Sapiens
  misc_feature (52)..(52): n is a, c, g, or t
gggtcccccactctgtaggaatccggaatgacctcgggtggctggtggctgncggggaagctggcactgccgggggagccccttcagctgaggactccacattgtagaagacggagccccggataaggcctgcccaggaacagggaaggtgcctctgcattgggagttgggggggaccgagtcccatttcctgtcatggtcacagtggttccccacattgatctgtatgggaatggctgccctgctggagcaccatgggggtggtgtagtgagacataggccggaccacatgcaggtgtcgtgggggcgtgcaggccagattgcagcgcaggtcagacagtgcaacaaaggtgttgcccagcagtcgcaggctctcccctaccaagttgatcaaccgctgatccttctcccggccctcgtgattgttattgtagtccgtggtggcagcagcacccagaacctcgtagtagcgctgcaagaagggctggaggcgactctccagccgctgtagctcctggagcacctcgacatactccgcaggggaaggatggttgggtgcatttgtttccggggcaggtgttgggcccgctggggctgggccaggagtgagctccgggttctgggctggggcacgctcctccacttcttctgcctccatgggctcccggggaggtgcttcactttcaactggttctgatgtttgagagctcaaggctactggctccggggtcacagccggtggctgcgggggcggctgactgtgctgcggttggggccctcctcgacactccatccgggatagtaaggtctgtatatccctgatcatgtgctgagccatcaccagccgtacccggggctcactctgaatcggggcctgttccatgttgatgtgaacatccacagcagagccgtcactaggaagattgaaggttccaaccatgacatagctgttggcattccggtcatgaacagaggccccaggcccccgagtaccagggggggatcccccacccatgagtggctgaggcagaccccgtcccagaagatgccccagaagggaggtgagtctgaggaggagcccgttccaccaggtggataacctttcccccaacattgtattcctgaagcttcttatcatcttgcagaactcgtccctggtaaatgagccgttgtttttcagatgggatgctgacagaggcagcaatgtgctccttaaactcttttacattcatctgggcccccacaataaaggtacgagtttgagagtccaaggtcttcaccaacacctccaagctgtcaggctcctccacagcggtactggtactatcattaggctccatggccgacaggtctctgccaccgacggccacttccgtttccccgatagtatttggggatctcgaagcgatacttccggctccccccaggtccccaagctttacttttgtggggcacgacgagaaagtccgcagccccaaacagtgagtttctgagggcgagtcgggccggggccggcctaggtgggagggagccgagcaccccgaggagccgccaccgcttcgcccgatcccgaaattccggaccggtccagcct

SEQ ID NO: 318946 - DNA, 1016 bp, Homo Sapiens
  misc_feature (658)..(793): n is a, c, g, or t
  misc_feature (815)..(931): n is a, c, g, or t
  misc_feature (938)..(950): n is a, c, g, or t
tttgattataatgttttattacaaaggtaatatatgatcattatagaaaaataaaataggtcatcaataattgcatcaccttgaaacaatcacttttaatttgttgttagaggttagtctattttaacatttctgaagtcatatagacttacatgattgctctcatgtaacctgtaacataagcgtttctcatgttgctacatctgttaataacagtggtttgactaattgtattggctgtgtggatgtggaacagaagattcttgatgtcaagaacggctgaggcacagaaggtgcagtcagtcatttgggaccatattgtctgtggctttcaggacagggagctttgggactcaggtagatgactctggaagagtccttctcttttggaactgcagcatcccttcgtcttccccaaggggaatttagtccaggaaataccagatcctcacctctctaattctcttctcaaatcccaaggcaaaacaagggagacttaatgtggttctggtaattgggctctttgttcttctggagcttccgactgcataagcagtgaataggtgattttgttctcagcatggagaaggcagaaaccagcagtagggatccacagagagggcataggaaagaagatgttaaagaggctggacattgnnnnnnnnnnnnnnnnnnnnnnnnnnnnnnnnnnnnnnnnnnnnnnnnnnnnnnnnnnnnnnnnnnnnnnnnnnnnnnnnnnnnnnnnnnnnnnnnnnnnnnnnnnnnnnnnnnnnnnnnnnnnnnnnnnnnnnnntagctgggtatgatggcacatnnnnnnnnnnnnnnnnnnnnnnnnnnnnnnnnnnnnnnnnnnnnnnnnnnnnnnnnnnnnnnnnnnnnnnnnnnnnnnnnnnnnnnnnnnnnnnnnnnnnnnnnnnnnnnnnnnnnntctgtcnnnnnnnnnnnnngatgttaaaggaaaaatctgaggcgcaattcataagtttaggttccagggcaaaatgcacaggcaa

SEQ ID NO: 318947 - DNA, 875 bp, Homo Sapiens
  misc_feature (518)..(518): n is a, c, g, or t
tataatgttttattataaaagtaatatatgatctttatagaaaaataaagaaaataaaaatcatcaataattttatcacccagaaacaatcacttttaatgtgctggtagaggttagtctattttaacatttctgaaatcatatagatttacatgattgttctcacgtaacctgtaacataagcatttcccaagttgctattatctgttaataacagtggtttgattaattggattggctgtgtggatgtggaacggaagagccttgatgtcaagaagagctgaagcacagaaggtgcagtcggtcatttgggaccatattgtctgtggctttcaggacagggagcttcaggactcaggtagatgactctggaagaaaccttctcttttggaactggcagcatctccctgtcctccccaaggggaatttaggccaggaaataccagatcttccctctctgattttcttctcaaatcccaatggcaagacaatggagactaaatacggttctggtcatncaggctcttcccagagccatccgggtgcatgagaagtgaataggtgattgtgttctcagccccaactttgtcagcctcatcaggattagtgggattggctgtgggaaaaagaagaaatatcagccagagcactgctggagaagagggcctgcctgtgctgatgctgaggctgcaaaaccaacgcccaaactagagccaaagcaagcactgctgaccctgtcttggcctctaggccaagcactgggtaaatatgacctcattgatcgatgcatagggtagcccagccacagccttccgcaaaggccaaggtgaaaaagtggagcagtcacttgagctgcattcttttcagggaattgc

SEQ ID NO: 318948 - DNA, 2064 bp, Homo Sapiens
  misc_feature (24)..(24): n is a, c, g, or t
  misc_feature (76)..(76): n is a, c, g, or t
  misc_feature (83)..(83): n is a, c, g, or t
gcccactcaagtggtcctgtaganaatacctgggagctggagcggttctggtccagaagcagtcaccgccacagcngaggganacaaatcctgacaggaacagtctttctggggatgggcagggatgtgcagccccaggtcggctcctgcatttgctgggcccccagaacatttttggcaaatccttgccttggctcagggctctcggcaaccagtttcagatgtgagggccggcccaggagctgtggcatcagtgtccctgcagccacttgcttggggctgccagctgatgtacattcttacctcagatgagggcctggactggccgatgcctcagaggctccgggcctggcatagtggttgtctggagttggaaccaggtagcaagagtcctgggtagtgttggcgagaaacagcagaaggccatggaaagccccagcaggccttcttccctctcctcagagcagtcaggtgccctggagtagctgagaggatgtcaaggggggcttgggaggggaggtggccacactcaagttggtctggagttacagcgtcgggggagcttgcctcgaaggtgtattagactggattctggggcagcccccgtttcctgggggtgtgggagctttgtctgagggcagggggctgtccaccttggccccagactcctcttcatcatcatccatgctgggccagatggactggtcttccactctcttcagccgctcattgagtgccttcagggccagttgccttctccgctcggcgtcttgagggtctgtgcctggcaggctgatggtgatggaggatggggcacccacatcgtagcgcttcaccgtcttctggcatatctttaccttcaccaggaggctgtgcaccaagttcgccagcaaacccaccacaggctgcaggatctcagggaagaaagtggcgaaagcaaagtggtcagccatgtcccctcggccccggctatggcgctggtagaagcgaagatatacccaactggagagcagcccgaagccataggaagccagcgccgggctctggagcagcgtggcgagccgcagcaggagcagcagcgccagcagcagcatgggcatcacactgacgcgcacctggggcactcgcaggaccacacagtcccccatggtttgcttgagtgccacccggacgccacctaggaagcccaaggcgccgtggatacggacagtgaacaggtagaccaggttgaagaagccatgtaggtgaggaggtaggcgaaggcccccagcagccctacagacacattcaccactgagaagaagatgagcagctccaaggccccccagaggggctccagcaaacgcccggccaccaccaccgttgtcaggctgatggccacgtcccacacatgctgctccatcagcccatgggtggccagggtccagatccagaagttgggaggaaagaggtagcccggggtgaccgccaggcagcctgtgtccacggcgaaggagagcaggtagaggaatagtaccgccgcacacagagccttcaccaccaagctggcgctggccagaatggcccccaagtgctggcgggcgcctggcagggcacgttgcatcttcctggcggctgtcggcctgagaaaagggtctggtaggccaggggcctccccggggcctcgtcctagtccggccccgatgggaggcccaggcccggcctagtcactgcctatggccctggtaaaggatccgcttccgatcgggtggggctctggtcccgaggggccgagtcgggccttgttgccgggccgcagcgtaggcccctcgcccgggacctgagggaaggccctggacggctgcggcacgcccgcctacccaccctgtaggccccgtgccaggctagcctggttggcgttgacctcagggctgggcctcctccatccactgcgaggccttcggttcgcaaggggactggtgcctcgttctgtacccgagtcaagcctggtcagctcccgctcggcctggctcctggcttcgaccgtacctcttctctcggggggccgacaaacaggggtgctgc

SEQ ID NO: 318949 - DNA, 416 bp, Homo Sapiens
tttttttgctcttagaatagactttattgactttagccaagggcaggccctgagatgggggtccagagagagaggcttggtggggctacgtcctgggggccaggttggttctgaggggtagaaggccatccacccactcgcacggctgctccaggagggcttgccacagctgcttctcctcaggtgtggaatccatccagggcacctgcagcccatagctgctgccggtgcccaggctgaggcgtgtgcctcccagctggcggttggccagggccccatggtcccagagggagagctcggcacaagcctggcgcaggtcagcaggcccaaagccatcgtacaccatggtgtgattgaacacagggctgaggctgcgtcgcacaacccttgtacgctggcggctggcccggctgtca

SEQ ID NO: 318950 - DNA, 1416 bp, Homo Sapiens
  misc_feature (17)..(17): n is a, c, g, or t
  misc_feature (26)..(26): n is a, c, g, or t
ctgccccagggacagcnacaacaacnccccagtcccgccccccagaaaaaacggatctctcgacaactggcctcgaccctcccagctcccttagagaacgctgagctctgcacacaggcgatggccttggagacacccacgccgggtccacccagagagggccaaagccctgcttctcaggctgggactcagcaccctcctgcccaggccactgcccattcccagagctctccagagttcaagggctccctggcctccctctcagacagcttgggggtgtctgtcatggccaccgaccaggactcctactccaccagcagcacggaggaggagctggagcagttcagcagccccagcgtgaagaagaagccctccatgatcctgggcaaggctcggcaccggctgagctttgccagtttcagcagcatgttccacgctttcctctccaacaaccgcaagctgtacaagaaggtggtggagctggcgcaggacaagggctcgtactttggcagcctggtgcaggactacaaggtgtacagcctggagatgatggcgcgccagacctccagcacggagatgctgcaggagattcgcaccatgatgacccagctcaagagctacctgctgcagagcaccgagctcaaggccctggtggaccccgccctgcactctgaggaggagctcgaagcaattgtagagtctgccttgtacaaatgtgtcctgaagcccctgaaggaagccatcaactcatgcctgcatcagatccaccagcaaggatggttcgctgcagcagctcaaggagaaccagttagtgatcctggccaccaccaccactgacctaggtgtgaccaccagcgtgccggaggtgccccatgatggagaagatcctgcagaagttcaccagcatgcccaaggcctactcacctgagaagaagatctccatcctgctcaagacctgcaaactcatctacgactccatggccctcggcaacccagggaagccctatggggcggatgacttcctgcctgtgctcatgtatgtgctggcccgcagcaacctcacggagatgcttctcaatgtggagtacatgatggagctcatggaccccgccctgcagctgggggagggttcctactatctgaccaccacctacggggccctggagcacatcaagagctacgacaagatcacggtgacccggcagctgagtgtggaggtgcaggactccatccaccgctgggagcgccggcgtactctcaacaaggcccgggcctcccgctcctccgtacaggacttcatctgcgtgtcgtacctggagcccgagcagcaggcgcggacgctggcgtcgcgggcggacacccaggcccaggcgctgtgcgcgcagtgcgcggagaagttcgcggtggagcggccgc

SEQ ID NO: 318951 - DNA, 1960 bp, Homo Sapiens
  misc_feature (94)..(94): n is a, c, g, or t
  misc_feature (373)..(375): n is a, c, g, or t
  misc_feature (377)..(377): n is a, c, g, or t
  misc_feature (379)..(379): n is a, c, g, or t
  misc_feature (389)..(389): n is a, c, g, or t
aaacaaatacacagactttatttatgcacaaatacactttccagcaaagacagaagtgatttaaaatcacacaacttcctggaggcagctagtntccgtgtacttcggacaggaaggtggaaagtggtgtaaggggctgggtcacaggattaaggcacaagaagctcaccaacaaggagctaggtaggaacggaaagcgaggaagagagggcttaaaagagggagagaggggtagggggctttgagggagaagcaggaggcagctcagggtaggggagctggcctcagatcatgtgcaggggtgaccatgccagatttccccaggcctccattgggttcagctgggcctgctccagaggaagaagttgcaccnnntngnggggtcagtnggaggaccccggggcctggcacacatgtagaagcggcggcccaagttgggtctgtggtttcttcacaagtcggcatcacacatggcttcctgtggcccccacaaaggggtgtgcgcaagggcccccgccagcacagacttccagaaatgaggtccggtaactccttctcatctttggcttctgaagtcttgggcctgccccttcaccactttggccactgctttctcttctggagtcttcggggtcatgagggcgctcatcagtggtaggctaggcagctctatgtcaggagaggcttggggacagctaggggagggctgaaagtagctcttcaggtttttctggcctctgctagagccaacctgactgggctgaggcctggttgagcgcacttgggctttgttttggcatgtctgtacccgggtttgattgttgtgctgcagcgtcgactgctccaacacaggactttgttcgagaggaactaggaagcgaaggatcttgagctgggtgcctgcaaactcagggaggaagcgggtgcacagaggtgggcactgttttgcaggcacagaggacacactcaagactgcacccacagggcagtggtcagagcccatcacctcaggcagcaggaaagaggcctgaaaggtgtctatgaccagggtcctgtcccccagcacatagtcaagccgggagccatagttgagatggcgggcgccagtgactgctgaccagcaggtgaaggccccctcctgctttggttggaagcagcggtagctatcgatgaagggccctacatgagaggcagactggcaccccaagttactgagcaagctgtccatccacttgcgccctgggtcctcttcaaagcattccaggttgactgcatcccagtggtcaatggggcggtgggctgtattcaggtcacccagaatgatcacatggctgcctgccgccaggagggcttctgctcggatttgcagcaaacgatagaagcgcatcttaaagactagccgctcaggcctcccagggtccgcatgggggcagtacacgttgattagggtcaaggtcttctccttaccttcccatgtgcggatcttatgctgcgtgaggagggccctgccctcactatccagagcccggagttcctcttgggtaaactcatccatgtttccatagcaaccaacatccccattctgggtggcaaacaggccactcaggccttcttcagcagccactggggtagcattgtccttacagaaggtggctacaccagaatagccgctacggttgcggctgaagctgaaataggagttataaccctcaacgatagccaggggctctgtcagtgcatccctggtcactttggtttcctggagacagacgatatccgcatccagctcgtccaaaatgcgccccacggccacggcggcacagttgctgggttcctgatttgccaccccttgcaggggtctccgaatcccattgatgttccagctcaccacgcgcaacatcttaaagggctggaacacctcccagcccgcgccaacctaggcgcgagcgaactgcttcct

SEQ ID NO: 318952 - DNA, 1444 bp, Homo Sapiens
  misc_feature (421)..(421): n is a, c, g, or t
  misc_feature (1239)..(1239): n is a, c, g, or t
  misc_feature (1290)..(1290): n is a, c, g, or t
  misc_feature (1298)..(1298): n is a, c, g, or t
  misc_feature (1310)..(1310): n is a, c, g, or t
  misc_feature (1392)..(1392): n is a, c, g, or t
  misc_feature (1399)..(1399): n is a, c, g, or t
  misc_feature (1413)..(1413): n is a, c, g, or t
  misc_feature (1439)..(1439): n is a, c, g, or t
gcttagttcttccatttcacccttgcagccagctgttggccacggccctgccctctggtctgccgtgcatctccctgtgccctcttgctgcctgcctgtctgctgaggtaaggtgggaggagggctacagccacatcccaccccctcgtccaatcccataatccatgatgaaaggtgaggtcacgtggcctcccaggcctgcacttcccaacctacagcattgacgccaactttgttgtgaaggaagaggaaaggatctggccttgtggtcactggcatctgagccctgctgatggctggggctctcgggcatgcttgggagtgcagggggctcgggctgcctggcctggctgcacagaaggcaagtgatggggctcatggtgctctgagctggcctggaccctgttcaggatgggccccnaccctcagaacccaaactcactgtcccccactgtggcatgagggcagtggagcacccatgtttgagggcgacagggcagagcgtttgtgtgcttctggggagggaaggaaaaggtgttggaggccttaattatggactgttgggaaaagggttttgtccagaaggacaagccggacaaatgagcgacttctgtgcttccagaggaagacgagggagcaggagcttggctgactgctcagagtctgttctgacgccctgggggttcctgtccaaccccagcaggggcgcagcgggaccagccccacattccacttgtgtcactgcttggaacctatttattttgtatttatttgaacagagttatgtcctaactatttttatagatttgtttaattaatagcttgtaattttcaagttcattttttattcatatttatgttcatggttgattgtaccttcccaagcccgcccagtgggatgggaggaggaggagaaggggggccttgggccgctgcagtcacatctgtccagagaaattccttttgggactggaggcagaaaagcggccagaaggcagcagccctggctcctttcctttggcaggttggggaagggcttgcccccagccttaggatttcagggtttgactgggggcgtggagagagagggaggaacctcaataaccttgaaggtggaatccagttatttcctgcgctgcgagggtttctttatttcactcttttctgaatgtcaaggcagtgaggtgcctctcactgtgaatttgtggtgggcgggggctggaggagagggtggggggntggggccgtccctcccagccttctgctgcccttgcttaacaatgccggccnactggcgncctcacggttgnacttccattccaccagaatgacctgatgaggaaatcttcaataggatgcaaagatcaatgcaaaaattgttatatatgaacntatgacnggggtcgtcgaaangcaaattaagaaagaattggatgttngaagt

SEQ ID NO: 318953 - DNA, 820 bp, Homo Sapiens
  misc_feature (163)..(171): n is a, c, g, or t
gaaaaaagaaaacaaacaagtttatttgtatatgccttatgagtaacctataaggttacttcaagccttaagagccaattacagtaatggttcagaaacaggaatatttgtacttactccttgggcctggacttgggtgtcttgtttttgtaagatgataggnnnnnnnnnattgtggtatgacacagaaaagtgcaccaaatgtacagtttgatgaatgtttacagtgtgaacacagttggttagctagcactcagagcaagaaacaggatcagtacctggaagactctcttgtgccctttccagacacttccatccactttttctctcccctaaactcctccattcacctgtccccatcttctgacccactgtgccccaggaaattattctgggtacttacattattgttctagtaggttaaattttaacagggaataaatagttaacactttcaaactgttatgtctcagttcagtttttcagcgcaaggttgttaatttttacaaacaagtaatagggcttcattttgttgaacttctgtagtctgtgaaacatcctaaacttcactccgagtgttttacaaatctgaagttgcgcattttttaacaaaaacttttgttaaaatgcctatcttttccttagaactccacttgcagtcattgttttatatgcctttggtaacatcattcttatatcctttatctgaaattaaaaaaattattgttttactcatctttttaattgaagatttcctcacacttgactaccttttcttaacctgtcgactccgaatacctgatatattctcaacattttt

SEQ ID NO: 318954 - DNA, 459 bp, Homo Sapiens
  misc_feature (331)..(331): n is a, c, g, or t
  misc_feature (361)..(361): n is a, c, g, or t
  misc_feature (383)..(383): n is a, c, g, or t
  misc_feature (390)..(390): n is a, c, g, or t
  misc_feature (400)..(400): n is a, c, g, or t
  misc_feature (430)..(430): n is a, c, g, or t
  misc_feature (440)..(440): n is a, c, g, or t
taggtcttttatttttaagttaagataatgaatcaagcagatgtgagatacttggatataaaacatgatttaaaaatgatgtctctactttgtgcctccccctcaaattaaaaaatattattgaaaccgcccacagtttcaaatctggtgggtgaagtgcatcataagtatgctgttcccacttgggcagtgttgctatccctgggtccagggtgagatggggaagcagaagggcctgaaccatatggatgcaaggtgattgttgcctgggcattcaggaactttggggcaacttatggaggttttgcttgctctttacaatgttacagtncatttatttaaattccttaaggaccagganttaattcagttaggtggaaggntaggacntaggccctgnaaaggatgggccccctggaaattccggacntctggagggngttaggaagtttaggctgt

SEQ ID NO: 318955 - DNA, 433 bp, Homo Sapiens
  misc_feature (400)..(400): n is a, c, g, or t
tttgttgttatttttaattctgttttattttctcagcattaacttagataattctcagaaagcctagcataaattaacagcagagtgtagcatggtggttaacagggcttcttcgcagtgttttattacagctaacttctactcctcagagtctgattcaggggccatctttcaggctagtctagcttcactactgattattctgtcttaggatttaataatgactgtacattgtaagagcagcaaacctcatagttgcccaagttctgatgccggggcaacaatcaccttggcatcatatgggttcagggcccttctgcttccccatctcacctggggcccggggataggcaacactgcccagtgggggaacagccatacttatggatggcactttcancccaccaggttttgaaacttggggggcgggttt

SEQ ID NO: 318956 - DNA, 1316 bp, Homo Sapiens
gggtcggcgtgcgccatcgccttctcctgcttggtctcgatggccaggacgcgcaagagctgagtgatgaggtcatggggcatcaggtcgatcttgaggtcgtccttgaaggggtcagtgttggccgtgctcatgcgcagcgccagctccaggagcgcttccaggcgagggggcgtgatgtcctccaccggcttccggagctcctcctccgcgaggtccatgaagtgcacgaagaagtcgccctggtccatgaggaagtagcgcttgatggacctgaggtgagccaccagctccttctcctccatcaggaagtccagcagcaccttgctggcgtagttaaacgccttctcgatctgctccacatacgcccgctcttttaacgtgtagatgatctctttagccaccgggcaggtgacgtcatggccacactctctgaccacatttagatattttcctgtgctgaggatcttgtccgccattttctgcaggaaggacgggatctgctgctggacgatggtgtaccgctggtcccagtacttgtcgttgtaatcctcctggatcctctccttccgcagctcgtgctcctcgaccataaactcactgtatgggtcgtggatgatgcccctgtagatccacttctccagaacctcgaagtagggagcactggccgccttggttaggtacaggcatagctcctgcgcctggctgtcccctgtgtagctgaagctcctgtcgtggagcaggctcagcgtggaccccccaagacattcgcctttgtccaccgaggtggcgagggaggccaggatgtccatggtgcgcatggctggctggatgtagaaccagagcttctgcagcgaaaggaggccctgcctgtgcagctgctccagctgtgacaccagaatcaggtgctccttcaccagggtgcgcatggcggccgccagggcgtggttcacctgcccgtactcgaaggaagacttctcttcaatgaacctggtcacagcggagtagctggcggccactgggaggatcctgtgcaccagctccctgatggacaggtccaggttggggtccacgaggaaggtccggctctgcctcccagccaggggctgagcactgacgtacctcccgtccacgcccaccagcacgtacagcaggtcctccaccacggccgactcctgcgaggccaggggcaacgtgcctatcggcaaagcggtgtctgtgctgatgccagcaccaatcaggaaatccccgatcagggcaggtctctcatacacccatgctgggaagatggggaggtgctggcctgaatttttttc

SEQ ID NO: 318957 - DNA, 1133 bp, Homo Sapiens
ttgactcagactttttattgtactcaagtaaaaacctgctggacccacagcaggtggcacagaaaagaggtaggagggggtaaggacactgaggatcaggtctccagcaggtctgtccagtgtgcctcttctaattctgagtcttctacttctttctcagtgtccatctggcacagccagatcaggtctccccaaagcagtgacttctcacagcaagggcattggccctctaggggcagaagctgccctggttcttcctgaagaaactcctctgccaggcagatcacatgggcccttagcaggcagccagggtgggggcaacacaagggcccctcttcatcctggatggtctgggcgcacagggagcagcaggcccctggatccccctggtctggctcaggctccgcgtcatcaaagggacctgcgcggcgccttggggccggggcctggggcggtggaggcccgaaggccagaggcacgtgcggcggcggcgggaggcagaggtcctggcggaggtctgggcgcacccagcgcagcgtgagcgggaggcgagcccagggcggtgcgcgcagcatgtgcgccagcacgcgcaggtggaaagcgaaggctgtctctcctcgcaggcgaggccccacgtgcgccaggcggcgcgaggcgtgcgggtgctgccaagcccactcaaaccgaagggcggccacggaggacgggaagccgtgcacgacgagcaccatctcccagggccctcgcccgctggtccgccaggccccgccttttttgcggcccccattgtgctgctggacccgacgagcagtgttgacagtgaaccccacgtagacgcggccccggtaccgggggttcaggcagtagagcaggtagacgccgaaaaagcgccctggcctcgccgcgacccccgcgggacccatcgggccttggggttcgggaaccacagcagggggttgattgccgtgacctagggtccaggggagggctggatcgctagggctgcagggtgcttgcttcggaacaagctctcggggactatccggaggcagcctgcaggaagccgtagcgccggtacgtgcccctctcctgtctggaggcgggtgtagaagtccgaccgcggaagccagact

SEQ ID NO: 318958 - DNA, 1709 bp, Homo Sapiens
  misc_feature (607)..(617): n is a, c, g, or t
  misc_feature (1240)..(1240): n is a, c, g, or t
tttattttcctttcaaataaaatgtacaaccaaaatttagggtttggagcagtagggaagacaggagataccagggagcccattttacagtagagatctgcatctgacccctctatcccatacctttgcaaaggaggggaggggtctacaagccagaactttcagaagagaagaaaatacatgctgtgctggtgctgtttctggagcaggtcatcctttaggtatagaacaccacctccacccgatgacatcagaaccactgactggtagagtccttggaaatcatacagtccacccatcccccgccagacacatggacacaccgaggctcagatggggaagggtacataccctagggcacacaccaaatcaaaaaggtgaagtcaggactagaacacctgagctactttagcaggggactgtggccacatggctgggatttggcacagtagatcatgaaatacattagtctctatggaatgacccccgtgcagagaaatggctgtggttgtctgggcgccgcctctagctcaggggctcctgacctcagttaaaggtgactgtgttaaggccagatactggatggtggtcatgaacctcaggacgnnnnnnnnnnnagcaccaaatggtggagctctctgccagctcagcttcttggggcctctcaggtaaaggtgatgtttgaggaccccacgcccatatgaggggtggagaggagaagccagcagcactggggtgagccttggcctacacccttccttcttacccttcccccatcttcagtaaggccaagagaggatgtggggtggggaaggccagaatggtatcgtgtttcttgtttctgggcagtgggctgcgtcctcccaagcaggactgaagggttcagaatcgcttttcctcaggctgagaggttatgagcagctccttgttcccgaagtcccaccaggccgtcatgtggaacgccatgttggttaagacaacagtgtactccaggatggcaaagatggtgtacactccagcctcacaatacatgttgtgccgaaagtagacagccagcgccgagaagaaggagatgaagttgatgatgaagagccgctgtttccagctgtaggacttgcgatcctcctgacttactgtgtgcttcttggtcaaccgccagagaatgcaggtgaggagcatgtgcccgagggatgaggcaatgaacacaatgaaagcattttcgttgatggtgaagtcctcnggaggaggagacataagtgagcactaggcaacggccgaggttctcccaccgacattgaggccgaagttgaggcggcagagcgggcgaatagcaggaacacggggaggtgcagttgaggttgtggttcccgtaggcgaaggccaccaagaagcgaggcgccgagtgcaggccgatgcagaaacgccacacgtagcgctggggcacctcccccgccgatggctgagctcaccgagggcaggtaattgggcacctctcccaaaagacctctccttccaggtcctaggcccaaagtgctggattctcattccccagctatcctgggatttgtgcagcagcatggtggcaccttctccatctcccccgcagactggaacctgcctctcagctgcgttccatctaccatgccattctggggccgtccctctgattggcccgagctccctcagcccgagtcgcggcatcccgggaa

SEQ ID NO: 318959 - DNA, 1040 bp, Homo Sapiens
  misc_feature (5)..(5): n is a, c, g, or t
  misc_feature (18)..(19): n is a, c, g, or t
  misc_feature (24)..(24): n is a, c, g, or t
  misc_feature (27)..(27): n is a, c, g, or t
  misc_feature (29)..(29): n is a, c, g, or t
  misc_feature (53)..(54): n is a, c, g, or t
  misc_feature (65)..(65): n is a, c, g, or t
  misc_feature (77)..(77): n is a, c, g, or t
  misc_feature (93)..(93): n is a, c, g, or t
  misc_feature (126)..(126): n is a, c, g, or t
ttatnttgaggcaataannttgtngantncccttcagatcattttttaaaatnngtctatgacanttctgcagtagngagagtcttcatgganttctccagatcctgtctcttctcccctgccctngctaccttctacccacctttatgtctgagataccatcatatccaggaagtctttagtgactcatagaccagatttaggtatccctgccatgtactttgatggaaacccgcatttttcctaccaaagcacttaccacactttactgtaattactgtttagtatatatgcatatcctattagcccttaactctgggagggcaatgaccaggtctacctcaatgcctagcacatagcaggtgctcaataaactagtagacttgaattaacctcagcaggaagctcaggattgaggagacaactggcaagggggcagaatgaggcaccattcctcaggtactattttactgcctcagatattattaaactaatagcataattcaatattttcacaacctccaaattcaacatttcagatagttgaataactctcagcacatgcctccacctgacaaaatacaaatgctcttgccaggcacatttgccatcttataagaagctctttcaggatctctgccccaatcctggcattactgtgaaggtgcccaatggaaattatatctgagttggcagagagtggagtgaaggggatattgatgagtctcatccagaaatgggttaggcatttcaaggaaatatctaccattctttttggagaagacttgggtaacatttttcttccatttaacacttcaataatcataacaaacatctttgtgtgcatgtcttcttatagtaccgaactgggagggaaggacagaagttctgctctcaggaaacttttcttttctgtggagtctcacccctacagtgaactccttgcatttcacaattgtacaactcttacccacagagttaaactctggtgtgtgttctctgatgctgcataaggcctgacctatgcctaaatgtttttc

SEQ ID NO: 318960 - DNA, 1314 bp, Homo Sapiens
  misc_feature (1149)..(1218): n is a, c, g, or t
tggacaccaggtgtaaacacacttgcaactgcaggcactcgagataccaggtgcctccctgttttcagcaacctaggcaagcgctaaggggtgtgctatgggtcccgcgtgctggggcagctggggtgggaaaaaccacgagaagccaagtagatactcaaggaaaacaccagaactgaagttacagagaatgaaataccagcagcacagggacagcgagagtcttttggcttttgtctgtagcttatatgagcagagtccaatatccaattaaatagatagaattcactttacgattctaattgtgctgagatccctaaaggtgaaagatccccatccttccagcagcagcagggcagcatgaagactgccaggcctcccagtcccccagcccccacatcccttggccttctggggagggggaggagctcccagaacgcagcggctaaaagcctattttgccccctggtcatggagtagcccagtttcgcctcgttgttaatgaaggacatgagtcccacgttggtctcgatgagcagggggcgctccaggatcagcacgccattcgcctgtcctggcaaagggctttctttttgggcttttttgacagcttggattaacagagccttgacgctttccaactgacacagagatgctgtcttctcatctgcgccagccatcgggtgttctgtgaaagtggcatagggcacgttggtagaccagggattccatctgtttatgaaggaaggacgactttgcttgtcccactgaattcgaatcccaaaaccttctcgcttgttgagcgatttagggggaaactggaattctccgtaggaaatggtgtctactgcgttgagcgctatccgcaccacctgctggcactggagactgatgaagtcgtatttacagataagcagggactgctccgtgaccagcaccagccgctccttctcattgttccagtgatccacctcggtaagcagccacactccctggatctcgccgtcctccacgggccgcaccaccacgcggatctcctccactgcctgctcgatgctgccgggccggaacacgaagtactccttgacgcgggcgcggcgcgtggggtcgtggatgctgagaggccagagtgtttggcgcagcggcgtnnnnnnnnnnnnnnnnnnnnnnnnnnnnnnnnnnnnnnnnnnnnnnnnnnnnnnnnnnnnnnnnnnnnnngtggggctcgtaccggccgagtccaccgagtcccgcagttgcagcattgccgcaccccttaccgaccccgaccctgacgccgacgcgaccgccgtc

SEQ ID NO: 318961 - DNA, 1066 bp, Homo Sapiens
  misc_feature (741)..(741): n is a, c, g, or t
  misc_feature (785)..(785): n is a, c, g, or t
  misc_feature (800)..(800): n is a, c, g, or t
  misc_feature (819)..(819): n is a, c, g, or t
  misc_feature (828)..(828): n is a, c, g, or t
  misc_feature (878)..(878): n is a, c, g, or t
  misc_feature (903)..(903): n is a, c, g, or t
  misc_feature (918)..(918): n is a, c, g, or t
  misc_feature (925)..(925): n is a, c, g, or t
  misc_feature (939)..(939): n is a, c, g, or t
  misc_feature (953)..(953): n is a, c, g, or t
  misc_feature (959)..(960): n is a, c, g, or t
  misc_feature (967)..(967): n is a, c, g, or t
  misc_feature (995)..(995): n is a, c, g, or t
  misc_feature (999)..(999): n is a, c, g, or t
  misc_feature (1003)..(1003): n is a, c, g, or t
  misc_feature (1024)..(1024): n is a, c, g, or t
  misc_feature (1029)..(1029): n is a, c, g, or t
ttttatcctactacatttttattaaagtaacaaaaaggtgtacatttgtccataagctgtacattcttccatataaaaacactatcatacaattagtaacctttgtcttttctgtcagaatagcttacaaacatactactactatttatttttacttaataggagagacaggcctgctcaacagtccagctcaggggttttgttgtttttaaagtgaacatcataaagaagagaagagagacaagattaagcatgagaccatgaggctgcttctaaaaaggcagggacctgtttgcagacaagatgcaagaacacagcctgcagtgattcacagctttgtttcaacccacaaaccagaaaattagctcttgggtctgtgggcccaaagtgaactttaaagcaataaagactggaagcaggtctgggaaggcaatacaaaatgtggagagttgaaaaggaggcagagctggcaggaatgggtagggagagtgtttggtaaatagcacctttgagtcaaaattgagcagtttagaaatccaggaaaggggactggctgtggggaggagaacctgggggtagaggaagtggggtgaagattcctcactaaggggcaacagcaggagggtggccatcctggccaaatgccctagccctgtccttcttaaggtgattcggtttgggaaactcgaggtcttttgaggaccctcatcaatgtcactgagaaattgaaggaagggagtntcttcccagtgtagctttccacttttctccaacccacaacagtntatattgcacaagtntacgacaaattttggattntactgaganagacagcaacctttcccacaggtgctctgagcacagggagaaaaacagtnccaaggtttggctttatttagtgtngccctacagaatacnagtagtntgcagacatggggnctctccattcagcnaggatnntgcaggntgactagcagcatcatccaaggggcagngaanggtncctagcccacagggatcaggngtttnataccagtttctcagacctctgggaccggggatattg

SEQ ID NO: 318962 - DNA, 784 bp, Homo Sapiens
  misc_feature (45)..(54): n is a, c, g, or t
  misc_feature (197)..(215): n is a, c, g, or t
  misc_feature (271)..(306): n is a, c, g, or t
  misc_feature (771)..(771): n is a, c, g, or t
ttggggttttgtttaaaaaacgctggggggttccgcccggggggnnnnnnnnnnggggggagatccaaacccctattccttgccccgggttttctcggggaaacaattattggcccttttcctttcccttttgggccccccggccaaaacaaagtttttaaaaatttttgggggggcgggcgggcggccaagtttgnnnnnnnnnnnnnnnnnnngtgtggtgtgtgttcgcgtggtggttcttttgttgttttttgttcttcccccctcnnnnnnnnnnnnnnnnnnnnnnnnnnnnnnnnnnnnatcctactacatttttattaaagtaacaaaaaggtgtacatttgtccataagctgtacattcttccatataaaaacactatcatacaattagtaacctttgtcttttctgtcagaatagcttacaaacatactactactatttatttttacttaataggagagacaggcctgctcaacagtccagctcaggggttttgttgtttttaaagtgaacatcataaagaagagaagagagacaagattaaggcatgaggaccatgagggctgcttctaaaaagggcaggggacctgtttgcaggacaaggttgcaaggaacacagcctgcaggtggattcacaggctttgttttcaaccccacaaacccggaaatttaggctcttgggggtctgtggggggccccaaggtggaacttttaaaggcattaaggaccgggaggcgggttcggggggagggccattacaaantttggggagatta

SEQ ID NO: 318963 - DNA, 1602 bp, Homo Sapiens
ggtttaaaaatattttattctttagaaaatacagcattcaaccatcccaaactgcagtgacccctgccccagccctgactgaccccacttcttgtggccaaaggtttctgggctgtgctgggaccctagtctcagctccccgggaggccaggttcatgccaggcccctgacccagcccccttaagccagccaggcagggtccccggacaccctgggcacacagacgagatgcagggacagcaacagggaagggtcacaaaatgccagcccggtggccctcggacgctgcaagtgcgttcagctgccagccctcctgacctcccagaaacactttcctggagcccaggaaggaggatggtggcagggagcggaaggtgggcagccccacagtccacacgtggccggccctgctccagcctcctagctgtcatccccattttcacccgggccgcggatgaggcgcttatggccccgcttgccccctgggcccttgggcttggcgaaggcctgcttgaaggcgtgttgcttggggtgcacctcgtcgtagaggaactctgccgtcagctctgccccatcgccaatctcaattttcttggcgatctccagatggaagtcctgctccacggagtcgaggaggcggctcttgcagctggagtagagcattcgctccttgatgctgcacttgtaccccggcatggagtagatgaacactacagactcaagggggtcgccctcatgggtgtgcttgtagaggaagaagtggtagcgggcagcatctcggggcaccggggagggcagctgggccacatccgtgggctctgtgtgcaccagctcaatggtttcccgctctaggtccagcttcatctggatgtagttgaccattttctgcttgagctgctggagtgcccgctgggcctcaggctgcagggggaaggcgaggccctgcagggtctggtgcttgctttccacactgatctctgtcttcacctcgttaatgcggatctgctggagctctctctcagccgaggtcagcggggcaggtgccgcacaggacgacaggtgtttctggtacccagcaaaagagaggtcatccttcacagtcccgaagagctcatccttgatgtggccacctccaaactcctttttcactgtggcccgcgtggccgcgtacagcatcttcagccgcacgggggagttatcaggcgaccaggcgaggaagagccattcgaagccctgagcattctgtgagtcgaggcggtagagcaggtagcagggctgctgggcgtccagcagtggcagcacggccctgtcatagtcctgatcccagcggcctactggctcctgcgaggcacccagcacgagctgctcgtcctcaatcacaaccttgatgagccgcacagagccagcccgtgccttggcaaagaattccttcagctcttccgtggcgtggatgcccgtttggtgcgccatggctcgggttcgctccgtccgcgccgtcggagccctccgcttgaccctggcccggcaacgctcgctggaccaagagaggtggaggatgtggcggaggctgtcgaccctcgcgcagcttcccgggcgatcccg

SEQ ID NO: 318964 - DNA, 1325 bp, Homo Sapiens
  misc_feature (722)..(770): n is a, c, g, or t
  misc_feature (1086)..(1087): n is a, c, g, or t
  misc_feature (1103)..(1103): n is a, c, g, or t
  misc_feature (1185)..(1185): n is a, c, g, or t
  misc_feature (1205)..(1206): n is a, c, g, or t
  misc_feature (1208)..(1208): n is a, c, g, or t
gacggcagtaactctacggggttttaaggtagcgaggcctgggtggcgaattcggcacgagggtcctttggcgtgaagcggcgctggttcgcgctgggggccgcactccaattggccattagcacctacgccgcctacatcgggggctacgtccactacggggactggctgaaggtccgtatgtactcgcgcacagttgccatcatcggcggctttcttgtgttggccagcggtgctggggagctgtaccgccggaaacctcgcagccgctccctgcagtccaccggccaggtgttcctgggtatctacctcatctgtgtggcctactcactgcagcacagcaaggaggaccggctggcgtatctgaaccatctcccaggaggggagctgatgatccagctgttcttcgtgctgtatggcatcctggccctggcctttctgtcaggctactacgtgaccctcgctgcccagatcctggctgtactgctgccccctgtcatgctgctcattgatggcaatgttgcttactggcacaacacgcggcgtgttgagttctggaaccagatgaagctccttggagagagtgtgggcatcttcggaactgctgtcatcctggccactgatggctgagttttatggcaagaggctgagatgggcacagggagccactgagggtcaccctgccttcctccttgctggcccagctgctgtttatttatgcnnnnnnnnnnnnnnnnnnnnnnnnnnnnnnnnnnnnnnnnnnnnnnnnnagttaagaggcagctcatttgtccaaatttctgggctcagcgcttgggagggcaggagccctggcactaatgctgtacaggtttttttcctgttaggagagctgaggccagctgcccactgagtctcctgtccctgagaagggagtatggcagggctgggatgcggctactgagagtgggagagtgggagacagaggaaggaagatggagattggaagtgagcaaatgtgaaaaattcctctttgaacctggcagatgcagctaggctctgcagtgctgtttggagactgtgagagggagtgtgtgtgttgactannatgtggatctaggctncaggaagggcacaggggctgagcactacagaagtcacatgggttctcagggtatgccaggggcagaaacagtaccggctctntgtgactcaccttgagagtnnantagaccctgttctgctctgggctgtgaaggggtggagcaggctagtggccagctttgcccttcctgctgtctctgtttctagctccatggttggcctggtgggggtggagttccctc

SEQ ID NO: 318965 - DNA, 1519 bp, Homo Sapiens
ctatataaaatgtttatttttggaggactgtgtggtctggtgtttgggagggaactccacccccaccaggccaaccatggagctagaaacagagacagcaggaagggcaaagctggccactgcctgctccaccccttcacagcccagagcagaacagggtctgctctactctcaaggtgagtgacagagagccggtactgtttctgcccctggcataccctgagaacccatgtgacttctgtagtgctcagcccctgtgcccttcctgggcctgatccacatgtgtcaacacacacactccctctcacagtctccaaacagcactgcagagcctagctgcatctgccaggttcaaagaggaatttttcacatttgctcacttccgaatctcgcagtcttccttcctctgtctcccactctccgcactctcagtagccgcatcccagcgcgctggcacatagctcccttctcagggacaggagactcagtgggcagctggcctcagctctcctaacaggaaaaaaacctgtacagcattagtgccagggctcctgccctcccaagcgctgagcccagaaatttggacaaactgagctgcctcttaactgctagaaaaacaattgttagaaaagctaacgatcaagacaaacagaccaaaaagcttaaataaacagcagctgggccagcaaggaggaaggcagggtgaccctcagtggctccctgtgcccatctcagcctcttgccataaaactcagccatcagtggccaggatgacagcagttccgaagatgcccacactctctccaaggagcttcatctggttccagaactcaacacgccgcgtgttgtgccagtaagcaacattgccatcaatgagcagcatgacagggggcagcagtacagccaggatctgggcagcgagggtcacgtagtagcctgacagaaaggccagggccaggatgccatacagcacgaagaacagctggatcatcagctcccctcctgggagatggttcagatacgccagccggtcctccttgctgtgctgcagtgagtaggccacacagatgaggtagatacccaggaacacctggccggtggactgcagggagcggctgcgaggtttccggcggtacagctccccagcaccgctggccaacacaagaaagccgccgatgatggcaactgtgcgcgagtacatacggaccttcagccagtccccgtagtggacgtagcccccgatgtaggcggcgtaggtgctaatggccaattggagtgcggcccccagcgcgaaccagcgccgcttcacgccaaaggacatgaaactagcgcacagcacggctgcccccatgtcgaaatacaggtaaggcactgggatgtcgggcttccggcgtgcctcagccctctcagcgtacagcatgagctggctgaagcagccccaaaaggggcagcgtgtgagcagcaccgaacccaactgcatgatcagctgcaacatccaccgtctcgaacctatcttcgc

SEQ ID NO: 318966 - DNA, 1065 bp, Homo Sapiens
  misc_feature (922)..(922): n is a, c, g, or t
  misc_feature (924)..(924): n is a, c, g, or t
gggcttcagcttctgcgccagctcatctaggaaggtgccacgtctggctggtcttggccatgttcatctccaggacatagtcggcgtgcgtgtggaaccccagcaagcgggacttctgggcccgcagcgtcaccagctccttgaggatagcgcagttctcctccttgcaccggcagttgaaggcctcctccactttcctcctggtctcaggcacgtggcatttcttcaggagggggaagtaatgggggtacttgagggtgaccttcaacttgccgtcctccatcttctccagggagttcagaaagtcctcggggagccctcctagctcctggagcgtgaagggcaggaaggtcgtgtcctcgttcaggttcttgttgaagtcgatgcacagaaggctcagcttcttcttgatgcgtttgatgttttcctgagtctctctggggaggtgaagcccatttctccggcccagcttgattagccgctccaggtaccgcgcagcctcgggcctcagtgagtccttctgaactttctcctggagccacacgatcctctggtacacgtcctccctcatgctcatctccacgtcgaactcagagagcttcttgtcggcctctgtgctggctgtccggatgtccttggagggggaaacatgctgggggaagtcaaggatattcctctgaactgtgtaggtgacctccacatcggccagcgccttgagcgtgctctcgtaggacacgtcctcaaactcctgggtgccaacctggtcatacacgcgcttggtctgctcgatgagctccctggtgcgctcctctatctgctgggcactcaggtcccaccgcaggtcgtttaccacagagcacggagatgctgcgtccgccatgtctcctgcacaggctgcggggggcttcatggcgggtgggtncntcgcgtgcggctccctccctccttccacctgtacgcgtccagccacctcggccactgaggccgcctgcctcggcccaaccgccgccaccgccgccacggccgcctgaggaccaaggggcccgccgatcccgggaattccgg

SEQ ID NO: 318967 - DNA, 904 bp, Homo Sapiens
  misc_feature (100)..(114): n is a, c, g, or t
ccgggcttgcacagggcccaaaaggcagggcccgccgtgccccgtttacttttccttttcccggcggggtacagggtcccaggtaggaactttgcccgannnnnnnnnnnnnnngaagggccgcgtccctcggcggtgtagagcccgcacgtccctcatgcccaggcactggcgccctccctcgtggtggaaggccagccccagggagctcctggtagatgcccagcagcccgtgcgtgaccacctgcacggggaagtattcctgagcaggttttggtccccgcagtagcgcgtctccttcaactgggtcatgtagtagcgcatgtcccaggcacggatgcggccgtcgaagggcaggccccggcgctcgcactccgcacgcttcagctccagaatcaccgcacgctcctgctcccccaggggcttcagcttctgcgccagctcatctaggaaggtggccacggtctggctggtcttggccatgttgcatctccaggacatagtcggcgtgcagtgtggaaccccagcaggcgggacttctggggcccgcagcgtcaccagctccttgaggatagcgcagttctcctccttgcacacggcagttgaaggcctcctgcactttcctcctggtctcaggcacgtggcatttcttcaggagggggaagtaatgggggtacattgagggctgaccttcaacttcgccgtcctccatcttctccagggagttcagaaagtcctcaggggagccctcctagctcctggagcgtgaagggcaggaaggtcgtgtcctcgttcaggttcttgcttgaagtcgatgcacagaaggctcagcttcttcttgatgcgtttgatgttttcctgagtccttctgaactttctcctggagccacacgatcctctggta

SEQ ID NO: 318968 - DNA, 997 bp, Homo Sapiens
  misc_feature (43)..(55): n is a, c, g, or t
  misc_feature (308)..(308): n is a, c, g, or t
acccccaagggaggggcctctccgtaaaaggtttggccccggnnnnnnnnnnnnnaggcctgggctggttttggaccttttttccatttttccagaggagttttgggctggaaagaaggccccaaccccctggggaaagacggaggatgaaagcagggcgggccaggccttcccaatggactggagatcccccttgcccaatttccagggatgaaagagcccccagcagcagggttgagcaggaacccagacccagggttttgcagcaattggccgccgccgtttccggccccaagtcctccttccanttgcaccccctggtagcgcagccacaggctttccacccccgcccgcccacagaagtgcaggatagggtaggaggtgagcacgctcaggatgatgaaggctcgggcaacggccacggccatgtcctccgagggataggacaggagcacgtcaggatccacagcagctccaaaggtcaggaagccacagatgcctgtccccatgtagacagcgagggctatgaccatggcagctgtcaccactccaccccaggtcttcacttcaggctgctgcatgctgttgaagacgggcacactgctgacgtggcactgaaatccgaagcagatggtgggcatggcattgaacacagccatccaggaagccggcctggtcaggatgttccctggggtcatctctttatctggccagatgtacttgatgataacgatggctgtgacgtaccaggtacccacgacgctcaggaagctggcatatttctggaaaccaatctccctggggatggagaggggcaggatgaagaggaaggcagtgaggctgatggtgaacttgcggtctgtgtaccaagggccgctggccccctccggctctttcgccatcacagctataatcttgtcctgctggtcgccaatgatgattaggaaggcaatgcaggcctcgtgccgaattcgccacccaggcctccgctggacga

SEQ ID NO: 318969 - DNA, 1371 bp, Homo Sapiens
  misc_feature (309)..(309): n is a, c, g, or t
ctccacaaaaatgctccaggccaaatttcttggtccagattcctggtctcggtagatttgctggaagagggcatcaaggtccttccagggtttttcggagctcctcggtcttcttggtctggttagggacgtactcctgcagaaagtcagccgtctgcttagggagcttggtgcctacgtactaaagtgtttccttgtggaacttgctgtcaagatggctggccatctcgtcctcatagaaggtccggtatttgcacagagaacacacaaaactggatcctttccaccatgcggtctcgctgccgcttnttctgcttgtcctgactcttcttgcctgcctgcaacttgcgcttggtctggccattttcatcctgggtggttagggcccccttctctggatcctctttgccttcttctctcccatcctcttttccctcctcatcctctccgtccactctggagcccttctccacagcctcggtgccttcaaggccctctgtggcttccccctcggtgccctcatcattgtctgagtcgctgttgtccgagcagtccgtgcgggtggctttgctatctggctcatcaggactgccgccctgctttctcttcttcttcttggttcggaagtcggctgtggtccaggtcttccaggtccgcctcatctgcttcatgccattgccaaacccgaaaccaaagcgggagccgcccgggaaggcgcccccacctcgcatgccctggaacatgccgtactcggggatgatgttctgggagaagagggagggcagccgagaggcaccagacatgcactggccccgggcccccatggggtcttcccacatgcgcccatagcctgaggccattggccggccgctccgggcatcccgggcccagccctgtgccctgggaccgaaggtgtcgttgccacgcatgcggaactggtcgcggtaggcatcgtattggccctcataggccatttccatctcagggtcaagctcgctgtagtcatagcctgaccggtacaggtcgcgctcactcaggacggccctcgagtcgcagaactcataagagtcatacctttctccacctgagccgtacacgcctccttgcatcatgtctgtctccaaatgcggcaccatatctaagcgctggttaattccatagttggtggtgttatcctggccatagccatagccatagccatagccctcgtagcctctatttgtcccagagttccaagttccatatccataatcacaggtgggctgagcgctggtatccgagtatgtcgactgcaaagtggtttcagatccctggacaaagcctgtgtagctcatggtggcgggcaacacaacatccgacgacgccggcttc

SEQ ID NO: 318970 - DNA, 590 bp, Homo Sapiens
ggtgtcgttgccacgcatgcggaactggtcgcggtaggcatcgtattggccctcataggccatttccatctcagggtcaagctcgctgtagtcatagcctgaccggtacaggtcgcgctcactcaggacggccctcgagtcgcaggactcataagagtcatacctttctccacctgagccgtacacgcctccttgcatcatgtctgtctccaaatgcggcaccatatctaagcgctggttaattctggataaaacggaatcggcactggcgctacccgaggcactagtgtttgcatttgtgtcagagctaggcatttcccaagagtgtgaagtggccataccatacccatagttggtggtgttatcctggccatagccatagccatagccatagccctcgtagcctctatttgtcccagagttccaagttccatatccataatcacaggtgggctgagcgctggtatccgagtatgtcgactgcaaagtggtttcagatccctggacaaagcctgtgtagctcatggtggcgggcaacacaacatccgacgacgccggcttctgctgctctgaacatccgacgctgcgat

SEQ ID NO: 318971 - DNA, 1147 bp, Homo Sapiens
gggatgggaaaactttattaggtttggtttccagcttcggccacgcgggctccgccacgagctcgggtcacggggcgccccgccgccctcctcgtcgtcctccacgtcgaggcccgggatgccgcggatctggcgttgcagcgcccctcccagcaagggcacggcgccctcctcctcctcctctgggggcggcggcggtggcggcgacacggccccgggggctggctctgggggcacgggaggctgcgccggcacgccctctgcgccctccgagatccctgcctgcttcgccctgcgccccctcgtccaggcaccgccctcagcctcctcgtgctccttctcctccttcggggctgtcggtgaaagggttctcgcccttcaggtagcgctccagcttcttgctgatgagcttgttgttgagaatactgcgggccaccatgagggaggacttcttggactgctccatcatgagcctgcggttccggttgtgatccatggtcttcagatgcttctggatgatcccaaactgcatgggaatgaagaggtcgcaggctgcacaatgggctgcctccaccttcttcacaaaatgctccatggcaatttcctgggtcagatcctggtctctgtagatttgctggatgaggccatcaaggtcctccacggtttttcggagctcctctgtcttcttggtcttgttagtgacgtactcctgcagaaagtcagccgtctgcttagggagcttggtgcctacgtacttaaagtgttccttgtggaacttgctgtcaagatggctggccatctcgtcctcatagaaggtccggtatttgcacagagaacacacaaactggatcctctgccggacgtccttatctgggccacggggtcagctttgtctggagagcccaggggccgggcgccggcgaggctgaggaaggtccagcaagagcaagagtctgaggcggaggaggcaagcgccagtgcgggagccctttccaccatgcggtctcgctgccgctttttctgcttgtcctgactcttcttgcctgcctgcaacttgcgcttggtctggccattttcatcctgggtggttagggcccccttctctggatcctccctcgtgccgaattcgccacccaggcctcgctcc

SEQ ID NO: 318972 - DNA, 484 bp, Homo Sapiens
  misc_feature (12)..(12): n is a, c, g, or t
  misc_feature (25)..(25): n is a, c, g, or t
  misc_feature (52)..(64): n is a, c, g, or t
ggatcaagtttnagtttatattttnctatcacctctcccgtattttccaacnnnnnnnnnnnnngagacagacagatggtgggggcaggcagaggggaggcagacagagacagagacaaacacagatacaagggtatcttctgtcacagagagagaagaccctagcccactgaagctagataggcccctggtcattctgatgagggcctcctgttaaggagtaggtaaccccagaaacatgccccctccccactcccaaccttggccaagcagggcagtggcagagaaacacagccaggacaaaccccaagggacaggacagcaatcacaggattgacacttgcctctatttgtcccagagttccaagttccatatccataatcacaggtggctgagcgctggtatccgagtatgtcgactgcaaaggtttcagatccctggacaaagcctgtgtagctcatggtggcgggcaacacaacatcc

SEQ ID NO: 318973 - DNA, 1596 bp, Homo Sapiens
  misc_feature (943)..(983): n is a, c, g, or t
  misc_feature (1115)..(1163): n is a, c, g, or t
aagaattacaaagtgatttatttttgttttctgaaagaaatctgaagagcagctcaaagtctccagtggaagctcatggacaaggttctcagggaagttttggagtttgcaaccacagtattcctttgtctgtcgaggctgggagggtagccgtgagcgtggtgggtgggtggtgtgagtggcatcttggcctggaggacacgcctggggcagcgtgtctgtgctcagtgagggccgatgaagaaagtgcgttttctgttttcatttaattcagttttgtgttaagggtggaacaaagctctgttctagagggaaagttaggaataggcctcccagaggatactccagacagttgacaagcatcgcagcccctgtcaggtcaaggaattttaacctgggagactcctgaaaatcagcctaatgtctgggggcagctggcgctgaggctgtgcagatgtgtatggccttgggtcacagctccctactggggctgcagcctttagaccctgggtctgggatccacgtctagggaccactctggcttctgtgcatccacccaggcccccgacccatcactgccacattctccgggtcatggccgagcttgacctctgcatccatggtgacggaagtggcaatgacatcatcaaggtcagagggtaaattcctaacaggagaccacaaaggtttcacttcttttagatccatccaatatgcgaaaaaagggtacattttaatttaatgtgttaaaaacacaatgtccctaccgtgtaaatagaatccaagtcaattgtgactgcaattccaagttagtatttaaaaatagagaaattgcacttcctggaaaaaattaaaaagtagttagtttaattattctgtaaattatttaattttgtcaagatgtaagtatttatattcacagcctcttatgttaacgtttgcnnnnnnnnnnnnnnnnnnnnnnnnnnnnnnnnnnnnnnnnnaactagaccccacaccagggcaccctaagaggggaaaaaagtgaattcaaagcaaaaataactatttgactataatataggccacaaaaaatcttgatataactcctagttataattttgatgcaaccaagnnnnnnnnnnnnnnnnnnnnnnnnnnnnnnnnnnnnnnnnnnnnnnnnntaaaaagtattttgtaactgaggaattttgataatttggggattttgttttcccttggtctaatggagagaaagacattttggttttctttttccattttgggttccttttgtttcaggcacggataacagcaaatggaattctgtatttattattatttaagtgtagcgcagatgtgtgtgcttgggcgtgtttctcgtgtcgcgtttgcgtgtcggctcttgcggtggagtcctgttgctgtgagggagtgctggccgcaggcagcctcgagtcaccgccaggctcacaggctgtgccacccgtccctccgacagctccaatactgtgaccctccttcctcaggaagcgcgttgaacccacagcctccgtggtgtgtttgcagggtgatttcctaataaaagtccactctgactgtgaaaaaaataacttt

SEQ ID NO: 318974 - DNA, 651 bp, Homo Sapiens
  misc_feature (23)..(23): n is a, c, g, or t
  misc_feature (31)..(31): n is a, c, g, or t
  misc_feature (66)..(66): n is a, c, g, or t
  misc_feature (123)..(123): n is a, c, g, or t
  misc_feature (162)..(162): n is a, c, g, or t
  misc_feature (450)..(450): n is a, c, g, or t
  misc_feature (504)..(504): n is a, c, g, or t
  misc_feature (529)..(529): n is a, c, g, or t
  misc_feature (543)..(543): n is a, c, g, or t
  misc_feature (567)..(567): n is a, c, g, or t
  misc_feature (577)..(577): n is a, c, g, or t
ggccatttaatttaaccattttnatttattnaatttttatacctatttccaacctagacccccacncccagggcaccccaagaggggaaaaaagtgaattccaaagcaaaaataacctatttngacctataatataggccacaaaaaatccttgatataacntcctagttataattttgatgcaaccaagttattttttatatattttgttatttattcttttaataatggaatttttttaaaaagtattttgtaactgaggaattttgataatttggggattttgttttcccttggtctaatggagagaaagacattttggttttctttttccattttgggttccttttgtttcaggcacggataacagcaaatggaattctgtatttattattatttaagtgtagcgcagatgtgtgtgcttgggcgtgtttctcgtgtcgcgtttgntgttcggcttcttgcggtggagtcctgtttgctgtgagggagtgctggccgcangctctgcgaagtcaccgccaggctncacaggctgtgcancccgtccctccgacagctccaatnactgtgaccntcctttctcaggaaggcgtgttgaacccacagcactcctgggtgtgttttgcagggtgatttccaataaaagtc

SEQ ID NO: 318975 - DNA, 446 bp, Homo Sapiens
tgcagccaagtcgcgccgcggccgggcgcggcccctttattcgcttcaggaggcagaaaactttctcagcgcgacgaccacgagcgccagcaccacgcaggtggccagcagggcggcgatcacgatggccgcgatagcgccgggccccagcgacccgccgccctggtccagccgctcctgcgcggtgctgtcctcgggtcctggcgcgacggtgggggctgggggaccggtgtccacgggctcccggccggggctggtgctctccacggggccttctcccgacggcagctcggccggctcgttccacagcgtgggcacgggctcctgtggaacatcgtctgcaaagccaaggagaggtgctggggccccaggtgacggggccgacagggacgtcaccccccacctctaggttaagcaagttgccggtagcgctgtgtgaggggtct

SEQ ID NO: 318976 - DNA, 1037 bp, Homo Sapiens
  misc_feature (13)..(13): n is a, c, g, or t
  misc_feature (114)..(114): n is a, c, g, or t
  misc_feature (208)..(208): n is a, c, g, or t
  misc_feature (210)..(210): n is a, c, g, or t
  misc_feature (212)..(212): n is a, c, g, or t
  misc_feature (335)..(335): n is a, c, g, or t
  misc_feature (450)..(450): n is a, c, g, or t
  misc_feature (482)..(482): n is a, c, g, or t
  misc_feature (498)..(498): n is a, c, g, or t
  misc_feature (531)..(531): n is a, c, g, or t
ttacacttatgtnctgaaggaggcattatggtgggacaaatattaacaaagcatgatttaaatatatatatatttaatgtgtgatatgtttgtatatatatttaaacacatgcnattgttctacaatttaccagattggtgccacagtgaataaaagagaaagtagacagcttttgctggaagattcaactaaagtgcctaatacgtnanantctaaaactaatattagaaaaatgtcacaagagatgcccaggccttcagctttctggaccatgaaagtgtcaccaaattcaaagaacatttctgaatgtacatccagtgacatctgttatgcnaaagaggaaaactttgtgaaacatttcatagctttggtcaatgatttactttttgtccatgtattgataaatcagtcacttctgagttgacactgattttcactgaccacctgcnctgttaaagagtaaaggaaatgaaagctaccntaatataataacaaanagtcagtgcctatgagagacaaaagcctagtgnccacttttttcaccatttgccacttgttagtgacatacacatgtaccacacctacacacccttcacaacattttccacacaatagaagatttgtataagatcaagtttattatttccagtgctttctgcaactattttctcaaaatattctttccccccaagatgttagataagtcatatggaattgcagtttggggctatttttgcagaaatcctgttcagaggtccctttcatcatctgcataatattaatttcacttgggcttcctgctgcccacatgcatctcagccaggcagacagaggggcagcagttggaatgaatatcattcatttagggagttcaaccaggaaaaggagaagatatggcgagctggctcagaatcagctccactgccactcgctggagctgcagcctgtccctggaggtgaggagcctcaaatcaatctgcaatggaagaaatgggatcagagaaaaagaggtttgcctttttggattggtcagtca

SEQ ID NO: 318977 - DNA, 1036 bp, Homo Sapiens
  misc_feature (74)..(95): n is a, c, g, or t
  misc_feature (123)..(123): n is a, c, g, or t
  misc_feature (128)..(128): n is a, c, g, or t
  misc_feature (900)..(900): n is a, c, g, or t
  misc_feature (968)..(968): n is a, c, g, or t
  misc_feature (994)..(994): n is a, c, g, or t
  misc_feature (997)..(997): n is a, c, g, or t
  misc_feature (1013)..(1013): n is a, c, g, or t
  misc_feature (1019)..(1019): n is a, c, g, or t
  misc_feature (1028)..(1028): n is a, c, g, or t
atgagggccccaaggcgcgccccgacccggaattatccttctagcggagattatggggcggataaagaggtacnnnnnnnnnnnnnnnnnnnnnnaacttttgtagcttgggtggcggtaaantccgntggttgtcggacagtaaaccgtttattactgtgtggacacagaccaccgtggtgcatgacagacagtttcaacaccatgagcgctggggacggagctgtgcctggacagctctgcggtgtgtggtggcgccacgctgggccggctgtcaccgccagctgaggcgctaacagcgtcacctgggagaaaacctggaaaccgtctaatgaagcaggtgacttaggggcgtctctagaaacccaaagaaatgtaccttaaataagcaaatataaaacacaaaaaagacgagcagacctggtgttccgtgtcaggcagaatctaaaaaaacccaggagttgcacttggtttcctcactgtcatgtgtgatcacaggtcaggacgtttcacagcagcgcgcccaggctcctgtgcgtgctctggtgcactggagtctggggctggctgggcttctggctgtcctctgtcgccggatgggctcgacgaatcagcgcacaaggccggccccttacgtggtgctgatcccactcagctcctgcctgatggcgtcgatgatctcctccttcaccttgtggagctctctcaccacctcctctaggatctcctgcttcatccggtccaagtcgaaggcatccagggccatgttattcacgctcccagcaggcttcatcctagagtgaggctgcgactgaagggggctcttagcttcgggggctctttgccacagacgggggttctggacagaatcgagggacacagagcttctccaccgagtangctccgctcccagggcttccggccagcctctgaaggagttagggtggctggctggctgcacgggtacnccggagaggggggaggtactaggatnttncatttgggctttcatnttcctncttctcggntggcttgt

SEQ ID NO: 318978 - DNA, 860 bp, Homo Sapiens
  misc_feature (835)..(835): n is a, c, g, or t
  misc_feature (837)..(837): n is a, c, g, or t
  misc_feature (844)..(844): n is a, c, g, or t
  misc_feature (849)..(849): n is a, c, g, or t
gtgattttgatgctgacgcatactatgcagccttgggaactaggccacctattcatatggaagaactggattactcataccagaaagtaattgaactcttctctttatgcactaatgaagaccctaaagatcgtccttctgctgcacacattgttgaagctctggaaacagatgtctagtgatcatctcggctgaagtgtgcgcttgcgtagataactgtttattccaaaatatttacatagttactatcagtagttattagactctaaaattgcgcatatttgaggaccatagtttcttgttgacatatggataactatttctaatatgagatatgcttatattggctataaggacttggaattgtactgggttttctgtaaagttttagagactagctacataagtactttgatactgctcatgctgacttaaaacactagcagtaaaacgctgtaaactgtaacattaaattgaatgaccattacttttattaatgatctttcttaaatattctatattttaatggatctactgacattagcactttgtacagtacaaaataaagtctacatttgtttaaaacactgaaccttttgctgatgtgtttatcaaatgatgactggaagctgaggaggatatgcctcaaaaagagtagctccttggatacttcagactctggttacagattgtcttgatctcttggatctcctcagatctttggtttttgctttaatttattaaatgtattttccatactgagtttaaaatttattaatttgtaccttaagcatttcccagctgtgttaaaacaataaaactcaaataggatgananagagtanagganagtgtgggtac

SEQ ID NO: 318979 - DNA, 2044 bp, Homo Sapiens
  misc_feature (141)..(141): n is a, c, g, or t
  misc_feature (422)..(439): n is a, c, g, or t
  misc_feature (474)..(475): n is a, c, g, or t
  misc_feature (550)..(550): n is a, c, g, or t
  misc_feature (1639)..(1640): n is a, c, g, or t
  misc_feature (1645)..(1646): n is a, c, g, or t
  misc_feature (1648)..(1649): n is a, c, g, or t
  misc_feature (1655)..(1655): n is a, c, g, or t
  misc_feature (1660)..(1660): n is a, c, g, or t
  misc_feature (1666)..(1669): n is a, c, g, or t
  misc_feature (1690)..(1690): n is a, c, g, or t
  misc_feature (1712)..(1712): n is a, c, g, or t
  misc_feature (1717)..(1717): n is a, c, g, or t
  misc_feature (1735)..(1735): n is a, c, g, or t
  misc_feature (1738)..(1738): n is a, c, g, or t
  misc_feature (1751)..(1752): n is a, c, g, or t
  misc_feature (1761)..(1762): n is a, c, g, or t
  misc_feature (1846)..(1846): n is a, c, g, or t
  misc_feature (1897)..(1897): n is a, c, g, or t
  misc_feature (1927)..(1927): n is a, c, g, or t
  misc_feature (1936)..(1937): n is a, c, g, or t
  misc_feature (1948)..(1949): n is a, c, g, or t
  misc_feature (1955)..(1955): n is a, c, g, or t
  misc_feature (1958)..(1958): n is a, c, g, or t
  misc_feature (1966)..(1966): n is a, c, g, or t
  misc_feature (1968)..(1969): n is a, c, g, or t
  misc_feature (2009)..(2010): n is a, c, g, or t
  misc_feature (2023)..(2023): n is a, c, g, or t
  misc_feature (2040)..(2040): n is a, c, g, or t
  misc_feature (2042)..(2042): n is a, c, g, or t
tcagactcccaaagtgctggggttacagacgtgagccaccgcacctagctcagtgacacaatcttgatctagtgtttcattcacttaattcaagacaaaggaggcctttgctggaaaatgcatcttttctgcttttacccntacatagttcacagacactctctgcagttactaaacggggtggcctgagtaatcctgatctttaagcaaggatcttttctaaactctgagtggtatgggtaagaaaaagaaaagaaatatctcggtcttctgcagtgaaattgatttttctaatgctcctggaaatactgttttagagtagaaaaataagtggagccaggcactagaatcataggaaaatactttttccaaattgagaagggaacatacgtacatacataaatttggtaaccaaaatgcannnnnnnnnnnnnnnnnnaatctaccatttgaaatctaaaatactgtgataannactgtcaaaagtgaaaatttgtttatgaaaggtatattgtttaatacatcctctactatagagtgatcagaagcnaaagaagtaaattaatgaaacatcaagaccccactcatctcagcactaagtctgtcagcaccaccatccttcctaaaggaaataaattaaacttgattccttaaggtactacaggaaccagagccaaaagtggaaaggaccaattagggttggagagaaaattttcagtttaaagtttatagatattgaagaaaatttcttattttaccctttaagaacaaatacagaagtgaaattttcttactggtagtcagtggtcagatatagctacattttccccttaagtcataccacccaactctagcttccaaaaaatgttgaaaactatcattcagcatattctgagacattctagtgtcttcatagtggtatacctgttgtaacactggcaacttttataggtatggaggacaaagcattccaacaaattttcatggtggagagaaaaaggcctactttcttattttgttacagaagccagaaactcttaaaaaaaactaacattgctgccaaatacaatttccacacaactccatctgtggtattgacttagctggtaaactttttattatttaaagaaaaaaaattacatatataaaatgataaatatttttaatgatactttaatatggtttttcctcagttatgtttaaagtcctaccatagtgttaagcagtagccttgactttgaacctaaaatagaaatacaagtaagaaaaattatgagttgaaaattagcttcttggactttgtgtttctcattccttaccatttttcactagtacatctatccaaatcacaacacgtttctttttaatgagatttaataaaaaatgtttattgtggcacaaattcaatgagcaagatactgcttcaaaaggaaatataattttatttagttcagattctaaaacttgtactttgtttaactttatgtatcttttcattggaaatacctttttgttattctttgttgacattgaaatcactttactaaataaaagcctactgcagtagcacatgcctgtagttcgagctacccgggagtctgaggcaggaagactgcttgagtgcaggagttcaagcccnnccagnncnntgtagnaagantttgtnnnnaaaataacaataataaactcngcaattaagattagttgacatnggacnacttacagaatatttttntcnaattagccctacnncttgtaggnncctcccggtcttaagactaaatacctttttaatttggggtaaatgtcagaattggaagagactttaaagggcatgaagaattcnaccccaaaggttatccagcccacgtacccatccagcctatcaagtgtaaancctttctgtactttaaactcttatgagacncaaactgcnncctaaggtagnntattcnggntttggagngnnctacctactagctggttatgtcttacattaaattaatacnnttaaaaagtattntgaaaatcacaccctcngnaa

SEQ ID NO: 318980 - DNA, 1707 bp, Homo Sapiens
  misc_feature (157)..(408): n is a, c, g, or t
  misc_feature (417)..(442): n is a, c, g, or t
  misc_feature (447)..(502): n is a, c, g, or t
  misc_feature (1003)..(1016): n is a, c, g, or t
  misc_feature (1624)..(1624): n is a, c, g, or t
aggcaacccttttaaccttaaaatttccaccacaaatgggtaatcctaaagagtgtaggttttaggcccatggtccttaattttcccaatgcccacccatcccctgggattgttaaaatgccaaagtcgggcccggccgggtgactcactcctaatnnnnnnnnnnnnnnnnnnnnnnnnnnnnnnnnnnnnnnnnnnnnnnnnnnnnnnnnnnnnnnnnnnnnnnnnnnnnnnnnnnnnnnnnnnnnnnnnnnnnnnnnnnnnnnnnnnnnnnnnnnnnnnnnnnnnnnnnnnnnnnnnnnnnnnnnnnnnnnnnnnnnnnnnnnnnnnnnnnnnnnnnnnnnnnnnnnnnnnnnnnnnnnnnnnnnnnnnnnnnnnnnnnnnnnnnnnnnnnnnnnnnnnnnnnnntctggctcnnnnnnnnnnnnnnnnnnnnnnnnnncctgnnnnnnnnnnnnnnnnnnnnnnnnnnnnnnnnnnnnnnnnnnnnnnnnnnnnnnnncgttgacagtacaccaacactgctggtccttgactatgactttatggtcataagatacaggattctaaaatagaatacatggcatatatacaacaggtgatgtcccattatgggacacaaattttaaagacacttaaaattgtataagtatcttttcagtagcgctagtgtgttcccgtgactgtaaagataacacagataatagcaaaagtttgaaatatgatgcctttcaaatggctctcccttcctactttgataggctctaattaggtgcctcacataaatgccctttggaatttctgatacctgccctagcaggttgaagggagattctgaaatgaagcaaggctcctaatcatagtcacaggcagggagccatctcaatttctggaacacagaactgggagtggggagacagcaggcataccagcacccttacatgccagagaagtgagattaacatgacgcgaaaattagcctcttttctcccgttccatcttnnnnnnnnnnnnnnttcaaaccattgacaaagaattgctaaaatgggacctgttgctcccacacaccagagccaccctggacaaaagccaacgtcccagctaagaaaacagtctgtcttcttcccacggtaacgtaggctttgtttatatcatcccttggccactccatcctgaaaatgtaagactggcacagtcagtagatgggggcgagttcgtctaggagcctccccaactcagcatcaacacctcccagggcgttccctcgctcttcggctcatttctctcatcacatgccaatcctgggatctgagagagagtagtcttgacatcagcccccgcgaggctgcagctcccaccttcttcggctgtagcttgcgagttcctcggttacaacgtgcaacgggtcaggtggccaatgtccttgatctccgcacagtagagcacgttgctaggcagcggacgccgccagcgccgcgcaggccccaggaccctgtcccagagccgccggagcgcgcgccacccagcactcctaggccccacccccttctcgctctccccttcttcctaccgacctctccgtcagcgtcgctgctttccttggccgggttcccagcctacatcntcgttcgcacttggcccgcgctttttcctccaatcgcgaccacaagtccgagtcaagagccatctccgtgaggccgccgcgag

SEQ ID NO: 318981 - DNA, 1847 bp, Homo Sapiens
ttaaactacacacacatttattaaatagtgaaatggttaacaaaggcacatcaataaccacttactatatatacagaaatatatataattaacatggatccaattatctcataactgccattttttccaacaaagagtcattcaattcttcatgtcatgaaggttaaaggcaaagtcttagtccccatcttatgctttcccaccctcttcttgaaaactacattgaacctctatgggttaatcatcgtcttctgtagccataaggtctctgcaagcatgctgactgcaggctcctcagattctttctccattccctcaagtccagtttttaatgaacaggctgtttgctttagcaggtgctgttgctggtattcatccagttacactatgattttttaaaaataaatctttccttgtacttgtacatgcctgcattgcattgcatcacttatgaagagatagctccctctctcatcaggaaaactggatttgtgtgtctatgtctgttgcactttgcaccggatgccctgcctgccttttcactgtgttctttccatgcacaacagaaaaatgctgggctgcactggccagaactgccattgtatactaatttctgcatccactttagaatgctgtgcttttgctttggacatgtttgtacaaatgggaatcagatagtctgtccctctcacaaagctatttcctggtggctgccctttgtatccaaaatcctctgtttggagctcttggcttttattccccagacacccactgtcctcctgcctaagggagtagtgtaagtcaggcactgaacagaaaagctgggaaggtttagttaaatgcgcatttctagtacaggaaagagccaagtagaaaatcagagaatgtgtgtccatctgttaaagtttaacaaatataggctttaaattactccagaattataatcatacctcaggcctgtcattgtatcatgccctctacagatgatgaccatgggaatggattctggtcagtggaattttaggatgttcactatctattcagtattttaggttcattatcatatcagaactttccagataataacaaaattacgagagtgttcattttttggccttcctgatgtggtgaatgactgcattgcttataggaattccatctctgcacctaaacactgagattcaatgcctagaagtttgcttaagtaaaacatatttcccttatctatgcatgtaggtgtctgatatttgcccattggaaagtcatgcctttttaaatgtgaacacttccaggacaggcagtatactaaatacggccattcttgaacaccatagggtaatttgtctcttagatctcaactatgagcagttctccatagtctgagaagcccaacaggaaagcacttaaggggaaaagtccagatctatcagaggaaacaggcctgataagttgctatcatgaggattttccagggccagaggccaccatgagggatgagaaaaggatgctgtgaaaagaatttgaaaagtacccaagacaaacttggtttacatctggttttgcctgtgggtcaactttcttccagccaatagaaactccaagtctccaatttgatgatggtcgggaatgcttgccctgaattcttacctaacattcagcagcctcaaagagaaagacattaactgaattctgaagaggcctaagacctcttgtaaatgtctatatactgaactgtttttagtgctggtattatcagactcacagaaacacctacaaaacattaaacggctcaaagtgggcttatcaagaaatgccatcatgggaaccaccttagaaatagtaaaaca

SEQ ID NO: 318982 - DNA, 1424 bp, Homo Sapiens
  misc_feature (63)..(124): n is a, c, g, or t
  misc_feature (193)..(246): n is a, c, g, or t
  misc_feature (369)..(370): n is a, c, g, or t
  misc_feature (373)..(373): n is a, c, g, or t
  misc_feature (376)..(377): n is a, c, g, or t
  misc_feature (381)..(382): n is a, c, g, or t
  misc_feature (388)..(388): n is a, c, g, or t
  misc_feature (420)..(420): n is a, c, g, or t
  misc_feature (422)..(422): n is a, c, g, or t
  misc_feature (539)..(539): n is a, c, g, or t
  misc_feature (551)..(551): n is a, c, g, or t
  misc_feature (631)..(631): n is a, c, g, or t
  misc_feature (633)..(633): n is a, c, g, or t
  misc_feature (637)..(637): n is a, c, g, or t
  misc_feature (641)..(641): n is a, c, g, or t
gctctctctttctctctttaattttggtttctctcaagcttccaaatggtgctcagtgctccnnnnnnnnnnnnnnnnnnnnnnnnnnnnnnnnnnnnnnnnnnnnnnnnnnnnnnnnnnnnnncatctggaaaaaaagcagcctgacagtccagctgtttgcaaactcatagcacatcctccagttacatgnnnnnnnnnnnnnnnnnnnnnnnnnnnnnnnnnnnnnnnnnnnnnnnnnnnnnntaacttaaataaacacacacacaaagaaaagagaaggcaacatgacgtgagctggtgatccatgaaggcagggagggaggggaaccgttttacctgtgctgaaccaagggaagaatgcggagnnggnggnngggnnaggggnaaaaaaaatcagaagaaacactgggggcagangntggtggggacacggagacaactttatacaacttgagacgaggcggcccggccggcgtgtcctcagtgcggtgtggcggcggaggatctggtgctggtggtgctggcacttcagggtngggggccgaggncgggcacagtctctaagcagctcccccaccccaaacacggaggccccaaggggctgggaacaagagtctgtggcgaacangnttangcancgggcggttggcggcttgctgggtgcccccgccgcaggcgggcacgggctggacggcctgtcttctttccactggccccccggcatgggatgggccagggcgccgggtcgggtaccggagtgcaagctcgaaagagagagagagaaaacactgagacagcattagtggagtgaaaggcggacacagatgagcctgcagaccatgcccccaaccctccgttgcccatcccctcctccccaatcccatccctttgaggcaaaaaataaaaacgtagaaaaatttttgtacagactccccggtgggaaaacgggggcagggatggtggctcttcctggagcgcactccccacaaataaatttacaacccaagtccacggctcaaaaacagaatccgcaaaggcagcgctgggggctgcagcccctgcccccgcccctcctcgctgggtgctcagaaggctgacagttgcgccaggctgaggcggcagtcgatgctggagttgtccgggcccgtgtaggccaggcccaggggctctaggaaggcccggaaggcggtctcgccctcgaaggccagctcggcctgcaggtaggagactggcagcgcagggcggaagctatggacacaagaggagaaggtgataaggcggccggccgggagggcaggggaggcccccaccgagcggggaggcccccccattcggggtgccaacaggatttcctaaaaaacagagccttggtggttgccccacccggctttcccaaactttccccacctaaaggggcttta

SEQ ID NO: 318983 - DNA, 2050 bp, Homo Sapiens
  misc_feature (541)..(624): n is a, c, g, or t
  misc_feature (1126)..(1149): n is a, c, g, or t
ataggatttaattcttttacattttagggactactttttaggaataaaccattcttgcgttagttaataaaggttcataaccttcggaacccctccgctgagaacaaaatacgataatagcctttataacgcaccttttcataaaaatattctgtgaggactctcataggccatcgaatcttctcgtattcctgaaacagaatggtacggtccagaacccgccccatcttctctgcgattggccgtccttcctcagcgagtcgtgtgatttttcaccaatggccgctcgcgtttctttagcgaggtctaagcgatggaaggtggcggccagggagacgccccctacgcgtcctgggattggctacgtcgcacggcgcgcgagggcggcgggcccgaaagataagaactacgactcccggcgccccgcaaagggaactccgttacgcatgcgcacgggcggggcgaaaaagcttctatataaaaggggcgcagaggactgggagacagcagttggaagttggcaggtggagaggcaggttgnnnnnnnnnnnnnnnnnnnnnnnnnnnnnnnnnnnnnnnnnnnnnnnnnnnnnnnnnnnnnnnnnnnnnnnnnnnnnnnnnnnnaactgagcagagcagagcatcgagccaaaggggagatgagtttgtctgtcctctgctgaggctacggccgggcctagggaactgggagcttgggtggaagcgacacccgtggaagtgggaggaggtggcgccgggactttaaccccttgttggctctgcggcaggggatttaaccctttgtggatctggcccctcggaggcagcgtcatcggtagttttaaccccttcggggctgggtttcacgcactggacttaccctcatcaccttgctcaccaactcctttattggggtgctccgcttggaggtttgaggcccacctccgcccattacgtactgttcccgccgctgcacccccttggacccgctagctggccgcactgtgggcgcttaaccctttactgacttgagctccccagattgcagttggagtttgctgatagaaggactagctaaaggcgtcactgcaggaattacaaactgaagaggactctgttggactgnnnnnnnnnnnnnnnnnnnnnnnnaagaaaaacccatttttttccttaaggacttactagccaaaatttcttaaacttcgaggactctactagccatggccgagccattcttgtcagaatatcaacaccagcctcaaactagcaactgtacaggtgctgctgctgtccaggaagagctgaaccctgagcgccccccaggcgcggaggagcgggtgcccgaggaggacagtaggtggcaatcgagagcgttcccccagttgggtggccgtccgtggccggagggggaagggagcctggaatcccaaccacctcccttgcagaccccggcctgtccagaatctatctgcctgagagagggcgagaagggccagaatggggacgactcgttcgctggcggcgacttcccgccggcggcagaagtggaaccgacgcccggaggccgagttgtttgcccagccttgtcatgactccgaggccagtaagtttggggctcctgccgcagggggcgaagaggagtggggacagcagcagagacagctggggaagaaaaaacataggagacgcccgtccaagaagaagcggcattggaaaccgtactacaagctgacctgggaagagaagaaaaagttcgacgagaaacagagccttcgagcttcaaggatccgagccgagatgttcgccaagggccagccggtcgcgccctataacaccacgcagttcctcatggatgatcacgaccaggaggagccggatctcaaaaccggcctgtactccaagcgggccgcgccaaatccgacgacaccagcgatgacgacttcatggaagaagggggtgaggaggatgggggcagcgatgggaatgggaaggggacggccagcgaggttctgccagcgggaacttctcggagaacgtacgagcggtaccc

SEQ ID NO: 318984 - DNA, 354 bp, Homo Sapiens
  misc_feature (126)..(126): n is a, c, g, or t
aataggactgaacgtctttttaatatcaacagagtaaattcattatgaataattacactttgaccctaaaatattctcaagtgctcagttacctcaatgtacttaaataccaaaaaaactgcctgntgctgaaatatgtactggctaggcttatctgaaggggtaagggtgactaaattcacatccaaagttaaatcacaatgtaggtgaaataacaggtttctacttcttgctgaattctgtgagaattcaaagagaatgcttgcggttacaaactgctgtgtgaggttgaaatcgtcagccactacacttcgtgggcgctcctttaaaaaccacagcaaaacacaaggatgc

SEQ ID NO: 318985 - DNA, 1177 bp, Homo Sapiens
ttctaatacttcctcaccatattccatgatgatctcggggggtaagcacttctggacaagccgagctacgatgcctcgagagagaagcgttgtagccgaggggcgatgtgagggattccttttaaacatctgcttgactaggaactgaagttcataggagtaatgagacggcagtggactgatgcaccctttgacatactttgaggataagatttttccaactatttgcctgaaatggatgcttaagggtacagagttcatacaggatgcaacccaaggaccagatgtcacttttattgttataaggcaggttttcccaaatttctggaggcacataataaggagttcccacataggtacaagcaaatgccatcggattggagagaagacgggcagatccaaagtctcccaatttcacttttccattctgagtgaggaagatattcttggacttgatatctctgtgtagcacacgtttcttgtgaatgtgatttactccaaggcacatttgggtaaaccaattaagtatcatgtcttcaggaaataactttcctttctgctgtttaatcttttgcattagatcccctccatcacagtattccatcacaatatacaagtgtccttcagcttcaaatgattctttgaaggcaacaatattagggtgtttcattttggctaaaagaacagcctccttcctagaattctgtgtattagagaaagacttgggaagccttatttctttcatggcaaacatctgattactgctttcatgctgaaccaaaagagctctgccgaaggagccctccccaatcattctcaggaccatgtagtcatccatgctggggcatccacacagctgggctccactcacgcagtcaccatgggctctcccaaaccgcttccccggcgaccctagtccactccttggcctggcaaccggcggcttccgcggggcgggcccggcgggtcgtctctcgggttgcgggtgaaggaagccgcctgggtctggcgggaggcactgttcttggagtagccgggcctacgaagagcacgttttaaagctgttgttccacgttgcggtggaacagtgctgttaacattgagggaaattgtccccgactaactgagttctgtctgcaggttaagtgaaagcctcgtgccgaattcgccacccagc

SEQ ID NO: 318986 - DNA, 946 bp, Homo Sapiens
  misc_feature (434)..(434): n is a, c, g, or t
  misc_feature (590)..(590): n is a, c, g, or t
  misc_feature (600)..(600): n is a, c, g, or t
  misc_feature (602)..(602): n is a, c, g, or t
  misc_feature (607)..(607): n is a, c, g, or t
  misc_feature (613)..(613): n is a, c, g, or t
  misc_feature (617)..(617): n is a, c, g, or t
  misc_feature (626)..(626): n is a, c, g, or t
  misc_feature (635)..(635): n is a, c, g, or t
  misc_feature (642)..(642): n is a, c, g, or t
  misc_feature (650)..(651): n is a, c, g, or t
  misc_feature (653)..(653): n is a, c, g, or t
  misc_feature (655)..(656): n is a, c, g, or t
  misc_feature (667)..(667): n is a, c, g, or t
  misc_feature (670)..(670): n is a, c, g, or t
  misc_feature (675)..(675): n is a, c, g, or t
  misc_feature (683)..(683): n is a, c, g, or t
  misc_feature (686)..(686): n is a, c, g, or t
  misc_feature (690)..(690): n is a, c, g, or t
  misc_feature (699)..(699): n is a, c, g, or t
  misc_feature (701)..(701): n is a, c, g, or t
  misc_feature (704)..(704): n is a, c, g, or t
  misc_feature (707)..(707): n is a, c, g, or t
  misc_feature (713)..(713): n is a, c, g, or t
  misc_feature (715)..(715): n is a, c, g, or t
  misc_feature (717)..(717): n is a, c, g, or t
  misc_feature (724)..(724): n is a, c, g, or t
  misc_feature (735)..(735): n is a, c, g, or t
  misc_feature (738)..(738): n is a, c, g, or t
  misc_feature (741)..(741): n is a, c, g, or t
  misc_feature (745)..(745): n is a, c, g, or t
  misc_feature (751)..(751): n is a, c, g, or t
  misc_feature (765)..(765): n is a, c, g, or t
  misc_feature (776)..(776): n is a, c, g, or t
  misc_feature (778)..(779): n is a, c, g, or t
  misc_feature (784)..(785): n is a, c, g, or t
  misc_feature (792)..(792): n is a, c, g, or t
  misc_feature (795)..(795): n is a, c, g, or t
  misc_feature (801)..(802): n is a, c, g, or t
  misc_feature (806)..(806): n is a, c, g, or t
  misc_feature (817)..(817): n is a, c, g, or t
  misc_feature (824)..(824): n is a, c, g, or t
  misc_feature (837)..(837): n is a, c, g, or t
  misc_feature (891)..(891): n is a, c, g, or t
  misc_feature (898)..(898): n is a, c, g, or t
  misc_feature (901)..(901): n is a, c, g, or t
  misc_feature (914)..(914): n is a, c, g, or t
  misc_feature (919)..(919): n is a, c, g, or t
  misc_feature (923)..(924): n is a, c, g, or t
  misc_feature (930)..(930): n is a, c, g, or t
cttgaaatatcttaagacttcttttctggacaaagtaggtggtcagtttccatccatgttccatatatgcatggaaagagtatgtattcttttcagatactgttgtgtctgtctctcagctcaagctcatgctcacctcacatcctatctttcacagggctttttcatcagttgcctctgtctggtaacagtcacaccagctcctgttcagttacagtctttgtctcgtaaccggagagtttcatcaaaagaattttatttacagctttatcatccatatgccactaaaattcacctgttttctttcaacctgcactcattttgattgcctggaactctggatttaattcttccatcccactttgtatcttgcattcacttcactctctctccagcttttattctttctttctctttccctaggtccaatgcanttgacccaactcacatgcgtggactccgggaaggtactgctccctccctccaaattctgagcagtaaaatgccgccccggggcactggggaacagaaaggaatgagaccccaacaggcagaagccaagagagcggggaggagccatggcgttctgncccaggatgnancacgnctggangtgntcccccgantcccagtgncaggtgnccatatgnnananntcagggttgtnctntgttngggtgagntgnggantaacgtggncnggnagnagaggncnancgtcttntgtcccgtggntcntgngaanacaggnagtggggaaaaggnagtgattgccnanncccanngtttctnttncctgannctgnaaactcggggnatttttnaggccgggaaagnagaccaggcccagtctcctcaacctttcctgggtctgaagtccggatctgcgtncaggatncgntgaatctctcttntcaangggnntgtgantggcctcacactcgca

SEQ ID NO: 318987 - DNA, 1139 bp, Homo Sapiens
  misc_feature (828)..(828): n is a, c, g, or t
ttttggggccaggtgtttgtattcgggctagaaaaggcaatgtcccaagtctctgctgcctgtcacagtccttcagccagggctggacctcaaccctgaggagtcacactgagttccagtgaccaccgtggtgtgggccatgccctcatggttgctatggccggaactgtggggcagcctcctccaagccgctcgcaccccgtaggtgcccatccgctgctggcgcaagtgctggccgaagatgaagcagagcaggacagatgtcacgaacagggacagcaacaccgacaccaccgtgactatgatgaccatctggctgtccgacacaggctcatagatctccaacatcttcggggctgagtgtttgtgaaagatgttgccaccgcgagacatcaagtccagcacagccaggcaggagaagttgcggtggccatcctctctgtcagccgtgctgttgaatgtggctgtggcctcctgcggagcaggggctgccttcccgaaggtctcatagtgcagagtctcattgcccacggaacaggaagagggtgaggctgtcccaggggctccacggtgggcaccctgcactcaatggtgaaggacttgcccacagccaccaaagtgggttgcagtgtcaggatgacctgccttggaggctggtacacgctgacgttggaattcattgactcctgcttcccggagcaggtgaagtggcattggaggaccgtgtcatgggagatgtttgagaccaagtaatgtttccactgagcctgttcgtccagcagaatcttatctagagaggtctccagaccacccacttcaggctggttnacaggtggtgctgcagttgacctcgagggaaccctttgggctcaaccgccagcttctttggcctcacgtgtacctcgaataccttctcatccgatcctggacagcagatcagggtgaagagggccacagtcagggtcctgtaaccgaaagaggacatctctggcagtctccacgggctcgcagggacccgccaagggactgcccctgtgggctccaagaagggtagctctgggatcccgggcaggaaattggtgacaaggtgacaaggtgcgcgtgtcacagctgcccagttcacggcttattcagtcttc

SEQ ID NO: 318988 - DNA, 300 bp, Homo Sapiens
  misc_feature (125)..(125): n is a, c, g, or t
cgtatttttcagaacagtgtctggcccactcaatgtttgctctatcctgctcaaggtgagttcttgcagtcaaaggtcaagggtggctcgtctccacttcccccgcaaccaaaccgcccggtctnagtgagggagccgccagaagggaaggagcctcctagcttcccggtcctcacgctcccggagcccacacgccccaaacagacacagaagagctcgctgagctcttccgcgcagctaaaccctccaagctttgctgggagaaaccgatgcccgagagcgcgtcgcgaggttccatcc

SEQ ID NO: 318989 - DNA, 964 bp, Homo Sapiens
aggttaatggacaagtctggcacaccagaagctagacacaaaactggtaaaagaaaccataaggacataaaaataaggaaaagatcccaaattacaagtgctagcagcgttctacccaaacagatggaccgtcaggctcaactggctccaaagaacagaccttggatggatcagtcaattccaacgaacaaccgctagaccaacactaagcactgctcagtagggtcaacagtgcccggtggtccaatgcaatgaattcagaacacatctgtgtccagagctacaaggccatgtgcccatcaactgtcacgactctcagacaatgcacgcagacctgcaccacttccctcctgcccaccacggagcagggaacagttctgtgagtgaacagaagcaggacatcggcatagccggctgacgatggaggatgagacgctgccgagatcctggagggcagatcactgaggatgaacacgcgttccttccgccagcagtcgtgcaccacctgctggggctctgcgtccccaccggccaagggctgcctcgctctaatgaaggccgctcactcagcacagcgccaagtggcctttccagctgcaggtaccagaaaaagccactgccgctatcacagggggaagaacgccccaaagacaaaaggtcatttgagatgattaacatcttttagaggccattttggtcattcttgaaatcaaagagaaacctttattttcaacaaaactgcccagaagagatggttcattgatccactaggaacaagtctcttaccacacacagcaccaaaatatatatttaaaaaattaaaaaacacatagccccctcacacgcatcccccaaaagccacacaacccagaccaaagggaaaacaaatcaaactcaatgccctcacacacgagccatctttgaattaggatttacaaatttatatattctttcctatggaaaa

SEQ ID NO: 318990 - DNA, 712 bp, Homo Sapiens
  misc_feature (574)..(574): n is a, c, g, or t
taatatatataaatagctcttcatttaaaaatacagtttccccaggttgaggtatgtggtggcctgttgtcacggcagcatgagccacggcggcgcccagggcgggggcggaagggcctagctggagactgccatcacgtagttcttggaggggctgctccggcccagcagcacttggttcttgcaggtgaggagcccacaggaggcggccagtggggcctcctcgtacaagacgcagatggagccgtcctccccaatgcggtaggacacctcataggggtccacccacagaggtacagctcgctgggcagcagctggtgcagctggggctggctgagtccgatctggctggccaccctgctgatgatggggtccatcttgtggttgatgcgaatgcagcggtagccggagcccttggacggcttttcgggaaaccagtggtgtttgtagtgctctgtgagtgcctcctggagcgccccgctgaagaccttaagcctctgctcgctcacgcagccccgggtcctcaggaggctggagaggaagcccacggcggcggcgatctccgggagcatgntcggttcccttcccgtggctcatgtcgcgcgcggctcgggctcagtgagaggtctcgggtgggaagtgcgggtccacaagacagcgttaccctggccgctatcccgggaattccggaccggtaccagcctgctttttt

SEQ ID NO: 318991 - DNA, 371 bp, Homo Sapiens
  misc_feature (31)..(31): n is a, c, g, or t
aactggtgcaactggggcctggcctaaatcncgaatctggctggccaaccctgcctgaataatggggtcccatcttgtggttgaatgcgaaatgcaacggtaagccggagcccttggacggcttttcgggaaaaccagtggtgtttgtaagtgctctgtgagtgccctccctggaagcgccccgctgaagaccttaagcctcctgctcctcacgcagccccgggtcctcaggaggctggagaggaacccacggcggcggcgatctccgggagcatgctggttcccttcccgtggctcattgtcgcgcgcggctcgggctcagtgagaggtctcgggtgggaagtgcgggtccacaagacagcgctcgtgcc

SEQ ID NO: 318992 - DNA, 1768 bp, Homo Sapiens
  misc_feature (192)..(212): n is a, c, g, or t
tagtttattaatagaatacagagtgcaggcacttacagtggtcaaactgagcgaggagtgggtgaggtctcctcagagagaggccgccctgggcccacccatcagggaggcatgggcgggagctgagaggcccccaagaccccccgccaccaccacccacatagcccaagcccagccaccctgggggacccnnnnnnnnnnnnnnnnnnnnnatagggcaaggccggcccgggccaacggctccgggcctagcaaaggcacctctggcagccgaggctgggccaggctcaggctgtgtggttaatatggccgggaaggactatgtacacctcaggcctgccagctgggcactaccgagcccactgggccaggcttgccgctggggagctcctgctaatgggaagttgatatacccctgcaccccagcaaggcctggggatgtaggcgcccttggtgcccgcacttatagaaggcctgccctacatgggctttcccagcccaagaagaccttggtagagtcccccccaggctggacccctcattcaggatggtgtcaagggttctggtcccccctctgccaccctgagactccatcccccaaagtgcaacaccccagcgccccctgcctggagctccagggcccctttgcgcagtgcggtgtccagccaggcacaggggccggccctggaccggggccagcgttaaggaagaggcacagggctgcccactgggagcctggtcccagcataggggcggcggagggccccagaccactgaagctcctgcgccgcgggtgcgtgaggcccccccgagagcacgcccccctcgaggcctagtcgagcagggatggctcggctgggcggataatggtgggccggctgggcgcagcagggggtcttctgctgggcactcctgggggaatcctggggggatccgaactggccgagatgggatctgaggcgagggctgggaagaggtcactgttggcaaacacgctctggggtccagccgggatgggattgggggcgccgagaaggaggctgctgcccccacgggaacaggaatcagggggggcctggagtggggcccctcactgctggggccggccaggggggtgtatgctggacaccggtcggcgctgtggagtggggctgtggctgctggcgctctggagccaggtgtcatcgacaggcgggggtacaggcgtggacacagtgctggtgctgatgtcaccgatgatgttgagcgcctccttgagggcatggtacatgcgcagcatgtcgtcccgccgctgtgcctggtcagccgactcctccatgaggctgctctggtctgccgaggagtataggtaggccagcagctcgtggtggatgaaggccttcgtattgttgatcatgaggtgcatgatggtctttggcatgaggtcgcggatggacttgttgatgatggccacgtatgagtccaccaggttgcgaatggtctccacctgccgctccagttgggggtccatggagaaggtgttctcctgggccccatcctcgttttctgcctggtccttctcggggtagacgccagctcggaggaacgaggccttccagctgtccacgtcttcctgggagtcacaggccagctcgatctgccgcaggtccttgtagacgtttctctgctccgtgttgaagatggcgaagacgtgcttgttggacatgaagcccttctccacatcacggatcttgaggttgtccctcgtgccgaattcgccacccaggcc

SEQ ID NO: 318993 - DNA, 1471 bp, Homo Sapiens
  misc_feature (213)..(213): n is a, c, g, or t
  misc_feature (219)..(219): n is a, c, g, or t
  misc_feature (221)..(221): n is a, c, g, or t
  misc_feature (224)..(224): n is a, c, g, or t
  misc_feature (281)..(281): n is a, c, g, or t
ttgtgaatccagctttgacctttattcaagagaccagatgggttgccccaggatccggctgccagcctgaggccaagcacggctggagacccacgacctggcctgccgttgccctgagctgcagcctcggccccaggatcctgctcacagtcaccgcaggtgcaggcaggaagcagccctgggggactggacgctgctattgattcattaaanaaagananganaaatacaccaaggctccatgttccccgtgacaggtgggcctgaggggtcggggtganccccccccagcatggcagcatgatttctgtacaatcaatccatcatctggggcacagggtggtgtgcgggggctatttcttggctttggcggaattgcggggtggggtgatgggtcggcctccagggttcaggccactgaactgcccgtacttccccttgttcttgtcggcgggcttgaggatctggaaagagcacatgagggtctcgtccacactcatcatggcgccagcattgtcaaactcgccacagtagttgggagctgagaaaagtgtcaccagctgccgcttggcaaagaactcgtagccgtcttctaccacctggtgtgctcggcagatgaggtccaagtcgtgcttgtggaggaacttggccaccacctcggctccaaaggtaaaagagacgccacggtcgttctcgccccagccctgcacgtccttgtcagggtcagaccacagcaggtcacacagcaggccctggtcaggcacatctgtgggccgcatgatccgccgaatctgctccatagactgcaggtccggggacaggcctccgtggcagcagaagatcttttcgtccactatggccgcgatgggcaggcagttgaagcagtcagtgaaggttttccacagtttgatgttgtagcgtctcttgcactcatcgtagaaaccatagatgcggttgatgctggcacactcgtggttcccacggagcaggaagaagttctcggggtacttgatcttataggccagcagcaggcagatggtctccaaggactgcttgcccctgtccacatagtcccccagaaagaggtagttgctctcgggagggaaaccgccatactcaaatagtcgcagaaggtcgtagtactggccgtgtatgtcaccgcagatcttgaggggtgcctccagctccagaagaatgggctggctcagaaaaatctcccgggatttcaggcacagaccgcggatctcgttctctgtcagctgtacattcttgccaggccgcgagccctgcacttccagcaggcgcccgatgatcgagtccaggttgagcttctcgctgtcggacatggcggcgccgccgctccagcccagcagctcctggcccgctcctgcctcccgccctccggcagcctccttccggcctggctctccttccgcccgccccagcctcgtccgaattcgccacccaggcc

SEQ ID NO: 318994 - DNA, 904 bp, Homo Sapiens
  misc_feature (20)..(20): n is a, c, g, or t
  misc_feature (64)..(64): n is a, c, g, or t
ccccttgaaggaggtaagtnacactcggaaaagatcaaccccaaccagctctctcccacacaangcagttctcagtgtgaggggtttaggggacaggcccaattcgggtaggctgtggtggtagcagacggcttctcagggcaggtggggttcgtcttgatcttaaaggccaggtttgccacaacatacccctcatggtattacagcaacacagagaacataagcaaggcatccttagcaccttctcatctgcaaaacacaccttctacttacactggtagtattttaattggtgttactgacaaaccttgcttccagtgcaggggcaattgaagctagctgaccctaacagtcattgggtcacagacaccaacaaggttccagagcaacgccaggaaaggagcgaagcagaggaatttaggaaaggcaatttattctcttttaaagtaggtatgactattctctccaacaatttcttctgagagtcagcaagaattctgtaatccagtgaagatgcagctgaccttttgaagccatgttttgataaagcaggtaacagtaaagttcctcaaggctgtctaagcttaccttctcacttagttgtccatatcttgccatctgtataaggtaattctctactgctttagttttttcaggctttacaagtgctaagttacttaacctggcccgggccgactgatccagaacttgggctaagatactgtttctcatttctgcttccctgtgctttgcttcctgttgggccgcatcaccaggatccccgtgtttggcctgcagctcggccagcctctgtctcctcagcgcctcaagctcctcgtccgccatggctcggcgagcgctggagcagccgcggtaactctcgcagcccctcgcgcgagcgcgg

SEQ ID NO: 318995 - DNA, 800 bp, Homo Sapiens; identical to SEQ ID NO: 123839
  misc_feature (154)..(154): n is a, c, g, or t
  misc_feature (162)..(215): n is a, c, g, or t
  misc_feature (219)..(219): n is a, c, g, or t
  misc_feature (222)..(222): n is a, c, g, or t

SEQ ID NO: 318996 - DNA, 390 bp, Homo Sapiens
  misc_feature (349)..(349): n is a, c, g, or t
aaaaggcatatagacaataaacaaagtaaataatcagatcttaacttctgtcctagacttgttccgttaagttctagtctgtgagcacttgtagttcaataatcgtcatcttcatcagagtccattacttttcttctgttgaatttcactgttgttgtcttttctgtttgttggcttacttttttaaggatttctattaaaccttgttctgatacctaggagaaccaggaaaagataaggaaaaacagtacttttttaaacaaaggaatttaccctctgcaggatgggaatcactttggtactctttttgagggtgtggggggaaggagctcagggaagggaaggcagntgggtgagggcagggagggtttgaaactattggggtataac

SEQ ID NO: 318997 - DNA, 459 bp, Homo Sapiens
tctacaggttttggtttttatgatgaacaactctgaacatacactaaaactgacaatacataaaaaaacctctaagtcccccatccccagtccccatcaccagttgacacaaaatgtcaactaccagcaacattttgtgattggccctatgagttgtttcctataaatcttacctaatacacacctggagaacatcttggtaagagaagtgacctggtacttttactagggattaaagtacagttctctaggtttataaacttcacacttcttacacatctcaagtgttttcagcctaagcaaatatttcatctagtgatagcaataatggtatctaatcaccccattcaactaactcaagctaactttatggaaatgaaatcaaagatgcttacacctggcccgggccgactgatccagaacttgggctaagatactgtttctcatttctgcttccct

SEQ ID NO: 318998 - DNA, 646 bp, Homo Sapiens
  misc_feature (464)..(473): n is a, c, g, or t
tttttttaaaacattaaataattttattcttttctcatttacagtagcccagtggtaagcatgttagaaaacctgaagaaatttaaaagtttttggtttacaaaaagcatgtataaaaatacctgttcagacaaacaaagatctgatcattacattgcccagctttaagaatgccaaaaataactaaaatactgtcaatcaaatgagagggctacatgggtttattaaagtttattttaacaattttagctaagcagaatgtgctaatgtaattcaagttacagttactgccagataacataagagaaaacattgtgtgtggccacttaagattatgcctcaaacagatactgtttcgtgcgcagaacagagttggggaacacagctgggttaagtttcaatggtaagcagcaataaagatcaagaaaatccccaacttttctaataaccgctatacaatatgnnnnnnnnnntagtatctatcaccacctcttaacaatggacatcaaaattaggattgtaggttttctaagtgcttggataaaaaatgcgaacacagttaagatccttggttaattatctttgatttttcaaacccccaaaacataaaatattttgcttgctggtgcattaacccattagcacc

SEQ ID NO: 318999 - DNA, 751 bp, Homo Sapiens
  misc_feature (28)..(28): n is a, c, g, or t
  misc_feature (36)..(36): n is a, c, g, or t
  misc_feature (50)..(50): n is a, c, g, or t
  misc_feature (188)..(188): n is a, c, g, or t
tgccaaaatgaaagctttaatgagtgtnactcctanacagtcacgtctcnagcttctgccagcctccactgtcccagctctcttagctggccgacaggggagctagttgctgaggggtagggatctggagtctaaagagcagagccaggcaaaaggaggtacagagatagcccccgatgggggctggngctcccggagtgtggtgctggggggtcatgggcttcaggccggcccctcttcaggcattcctagcaaagccaccaggggctccaggggtgtgggggtccccatggagcacagggtgggtgcgttcatgcttgcgcaagtcgctggcactcaagaaggccttgggacaatgggggcaggtgtaggggcgcactgagctgtgagttcggctgtgtttgcgcagcccagcccggtcagagaagctcttgccgcactgggtgcaggggaagggccggagctccgggtgtgagcgctcgtgccgacgcagcagcgtcattgtggagaaggtctccttgcactctcggcacacaaactgggggggcttctcgtcagcctcctcaccccccgcctcgcctgccccttccaagggaccaggagcctcccggacaccagcatcttggcattccacatgctccaccgtcatgcccaccacctgccactgtgtggccatcacaccacctgactccgggggcagccctagcagccctgctggagggtcccccagccccgcccctgctgccggggc

SEQ ID NO: 319000 - DNA, 1631 bp, Homo Sapiens
  misc_feature (363)..(363): n is a, c, g, or t
  misc_feature (464)..(464): n is a, c, g, or t
  misc_feature (466)..(466): n is a, c, g, or t
  misc_feature (1015)..(1015): n is a, c, g, or t
ctggcctctctttattcagggcccagcagcagccaggctggagaccccaggctggggcagccttgagcgggatgcaggcacaggcccaggcctcccacgcagagtgctgacagctccattcccagcccagccacagggtcctgccagctctccagccgggaattcaaaagtggcagatgtgcctcagccggagtccccgaggacagccaaagaggaaccgaggcactgctgctgtggggaccaacgggaggcttgcaggcaggacgagtgtaggcagggacctcagggctcctctgtagaggcgccagcgcccgaaagtaggccttgtctctccaggtcgttgctgtccacatcattgctgtntggggtccctgtgacaggctgccaggcccgggtctcgtctctctccaggtacagcgcagtcagcaggaagcagccgccccccagggcgatgacaaaggcgnanacaggaagctctgctgcaggctgcggaagcgctgcagataggagttagggcgcctggcccgcagacactagagatcagcaggatgtcggcaaccactgcccagttgcaggacagaagcagctccccaaggcccaggaacacataggaggccagcagggtggtcggggccaggacgagagccaggtagaggcagctccccggggtgggtctggaaacagcaggataagcaggatcaaggccacggcctccaggcagggcatgactcggagggcccagcgccagttcccagtcagcatcgtcacagccgaccccagcacgtagcccagaccacttccaacggggataaagatgtagaagacagcccagcacgcgggtgcgctggtccctcacgaagaggtcgctcaggacggtgggcgcgatggtggagtagctggccgagccagtgccctcgatgccccgggacaggaagaagagccaagaataccggggggagatgaaggagctagagaggccagctcctgaccacagcaagataccgaagctcatggntaccttgcggctatgtcggtcgcccaggtagccaaacacaggtgcagacagcagcaggcagctaacgaagacagtctgaagcaaaccagcatggttgtcactgatctggaaaacctcctgtatatccagcagcactcctgcaatgatgaaccagttcatgtaattcaggaggttgatgtagcagaggacggcggcagccacgtaggccctccacgggggcaggctccaggaggtgggcgtgatgggagggggacactgcctgcctggccctggggactggccctgcagacctcctggcccaggctcagggcactccgctgacatccccccagccatgccagcctgcagctcttggcctgagactggcgccaggatgaagcaacattagctcagcacgaagtcacttcctgtggggtcccaggctccaaacctcaaagcacctgccctaactgttgggcgtcttatcgcaggttcctcctgaccccacggcagcttcaccagtgcgatttccccatcgtcagcctctgagacctgctacggaggacaagggctcctggcacccccaccctggggactggacaactctgtggtccccttgatctagcctgcagcttca

SEQ ID NO: 319001 - DNA, 1619 bp, Homo Sapiens
  misc_feature (1609)..(1609): n is a, c, g, or t
tggctctgaggaagatttatttgctctgaggctctgcatcccccagccatccccccagagcctctccctgtggggaacacaggacacaggcagagtcctccccacagcttgcatctgtcccctgaacagggcaacctggacgccaggctggatggaggggagaaggcgatgcagccgcaatggtagtctccatggtgtgtgaggagccggcacctgctctcacacgatgccatcaaagccctgcaggccacacttcttgccggccacctggcacccgaatctcagtgcttcctgcacgctcctcccctgggagaggctgaagatgacggaggcattgaaggtgtctccagctcccagtgtatccaccacgcggggtggcgggaaagcatccgagtggagcaatttgccatcagggcccagggcgtcggcgccctcctcagcccaggcacagacaagcacagcccctttcctcacacgaccatacaagcccctcaaggcttcctctgctgactggaaccccaagtgcttggccacatctttgctgacaaacaccacgtctccgtagccaaacagctggaagagctcctctcgtggcttctccacctccacggacacccggatcttctgctctggaggctgcctggtgttgtgtgcgtctatccgctgcagcatcttcacctgctccgatgcgttccggccctcaatgtggatccacttgaactgggtcagatcaaccttctcaaagtctgtagcagacacatctggcaggctcctgtcatagtataggatggtgcggctaccactggcctcgttgatgatgaccgtggcgatggggacggagcctgtggtctgaaagactgtgtagcgtaggtccacagaatagcggcggaggtcatccaggacaaaatcagcaacatggccaggagccattgagcccatgaaggcacagggggctccgagcagggagagaacggtgcaggagttggacgtgttgcctccgcgctgccatctctgggacaaacaccttatctccgagtcctccttagggtacttgtccaccaggctgatgacgtccagcaccactagccccacgcacaggatctgcttctcttccatgaggctactcccagagcttcctgcccgcccggctgacggggttcctcccggcctctgcctcttatccaggaggatggtgtccccgctcccagctgccctggctcctcctccgcgtgggagctcctcctccagggagccacctgcagcggccaggggtgcagggaacgaaaggagcagggcccttcctcgcgacacccgaagacccgagcgggtctaggaaagccaacccagaggtcttggtccccggtcttcccgtagcaggttgcctgggcctgcagatggcaacgcctcccacttctcagccttagtttcctcgcttgtcagatggactcacagctgatgcaaacctttttaaagcgcggctaagcgatctcgagaatgcaaagagaaaatgcgctacttgccccgcactctcctgcacctgcgtctccgactcccgacccgggacacgcgaggtacagctgggccgcgcatctgcagccctgcctgaagncccgcggtcg

SEQ ID NO: 319002 - DNA, 1540 bp, Homo Sapiens
  misc_feature (1)..(1): n is a, c, g, or t
  misc_feature (28)..(28): n is a, c, g, or t
  misc_feature (30)..(30): n is a, c, g, or t
  misc_feature (63)..(63): n is a, c, g, or t
  misc_feature (65)..(65): n is a, c, g, or t
  misc_feature (67)..(67): n is a, c, g, or t
  misc_feature (90)..(90): n is a, c, g, or t
  misc_feature (1518)..(1518): n is a, c, g, or t
  misc_feature (1532)..(1532): n is a, c, g, or t
nggtttgcatcccctagcattcccccanancctctccctgtggggaacacaggacacaggcanantnctctcccacagcttgcatctgtnccctgaacagggcaacctggacgccaggctggatggaggggagaaggcgatgcagccgcaatggtagtctccatggtgtgtgaggagccggcacctgctctcacacgatgccatcaaagccctgcaggccacacttcttgccggccacctggcacccgaatctcagtgcttcctgcacgctcctcccctgggagaggctgaagatgacggaggcattgaaggtgtctccagctcccagtgtatccaccacgcggggtggcgggaaagcatccgagtggagcaatttgccatcagggcccagggcgtcggcgccctcctcagcccaggcacagacaagcacagcccctttcctcacacgaccatacaagcccctcaaggcttcctctgctgactggaaccccaagtgcttggccacatctttgctgacaaacaccacgtctccgtagccaaacagctggaagagctcctctcgtggcttctccacctccacggacacccggatcttctgctctggaggctgcctggtgttgtgtgcgtctatccgctgcagcatcttcacctgctccgatgcgttccggccctcaatgtggatccacttgaactgggtcagatcaaccttctcaaagtctgtagcagacacatctggcaggctcgtgtcatggagcacaatggtacggttgccattggagttgttgatgatgcagcaggagctgggggtgtcccccttgctctgccaggccacctgagacacgtccacgcccgccgcctgaagtcggccaccaggaagtcagcaacatggccaggagccattgagcccatgaaggcacagggggctccgagcagggagagaacggtgcaggagttggacgcgttgcctccgcgctgccatctctgggacaaacaccttatctccgagtcctccttagggtacttgtccaccaggctgatgacgtccagcaccactagccccacgcacaggatctgcttctcttccatgaggctactcccagagcttcctgcccgcccggctgacggggttcctcccggcctctgcctcttatccaggaggatggtgtccccgctcccagctgccctggctcctcctccgcgtgggagctcctcctccagggagccacctgcagcggccaggggtgcagggaacgaaaggagcagggcccttcctcgcgacacccgaagacccgagcgggtctaggaaagccaacccagaggtcttggtccccggtcttcccgtagcaggttgcctgggcctgcagatggcaacgcctcccacttctcagccttagtttcctcgcttgtcagatggactcacagctgatgcaaacctttttaaagcgcggctaagcgatctcgagaatgcaaagagaaaatgcgctacttgccccgcactctcctgcacctgcgtctccnactcccgacccggnacacgcga

SEQ ID NO: 319003 - DNA, 873 bp, Homo Sapiens
  misc_feature (30)..(30): n is a, c, g, or t
  misc_feature (49)..(49): n is a, c, g, or t
  misc_feature (129)..(129): n is a, c, g, or t
tgttggtttcccggggccccccacggcacnccggggacccccctccagntttggttgcgtctgccaagattctttcagcccgcagcgtcccggatcatgaacaccaaagatggcctacgcagcaccagncccagcacccaggtagtagccaatcttcccgaagagcaggcccatgaggaccccgccaattcatcccgacatatttgtagcccaagaaggccaccaggtcgatggtggtgaggtcggtgttgacagtgaccagatagaggctgagcaggatggccagcacctccagggtcagccatgccagggctgagctcgcttgcagccccaggaggtctggggagaacctatcctgggtccccagcgcaagaccagccaccaaaacgtaggtgatgaaagccattgctggaatgtagaggtccggggcattgacgtcaaagcggggggccaccggggtgtcctgttggtactgcacttcccagtcctggtgtaggtaggggaagaacagcaggcccagctttctgcccacatacatggtgtccacagcaaagtaatacttgagcttggtgatggggatgaagcggtcgatgttcttatccaccagctccttgccctgcgcggccaggctgctcccataggccatggccatgttggacaccgggtcagccaggaaggctgcatggggcgtgggagaggctgcaggataacttaggccaccaggtgcccgctgggccccatagccccggctctgggctgaacttgtgtcatcgaaaagctggtgggggtcggccatgcccggctgggacacagggatcctccgcttcgaggccgaacctggcatcccagcgctgtgcacacctcagggttcca

SEQ ID NO: 319004 - DNA, 1217 bp, Homo Sapiens
  misc_feature (198)..(216): n is a, c, g, or t
tccatgcccatcagggtttattgtttctgtaacagcggccacgcctggggggtgcgtgttgcagctggagatctctcagcaccttgggttgggggcggggctgggcgggacatgggatggaggcggtgcctgtggccagacagggtggaccttggggcctgcaggcaggagatgagttcggcggccacagtggccccnnnnnnnnnnnnnnnnnnngggaggttcagcgggcgcgctcaccgcaccagttggaaggtgagccagtacatgagcataggctgcgccgccgccaccgccatggttcaggtacatgcgcagctggttccgggcccccacgcaccgggaccccctcagctgctgcgtctgccaagatcttcagccgcagcgtccggatcatgaacacaaagatggctacgcagcaccagcccagcaccaggtagtagccaatcttcccgaagagcaggcccatgaggaccccgccaatcatcccgacatatttgtagcccaagaaggccaccaggtcgatggtggtgaggtcggtgttgacagtgaccagatagaggctgagcaggatggccagcacctccagggtcagccaggccagggctgagctcgcttgcagccccaggaggtctggggagaacctatcctgggtccccagcgcaagaccagccaccaaaacgtaggtgatgaaagccattgctggaatgtagaggtccggggcattgacgtcaaagcggggggccaccggggtgtcctgttggtactgcacttcccagtcctggtgtaggtaggggaagaacagcaggcccagctttctgcccacatacatggtgtccacagcaaagtaatacttgagcttggtgatggggatgaagcggtcgatgttcttatccaccagctccttgccctgcgcggccaggctgctcccataggccatggccatgttggacaccgggtcagccaggaaggctgcatggggcgtgggagaggctgcaggataactcaggccaccaggtgcccgctgggccccatagccccggctctgggctgaacttgtgtcatcgaaaagctggtgggggtcggccatgcccggctgggacacagggatcctccgcttcgagggcagccggggcgtccccgcagccgccgccgccaagcctgccgggtgcatccttcgccgccgccacctcctcgtgccaattcgccacccaggc

SEQ ID NO: 319005 - DNA, 1982 bp, Homo Sapiens
  misc_feature (1636)..(1661): n is a, c, g, or t
  misc_feature (1668)..(1668): n is a, c, g, or t
  misc_feature (1896)..(1896): n is a, c, g, or t
agtagtcattttcaagactgaattccaaacatggtttattggtgagttaggaacatgtaaggccaagtacactgagagcctttttgaaagtaattgagtggaaacttgatgccattctaaatcaagggcatatccaggtggcccggttgaactcactccactgtacccagtctcaaaggccaggttgctaagaaaccaggagtaaaagagtcaagtgaccatcatttcacctgctgcttgcccccaatagtagtctctgtgaggccttactgacctcacctaggaagtgatttttgagcccttgtttcagggctgtggcctccctgctctatcctgaataaagcagacaggtgtgcagattttggccatgaaagcatggctaatagggccacagtccctttaaagaaacatggtttgactctggttttcttgggggaaaataccacaatcaccgatgcaaacattggaagattattgagagccctagaaagctgctgtgatcccagtagaaaatatgtcccagaaatgtcatgagattgctgtgtgttgcctgggacacagatcaagggcctatcttggagagctggggaccagcagtctgcctggaggccagggagcagtggctgagtagctctgcctttgctctggtctataccttaagaatgccaaagaatgaatttcaacgcctgccttggcaactcttacttaaagtgcaaaaagcttctgtggcgaggcatgctatcatggaatgagactggcttgccctaggcttaatggatgggcagtcattttgcagaggctatgggaagagggtgataatagaagagtggcagctataggaaattatcaacataccttggccagcaagttagagaatctggcaatggatgaactgaaagtgatgaactggcagggataacaaagaacctaacatttattaagcacgtatttattaactgctcagtgtttcatattcatgcaagtattctcattttacagagaaagaaattatggcccagggggctaaagtaaacaactcaagggcacatagaaagtaaataaaaggactgtgatttgaatccaggccactcttagcccatgctgttttccctttgccacactgtggtaggtgtttgaacagaggccacattactagagttggcatgactcttgactcttgcctgcctaacaaaatattgaaaggcaaacatttgaaggagggagggggtgcaggttcagtttatatggaaatgcaaactgggctggaagatattcctgagttaggctttctcttcatattcagcttgcacatttggtaatgtttttaagatgatcatctaattttattttgtgaagtgaaggatttgtgttttagttggcagttgttaagtccttggcttgccatttttcaaaaagtaaaaaggtcctcacaggtgtctccatacttcgccaaaggttgtagcatgggcagtttcagtttcagcctaagagactggtgacatccacaaatgcagttttagaagcagaaaaggtcttggtgcctctgcagtacttgatgtattggggtcaaatctctacaaatttttctgtggtgatagcaaaatcaagagatggcttacaaaaagaaatattgaannnnnnnnnnnnnnnnnnnnnnnnnnaaaggtnggggtgttcagccactgagggacaaaacttagcatctaatttcaattatagtgtcatgcagagtatttctaaagtaattggttatcatgggaaagtattctcttttcaagaagttctttgattctgtaataactagaacaaataaagtagtaaaagaagaaatagttctgtgactaggaaaaaattgcttttgagagaacatagatcaattatactacttctaaggtngctgcagataagtggcgcttgacacatgacaagcctggaaaaaaacatcagaaataataaaaaatttcagagagaatcaagatacc

SEQ ID NO: 319006 - DNA, 750 bp, Homo Sapiens
aatgttcaaaacagttttatttcataatacaaaaaacttgaaaaacattcaaagtatctgtcaatacaagaatggatcaaataaactgtgatacactcattccatggaatggctaaaggaacaaactggtgacacacagaacaacatggatgaatctcaaaaacatttggagtgcgatagaagccatacccaaaaaagtgcgagaaaaaatgataaataataatggtttcaagaaatgcagagcagacgagcccagaggcaaagacccacaggacagagggtcagtcccaggctgtggatcctaactaagaaactcctgctggattttgcccagctccatttccaaactattttgggttattgacttctttatcccctccatgttccctcatttttgaactagaatcactgtagtgggttattctatgtctgtcccatcattccacagtaggggcagataagctgtttagaatggctaaaattcaaaaaggtgaacacaccaaatgctgtcaaagatgaggagcaaccagaactttccatcgctagtggaaatcaaaagggtacagtcactttggaaaacttaagtttactcacaatcctgcacagaaatacttacagcaattttattcatcattgccaaaacttggaagtgcccaagatgtctttcaccaagcgaaagaataaacaaactgttgtagccatacaaggaaatctgattcactgattttaaaaaacaagttatcaagccat

SEQ ID NO: 319007 - DNA, 971 bp, Homo Sapiens
  misc_feature (126)..(140): n is a, c, g, or t
  misc_feature (526)..(526): n is a, c, g, or t
  misc_feature (871)..(871): n is a, c, g, or t
tataatgacaagacaaagtttttcatatcaccattacactcatgctagggataacaatacttcctctattataaatgctacttgacctttatttactatgcttggcataactgggcatgcttaatnnnnnnnnnnnnnnncattcaaatttttttcttttactaatcgaagtacctaattttatacaatttgcacacttttaatgttagtaacagaaacaatgaaattattttacttcttgatacttaagagtttaactccaagacatgcaactacacccacataatagattttttgtcatcaatatgatggtcctggcatcttatatattaagttcacactttaaattaagtactacttgctaaaacgaaaacaggtaaaaacaatgaacagacggttcacgttaagaggaatacgaaaagccaataacaatactgacataacaatcttatttgtaatgaaagaaatacaaattttaaaaatgacataccattttttaattacattggcaaagattaaaccaaanagaatacctacaattgaccaaggggtattctggcagggggagggaagtcacatacatatagtactaattagaggggtaaattgtataattaaagccctatgaaccagtcaaaccaatcattccacttttagaaactttctcaaggacataattaagcatgtaactcaaaatgtacaaggacattcactctgccactgcttgtagtaataaactgcagataatcaaaatgtctaacacagaaaaaagtgagttaattatggtaaacctttcttatgggaaaggcagtgggcttccaattccattcttcacacctagcttagcttctttcttttcaacagagtctancttctaacagagaccaagaatgtcagacattgcctttctccggacgcgtggtcgacgatatcccgggattccggccgaccagcctgtaattagcagctta

SEQ ID NO: 319008 - DNA, 1304 bp, Homo Sapiens
  misc_feature (970)..(970): n is a, c, g, or t
  misc_feature (979)..(979): n is a, c, g, or t
  misc_feature (990)..(990): n is a, c, g, or t
  misc_feature (992)..(992): n is a, c, g, or t
  misc_feature (1050)..(1050): n is a, c, g, or t
cacctggctacagaccaggacgtggctgtgttctgttcctttcacaaaagctctctgggaccttcacttgcaattagtggttagggaaaagcctcaggcagaacacaaatagaaatttaatgatgtgttcaactccaccagaaattacctcgagtcagcattgacgatattggaggagctgccgtgctgctgatacggggtgtgctttatgctgctctttgcggtttgttgatcccctcctcccccactctcaatacctagagagtgaaacccagtacaatgagataaagactaaaaagagaaatcccttcctatatacagtgtgctacatttacaaaaaatttctccttaagaaaacagaatattcaaaaacaagcacttttccaggaagttagtgtggaagataaaggcacacatttatttataaatggatgttgctcctttgtatttttagcttccctatttgcttaaaagtacaggctccctaagagaggatggagagggagagactgaatcgttagtaggtctaaacatcaaagaaaacatttttattagttacttatggaaaatcatctattacaatgataaccttcaagtgacttccattatggctggacaggcggtgagctcagtggattgcagtggtgtgctggtgattttgcacagtgagctctgcggaaggggtcaggctcaactgctgatgtgtctcacacgtagcagacaaggggtgtctgactggcttcttttgcctcaagatggtgtatgtcgtaagtgatgcaatcagctgtctgctttttaaggttgggattgtgctgactttgggattaacatgagcttctttagcaaccaagcatgaacttgattaagaccagaagtttgggagatgagtcctggcattatgtctaggactaaagcagtggctttgtatagcaagctgagtaaaggttgacatattccaaaacccttcttnttaaaatgnaaaaggatggngngaaggatggaaagcctggacttaaacctttagaaaaaacttctggagagaaatccctnttaaacagttacttttgtcattgcctctggtcatttgtctaaataggaatggaaaattaaaagaaaagcaacaatccaatcttttttctaaaaattatgctggggtctcgactaaaactgaatttgaattggaaaattctggtgttggttggagttccatcttgcaagggataatacaaatcctatgatctctatgcccaatatgctgcctcaactctgagctgtctgcaaggcttagtaagtattgagtggtg

SEQ ID NO: 319009 - DNA, 1049 bp, Homo Sapiens
  misc_feature (5)..(5): n is a, c, g, or t
  misc_feature (9)..(9): n is a, c, g, or t
  misc_feature (14)..(14): n is a, c, g, or t
  misc_feature (19)..(20): n is a, c, g, or t
  misc_feature (56)..(56): n is a, c, g, or t
  misc_feature (70)..(70): n is a, c, g, or t
  misc_feature (665)..(665): n is a, c, g, or t
  misc_feature (1029)..(1029): n is a, c, g, or t
gcaanttgntgccnaatgnnctgctacaatctagggttttgcaaagttcccacagntcggccaccacaanaaacggtcgatctcccgtctgtgagagggttgtctggtcccaagaccttcatctccatcttctgctggttccgattatcagattctccctctactaggcgatctgggatctcagcttggtatttgcaaccaactctaatctcgccctgatcagcgagaagtgtcttctgcacggggtcaaacaccagtgagtaaaaaaagcagtcctccttttccaggtactggctcaagatatctgtctcattcaagagggtcacactgcatttcccccgtatgtgggtggctggtaatgattcaaattgccgagaaagaaaaagttcccggtgcttcagttgatggcgctgctgctcagacacccctggctgctttgattcctcttcaaactccctggcattactatcagccaggctgttgaggctactagaaatgtccctgcgccggaaaagacagacaactctttgcctccacatttccatttgcagtcttgttgagttctttaatccgtttaaccaggtaaggattgctggaagagttctcaaaatagacgtaatctcccacccggtacatgttggccgccatggccgttcccgccgccnctccggccgcacaaaggggtccgggaggctcgcgggggcagggctcggctcgaggcaaagccccgaacggtgggctggcgcttcgagggagtctcactggggcccgcgcagccggcacctccgctgcctcagccgtcgcggttcatcccggcccgcgctgtcgccgccgcagctatcgcctcactcccgggacgctgaggctggcccccgtccgctcggcttcttccggaacgagctcggctcctgccaggccagagccaggctccagctacccccgcccccgcggagtcccactagtcgttgggctctgccggccgcagggaaggcttgccgggcccgcctcagggttcgcctccttccgganacacttcggcatcccgggaa

SEQ ID NO: 319010 - DNA, 1217 bp, Homo Sapiens
  misc_feature (6)..(6): n is a, c, g, or t
  misc_feature (28)..(28): n is a, c, g, or t
  misc_feature (34)..(34): n is a, c, g, or t
  misc_feature (191)..(191): n is a, c, g, or t
  misc_feature (262)..(262): n is a, c, g, or t
attttntttagatacacggaaaagctanaaaatnttgaagtagcagaagaacagatggtttaactccatcaactgccttatatgaagccacatgctgcgttgcgtgccaatgcttttccctgcaaatgtgggatgggcagagcctctccatctactccctgcttgctccgcagctgtggccatcctctgtnctgccacctcctctctctgcctccaactcctctgtctccgcgcggcatagcacttcgtactccgcgcggcncccacaccaggtccaggtcatcttcaacctcctcgcctgataggtaactgcttgagggagctgttctgctccaggcggggcttggccctcttccttccctttttcatctgcgttgtcagctcagccaccgtgcccctgccacaccaggcccccggcgcccctttatctttcctccttttgtactccataatctgcttgttgagcgcctcatgatcgatcccacacagactggagcttgtggtcggctctgtggtgccgcagggttgtggggcatcagggtccctgaaatcattttgtacaaagttgtctctttcatcccggggtccaaagtctgcgactgccagtaactgatcaagctcagctagagctgcatttcccttgtcttgaacaaacactatcggtggcacattcctcagggtctgctgggacatcaaaaggtgcctcatgtgcgcggcacttctctgcaggacagcctccatgtgtgcgttctgctcagcagagagcgttgtcttccagtacgctcggcaggctgagaagtctggagtcagggaaaccttggagagctccacgttaaggtcatacagctcctgactcacttcaggggtacacagcaggtctgtcagtgccttatagaggaggccgttcagggccctcaggcgcgcatggtcttccttcctggttttctttgaggtgctcctcatgaggaattccaacttggatggtttgtaagtcgagtgagaacccaaggaaggactttcataccaaaccttttttttggttttcgaggcaaatttcttgagccagttcttgcaggagacagcagagcagtgaagtccccgctcgcagcctggaaatagcgcagcatcgcggctacggaacagggcccggagacccgcgcgggagcgccacagcccgcccgccgcagcccacatggcgcggcgccgggacccggagc

SEQ ID NO: 319011 - DNA, 1996 bp, Homo Sapiens
  misc_feature (1023)..(1023): n is a, c, g, or t
  misc_feature (1041)..(1041): n is a, c, g, or t
  misc_feature (1066)..(1066): n is a, c, g, or t
  misc_feature (1131)..(1131): n is a, c, g, or t
  misc_feature (1236)..(1246): n is a, c, g, or t
  misc_feature (1271)..(1271): n is a, c, g, or t
  misc_feature (1317)..(1567): n is a, c, g, or t
  misc_feature (1618)..(1619): n is a, c, g, or t
  misc_feature (1637)..(1637): n is a, c, g, or t
  misc_feature (1654)..(1654): n is a, c, g, or t
  misc_feature (1672)..(1672): n is a, c, g, or t
  misc_feature (1696)..(1696): n is a, c, g, or t
  misc_feature (1721)..(1721): n is a, c, g, or t
  misc_feature (1724)..(1724): n is a, c, g, or t
  misc_feature (1766)..(1766): n is a, c, g, or t
  misc_feature (1838)..(1838): n is a, c, g, or t
  misc_feature (1854)..(1854): n is a, c, g, or t
  misc_feature (1863)..(1863): n is a, c, g, or t
  misc_feature (1882)..(1882): n is a, c, g, or t
  misc_feature (1894)..(1894): n is a, c, g, or t
  misc_feature (1904)..(1904): n is a, c, g, or t
  misc_feature (1913)..(1913): n is a, c, g, or t
  misc_feature (1915)..(1915): n is a, c, g, or t
  misc_feature (1927)..(1927): n is a, c, g, or t
  misc_feature (1940)..(1940): n is a, c, g, or t
  misc_feature (1948)..(1948): n is a, c, g, or t
  misc_feature (1956)..(1956): n is a, c, g, or t
  misc_feature (1981)..(1981): n is a, c, g, or t
  misc_feature (1985)..(1985): n is a, c, g, or t
ctttccaaaactttatttagagaaactaaaatttcgtaattttcatattatacaaaatattattttgagccattaacaaaagggaatataaaaaccatagtttgtaggccatacaaaaataggcagcaggccagatttggcccatgggtggtagtttgctgacccctgctctagattaacaaatttacgggctttggaagctttgtggggcaaggaggcttgatatacaggttggtggtgcagaacaaagaggaaatttctaagtataatagaaaagagatgtaatgctgtccttcatgtatcaacgctggattcaactatgtgcaaaacattttatcatatgtcgctggaatcaaagatgcagaagtcacagtctctggtctcgaggagcatatacttctccatggtagcttagaaatggaaagtcttccttcaaagtacaatacatccttctcagactttgacaatgcacccgtgcgtgctcatctgtgaggcaggtagtttctttggcaactacagctgaggccaaacatgcattattatcttgaccacctgtgcttcttcccctccccagtaatcataccagtttttctcctggtctccaaattattctgttttgcattatcattttggggataatacttgggatgatatactaaaagtcaactggtcacatctttttaaaaattaccattttaattagtcttcagagataccctctctctcttaataggtaacatgcttgtgacgcctgtgtttttttgtttcgatccaggcagaaacttctccctaggaggcaggataaacggatctatctcaaggcaacaaagacacatcacaaaaacatttttttcagagcaaatgttaaatacttgatccaacagaacacaaataaagataaaatgtaatgctctattatatacttcagttggttataaagattgcggatttgaaaaaaatcagcagaaatccactatgtcaatgtcagagcatatgaagcatagaataaaagttaacacagcnaataataaattgtttgtnaatactaagtaactattaataaganacaataatagaatatactaatattgttttcatggacatccatctcttacgtgtttccttgtaaanagttgtactatttgtctttcaaagacaacacaataaaagtcagagtaaaaagcagtcctctcaatgtttagtatcatctcatcagcgaaatcccaaatcggattnnnnnnnnnnncagagactcaacagggggattgggntgggttaagacagtgaggtctgtggctgggcgcagtggctcccgtnnnnnnnnnnnnnnnnnnnnnnnnnnnnnnnnnnnnnnnnnnnnnnnnnnnnnnnnnnnnnnnnnnnnnnnnnnnnnnnnnnnnnnnnnnnnnnnnnnnnnnnnnnnnnnnnnnnnnnnnnnnnnnnnnnnnnnnnnnnnnnnnnnnnnnnnnnnnnnnnnnnnnnnnnnnnnnnnnnnnnnnnnnnnnnnnnnnnnnnnnnnnnnnnnnnnnnnnnnnnnnnnnnnnnnnnnnnnnnnnnnnnnnnnnnncaacaacaacaaaatagggtactgagagcttatgatgttgaagttcttaannagaaatacaacatgagcntgttggtacttggcganagtgaaaacaggcaaagnaattagcagatagagctcaagggnctgggaacgttatatttcctcgtcntcntcagattttccaattgcagtgtcagctattcagtattcagtnatacttttcaggttatcgtacagtgctatctggggtgcacaaacatctcagcatacatccctcttttcctangagttagctgtgttanctttgagcncttaggtttcctttttttncttttatctgtnacagctcacntgggacacncnatctcctttgcntctgttttttccntttttctntttggtcntgttttttgctctgcgggggcgganttcntgggcttagga

SEQ ID NO: 319012 - DNA, 1090 bp, Homo Sapiens
  misc_feature (13)..(13): n is a, c, g, or t
  misc_feature (49)..(49): n is a, c, g, or t
  misc_feature (107)..(107): n is a, c, g, or t
  misc_feature (149)..(149): n is a, c, g, or t
  misc_feature (1077)..(1077): n is a, c, g, or t
agaaggctctctnaggacccctaaaaggcaggcaggcagctgggacccnacatcccccagggaggaaacgacagttctttcaattcgacttggaccaaatcttggcntccctcggagccccttgccctttgaggctttcttgcctgggntggcgctggttggtgcccaggagctggttccctcagctcagtcaggtgttgctcagggtcctgagatgtggctgcggctgctgctgccgtcgtaactttaatggtttttttaaggttggcaacctcactctcaatctgctgcttcaggcccagctgctgcttcttgtgttgtttggcacggctcacctgctcctcaatgcctgacagcacgacttcacagcccacacaccattcctgcagggttcgggcaatggcactgaggtcctggcgctggatgtcccgcccgatgctgtagtcaacctcgagccgctggttgcgctggtccagggagccacgaagcacgtcagcatacacagcctcaatcacaaggtcttccagctgccgcacattacgcagggcaagagcctccagcaacactgcatatgggatacactttactttagcagccagggtgacaactgagaggtgtcgaagcttattcttctgagcctctgttagtggaggaagattccgggcttcagctaagtagtcagcgtatgtcccataagcaaacactgtgagcagccggaaggtagaggcaaagtcactctcagccagctctctaacattgggcatgtccagcagttctccaaacacgtagacaccaggggcctccagcacctgatggatgagtttggccagcgctgcccccttggccgacttggctaggagcagaaattgctcctggttctgccctgtcaccttcacttccgcactcatcactgcactgagtgtgggggacttgggctcaggatgtccagagctgcaaggaaagaggatgtgaagctagaggtccccgatggctggtcggatgggaagcacaaggctgagggactggatttaaaggcactaagtcggttctgcggtgaggaatcagaccctcgtccgnaattcgccaccca

SEQ ID NO: 319013 - DNA, 1504 bp, Homo Sapiens
  misc_feature (128)..(353): n is a, c, g, or t
  misc_feature (411)..(714): n is a, c, g, or t
ttttatatgtgttttgaggtaagagaggaatgaagtgaaatgaaggttaggaggtaaagtgtgggtgatagataaaagagattagggtggtggggggagggaaagatgtagatgtggagagtgtgttnnnnnnnnnnnnnnnnnnnnnnnnnnnnnnnnnnnnnnnnnnnnnnnnnnnnnnnnnnnnnnnnnnnnnnnnnnnnnnnnnnnnnnnnnnnnnnnnnnnnnnnnnnnnnnnnnnnnnnnnnnnnnnnnnnnnnnnnnnnnnnnnnnnnnnnnnnnnnnnnnnnnnnnnnnnnnnnnnnnnnnnnnnnnnnnnnnnnnnnnnnnnnnnnnnnnnnnnnnnnnnnnnncaaaaggaaggggtttagtaaccgtctcggggggccgctgggggccctacatgatttnnnnnnnnnnnnnnnnnnnnnnnnnnnnnnnnnnnnnnnnnnnnnnnnnnnnnnnnnnnnnnnnnnnnnnnnnnnnnnnnnnnnnnnnnnnnnnnnnnnnnnnnnnnnnnnnnnnnnnnnnnnnnnnnnnnnnnnnnnnnnnnnnnnnnnnnnnnnnnnnnnnnnnnnnnnnnnnnnnnnnnnnnnnnnnnnnnnnnnnnnnnnnnnnnnnnnnnnnnnnnnnnnnnnnnnnnnnnnnnnnnnnnnnnnnnnnnnnnnnnnnnnnnnnnnnnnnnnnnnnnnnnnnnnnnnnnnnnnnnnnnnnacgggcctagacatcttgacaagacataaaggtccaccctgaacctaaatgtgtctgagcagtcagtgttgtactgtggctactacttcacttttgtatcattctatcttattagcaagctacatttctaggttaacagttctaccaaatatgaatatgaaagtttatttttaatgagacaatgttgcaaaattatggtcaaccaacatcttttcaccaaatacttcaagcataaaaaatgagaatctttacaaaaatatacagagacaccacaaattggtagctgcccataacattaaacaaactggactcttaagagtggcttctcaacagcatatcattttaattataaccattgcctggtacagggaaaactaacaagtgttttttaagcatcattgcaacattgtattcctgataatttaagtaaaccaaactatgagtaaatgaatgatacatgcctaaaaatgaccatggtttatactatcagtggccactggacttaggactagtccaagaccttgatctagattttgacctagacctagactgtgatcttgactgagatttggatctaggtggttcttttttccttgattccttttcatatcttgagccagacttataatgtgttttggaatctgttttagaggtgcctctagttttggtgtgagatgcagacctagaacgtgatttagccttcatttctttcttgggctgggacttggaccgtgatcttgaattggatttagatcttgaaaaagatcgatttcggtgtttgaatctttca

SEQ ID NO: 319014 - DNA, 1766 bp, Homo Sapiens
  misc_feature (329)..(329): n is a, c, g, or t
  misc_feature (434)..(434): n is a, c, g, or t
  misc_feature (486)..(486): n is a, c, g, or t
  misc_feature (546)..(546): n is a, c, g, or t
ttttccaccggtcactttaaccagaaaccgttgtgttattttcaaaagccgcctctccgggggcattggagggaagccccgggtggatttgggcacccaaggcccacttccaatcccaaggttttggcaaagccccacccatttggatttttcctgaatacatggtgaggcccccctgatggtaaattcagtcagagggccagggtttggaataataatgggaatcaaagatgctcgccttcctttcatccttcttacaagacctcattcctctcaggggaacatttcaggcagaagaaatatccaagaactttcctccagctagcgcnaaaatccagttgccagagaaagtgcctgccggccaggatgccaaaggccaggaccagggtagcagcagcaggcagaaaggaagtttgaaaaaaagagcttgttgnatgctcatcccagcgttgagcaggatgacaaagtctcctagctcatgtgganactcctcacagaggatggccaccgaggtgctgatgccttggaaaactgacacagtgaagnaagcaccgatggccaggccatcgatgaaattatggaggccgtcgctcagagtgatcatccaggccagagtgccgatatcagagtagcggacacctttcagccagtagcaagcactctgggaagcctgcaggtcctgcacagagagcgagcccacaatgaccttctcgtccaccatgggcgccttgccgtccagctcactgctgcagtgctgaggaatcatgtggtccaggtccccgttctgcagcttctccatcaccccctcctcctggtccttcttggagggaagcgactcagaggcataatggctgtgtccatgatgatgctcatttttctgcttaagaagaatcttcaagatcttctctgtgaaaaagaaaagataaaagcccccaaacaccactgcagacttggagacataataatcttccagagggttgaaaccaaatgcctctgggatgagctggaatagggcgttggagtagcagggttccaatggccagggctatgaagtaagtgcagcagcctgttgtaaaaggttttctttgtgcagggcaggacgctggctcccaggagggaggcgaggttgatgagtgtgacactgaggagaccgtatccccacacttcaacagcgcttggccgcccctcctccgtctgctcattctcctcgttttcctggttctccgaggtgcaggcccgggaatccagctgctggaggatggtggggcagaactcctggagctcgctgctcccaatccgcgactgctcgctgaaattgtgggcagtgaagaggtctccagaactaaagcacgtggagaggttcctgtgtccttgcacgtgctgggtgacattaccccggcccactcccacatccaggtggttgagtagggccttcagctgctgcagagtgaggctgtcaccctcgccataccgatgtattagatcctgcaggaaggaggcagcgctgatagctggtgcacccagggatgaagcgtgagcctcaggggtggttctccataagccaagcagggtcagcaggaggcagctctggaaggccgggtgcagcagcagcagcttcatggtgactgaataaacctggcgctcggaggcggcctcggccccgcgcagcctcaccgcaaggtcccaggcggccggcggcggcagaagcagcttagccggtgcgtccgcgtagacacgcgcgccgacccccctcactgcgatcccgg

SEQ ID NO: 319015 - DNA, 1734 bp, Homo Sapiens
  misc_feature (1608)..(1608): n is a, c, g, or t
catacacagaaagcctcgatagctcagtgtctgccacagagctgagagaaacagatgtctactcccattttacaaacagaggtagaggaagtgccttgcctgaggccagggttgaattctgccttcacccattttgtcagcaacacactggtggagaagagagctctggtgggcactgttctctcaggcaggctcagaagtgggcgggagcatagatacagctcccacagggctgtttctgccacagacatggacgtctcgctgcctaatgaagttctatgctgtggtggccacctcacctgcatcttgggagagccacaagattgcagagaggatagaacagaggatcctgaactccaaccctgtcatggaagcttttggtgagcttgggctcctttgcacagtatctcagtcccatttcctctgggattttccaccttccagggagagggacagtgctttgagaccctctcttgggtgggggtggaggatgagtgtatccttcactgcctcagatccccaacctctccctggtactccttagcatcattctaacagaggtcatgtcattcagtcctcttcctcgctccagcctaggcacacataacagtcgtgctggagaagacctggtggcttagctcgtccaaattctgtctttctatccagtttcctgatggttcaatgaagggtacttgttaagggatacaaggtgattagtgtttgtgttggcactggaacccagatgtgccttcctgtctaaagtcagtagtgacagctgattgtttttgacctttcccttcaaagaaaggtccctgactgcctaggcttgctcattccaatttcttgccaggaatttcttctaactcccctgaatcccacttgctaaagcatgagggcccattttctagtcctgtcccctatgacatgaaaaccaacaaaggggcctttaggtgacttgagcacgggaacatgacctccagagacctgcagccaccttggcttatgaggactctgcaaacccaggggagtgaaataaacataggtgtgatctgtagggaatgcgtgtacactgaggaataacaacagcagtcgctttgggaagttcatccagctccagctgaacaggtaatagctgctgttgccctggctagtgggaggatgggactggggaggttgaaagtggctggggcagtatctggcctgggccacccctatgggcaaaaaccctgctcctcctggtgcatgccctttacctcaggtgtgagctctgagggtgatctttgcacctggagaactatagctcctctccccttgggaaccctggggcagtgcgcttattcaggcctggggtcctcctggcttttactcttgctcagggacttcaagctaaattgccacctctttggaccatatccctgagcttgaggctgagacttcgacttctgtctttgggtagagcaaaatgatgtgcaaaggcccttggcctggccacctgagctagatgcagggaaatatttcaggacccccaaggacattttggagtgggccccccacctcaatgcccattgtctaaatgggaaaaccttggcgggggagttgccacgttanacggcaaatttgtcacaccccaaattgccagaaatggctttggaatgaaggggcaactacgggtctttgcctgtggtggctcaagggcttaaaaaagacgtggagccccgatcccaacctatctcc

SEQ ID NO: 319016 - DNA, 958 bp, Homo Sapiens
ggttgggcaccacggaagaagcagttccctcaggaaggggcccaggggaccttttggtcctcggggggtgctttgcaaattgattagaagaagtggaagttcctctcccgtggaagcttgcaggcccctcgagttttttctgggaggtgggtgtgggctgcggctccagtcatttgctgagccctgttcagctggagctggatggagttcccaaagggactgctgttgttattcctcagtgtacacgcattcccaaaagcttccatgacagggttggagttcaggatcctctgttctatcctctctgcaatcttgtggctctcccaagatgcaggtgaggtggccaccacagcatagaacttcattaggcagcgagacgtccatgtctttccagcaccactctctccactgacaacaatagactggttgactggttcaatcaggctcttgacattcctgtaggtctgttcacccacagtgaacacatggggcttcagtttctggggctgaggcgcagcatggtactctctcattagctcgggcgagtagagctgaggaacaggcttgaaggggttcaaggctaccagggtgcagccagcattggtgtagaatgtgtctgccatgtaccgggcctgcaggcacctcaggactgtctctagtgtcacaggattcaccctggtgaggtcatccagtttgtacagcaggacctccccacccaggaactcctgcaggtcttctctgaggtactccctggcttggccatcagaccccggattgtggccattgacctgctggagcatcctccttcaaagtggtcagccagggttctgggttgcaggaggtacaaggagtactatccacctagtcatgggaccatgggctggggtatggttccaacaaagggctcagttctggaggaatctcagacaagcctcgtgccgaattcgccacccaggcc

SEQ ID NO: 319017 - DNA, 1403 bp, Homo Sapiens
  misc_feature (35)..(35): n is a, c, g, or t
  misc_feature (97)..(97): n is a, c, g, or t
  misc_feature (307)..(307): n is a, c, g, or t
  misc_feature (314)..(314): n is a, c, g, or t
  misc_feature (334)..(334): n is a, c, g, or t
  misc_feature (464)..(464): n is a, c, g, or t
  misc_feature (598)..(598): n is a, c, g, or t
  misc_feature (630)..(630): n is a, c, g, or t
ctcggcgcccgcgcctcgggccgtcgggagcgganctcctcgggaccaggacttcagggccacaggtgctgccaagatgctccagggcacctgctcngtgctcctgctctggggaatcctgggggccatccaggcccagcagcaggaggtcatctcgccggacactaccgagagaaacaacaactgcccagagaagaccgactgccccatccacgtgtacttcgtgctggacacctcggagagcgtcaccatgcagtcccccacggacatcctgctcttccacatgaagcagttcgtgccgcagttnatcagcnagctgcagaacgagttctanctggaccaggtggcgctgagctggcgctacggcggcctgcacttctctgaccaggtggaggtgttcagcccaccgggcagcgaccgggcctccttcatcaagaacctgcagggcatcagctccttccgcngcggcaccttcaccgactgcgcgctggccaacatgacggagcagatccggcaggaccgcagcaagggcaccgtccacttcgccgtggtcatcaccgacggccacgtcaccgggcagcccctgcgggggcatcangctgccggccgcgcgggcccgcgcggcgggcntccggctcttcgccgtggctccccaaccagaacctgacggagcagggcctgcgggacatcgccagcacgccgcacgagctctaccggcccgactacgccaccctgctgcccgactccaccgagatcgaccaggacaccatcaaccgcatcatcaaggtcatgacacacgaagcctacggagagtgctacaaggtgagctgcctggaaattcctgggccctctggccccaagggctaccgtggacagaagggtgccaagggcaacatgggtgagccgggagagcctggccagaagggaagacagggagacccgggcatcgaaggccccattggattcccaggacccaagggcgttcctggcttcaaaggagagaagggtgaatttggagccgacggtcgcaagggggcccctggcctggctggcaagaacgggaccgatggacagaagggcaagctggggcgcatcggacctcctggctgcaagggagaccctggaaaccggggccccgtcggttacccgggggaagcagggagtccagggcagcgaggagaccaaggcggcaaggtggaccctgaccgaccaggacgcagagggccctcgggagaaatcgtggccaagggtagcatggggtatcaagacaacaatggagccccaggtagtcctggtgtgaaaggagccaagggtcgaacctggaccccgcggatcccaaaggcgagccggagcgcagggttagaccccgttgccaagatcagtccagacagtgttggtcccca

SEQ ID NO: 319018 - DNA, 1686 bp, Homo Sapiens
  misc_feature (319)..(337): n is a, c, g, or t
  misc_feature (340)..(343): n is a, c, g, or t
  misc_feature (346)..(347): n is a, c, g, or t
  misc_feature (405)..(405): n is a, c, g, or t
  misc_feature (409)..(409): n is a, c, g, or t
  misc_feature (411)..(411): n is a, c, g, or t
  misc_feature (414)..(414): n is a, c, g, or t
  misc_feature (418)..(419): n is a, c, g, or t
  misc_feature (423)..(423): n is a, c, g, or t
  misc_feature (426)..(426): n is a, c, g, or t
  misc_feature (442)..(443): n is a, c, g, or t
  misc_feature (445)..(450): n is a, c, g, or t
  misc_feature (452)..(452): n is a, c, g, or t
  misc_feature (454)..(458): n is a, c, g, or t
  misc_feature (463)..(463): n is a, c, g, or t
  misc_feature (465)..(466): n is a, c, g, or t
  misc_feature (468)..(468): n is a, c, g, or t
  misc_feature (471)..(473): n is a, c, g, or t
  misc_feature (480)..(482): n is a, c, g, or t
  misc_feature (484)..(484): n is a, c, g, or t
  misc_feature (486)..(486): n is a, c, g, or t
  misc_feature (489)..(499): n is a, c, g, or t
  misc_feature (503)..(506): n is a, c, g, or t
  misc_feature (510)..(513): n is a, c, g, or t
  misc_feature (516)..(517): n is a, c, g, or t
  misc_feature (524)..(524): n is a, c, g, or t
  misc_feature (536)..(537): n is a, c, g, or t
  misc_feature (539)..(540): n is a, c, g, or t
  misc_feature (543)..(543): n is a, c, g, or t
  misc_feature (644)..(644): n is a, c, g, or t
  misc_feature (1666)..(1666): n is a, c, g, or t
  misc_feature (1671)..(1671): n is a, c, g, or t
gttaagatttctttatttacagtacaagtctccaaaagttcaaggcagttatcttttaaataacatgtcaatcatataaaatagctagaaccaaagtagagaaatatatacaatacattaagtactttcaatatagtggcatttttcatattaaattaaaagagggtactatgatttacaatgtcatttcccgtagtttaaaattcaacatgtcaaaacgacataatgtacattttttacaaaactgacacagcagtattaaaactgctaatgattgtagtttttattttttctataatacactgcacctgtgttaccnnnnnnnnnnnnnnnnnnncannnnggnngggctagagggtttgaatactgcataagtcagtatattaacacttgggggataagggngggngnggngggnnttanggngggggtcattcacaanngnnnnnncncnnnnngcgcngnnanggnnnagggggnnngngntgnnnnnnnnnnnttannnngggnnnnggnnaaggggnaaaatgtcatgnngnnggngaccacaatgccatcacaaaagctgatatcgatataaccctactatttacaatacctaataagagccaaagctagaaaatcactcactgctaaatcatggnaaaatattatagtttgtaggaaattttgaatatctataaaatattcaatagactacaaaagagcttgcaacagcttgttctcattatttttcttaggtcagaattagaaaaaagtaaatcctattttttaataagttttgatggcatcaaaaagcttcacatttataaataagatttttatacaaagcaacatgttactgacatagttttctcttgctactatcaattattctcgggactcatgttgtatgttaaggaaggaagtattaagatttcttcctcattcctaaattttcagaatatactctaggccttgaaggaaagggaaacagtcattcaatacttaacactgagtagtacaatatttgaaatatatctatgatagtggcctaaacaagagcagcaagggaccagacatatagttttaccactcaatagaaataaattgtatatttccccttcattaatactgtccaattttaaaatgagagattacctttgcaaggcagcaactattgtttcagaatgtattatattgaaaatttttgccacaaagttacctactagactacagtactttaaaacacagttgttcaagtcatgggcaaggaaaacaaaatcaacaggacagattattgtcagaagccattcctgtggagcattcctgctatgcacatagaattgaaactaaaaacaaagaaacaacctaattgcacctagggggagacaccttgtacttcaagtgctcatgactaggggagtacaggaaacagacaggaataataaccttaagtatcctcacagaaaaaatgaacagagacaaaacagtgttggcattttaaatcagatacaaaatccattgttcctagacacaaaataagttaataatgttccacatttatttttttacctctgtacagctcctttaatagtctttgatttcaaaactaaaatcctcagtgttttgtgtatcttcaaaaggcacatacacgtttttaaaggggccaagtggaactatgcantacantagctaataagcctt

SEQ ID NO: 319019 - DNA, 2002 bp, Homo Sapiens
ttgacagtgcagagggtgaccaagcctgggaaggccccaggggtccaacaccaaaattaaaggtttattatacacaagaggacgttctgtccctcagagtgggacgtccactatcaggaagcctgcagccactatgtgtcgccggaccagaacaaagcgacctagcaagtccttgcttcggctgttgaagttggggaactcccaccgcaagaacgctagcctcttagaccctggaggtggtgactggctcccagttggctgggcaaggtgaggtgccacaaagtcccttacgggcagaaactcgccgtcactgtccagcagcacctcagcatctcgaggctgcccttgtcggcgctccccagcagccccttcagcgtctcctgcagctccttttgcaggggggtcaccttcctgtcaagggctgagggcccaggggccacagccgaggcaggcagaaggggacccgagtactcggggtactccagcagggcagtggcgttgatgtggagcagcttctggaaggtgttctgatccttctgagacttgccccctagaaattggatgtgaaattcagggtggaggacggcttgcagctctgcttcccgtgcctgctgcagcacacacagggcccacaccaggtccacttgcagggctggctccaggcctggcagctctgaccccagcttctcatgtaccaggctgaagaactgatcctcttggtctggatggaagttcagacgcgcaaaagccagaagtacgctgcacaggtggggcagggtgatgtcctgcgctctgttcaggacgtgctgggcaaaggcctcaaacaggggcaggctgagccacttgagtaaggcgaaggacttggcacagtgggccacctcaccagaagtcaggctgggcatgagggatagcaggtcggtggccaggcgctgggacacctgggtctggtgaaagctgagtttgccataggcataggccacgtccaagagcacatctttcgtcagagagaagggcttctgcaccaggtggtaggagatggcccgcagcaagggcacggaccgccggctctgagctgccagcatcaccagcaccttccgcagctcattggggccaaagtgctccaccaactccaggcacttgtcttccaggcggttcattagtggctccgagaggtgtcccaccttcatcatgacggtcactaatgtgtgggaatcttcaatttctgtccaacgcctttccaggtgtgtgagcagctcagccagcagctcctgcgagtgctgctcctgtgagagggtggcacaggactctgccaggaaggccaggtgcttgtacttgagcttccgcatgcgccagcggacctcctgctccaccgactgcagctccttggaggccttggggatgcccagagcatacaggcttcccagcagcttcgagagggtaccatgccagaccgaggcaatctgactgttgagcagacagagaagttgatgaaagtgggcatcctgtatgagcaagcctttatcttctggcttctcagacagcaagtgagagagccggataagtaccattgctgcttgattgctgtccaagtcgtgactgccaccaagtagctccaggagctcctctggccttgtggccttcttgatgaggtggtccacctgcttctctatgtagggagtagatgctcgttccttctccaccggctccatcaaggaacctgggaggtgggaaatgggtgaggtggctgaggaagtcagagtcttatgggctacccaggcaagtctcagtcggccaactggagccatggcaggggcctgacgagcagcttctctcaggaggcacgtgcatcgctttaccaggtgagctgccatgatgtcctgggtggcagagagacaagactcctagcaagtgattccaaaccgcagcgagcaccaccgctgacctccatccgccgccctaactgtccccggaaccatgaggtgcgcggcgcgcttccctacgt

SEQ ID NO: 319020 - DNA, 977 bp, Homo Sapiens
taggaggatggcccgcagccaagggcccccggaccgcccgggtttttggagttgccagcattcacccagcccccttttcggcagtttcatggggccaaaggtgctccccccaacttccagggcacttgtcttccaggcggttcattagtggctccgagaggtgtccccacctttcatccatgacggtcactaatgtgtgggaatcttcaatttctgtccaacgcctttcccaggtgtgtgagcagctcagccagcagctcctgcgagtgctgctcctgtgagagggtggcacaggactctgccaggaaggccaggtgcttgtacttgagcttccgcatgcgccagcggacctcctgctccaccgactgcagctccttggaggccttggggatgcccagagcatacaggcttcccagcagcttcgagagggtaccatgccagaccgaggcaatctgactgttgagcagacagagaagttgatgaaagtgggcatcctgtatgagcaagcctttatcttctggcttctcagacagcaagtgagagagccggataagtaccattgctgcttgattgctgtccaagtcgtgactgccaccaagtagctccaggagctcctctggccttgtggccttcttgatgaggtggtccacctgcttctctatgtagggagtagatgctcgttccttctccaccggctccatcaaggaacctgggaggtgggaaatgggtgaggtggctgaggaagtcagagtcttatgggctacccaggcaagtctcagtcggccaactggagccatggcaggggcctgacgagcagcttctctcaggaggcacgtgcatcgctttaccaggtgagctgccatgatgtcctgggtggcagagagacaagactcctagcaagtgattccaaaccgcagcgagcaccaccgctgacctccatccgcctcgtgccgaattcgccacccaggcctcgctcc

SEQ ID NO: 319021 - DNA, 336 bp, Homo Sapiens
  misc_feature (14)..(14): n is a, c, g, or t
  misc_feature (32)..(32): n is a, c, g, or t
  misc_feature (310)..(310): n is a, c, g, or t
ttcctgataagtgnacgtccccattctatgantggctggaactcaagtctgaatggcagaaaggcgcctacctcaaggacaagattgccaaaacggtggctgaggagctggccaagtgacttgtgccagcagcatggactgcgtgcctcttcgccggaggtctagctgtgggcggccaagaagggtcacccttgaggacaaacctctgtgcaggaccttggccagagtggggaggtggccagccactctgagggacagaacgtcctcttgtgtataataaacctttaattttggtgttggacccctgggncttcccaggcttggtcaccctctgca

SEQ ID NO: 319022 - DNA, 971 bp, Homo Sapiens
cctcccaaatctccaacttggagtggatggtgttccttaaaaattgcccacagggcaaggggggccctaaaccccttcccacttttcccaggaaatgccagagtgttccagtccaaatcaggaccacaactgccctcctttaagagtaaattccttctctttcagatttgttgaaccttccctcctggccgggcgcttgcttttttggagagcgcagcccctgacttccctcttggggccacaacttcaacaggctctgccttcacctctgccccccaaggggacaagatgtgcgctaagaacaactcctgaaggctcttggtggaggcggagacgtcctggaggaagtcctcagacacaactcggatgttggcttcctttacttcctccatcttcttattcatcttttccacctcctttttggtgctgatgcacagggaagccttgttggccgtccccgtcaacttccccccgagtttctcaatcatggccttcacttcatccttgttccgggacagcttcccgagagtcaggatcttcatgttggataatggcttatctgctgaagcagaggagttcacagcagcaggagccgaggctgtggagggcggaggcgtggccgccacggaggcgctggtttctggggggaatatacggtcctgttttttaaccttcaatttcttgaggtaagagatttctcggaattcctttggggttacccactccttccggttgggtgtctgtgtcttgaccatacacttggtccaggcagtgacgtccccagtgcagtaataggcatcgctcttgaagaccagctgacccgagcattcctcgcagggaaggagggcaccgaacaccatgccatcggctactcggtccaagatcgccgactccccagaaggcacttgctgcttgttgaagatgagtagctccttcaggtcattagttaacacactttcttagcgtcgtcc

SEQ ID NO: 319023 - DNA, 1494 bp, Homo Sapiens
  misc_feature (241)..(241): n is a, c, g, or t
  misc_feature (962)..(962): n is a, c, g, or t
  misc_feature (974)..(974): n is a, c, g, or t
  misc_feature (1356)..(1356): n is a, c, g, or t
cttcggaggctcaaaaacacattttccaaaggtgggaaggctcatgcttcaagcaggataagcttaaaccaaaagcgggtccaggaacattccccagcaagccatctgcctttttgccaatttctcctttccagctcggcctgttgccccagtcagggggaggtcccccttctctaggcacaccactttctgccagggactcctcacgggctccacagcaccaccttcccttgcaaactgntgcaggaaaagtagcagatgatctcctgtctgcacaaagcgcggtagcccactgagtcatccttcttcaagaacacctggatatacagccgctcaggccgagtgccgctctgtcccaggctaaatgttatcgtggtgtccagcagccgccgacctgtctccacgaggtataggttaatggtgtaggtctgattgaagcaagccagagagtcctttgaactagacttctccgaaaagctccccattgacccatcttcagacctgctacttttctgcacttcattccgacaggccatgactgcagccaccgtcttctccccagtggtggcaaagctcactagggcagtctgtgggaagtttttaagcaaactcagcgttccataatggtactgcagcagagcatagtggcttggggacaagtgcaggaagaactgggcccgggaagcgtccactgggttgggctgggtaggcaggacccggggttggaatccacttccaaattctaagtcgagagactgcagtgggatctgtctcaactcccattccgtctccagagccaaagtttggagggaacgtgagctcgggtcaggacacaccaggacagcttcatccaccacaccacaggctccagacaggtgctgcagccacggagtttaaaccctaacctgctgaacaatctctccatcttccacattaaacttgacaatgttcacatggctgangggaacaactcngagggcccacaccaccccagagccgtaagaatacaccatctggtagtggatgctgtcactttctgggagatgttccacccacttgaggtgcccactggagaggtgatggagggcaagtgtagtcttcttcaggactgcgatgtaccttacagactcctgcaggccaaccagcccaagtgcctggaaactgccactgtccagggttatctcccagttcaggcccccgatgttagtctcccaggaacgcatgattcggcctccattggacacagtgatcacatcctgtccgtgcagcagcatggcatccacagccccttctgccgtgcccttgtcaacatggcgccacaagatctccccagttcgggaatttaatgctgcaatnacattcttctctgtggctacaaccaacttcttggatccaggggaaaattccaaggaggcaaacttgaccttcccaacatattgctgtctccaatcaaacttgcccacttggtcttcgtagaccgcggatcccgggaat

SEQ ID NO: 319024 - DNA, 2897 bp, Homo Sapiens
  misc_feature (92)..(100): n is a, c, g, or t
  misc_feature (569)..(606): n is a, c, g, or t
  misc_feature (1991)..(1991): n is a, c, g, or t
  misc_feature (2503)..(2503): n is a, c, g, or t
  misc_feature (2511)..(2511): n is a, c, g, or t
  misc_feature (2514)..(2514): n is a, c, g, or t
  misc_feature (2530)..(2530): n is a, c, g, or t
  misc_feature (2535)..(2535): n is a, c, g, or t
  misc_feature (2538)..(2539): n is a, c, g, or t
  misc_feature (2564)..(2564): n is a, c, g, or t
  misc_feature (2571)..(2571): n is a, c, g, or t
  misc_feature (2581)..(2582): n is a, c, g, or t
ccttttccccctatattggggggccccgcggggggccccaaaaggaaatgtgttttttggaaaaggtttcttcgcaggggggccgagggcgnnnnnnnnnagagttttttcttttctcttccgtagctgtcttttgacctcttagaaagctatttaaataaatatcatccaaaaaccaaaaatggaaaagaaacaagaaaccctccgagcacaaccaccttaggccaactgaatgtaatctagtttattcaaccaaaaattgagagagaaggaaaatattgaaacaaacaaacgaaagaaagcagttcttaagactagcagtaaataaatttatacaacagttcggtctgtataatatgatgaaataaatctacatcttttcttattttggtgctttgaattatacatacaaacaacaattacagggacttgttcacaaagcatgtaggcctagaaaaaggctctctgaaaccctcaatggcaactggtgaacggtaacactgattgcccagaactggtatttcctttgcagaggccaacagctttgaacaaatgattcgcctacaacnnnnnnnnnnnnnnnnnnnnnnnnnnnnnnnnnnnnnngatgtgctttgaatgcatcaaacaactgtggccagtgaaaggaaacaaaactggcagtttgtccatttgaatatcagacctagtttcttcttaatttccacactatttctcccatattccttaaacttcttggcatccttcatgccttacagctacccagatgcaataaagtcattgtacagtatttcttacaatataagttatatgcaatgttcagcatttttttttttcacagcactagagaccctgttaaataggggatatgagtcagaatggcttattcacagatggggtccagattcagtggttggaacacagacaccacagtgagctcctttgcaaagtggcaaacataattttgctttctgccttcaaaaacatatatccatcgcgtttaggcttcatgatactgctcctgcaaaaatgcaagtcgaaagggactgcagggactctcgctgggggccctgtgagcatcgagcagggctctaacccatggcggtgaccatgctggaggggtggtgtggtccaaaggacaggctggatggcgggtgcatcggcgtgggcgtggtcagcatgtggctggagtggctgaggagggcgagatgtggctcagggaggacatgtgtctggagagggcggccgggttaaacgagctggttcttggggaagtcctccagtgagtcatgcacttttttgcactttttggatttgctagacatttttcggtttctggtctggatgccttccttcttcatagtcaggggtctgttaatattgtgaagcttgtagtagagcccacaggcattgcagacagggtccccattggcattcctcctccagagtgtggttgtggtggtctgacagttcgcacaggacgtccctgctctcctggctgcagacagccttcgcttgggcttaatgaggggccggttctgtccgttcattttgtgatagagcccgcaggcgttgcacaggtagtgtcccgtgccatctcgccgccacagtggggtcgaggttgccccacagttcacacactccctgccttctgtgctggaccgggccttgggcctggacttgcatccgaagccggtgggggagccgcccagcaggctgctgggggggaagagtccggagctgtactcgggcacgtagggcgggtaggtggtgatggggtggtgggtcgacgaggaggctccacccagggcggtcatgctgccacgggagtgggacgactccagcttcatgctgtcgggcaggggcacctggtacttgaggcactctttctcgtcctgccgggccgagccggccgagcctggggtggacagcgatgggtccggggagacgtccttcggcggggtgggcgggaagggttaagaggtgcgggntggcgtggccccccgacaaggaggaggacgaggccggggggtagacggagaggggccccggggagccgtggtggatggacgtcttggagaaggggctgagattccagggggaggcggtgtggtggctgcccagggctttgccgccgtccagccagggtagggatccatgaagcagaggcgggcggcacacctggctcccgtggtgggtcggagggtacctctgcaccgtggccctgaccgagtttccgtagtagggcgggacgtggttgccttgaccgtcgatgttaaaaagcacatccacctcctccggcagcgggtactgcgccgcgtccatgtaggagtggctgaggcccgggtggtgcgtgtccgggtgctgcccgttgagcacggcggggtggtggtggctcaccagcgcggctggtccgccgtcacctccatggcctcggctgtgctcgcgccctctcgccgggcccggaacccgcgcgcggggagggagggcggtccgcttgggnggtcgggnttntcctgccgtcggaggntcggntcnngttgaatgatttgctttcggtgggnttttggnttggctgggnngcaaaggtgagcaaaggagaaggttttttaaaaattatcttggaggggtcgtttagcaaagagaagaaggggaagacaaaaatccaaaaactgggtatggcagaataaaacgggaccaggttgtaaaaaggggcgacgactctgcaattctgcgagccaggctcctctgcaccggggtcctcagccgctcggaggcggagtccctcctcgggtcactccggctcccggcgtttctcccacagtcaaggaaaccagccctcggtctgcaccgaccccaaccccgacctctggtcgggactccacggcgaccttccc

SEQ ID NO: 319025 - DNA, 1721 bp, Homo Sapiens
  misc_feature (488)..(488): n is a, c, g, or t
  misc_feature (509)..(509): n is a, c, g, or t
  misc_feature (521)..(521): n is a, c, g, or t
  misc_feature (844)..(844): n is a, c, g, or t
  misc_feature (1570)..(1570): n is a, c, g, or t
ccgggatgtggcgttctgtgaagagttcggtgctaacctccctcacgcggcggtggctgccgggaccctagcaggtttcagctggagcggcggcggcggcaacatggcagagaccgcggccggagtgggccgcttcaagaccaactatgctgtggagcgcaaaattgagcctttctacaagggcggaaaagcacagctggaccatactggccagcacctcttctgcgtctgtggcaccagagtcaacattctggaagtggcctcgggggccgtgctgcggagtctggagcaggaggaccaaggaggacatcactgcctttgacctcatccctgacaacgaggtgctggtgacagccagtcgggcattgctgctggctcagtggtgcctggtcaagagggcagcgttacccgcctgtggaaggcgatacacacggcccccgtggccaccatggccttcgaccccacctccactctgctagccacaggtngctgtgatggggccgtgcgcntcttttacatcntgcggcactacgggacacaccacttccgaggctcgcccggtgtcgtgcacctagtggccttccacccggaccctacacgcctgctgctcttctcctcggccacggatgccgccatccgcgtgtggtcactgcaggaccggtcatgcctggctgtgctgactgcccactacagcgccgtcacctcactggccttcagcgccgacggccacaccatgctcagctccggccgtgacaagatatgtatcatctgggaccttcagagctgccaggccacgaggaccgtgcctgtgtttgagagcgtggaggctgctgtgctgttgcanaggagcagtgtcccagctgggtgtgaagtccccagggctgtactttctgacagctggcgaccaaggcactctgcgcgtgtgggaggcagcttctgggcagtgtgtgtacacgcaggcccagccgccgggccctgggcaggagctgacccacggcaccctggcacacaccgccggcgtggtcctcaccgccaccgccgaccacaacctgttgctctacgaggctcgctccctgcggctgcagaaacagttcgctggctacagtgaggaggttttggatgtccggtttcttgggcccgaggactcccacattgtcgtggcctccaatagcccctgcctaaaagtgtttgagctgcagacgtcagcctgccagatcctccacggccacacggatatcgtcctggccctggatgtgttccggaaggggtggctctttgccagctgtgccaaggatcagagcgtccgtatctggagaatgaacaaggctggccaggtgatgtgcgtggctcagggttccggtcacacacacagtgtgggcaccgtctgctgctctaggctgaaggagtccttcctggtgacaggcagccaggactgcactgtgaagctgtggcctcttcccaagccttgctgtccaagaacacagtcccagacaacggtcctatcctcctgcaggcccagaccactcagcgctgtcatgataaggacatcaaccagcgtgggtatttgccnccaacgacaagctgctggtcacaggcttacaggaccgaacggtccagctttgggccctgccacatgcccgctgctgggtgtcttttcagccaacggggtggcctttggggcggacagtttttttccatggaccaggtgttgggcccggtct

SEQ ID NO: 319026 - DNA, 2676 bp, Homo Sapiens
  misc_feature (25)..(26): n is a, c, g, or t
  misc_feature (30)..(30): n is a, c, g, or t
  misc_feature (38)..(39): n is a, c, g, or t
  misc_feature (45)..(45): n is a, c, g, or t
  misc_feature (56)..(56): n is a, c, g, or t
  misc_feature (94)..(94): n is a, c, g, or t
  misc_feature (120)..(121): n is a, c, g, or t
  misc_feature (193)..(193): n is a, c, g, or t
  misc_feature (208)..(209): n is a, c, g, or t
  misc_feature (214)..(214): n is a, c, g, or t
  misc_feature (221)..(221): n is a, c, g, or t
  misc_feature (223)..(223): n is a, c, g, or t
  misc_feature (256)..(256): n is a, c, g, or t
  misc_feature (271)..(271): n is a, c, g, or t
  misc_feature (280)..(280): n is a, c, g, or t
  misc_feature (297)..(297): n is a, c, g, or t
  misc_feature (304)..(304): n is a, c, g, or t
  misc_feature (318)..(319): n is a, c, g, or t
  misc_feature (324)..(324): n is a, c, g, or t
  misc_feature (326)..(326): n is a, c, g, or t
  misc_feature (333)..(334): n is a, c, g, or t
  misc_feature (337)..(337): n is a, c, g, or t
  misc_feature (343)..(344): n is a, c, g, or t
  misc_feature (347)..(347): n is a, c, g, or t
  misc_feature (349)..(349): n is a, c, g, or t
  misc_feature (351)..(352): n is a, c, g, or t
  misc_feature (354)..(355): n is a, c, g, or t
  misc_feature (359)..(359): n is a, c, g, or t
  misc_feature (361)..(361): n is a, c, g, or t
  misc_feature (363)..(363): n is a, c, g, or t
  misc_feature (367)..(367): n is a, c, g, or t
  misc_feature (376)..(376): n is a, c, g, or t
  misc_feature (382)..(382): n is a, c, g, or t
  misc_feature (386)..(386): n is a, c, g, or t
  misc_feature (394)..(394): n is a, c, g, or t
  misc_feature (404)..(404): n is a, c, g, or t
  misc_feature (455)..(456): n is a, c, g, or t
  misc_feature (463)..(463): n is a, c, g, or t
  misc_feature (465)..(467): n is a, c, g, or t
  misc_feature (469)..(472): n is a, c, g, or t
  misc_feature (494)..(494): n is a, c, g, or t
  misc_feature (499)..(499): n is a, c, g, or t
  misc_feature (514)..(514): n is a, c, g, or t
  misc_feature (523)..(523): n is a, c, g, or t
  misc_feature (525)..(525): n is a, c, g, or t
  misc_feature (532)..(532): n is a, c, g, or t
  misc_feature (539)..(540): n is a, c, g, or t
  misc_feature (542)..(542): n is a, c, g, or t
  misc_feature (546)..(546): n is a, c, g, or t
  misc_feature (548)..(548): n is a, c, g, or t
  misc_feature (550)..(550): n is a, c, g, or t
  misc_feature (552)..(552): n is a, c, g, or t
  misc_feature (554)..(556): n is a, c, g, or t
  misc_feature (559)..(559): n is a, c, g, or t
  misc_feature (562)..(562): n is a, c, g, or t
  misc_feature (564)..(565): n is a, c, g, or t
  misc_feature (567)..(567): n is a, c, g, or t
  misc_feature (572)..(572): n is a, c, g, or t
  misc_feature (584)..(584): n is a, c, g, or t
  misc_feature (587)..(587): n is a, c, g, or t
  misc_feature (593)..(593): n is a, c, g, or t
  misc_feature (603)..(603): n is a, c, g, or t
  misc_feature (612)..(613): n is a, c, g, or t
  misc_feature (615)..(615): n is a, c, g, or t
  misc_feature (653)..(653): n is a, c, g, or t
  misc_feature (669)..(669): n is a, c, g, or t
  misc_feature (674)..(674): n is a, c, g, or t
  misc_feature (676)..(676): n is a, c, g, or t
  misc_feature (723)..(723): n is a, c, g, or t
  misc_feature (1513)..(1513): n is a, c, g, or t
tgtctccattcagcagatgggcagnntgangcccaagnntgtggngctcagtctgnggtcacacagcagtctcctgggttcccacttggccttnaatggggagggaggacttggcctggnntccgtgcgccctcactgcagggtggctggctgcggccacgtcgcagggagctgccaatctggtctctgaagncctccagtctctggnncaggnttggaancncggccccacctaaggatcagtgagactcgaggnctgccctctccaggncccttcctnacccaggtccatctggntcccaanaacctctggagaannctcangnggtaggnnccntccagnnttntncnnannccancncnatanaccatgggntccaanatanatttgggnacgcagatgntcctaaaaagagaattccaagtttgggaagtagaaagatcttagatgccanntctcaanannnannnnattttagagataagattgaggnttggngagggtgggttttancccaagatnanagagaanattaggnngncctncntntntnnnttnttnanntntgagncctggtgatgtnttngggggntttatagggnggggaggtnnanaaaggtaccacctcctcctccgtcaacatctctgccangactcgggtctgagtncagtnantgtgactcctgtctcttgggcacttggcagagcaggggctgcatggnggctcccaggggtgggggccgggcagatgggggcctgccacctgaggcctcagggtccaacaccccacaaggtacccagaatgttaggatggcataaaggggtggggtcttggtcgccttctgtgtgcagcagatggttcttctaccgtcctctcctgagactagaagcctcctgagagcaggaaccacgtctggtctatttctgactcctcagagccccagaagagaggctggggcaaggtggtgctcccctggccaggccggcccagtgggccaggggcactcgacacagtgggcagatgtggcagcaggggcaggagtagaggggtggcagtgcatggcaagggggagctggggccatcaagcagggacacggtggggtcaggccaggaccctgctggtgatggtagcaggcagagaggagacgcctctctagtgcatggacctgctgggccaggatgcgctgctcattctgggccaggtctcggctattctgcagctggctcttttctttcctgagcctctcattctctagcatgaactcctgtagcatcccgtacaggttccgctgggcccaggccacccgggctccactgagccctgaggccttgcagtccatttggtccagctggaactgcaggcgacggttctcctcctggagctgcagcatctctgtctccaaacgctggggctgctttgccacaggagacttgggggcctgtggtcgggtggtgacccgctgagctcggcttgcatatcgcagggtgctgagagtctcaggaaggcactngggctgagggggacacgcaggccaccatgagggtgaccccgcgccctcccagtgagtctgccagcaacttggtgagcttgctgtcccggaaagggatgtggctctgcttccgctgtgggtccagcagcagggagatgcagtgacccagggccagcaggcttcggttgatgctgttagcctcaagcatcagctccccacgggatcccgtggctgctaccttctcactgcctgccaggtccacaaagcacagcttcccaccaacagggggctccccagggtccacagaaggcatctgctgggcagtttgacggctgatgtaaagggtgagcagggcatggcttcggctggaggcctggttcagggtgtgggctgagttccttcgacggctgagacccgtttgcaaaagttccatcagggcctccagactcccaaattccaccacccgcagctgctccacatagaagccccgagtcttgttccagcgaacagggaggggccgggagaccccaggctcagcaagtcccgaacctgggaggggagggaggagggtgagggaagggatctttctgagtccacccacccccagatcttactgacaacagtccccaccgcctcttctgtcctttgatccaggctccctggaaagaagcgctccgtttcctcatgggctgtctttctattcctctcattcccttacctgctcattgtagatctccagataagaggcgcgaagggtgacaggggcacccaggtgctgcacgcggtccaacagccaggcgaaggtcctctgcatgatgccagccaggctggggggtgtaggtcttcccagagcccgtctggccaaaggtgaaaacagtgcaggagaaaccgcgcagcgccagctcccccaggcgccgcacgccgcacgcccggaacacgtcctcctgcgtgcgcgccgcgtctagcaccgcaccgaagcggaacgccacttctggacccccgcctggaggactcacctggcgcgggtggggcggaggagcggggcactctgcagagtccgggtccctgagcagtgcagcacgctctgctgccctcgacgcagctcggccgcgctcatgggacgtaccctgagcaccacctggatgggcgtttccggcccctctggcccttgctccaggtccgcg

SEQ ID NO: 319027 - DNA, 496 bp, Homo Sapiens
  misc_feature (47)..(47): n is a, c, g, or t
ttcctccgttcaaacatctcttgcccagaaattcgggtctaaatccnaatactgtgaattccctctctcttgggcaacttggcaaaaccccaggctgcaatgggggtgccccagggtgggggccgggcaaaatgggggcctgcccacctgaggcctcagggtcccaacacctgtaggaaagaccagagtcccactctgggtgacctcagtcctgcctctctgtgtcccacctacctggtgctagccatgacaccccaccatgcctaccccacaaggtaccaagaatgtcaggatggcataaaggggtggggtcttggtcgccttctgtgtgcagcagatggttcttctaccgtcctctcctgagactagaagcctcctgagagcaggaaccacgtctggtctatttctgactcctcagagcccagaagagaggctggtataaagcaaggagcttggggagttactgaaggagtaagtgaatgtatgattcagtaaa

SEQ ID NO: 319028 - DNA, 413 bp, Homo Sapiens
tggagctgatgcctctctttattcatgtatttcatcccctgctgcctggtttctcctgaatccccttgttcccctaaatagcacccccagtccccgcccctagcccagctgcaggtggagtagcagctgctgtctccattcagcagatgggcagactgaagcccaagagtgtggagcccagtctgaggtcacacagcagtctcctgggttcccacttggccttcaatggggagggaggacttggcctgggctccgtgcgccctcactgcagggtggctggctgcggccacgtcgcagggagctgccaatctggtctctgagggcctccagtctctgggccaggtttggaaccccggccccacctttgagccctggtgatgttttcgggggcctcacaggcaggggaggtgcag

SEQ ID NO: 319029 - DNA, 442 bp, Homo Sapiens
  misc_feature (54)..(54): n is a, c, g, or t
  misc_feature (410)..(410): n is a, c, g, or t
  misc_feature (428)..(428): n is a, c, g, or t
attttggagctgatgcctctctttattcatgtatttcatcccctgctgcctggnttctcctgaatccccttgttcccctaaatagcacccccagtccccgcccctagcccagctgcaggtggagtagcagctgctgtctccattcagcagatgggcagactgaagcccaagagtgtggagcccagtctgaggtcacacagcagtctcctggggttcccacttgggccttcaatggggagggaggacttggcctggggctccgtgcgccctcactgcagggtgggctggctgcggccacggtcgcaggggagctgccaatctgggtctctgaggggcctccagtctctggggccaggttttggaaccccggccccacctttgaggcctggggtgatgtttttcggggggtntaaaaggcaggggaagtncagaaggtaccaac

SEQ ID NO: 319030 - DNA, 2348 bp, Homo Sapiens
tacaaatcaaaaggctttattccttatataaacccacacttagaaaaaataaatagttaataaattataggcaaaccagttggtctcagccacgcctcccactgaggtccagggcagccgctgcagcagcagacgagcgggaaggtgtggccacagcttggctcaagggcgtggtctggactggggacgaagggacagaggaggaaggcaaggtctgggtgagggcagggatgggggctaaaggtgggttcctgaggcgtgcccaggctctggcccgggcagcaggggtgaggcaggggctcagctccctcctgggccctgggtgatgcggcgtgcgaagcggctgcgatcccgagcaagctgctcccaggggccctggcgggcggcctgggccggccctgcccagacagccaggaaatggacagtgaccttctcggagaagcgcacctttctggcctttaggggagtctcagggtccggatcatgagtaggggtttctgggcgcttgagccgcctttgcagtcggaggggcagcctaggaggagcccagggaggcggtggcttctctccaggtacatagatggccactcggaaggggcagggctcagcttctccccagtcctcagcagcttcctcttcctctgtctcttttccaggtcgatatccccagcccctgaagtgggcactctggtccgggtgggagggatgtgggtctgactcagcttctcctaaggctgcttctgaatcatcttccttatcctcactatccacatcctcatcttcctcctcctccgtgtcctctcctggccgatacacccaggccttcaagaaagcacttgcagggggtgtggaagcagaagtctcagcttctctttcatcctcggctgatcctgtatcactgtcctcatcttcctcctcctctgtgtcctctcctggctgatagacccaggacttcaagaagacacctgtagcaggagtggaagaggaagcctcagcttctccctcttcctcatctgatccagagtcactgtcctcatcttcttcctcatcttcctcttcctctgtgtcctctcctggccaatacacccaggccttcaggaaggcacttggtggggggatgcagggaggacactcagcttctccatccttctcagctgcccccaaagccttgacctcaccctcctcttcatcactgggttggcaccaccaggacttgagctggggcctctgggctggggctgaggattgcggccctggggcagcttctcctttcccagtttctttgtgtgccttttcctccttctcctcggacgcctctcctgaacgatactcccaggacctggggtcggagcctgaagatcggggggacacggaggtcttcctggctcctttacttctttctgttcttttatcctccgtggcttgattctcttcctcccctgggcaagacacccaagtgctgggcttggatcctggagacaaggcagaagtagaggttctgtgagcttctttctttacagcttcttcatcgtcctcctcctccacggctggacaacactcccggtgtgatggtggataagagaacttggttaactccctcctcttcagcaactccctcttcctcggctttctcctcccctgggttcttatcagaaccttgcagtgtccttatcagaagttctgggatacaggggagcacgctgtccatctgcaaattgatcttcccttgccctctagggacactggttgcctctcgctcaccatacatgccagtcatcatcatccaaaagtccccaggcttcaggaagggaactgctggttttcagccccagtgtttctctgtcctctccagggcctccactgtcttcagcctcctcttcagggtgtctgccccaaggtgtatgggggattgccagaggagtcctagcttctccctccaggccagcttctaccagagctgctccttttactgcttccaccagccagggctctagaggtcccaggcccctcaggcggctcccaggcgcggctgaggaggcccatcactggggacaggaggaagaaagggtgggcatccctccacggggtagcctgatggggtgctttgcctggggccatgtgtctgggcggctgggaagttcgcgtcaccccgggggcaggagcgccggttcggtctgccagaagcgatcacaggtccggacggttagggaggccagcgcgttcatctcaccctcaggcgtcggtctccgagtaactcagagtatctccggctgcctaagtgccgtggcgacaagcgggcgcggggtcgtgcagcgtcttgcataagatcaacaactgctgtgccgaat

SEQ ID NO: 319031 - DNA, 2016 bp, Homo Sapiens
tataaatacaattccggatttattaaaaatcagggctcccctgctgtgccctcctggcactaaggaaataaataaccagagggggcacagctaggtaaagggggaaaaaatcagatctcaagacagactctttgaactaccctttctccctccccaattcccacccccttatggctcttgggacatagcacctgagcaggcacctcagtccgtgtagagtgtgaccggcaccaaggcatgtctgccctacccaagaagggagacaggccctggggtcacttgtttccagcccttcatgaccccaagacctgttccccacaggggccagggctgaagcaccaattggaggcacctgagggtggtggctgggggagggaggatggggtaacagaacctaggcagcagaagcagctgacgggggtccggccccctctccaagttcagccagtgcctgactgaggtcatgccccatcgtcctttcccctcgaaccccacctgcactcagctgaggatcttccggggcagttcaacagcagcacggatgaagactgcatcatcccgcacatagtttcgctttcgaatgtcctggtgggagatgaacttgggataaccaaagcccagagaactctcatccagggagccccgccacgtgcctggcttctggaaattcttccagtttgggtcggggtggaaggtctcagtgacgtgctgtggtttagccagcccagggtcgctctgatccagcagggagaaggtgacacggcgggcaaagggccactcaaggagattgtcaaaggcaccaggcagcacacgaatgtacagtgagaggtgtgtgccctcaccactgccattgccattgaggaatgcagacacctgcagcttgtaaccatacttatgtgtgtagaaggctgggctgaagcactcaaggttgggcttggccttggcctcctgtagccgccgtccatagctgccaatcttccagatgagcacgccatcactgcccactgatagctcctccagctctcgccgaagctcctgcagctcctgccgttgccggctcaccagggcacacatcatggccagatgtggcttcacactctcctccacatgccgtgccattgccagcttagggcacctgtgcttgcagccggagtctttgaatgggcagagcaccagggcggtgttacagctgtccttcagatggcctggcaggtcctcccgagccacagtgcccacaccacattggttggggcaggcaacaggcagccttgggcactggtactggtggctctggatggtgtcaaagacgaactccttagtgcagtaggtgcagggctgagtgcgcttggggcactcagaggtggcatgctgggccagcagccgccgcatcatgcgggcaccacacttattctcacagtagacactctcctgggggcacataccctcatggctctcataggcctccccactgaagtcacagccacaaaactcgcacttgaggcgccgcttggggcagtcatgctgcaagtgtgcaggtagatcacggcggctcagcttcatggggcagcgattagggcagggaatgacattgaagctgcaggtattcaggtggccctgtagatgacgtagtggcccactccagcggcagccctcctcactgtggatgcagcggataggcaggcccaatacttgtacttccagctccgggtctgggtagatcttggcatagtccagaggaagctggtcctcagggcacttgaagactccttcactgaggaactcctgcaggcaggtatcgcagaaacggtggccgcaggtggaaacctgcacaggctcgcgcatgggcttcccgcacagtgggcacagcagccgtcgcttgggcttctccaggaacttgtagtcgaagccaggcatggcgggcgagcggccggcacgggcgagcggggccaggcacgcggcggccccacagcccgcgcctcgctggagcggcgctcccggctccgggcggcgccgact

SEQ ID NO: 319032 - DNA, 862 bp, Homo Sapiens
  misc_feature (320)..(320): n is a, c, g, or t
  misc_feature (324)..(345): n is a, c, g, or t
  misc_feature (358)..(358): n is a, c, g, or t
  misc_feature (372)..(372): n is a, c, g, or t
  misc_feature (374)..(374): n is a, c, g, or t
  misc_feature (379)..(379): n is a, c, g, or t
  misc_feature (412)..(412): n is a, c, g, or t
  misc_feature (423)..(423): n is a, c, g, or t
  misc_feature (427)..(427): n is a, c, g, or t
  misc_feature (429)..(429): n is a, c, g, or t
  misc_feature (433)..(433): n is a, c, g, or t
  misc_feature (435)..(435): n is a, c, g, or t
  misc_feature (442)..(443): n is a, c, g, or t
  misc_feature (447)..(447): n is a, c, g, or t
  misc_feature (461)..(461): n is a, c, g, or t
  misc_feature (491)..(491): n is a, c, g, or t
  misc_feature (502)..(502): n is a, c, g, or t
  misc_feature (505)..(505): n is a, c, g, or t
  misc_feature (549)..(549): n is a, c, g, or t
  misc_feature (558)..(558): n is a, c, g, or t
  misc_feature (567)..(567): n is a, c, g, or t
  misc_feature (569)..(569): n is a, c, g, or t
  misc_feature (608)..(608): n is a, c, g, or t
  misc_feature (611)..(611): n is a, c, g, or t
  misc_feature (613)..(613): n is a, c, g, or t
  misc_feature (616)..(616): n is a, c, g, or t
  misc_feature (620)..(620): n is a, c, g, or t
  misc_feature (622)..(622): n is a, c, g, or t
  misc_feature (626)..(626): n is a, c, g, or t
  misc_feature (631)..(632): n is a, c, g, or t
  misc_feature (650)..(650): n is a, c, g, or t
  misc_feature (653)..(653): n is a, c, g, or t
  misc_feature (658)..(658): n is a, c, g, or t
  misc_feature (666)..(666): n is a, c, g, or t
  misc_feature (670)..(670): n is a, c, g, or t
  misc_feature (673)..(674): n is a, c, g, or t
  misc_feature (678)..(678): n is a, c, g, or t
  misc_feature (684)..(684): n is a, c, g, or t
  misc_feature (693)..(693): n is a, c, g, or t
  misc_feature (701)..(701): n is a, c, g, or t
  misc_feature (707)..(708): n is a, c, g, or t
  misc_feature (710)..(710): n is a, c, g, or t
  misc_feature (715)..(715): n is a, c, g, or t
  misc_feature (721)..(721): n is a, c, g, or t
  misc_feature (729)..(730): n is a, c, g, or t
  misc_feature (739)..(739): n is a, c, g, or t
  misc_feature (744)..(744): n is a, c, g, or t
  misc_feature (746)..(746): n is a, c, g, or t
  misc_feature (751)..(751): n is a, c, g, or t
  misc_feature (757)..(757): n is a, c, g, or t
  misc_feature (763)..(763): n is a, c, g, or t
  misc_feature (766)..(766): n is a, c, g, or t
  misc_feature (773)..(773): n is a, c, g, or t
  misc_feature (778)..(778): n is a, c, g, or t
  misc_feature (780)..(781): n is a, c, g, or t
  misc_feature (784)..(787): n is a, c, g, or t
  misc_feature (794)..(794): n is a, c, g, or t
  misc_feature (803)..(803): n is a, c, g, or t
  misc_feature (811)..(811): n is a, c, g, or t
  misc_feature (813)..(813): n is a, c, g, or t
  misc_feature (823)..(823): n is a, c, g, or t
  misc_feature (827)..(827): n is a, c, g, or t
  misc_feature (829)..(829): n is a, c, g, or t
  misc_feature (839)..(839): n is a, c, g, or t
  misc_feature (846)..(846): n is a, c, g, or t
  misc_feature (860)..(860): n is a, c, g, or t
gaccttacaagtcattttcctttattttcttaacatataatgaaattccaactccaaagagacatatatgcagagagacagatgcagggccttggtgtgcagcagcctagaaccaggcagggggtgggtgtgacccctctcccctccatcacaactctccccactcctggcccctggccatttgcccaggcagaaactgagaagctggaaatgagaggaatcagcctcgtggtccagggagtagccagagacagggccttggttactaggcctggccaaatcattgtctagctgaaaccgtgggcctcagtttctttatntgtnnnnnnnnnnnnnnnnnnnnnnaaagggaatgganaagagagtgtgaanangagangcactggtgatagttaagggccttctggttgtncctctgcttcnaaananatgngnaaatgannatanaaggtttcagaagncatcatggctaagtgcacagtggtggagcngctctggcccnggnggaattgaaaggacttatgtagatagaatccagccttcaaagcngatcctganctctgaacngnccttgggctgcaactatagctacctcattaggccaaggntgncntcntccncnccgngcggnnaatgcgagaggggaaggntgntggcnagggggtnatanagnnagcntgttgnaggttattnaggtggtnaaatgnntntgatnaggagntcatgagnnagggaagangttgntncatcntggttnaggacnagntgatggntttgncnnccnnnnccccggnggcatgggntgtggttncntggggttgcntggntnagggtgtttntgtcgtnagggtttggggttnag

SEQ ID NO: 319033 - DNA, 886 bp, Homo Sapiens
  misc_feature (115)..(124): n is a, c, g, or t
  misc_feature (484)..(509): n is a, c, g, or t
  misc_feature (513)..(519): n is a, c, g, or t
  misc_feature (521)..(560): n is a, c, g, or t
gcgccccccgttttttccccccatggggccaaaaatttttaatccgccaaggggccacaaaggtggccgaaaagccccctgggcggattcagggggttcatccaaggcccgtttnnnnnnnnnntttccccatttctgccaaaaatggcttaaagaaatttccacccccttttttccaaataaattgcaagggcggggcggtaaattggaaaaaggaaggtttcccttgggctccctggtgaaaagagtcccctttaatgccctcaggaaactccccattgggaattgtttcggaacggctccggtttcccctccgggggtttttttatttggggggaatttccagcacctagttcatgggccggggttttcctagggaaccaagtatgggccacgttcccccttccttaatggggcccgcggggcccaaaggaaaggtttagaaaggttttttgagggccggaggcggccgacacattttttnnnnnnnnnnnnnnnnnnnnnnnnnngggnnnnnnngnnnnnnnnnnnnnnnnnnnnnnnnnnnnnnnnnnnnnnnnaacttttagaatcctttttattttccttctctgaaaagagaataaaatatgttcagcaagaaggaagttatgaggactgagggaaaccaaatatagatgtctgagagttgaccttccaaggaaaaatgttttctgtcaagatttgactttccttagataaaccagaaaggatacaattttaactcacagctcctaaacaaggaaaatatcacccatagtagctctccctgcatcctaaccacttgctcatcaaatctccattcaaagaaaagagcacctgctaaaacagagtataaaaatcagagtatgcctctttggtgtctacc

SEQ ID NO: 319034 - DNA, 1209 bp, Homo Sapiens
accaaaccaagcaggatcagagctatggccacatgtcgtggccagctgaaggccttgcctgggaaaagcagctgctgcagggcccggcggatagggaacagcacgactggcacagtgagggtcaccgcgagcagcacggccaggcgcacacagaggatgagcgggtccttctggctgtacatgtgcagcatctccgccttcacactgctgtagaaggtgaggtatccaaaggttgctgtgagcccatacatgcagaacatggccccaatggacacgttggccacggcctgcatcctgcgcttggagggcccggcagagctccgtatagatgggcagcacctcagggtggcagacaaaagcaaaagccataatgggcactgtgtaggacatctgtgagtcaactgtgaacatctgggcctcacagctgctgttgagtccttggctggggagtcccacgagagcttcactctccattgctgtttcattgtggcctatagcacagccaagttggaacttcttgtagatgaccgaaacaaggaaaaacagcatgcaggtcagagagagaccactggtgtaccccaggtagcccaagtgtttcatgagggcgaggggcaggatgattaacacactgacgatgatgatgaggaggtttcccttcaagaaccagtccccctcggggtccatgtacaggaaggtgccgataaccagggggagctcagatttgatgatgaacaggtaactggacatggccccaacattgtgcagacagatgactgtggccaccactaccttccccgcaggcccgaatgccctctgtcccagctgctcataggctcggatgcctgcaataccagcacaggtcagcaggaggtggatggagtaggacgacagaagcgcaatgcacagcagcagggccaggaagaagatgacccccgtgtgggccatggcataggccagccccaggatgccgctgcccatgatggcgttgctgaggttgaacactgacattccaaacgatgtcttcccctcgaaatccatgaactggaccggcttgctcccaggagcaggaccacgactgggcaggaagccctcacgttcttgcctgtagcccacagcatccgaagggagggctccattcatctttggatcctgcagttccatcctgctcctctcagctcctgaagtggccgcaactcagactcaggttcg

SEQ ID NO: 319035 - DNA, 2049 bp, Homo Sapiens
  misc_feature (62)..(62): n is a, c, g, or t
  misc_feature (1120)..(1120): n is a, c, g, or t
  misc_feature (1940)..(1940): n is a, c, g, or t
agccccctcccacaaaaaaaagggttccggccctcggggtgtttttcccccctcgtggcgtnccgggtgcggcccctcccggttcccaaggccgggcccccgtccgttcaccaggcagatccggttctctccccagcgcacgggagaccttgtgccagcggccaggccgggagcgctggcggctctgggcgcggagccgagtcccgaggcttcccatcagttcctatgtcgggccaggatgcccacaaactccaggtgactggacagggaacccccaaactggtaggagtctcgggtggtcctgaggtgtgggggcagcatgcaggcaggatgccgggcgggctgacggctgcggcgggaggccttccgggcggtggcctgcagtcctctaggccccaggcccggggtctgggcttgcagggcgggtgcacagcccgtgctcacattgacgctgcccaggttctgctgcagatcaaatacgcgctgtgggcccaggagccgctgcacgaagacgttgctgatgcagccactgaagttgtaaatggtgccagactcaggcaggcctcccaggaggagcctcgggggcccctcaggctgcggctggagctcggggggtggtccccggtggggcttcatctgctggagctggtcatcgacatacagccagactcccgtggcattgctgtagaaggcgacgtaatggggggcaccatcggcgaagcccgcttgagttttcacttcagtcctcaggagctgtaggctcacacggccctgctgcagggacacctggcatagcccatccggggacgcccggtagtagagcagggcactgtcctgggcgctgtggaagccgaagccggagtagacgttgccagtgagcggttgccccgttcgagagcgccaggcgaaggaagccgttggccatggaaagtcatggcgcgccccaccagcaggtcggcggtgcagccggcgctcacgcctgtcgtgttcagccgcttgaggtccacatacttgcccagggccttgatgcctttgacgcagccacggactgagcctccggtggggaagagccgtcgcaggctcgggggcagctggtcgggcggcacgccccccagggtantaggcgtcggccagctccagatcattgtcctgctccacgctgtacaccgtggcccgttccacacgcaccagcacacgcttgcggctgccccccagcaggaacacctggatcgccttgctggccgaggtcaggggcggtgggggctgcagtgggacggcctttttcaggccagccccaaagtcatacaacagcacgaggctgccttcttgcacggccaagcacaggaactggctctgctgcttcaggaagaagagcaccccgctgtaggacacgagccgcagctcctgctcgaagcgcttggtggtgctgatctgactgtcgaagctgatgcgggcgaagccggtgccgtccaggtaggagccgtccgtgagccacgggtccccggtcgacttggagcgggcacaaggcctgtccacagccgtgtccagctggaaggtcctctcgaagttgtagaggctgaccacctcctcattcagcgtgtccatctcgatgcagccccggtagccggggaagcgaagcaggggagggggcgtgaaggtactggggtaccccccgacgtagaagacgaagtcgtctggccgcaggttgagcagcccctctgccccaggggccaccgtgtcacccttggtttcctggatcatctgtctctccactgtgacggacatgtggccaaactggagagtcctgtccaggctgacagctgcgaactgctccccaatgtcctcatcgatgcttaggactgcagggcccgcctcacccagctgatacacccagtgcaccttcttgtcacgcagagacacacccatgtagtccccagtgnctggcggctgcccatgtacatcacaaagcgatcctcggtaccctgcccaggctcaggctctgggccctgcaggtagaacttgagggcagtgtaggcagcaaggtcggca

SEQ ID NO: 319036 - DNA, 1067 bp, Homo Sapiens
  misc_feature (92)..(92): n is a, c, g, or t
  misc_feature (94)..(94): n is a, c, g, or t
  misc_feature (117)..(117): n is a, c, g, or t
  misc_feature (131)..(131): n is a, c, g, or t
  misc_feature (142)..(142): n is a, c, g, or t
  misc_feature (1001)..(1001): n is a, c, g, or t
  misc_feature (1009)..(1010): n is a, c, g, or t
  misc_feature (1019)..(1020): n is a, c, g, or t
tttaagtagactttcccaccttcccagaacgggagccacccttcccccctttctcattcccaccctaacccgggtccccttttgcccatctncnagcacctgcaggggtcggttcancgacgtggagaaantcccctggttncgtccttccgcccgcagcagggactgcttcttcggtccccctgcacctgcaagtaggggggcgttccgggcctggcccaagtggaagatcagtccggtgactgccaggggccgcacctccagttccaggcccacatcaggcagtgtagctcctgggaggtctaaagtgataactcccccgctgcctgggaagaacaggcccgcctccagggggcccaagatgcagggtgtgacccctgccatccgtgtgggggcccccaggggcctcccgtgcagcctcagtctcttcacacagccgctgaacccgacggtcaccggaagtttggagctgtggctgctggccgggaggccgcccacaaagagggtgtggggctgggggtgctctgccccctggtgctgccggtgcggcccctcctggctccaggcccgggccccgtccgtcaccagcaggatccggttcttctcccagcgcacggagaccttgtgccagcggccaggccgggagcgctggcggctctgggcgcggagccgagtcccgaggccttccatctgtgcaacgaagtggccattgctcaggaagagcgccagggaggggctgccgggcctcagacgggcagtgaagaggaggaggcctcgggagcttcgcgggaggacgtgcatggagagactgggccagttcctatgtcgggccaggatgcccacaaactccaggtgactggacagggaacccccaaactggtaggagtctcgggtggtcctgaggtgtgggggcagcatgcaggcaggatgccgggcgggctgacggctgcggcgggaggcctcgtgccgaattcgccacccaggcctcgctacttaggaanttaggggnngtgggtggnngtattgcggcgatgggcggggggccggacgccaattagcgggaggga

SEQ ID NO: 319037 - DNA, 1304 bp, Homo Sapiens
acggcttccttcgcctggcgctctcgaacgtggcaccgctcactggcaacgtctactccggcttcggcttccacagcgcccaggacagtgccctgctctactaccgggcgtccccggatgggctatgccaggtgtccctgcagcagggccgtgtgagcctacagctcctgaggactgaagtgaaaactcaagcgggcttcgccgatggtgccccccattacgtcgccttctacagcaatgccacgggagtctggctgtatgtcgatgaccagctccagcagatgaagccccaccggggaccaccccccgagctccagccgcagcctgaggggcccccgaggctcctcctgggaggcctgcctgagtctggcaccatttacaacttcagtggctgcatcagcaacgtcttcgtgcagcggctcctgggcccacagcgcgtatttgatctgcagcagaacctgggcagcgtcaatgtgagcacgggctgtgcacccgccctgcaagcccagaccccgggcctggggcctagaggactgcaggccaccgcccggaaggcctcccgccgcagccgtcagcccgcccggcatcctgcctgcatgctgcccccacacctcaggaccacccgagactcctaccagtttgggggttccctgtccagtcacctggagtttgtgggcatcctggcccgacataggaactggcccagtctctccatgcacgtcctcccgcgaagctcccgaggcctcctcctcttcactgcccgtctgaggcccggcagcccctccctggcgctcttcctgagcaatggccacttcgttgcacagatggaaggcctcgggactcggctccgcgcccagagccgccagcgctcccggcctggccgctggcacaaggtctccgtgcgctgggagaagaaccggatcctgctggtgacggaacggggcccgggcctggaagccagggaggggccgcaccggcagcacccagggggcagagcacccccagccccacaccctcctttgtgggcggcctcccgggccagcagccacagctccaaacttccggggaccgtcgggttcagcggctgtgtgaagagactgaggctgcacggggaggcccctggggggcgcccacccggatggcgggggtcacacccatgcaccttggagcaccctggaagcccggccagatttctgcccacgccgggcgggcgaggcggtcccttttcagaccacgccgaagactgacccgggccgagattgtgagtcctctagacccgccaggcgccaggcgcccccgaagac

SEQ ID NO: 319038 - DNA, 598 bp, Homo Sapiens
gaaactagattaatatgtattttttgaatgttaaaaaagatgttttctaccaattatccctaaagcaggcatatacttatcttgcaggataacttaaatatctgagaacttctgggagaggttgtgataaagtttcttttccctcctacccaaattttatttgtctttaacaaattgggaatttgtgttagcatatgggcttttctctcctgtagcttgaaagtgcaatagcaaaaacatctgaactttaccttgaatcttcacagagatcaagaacgttagggacaggtactccagcatttgcaagggctttcataatcctgaactccctctctatggcatgggcagatggaaggagtgtccctgggggcttcttcctcagaactagatcacgattagccagcctgatgtagtaagttgggatttgactggcccgtgatcaaactgaagtagttccaatgggcctgtggtctggatacccagtaagtctttgaggtacttctgcaaggaatctttcggaatttccatcgtctttttcacaggccgagtgtttggaacacctactctcaatgtaaaacccaagagagcttctaattcc

SEQ ID NO: 319039 - DNA, 951 bp, Homo Sapiens
  misc_feature (138)..(173): n is a, c, g, or t
ggaaacagggggggcggccgcccgtgcgcccatatggatacaccaaaggcggggcgggaacaggcgggaaaaaaagtaccggggtgggtgtcaaaaacaaaacgaccgtattcgctgaggcggggcgaatataacgcnnnnnnnnnnnnnnnnnnnnnnnnnnnnnnnnnnnncaacgcgacacagaggactccccccgaggttcgggttcgtgtgtacgtaggttccatgggagaatttgtggtgcaggtcccagaaggaaaggggccatggggtcctcccctcctgggcgctcatccaaggagcacttctctggcagggacgggatcccgaggtggagaccatgggcgaaaccttcacccccggctgtgacacggctgcagcagggacctccttcaggagctctgagcctgcacctcttcctgaggctccactttaggggcctccctggacagtgaccaggcaggtccttaagtgagtgaccgatgggcttcccggcctggtggaactccttcaggacacgctccacttctttattcaccttgcaatctttcccgtccacggcaaacgtgctcaggtttttagccgctccaaagcctcctggaaagatggcagcatcatggttggctgcactgaggttggccaggtctgtgattttgccacgggcgatcctcgcagactcggtcaaaacattcctgctctcgccttcggacggctgccccttggtgtggtcaatcacgtgcatctgagggacgtcaggagcaaagatctggacttcagcccctccacggctcaggtgcaccaggatcgccgaggcctcgtggatctcggtcccatcgtagactccgcatccagacagcaccagcgcgaccctggccgcggggcgcggcacggagaggtgaagggctgcgcgctgggaaggcgcctcgtgccgaattcgccacccaggcc

SEQ ID NO: 319040 - DNA, 1274 bp, Homo Sapiens
  misc_feature (163)..(164): n is a, c, g, or t
  misc_feature (240)..(240): n is a, c, g, or t
  misc_feature (284)..(300): n is a, c, g, or t
  misc_feature (1079)..(1079): n is a, c, g, or t
aaatgtttttcttcctttcccaaaaaaactttaatttacccccggaaggtaaaaaaccttcccgacggggccagaatttttctattttctggaaaaagccgggctgcgattttgttttttggggaccccagtgaaggcaaagtcccctgtggccagagaacgnnaattgcccccctcggccctcctgtatgtgagagcagccccagccaccacccaggaaggaacattcccccatggcantgcagcacatcctctttagagagagaacgcctgcaggtttcgcnnnnnnnnnnnnnnnnngggcctgccagactcccagctggatggaaagcagccgacagctcctcagccagagggtgaggccaagtcctggcgcctagctgggccccgtccatgcgcgtcactttccagtgagttccagcaccttcctcaccatggctccgatcccatcatggatgtagtggagtgccgtctcgcacatgaaggctggggtcgtgaccaccttgtttttctggtccacgtgagcttcgaccacttccttcacgcagtgcttggcacccagggccttgatggcctctgcggtcccggcataaggccacttgccaccttcctcctgctcgtggcccacagtcacctcgacgcctctgagcaccttggccgcgaggacaggtgcaatgcagcacaagccgatgggcttcccggcctggtggaactccttcaggacacgctccacttctttattcaccttgcaatctttcccgtccacggcaaacgtgctcaggtttttagccgctccaaagcctcctggaaagatggcagcatcatggttggctgcactgaggttggccaggtctgtgattttgccacgggcgatcctcgcagactcggtcaaaacattcctgctctcgcttcggacggctgccccttggtgtggtcaatcacgtgcatctgagggacgtcaggagcaaatatctggacttcagcccttccacggctcagttgcacccaggatcgccgaggcctcttgtatctcggtcccatcttagactccgcatccagacagcaccagcgcgaccctnggtgcggggcgcggctacggagagttgaaggctgcgcgctgggaaggcgtccgaccgccgggggacagggacgtgaatgcagatgccgcagcgagcctcgaggccaccagggccctcacaggcgccattgcggtgaggacagcggggtcggaaggtcacgcagggacagacgtgcgcacccacccctctacaaac

SEQ ID NO: 319041 - DNA, 1791 bp, Homo Sapiens
  misc_feature (1112)..(1112): n is a, c, g, or t
  misc_feature (1151)..(1151): n is a, c, g, or t
  misc_feature (1162)..(1162): n is a, c, g, or t
  misc_feature (1167)..(1168): n is a, c, g, or t
  misc_feature (1171)..(1171): n is a, c, g, or t
  misc_feature (1186)..(1186): n is a, c, g, or t
  misc_feature (1196)..(1196): n is a, c, g, or t
  misc_feature (1234)..(1234): n is a, c, g, or t
  misc_feature (1265)..(1265): n is a, c, g, or t
  misc_feature (1276)..(1276): n is a, c, g, or t
  misc_feature (1303)..(1303): n is a, c, g, or t
  misc_feature (1321)..(1321): n is a, c, g, or t
  misc_feature (1329)..(1329): n is a, c, g, or t
  misc_feature (1349)..(1349): n is a, c, g, or t
  misc_feature (1353)..(1353): n is a, c, g, or t
  misc_feature (1367)..(1367): n is a, c, g, or t
  misc_feature (1372)..(1372): n is a, c, g, or t
  misc_feature (1374)..(1374): n is a, c, g, or t
  misc_feature (1380)..(1380): n is a, c, g, or t
  misc_feature (1386)..(1386): n is a, c, g, or t
  misc_feature (1388)..(1388): n is a, c, g, or t
  misc_feature (1414)..(1414): n is a, c, g, or t
  misc_feature (1419)..(1419): n is a, c, g, or t
  misc_feature (1453)..(1453): n is a, c, g, or t
  misc_feature (1463)..(1463): n is a, c, g, or t
  misc_feature (1485)..(1485): n is a, c, g, or t
  misc_feature (1489)..(1489): n is a, c, g, or t
  misc_feature (1498)..(1498): n is a, c, g, or t
  misc_feature (1518)..(1518): n is a, c, g, or t
  misc_feature (1539)..(1539): n is a, c, g, or t
  misc_feature (1542)..(1542): n is a, c, g, or t
  misc_feature (1549)..(1549): n is a, c, g, or t
  misc_feature (1554)..(1555): n is a, c, g, or t
  misc_feature (1561)..(1561): n is a, c, g, or t
  misc_feature (1569)..(1569): n is a, c, g, or t
  misc_feature (1578)..(1578): n is a, c, g, or t
  misc_feature (1611)..(1611): n is a, c, g, or t
  misc_feature (1619)..(1619): n is a, c, g, or t
  misc_feature (1624)..(1624): n is a, c, g, or t
  misc_feature (1626)..(1626): n is a, c, g, or t
  misc_feature (1628)..(1628): n is a, c, g, or t
  misc_feature (1635)..(1635): n is a, c, g, or t
  misc_feature (1638)..(1638): n is a, c, g, or t
  misc_feature (1658)..(1658): n is a, c, g, or t
  misc_feature (1727)..(1727): n is a, c, g, or t
  misc_feature (1735)..(1735): n is a, c, g, or t
  misc_feature (1753)..(1753): n is a, c, g, or t
  misc_feature (1759)..(1759): n is a, c, g, or t
ggtactggtccgcaattcgttggatatcgtcgacccacgcgtccgcactgtgtccagtgtgggcgcctggcacgccctacgcccgcggctcagctgcttccaccagctcctgctggagcctcccaagctggagccgctacagatgacatggggcatgctggctccgcctctgggcaacacgcggctgcacgtggtcaagctcctggccagtgccctgagcgccaatgatgcagccctgacgcacgagctcctggcactggacgtgcccaacaccatgctggacctcttcttccattatgtcttcaacaacttcttgcatgcccaagtagagggatgcgtgagcaccatgctgagcttggggccacctcctgacagcagccctgagacgcccatccaaaaccctgttgtgaaacatctgctgcagcagtgccgcctggtggagcggatcctgacgtcctgggaggagaacgaccgtgtacagtgtgcgggaggccctcggaaaggctacatgggtcacctgacaagagtggccggtgccctggtgcagaacacggagaaggggcccaatgcagagcagctgcggcagctgctgaaggagctgcccagcgagcagcaggagcagtgggaagccttcgtatcggggcccctggcggagaccaacaagaagaacatgggtggacctggtgaacacccaccacctacactcctcccgtgagcgatgaggacgaccggctcaaggagttcaacttccctgaggaggctgtcctgcagcaggccttcatggacttccagatgcagcgcatgacctctgccttcattgaccacttcggcttcaatgatgaggagtttggggagcaggaggagagtgtgaacgcaccttttgacaagacagccaacatcaccttctccctcaatgctgacgatgagaaccccaacgccaacctacttgagatatgctacaaggaccgcatccagcagtttgatgatgatgagtgaagaggaggacgaggaagaggcccagggctcaggggagtctgatggagaagatggcgcctggcagggcagcccagctgggccaggggggcccgtctgggccagccacctggtgttcncgcccccagctgggagcagccaccctttgaacccagtgncttacagatgnccccnnccngccccccgccgtctncgggggaggnaggaggctggcacacttggggcttccaggccccaacangggggcccctcaagtgtggccccaggggctnccccacttcanaggctgggcaggccttcctgcccgcgnacgcccctgcagctccanggtttcanggacccccacaacccccctncacncacctcacggacgnccacnanaacggncacacnanccttcaccagaagcctcacccctttncacgnccttgttaacatcgggggactttcagccgacttnccacgggtcntttctgccccagctcctccgtnagtncaccaagancctctactctgtccagctcngggccacagccccccagaccnagnagggggnagagnncaaagnccttgggntttcccaangcaactgcccggcctccccgcttcttcgcttanccaattgnttttncncngaagggntgntttccagttccaattatttntgttgtgtgggtggtcaatcttcttttcctgattccggtggggagtggtcagtgtcatgctataccttncccatttntgacaagtgtgaggaagnacaacnttttagattggtgttaatataaataagatgag

SEQ ID NO: 319042 - DNA, 997 bp, Homo Sapiens
  misc_feature (19)..(19): n is a, c, g, or t
  misc_feature (62)..(62): n is a, c, g, or t
  misc_feature (92)..(92): n is a, c, g, or t
  misc_feature (215)..(215): n is a, c, g, or t
  misc_feature (288)..(288): n is a, c, g, or t
acctgactgagaagttctntcctagcagtagttcttgctatcatgccttggcttcaactctnccacggtctgtagagtattgggctcttctngcttcactgggtcgttcctcccactggctcagctccttctgaaactcctcttcagctcttcctctgagtcaaccacagggaagtcttgcatggactgagtggtgcgctcggatccataagccnccacagcaccttttccctttctctgcttggcttcaattgggttaatgataccttgtgcattcttcccgaggcnccgtccagggacgtagcccatcttctgaagaagcttctgtccaattccttttgtgtgtctttcccagctgccgaagtccatgaaagatttggttcctcctgctaaacctttctggctgggcttaaaattgccacccgtttttagcttccttggtccaaaatccttaggaaagtcgtcctgcttaacaggtttctcttcgtcatcagaatcttccaactctgcctcctccgctgcccctttcttgagccctgcgctgatgaagttgactggcgcagagtattcacgggcccgttttcctccaaaggtgggccttctcatcatccgagttctcgctctgcccacaccccgtaggtggcttcttcccttggtctgccagtggcgctgtcggttggggttgaactcattctggagatcccagtcagtgatctcaaagttctcccgctcgtcatcatcatcatcaatgcggccttccccatcccggtataagtgggacaatgacatggccagtcacttagaaaatgagtaggtatcttcttagatcccagattcttttttctattactgaggaaagaattatatctggatgcttggtggtccctaggttaccactgctcatagggactcaaactcaggagtgctagaagtcaggcctcgggcttgtctctctcttgctgtctgtccgagggtccagcgtaccaaattcagcatc

SEQ ID NO: 319043 - DNA, 446 bp, Homo Sapiens
ttatgtaatcaatcattttattattttcatcaacaaccaacacagcaacacaaattgacagccagtcctcaagggaaccttttttgaagtgaagagcaaggccctgaatgagctacctacatggaacatagtatttgcaatatgcaaatggagacctaaaggctcatgacaggaacagaaggtggctgtatacagaggaacagacacgaagtggatgttatgggaagttcaatcaacaattggcaacaagctaggtcagtagtttacgaaagtggtcatctatacagtgcctgagtttgggttctgggcctggatcatgtaagaaaggcagcaaagtctggggtgccatgaatcacacctggcaatcccagcactttggggaatctgtgggtgagagggtctctttaaagctatgggcttggaaaccagcctggggtaacaaaacc

SEQ ID NO: 319044 - DNA, 1210 bp, Homo Sapiens
  misc_feature (1035)..(1035): n is a, c, g, or t
  misc_feature (1075)..(1075): n is a, c, g, or t
  misc_feature (1077)..(1077): n is a, c, g, or t
  misc_feature (1102)..(1102): n is a, c, g, or t
  misc_feature (1112)..(1112): n is a, c, g, or t
  misc_feature (1119)..(1119): n is a, c, g, or t
  misc_feature (1126)..(1126): n is a, c, g, or t
  misc_feature (1129)..(1129): n is a, c, g, or t
  misc_feature (1131)..(1131): n is a, c, g, or t
  misc_feature (1133)..(1133): n is a, c, g, or t
  misc_feature (1135)..(1135): n is a, c, g, or t
  misc_feature (1137)..(1137): n is a, c, g, or t
  misc_feature (1142)..(1142): n is a, c, g, or t
  misc_feature (1145)..(1147): n is a, c, g, or t
  misc_feature (1150)..(1150): n is a, c, g, or t
  misc_feature (1160)..(1160): n is a, c, g, or t
  misc_feature (1162)..(1162): n is a, c, g, or t
  misc_feature (1170)..(1170): n is a, c, g, or t
  misc_feature (1176)..(1176): n is a, c, g, or t
  misc_feature (1181)..(1181): n is a, c, g, or t
  misc_feature (1186)..(1186): n is a, c, g, or t
  misc_feature (1188)..(1189): n is a, c, g, or t
gggttcttaggggccccccgctttgttgctgttctttgttgttccgtcgtatccaacgttatgggttccccaatcctgggcccatggtagactggccacatggctactgggctcctggccttcctagggctagcagcttggtgggcaaacactctgccctgctggagagctgccaggccatgcccgggcacaggctagtggggctcctggctcagtcctgatagcagtgccagggaggcgtagagtgcacacatgcggccctgggcctgcggctcccagcacacgtggggagtgtcctcccccagctctaggccacactcgtccagcaagacccaggccggtgctccttcgccccagctgttccccaggagcccggggggcagggacatggtgctgcgctcctgccacggggcactctgctccaagaggctgcccaccagctcgagcggccccaacagggtctgcgactccagcgcctccgccagcagcttgtgctgcgtttcactcagcatggtcagtgcccccagcaggtagacaacagggatagcgagttccggcaccagcattccggaggacaacaccaggcactccaggacagcacctgctggaccgtccaggggctccaccggcccaaggctctggccctgctccagcgcctcctccaaggctcgcagggccagctggtcccgcagcaccccctccaggccctccagcagcagctggcacagctcctctgtccaaaagctccagttccttggagatggtctccacctctgcccgtaggcctggaagtcttcagtgaacgccccctccgcagggaccccatctgtcaggaagttgtggaggcacctcatcatggagaggccagagggcagctgtggccaggcgccttcgctcgtggaacgcttgtggcctgtggcgggtggctggaaggtcctctgcttcttatcccgggaagagaaggacgtccaagttagagtaaataaccagctggggcacccggaatgcgagggtgctgcctgaggggatggtgancgtgttcttctggctcagatgggcctggccctaacctgcnancacgtggctccgggcagggaaaacnggccgagccncccgctnttgggtnccntnantncncctcnttnnnttntcgcgcctantnacacgtanaagtgntcccnggttncnnctggcaggcttttgtctggct

SEQ ID NO: 319045 - DNA, 1213 bp, Homo Sapiens
ttttgaggctaatggttacatcttaatttattttatttctttacaaattaaagatgcattgaaaaataaaccaatgaagagaaatgagaggtccagagcaggggcatcccaggtggggagcaggcaagcctggccaccatcaagcctagcccttgtcctgcccccaagccagttggggttggaagataactgtcagccactcagtcaataccaaagcccaagcggtgtcccagcaggagagaacggcgctccagctgcctctgcctctctccccaacaaccccgggcctggagaagcagtgtttctcgtgggagctcagagtgggatgtgaactggctctgtgaggtattgcaagttgatgaccaggctccctaggctccctacagaaccatccagtgttggggcctctccagctggaaaggaagctggtacctctaccagatcttaatatattttgcaactcagttctccggtcacctctgacagtgtgcctctctatccacggagtgatcatcaatcattgcaggagagagcgagcgagcagtgaaagcagagaaacttgactgctaacctccaggcccaagaaggactgaccacttttctctccaccacctatgggctataccccagctcttgtgcacctatatgttttatccctaatataggaagttgtggatgacactgagccccctgtagtaaccttaggatccccactctttcctgcctgcccctctcctcttgggagactggtccaaagggacacataatattgccagggtctgggtgcctccaaacccccaataccgaatcatatacagtgaactgagaagctacattcattatgacaggattagcaggaaaaagagggtagaatgagggaacaggggcaccttccatcagcaggacatgacagagtggcaggatacttgagcccagaaagaaggtgtctccttatatctccccctccccccagagagactgaggtcagcttacataagatatgttactgtcccaatttctctgacatcctggggtgctttctggaagctagcctgggccctatgccatttacccacttgctttagctcagtagctgccgaatctccttgtgcatatgacagagaaagtccacataagatgctccccccacgccgtccgcggacgcgtgggtcgacgatatcccggggaattccggacctgtaccagcctgctt

SEQ ID NO: 319046 - DNA, 435 bp, Homo Sapiens
aatgatataagcacatctttatttttcctttaaacacttaatatttacaaaacattaaaccactcaattttgactattgtatcaaaagtgatatattttgcaacatatactgtaatttaaataattctattaattttcaaaaagtacatttaattaccatactaattttcaaaagaagagcaatggaatgtcagaagtaatctttcactatgtgccagtagcttgagtggttatattctgaaaaatgaatgacacattttctgttattctttcaagaaaaggatctgtaagatttaaatgatctccagaaaaatgtttccattgcttcagctgggacatagaaagaggtttcagggagttagatttctggtgatgtggaccaagctgacaatctctagagacaatgaatttttccaacgaatcacctgtatgaac

SEQ ID NO: 319047 - DNA, 590 bp, Homo Sapiens
  misc_feature (15)..(15): n is a, c, g, or t
  misc_feature (29)..(29): n is a, c, g, or t
  misc_feature (75)..(87): n is a, c, g, or t
tttttggtttttttnatgtgccaaccggngtggttattttaacggtcctcacaaaatcagccggtattcttattnnnnnnnnnnnnncagaacattcatggatgggcaaagaaaggaaacaatgcagacgcctttggacttcaagagaaagcccatcaggaatctctgagagtgtcagctgagagagttctgtctctctccatgtaggatcctttctgcatcatgtatatcccaaaaggagttctgcgtgaaggtcatccatcttccctacagttcttagctgagcactgacacacacacatactccaccaatccaccaaactgcagctgtagctgcttatctgacccacactcccctggctctccacttttaggcacagtctttgttctttatcgccaggcccgattcaggagcttcacctgtgccagtctcttagtgatcatggtggcaaaaaccaggccaaagaggacgctgctgattaacacgtagtcatagtcatccttcagaacgtcaaactgcttggatgggtagactcgagtttggtaaatgtccaaccatagggcacaaccaaacaagtggactccagacc

SEQ ID NO: 319048 - DNA, 2123 bp, Homo Sapiens
  misc_feature (182)..(270): n is a, c, g, or t
  misc_feature (327)..(345): n is a, c, g, or t
  misc_feature (375)..(460): n is a, c, g, or t
  misc_feature (635)..(635): n is a, c, g, or t
  misc_feature (644)..(644): n is a, c, g, or t
  misc_feature (750)..(750): n is a, c, g, or t
  misc_feature (812)..(812): n is a, c, g, or t
  misc_feature (824)..(824): n is a, c, g, or t
  misc_feature (827)..(827): n is a, c, g, or t
  misc_feature (1147)..(1148): n is a, c, g, or t
  misc_feature (1154)..(1167): n is a, c, g, or t
  misc_feature (2021)..(2021): n is a, c, g, or t
aaagggggccaaagggtttttaatccccccgggggatttccggtttaataaaacccgttggggaggggttcccctttggggagaatgtttaaggaattccacccttttttcaaaaaaggccagggcgggggttaaattgaaattgagctcggtgggacccccgtggaaaaatcccgtaaagnnnnnnnnnnnnnnnnnnnnnnnnnnnnnnnnnnnnnnnnnnnnnnnnnnnnnnnnnnnnnnnnnnnnnnnnnnnnnnnnnnnnnnnnnggttttctttggaaacagttttggcccttttccttttcctttggggcccccgccccnnnnnnnnnnnnnnnnnnnttttttgggggccgggggggccgccaaggnnnnnnnnnnnnnnnnnnnnnnnnnnnnnnnnnnnnnnnnnnnnnnnnnnnnnnnnnnnnnnnnnnnnnnnnnnnnnnnnnnnnnnactcatatcttgtattttatttcttatgaaaatggctacccaaagaagtcattgtagcaggctactattttaaggcagcaactgtataacttaaatgctaagactcactccataagacagaaaacccttccccagggctgtaatgggcatttaagtttcccaaacccagggacanctaattttnattacctattgaatagaaacagctggattttaatagttcccctcccctatagctgaaaaactccacaaacaataattgactctatctacatgatctgttgactcangccagatatagttactaaaacacttagaattgtgatgttcaaactggcctctggctacttcnggggggttattnggngttacgcaatgacatattgccagcgacatggtgaatatactgtctttatagtcagcaatgtttagttgaggctaatcacgtatttattttttcaaaaggttaaatgtaagcttttccccactgaaatatatagaaaacccccatgtatgaaacaagttttaggcattggtgttggcagcggtagtgggctgatgtgtcctccctgcacacagctgggggcatgtagccccttcccctttgggtgaaccctggggaaattttggcaccctcagcctcactgcctttcaatttcagctcaaagactgggcatcctgcctggnncaacgnnnnnnnnnnnnnnaccaatgtccttcaagggagtacaagagtcaccagcatgactgcccatcctgcgtgtcctcctttcaggtaaataagaggtagcatagctgggatttcgcgtgccgaagtctaggtctttatatctagactttggggcttttcagtctttttggtaacaacacatttcaacaaattaatacttctacttgtgttcgtgtagcactcagatccagtggcacctcatttttacactggagtaaacagcaatatatgttcccaaactgtgagaaggtgctgaatgttcccaaatagcaacttgctccctattctgaatattctggtttctgaatattctggttctttttcttttccgtatattcttctagtcgaagaagccacttggtccagtactgggaacagagctctgcatccatgaaatgtgggtgggcaggtgatccatctttgtaggccaccacaattaagccacattgaactgatactcagccacacagtccagcagacctatatagtttaaggtttcatgttgaacagcactttcaagagctcgcactccactgacatctttcagaatatgctggacactttcaatgtaaccagacttgaggagattttcatctctctcttttaaggtttcctggggtgaaagtatgctttccaaggcttcgtggaaccgtttcccttgtaaaaagacgtttgaagtgtattctttaaagccatcttctcccagttccagaatcatccgctgtttccacctctccaacaagaaaacctgttgttttgtcatggtctgctgaaggactcgggtcacacttggtatcacatttctttgcaggggattttcaaaggaactgnaggatcacttgcatttggtttatcacttctctctggattgaagataggaaacagttttgtggcactcgtctgtcctcaccttggtttggcagcttatgcttg

SEQ ID NO: 319049 - DNA, 1054 bp, Homo Sapiens
  misc_feature (7)..(7): n is a, c, g, or t
  misc_feature (19)..(19): n is a, c, g, or t
  misc_feature (35)..(35): n is a, c, g, or t
  misc_feature (49)..(49): n is a, c, g, or t
  misc_feature (58)..(58): n is a, c, g, or t
  misc_feature (61)..(61): n is a, c, g, or t
  misc_feature (71)..(71): n is a, c, g, or t
  misc_feature (83)..(83): n is a, c, g, or t
  misc_feature (101)..(101): n is a, c, g, or t
  misc_feature (103)..(103): n is a, c, g, or t
  misc_feature (105)..(105): n is a, c, g, or t
  misc_feature (114)..(114): n is a, c, g, or t
  misc_feature (116)..(116): n is a, c, g, or t
  misc_feature (135)..(135): n is a, c, g, or t
  misc_feature (137)..(137): n is a, c, g, or t
  misc_feature (140)..(140): n is a, c, g, or t
  misc_feature (149)..(149): n is a, c, g, or t
  misc_feature (274)..(274): n is a, c, g, or t
  misc_feature (396)..(396): n is a, c, g, or t
  misc_feature (478)..(478): n is a, c, g, or t
  misc_feature (502)..(502): n is a, c, g, or t
  misc_feature (514)..(514): n is a, c, g, or t
  misc_feature (524)..(524): n is a, c, g, or t
  misc_feature (532)..(532): n is a, c, g, or t
  misc_feature (547)..(547): n is a, c, g, or t
tccacantcagtcgcagtnatttttgagctttatnccaacacatgacantgtgaagtntgntgagtgattntgccgagagccntcatgagccccaagcccntntntgccatcantntctgaagtcagatgatgantnttnccctcaccngcacacggttcgtatgacatccatggattggtgaggatggaggcagtgctgcagccagggccccgagacagcttgaaagacaatgtgagggcactccttaggacacaggtaggagagctgctctncatagaagtgatagaagggccaccagacagcactgtttgggatataggtaagcagtgaagccacatagcctcgatagaagccgcgaagtccatcagcctgcaggatctgcctgatgatgtcnttggtttggccaaaggcaactaccccttgtccctctggttcccccgcacctgaaagcggcccattttctcacccttgcgttncatcatcaggtgctgggagactanatcaatgggcantgtgatgctntgggccanaagggaggctgagcnaccagccaccagtgatttgactgtgttactctggctgtagtcagctacaaacttccggggtgagctcataagtggtgacataacactggccagagatgagggtgaaggtattgaccaggaaccctcggtagaggccagtgataccatctgctcgcaggatcttgatgaaggcatcgaaggtcccatggtagaggctcttcctccttctgaacttgcaaccgggtgcggatgagggtgaatgggtagacactgacacggatcatcattgtcattgccacaccaaacacgtagaacttcttcttgtccaggtgttcccactcgatgatctggatgtatgcgtattgtcctccatggtgcctgaagaccattctcagactccggcggctccaccgcgtctgaggcgaactccaagcccggacctctaggccgcagcccccagatctatccgtcgattcccagcgaatgccgtctgccggtcgcatcttcctccatctcgactgggctccc

SEQ ID NO: 319050 - DNA, 1238 bp, Homo Sapiens
  misc_feature (375)..(375): n is a, c, g, or t
agtgttttggaaggggcttagcaaatacatagaggaggagtgccaagaggacggagcaccacttgttctgttcatgacaggccggtttgaacattctgataggagggatccagagagagaagtggcagtggtatagatgctgcagacctctgacacatcaatcacaattttcttcttgtggaaactgaaggaagccctggttttggtccaaaagcagacattctgtaaaggagtcaggtcctgggtggggaacgaatcttttcccagcttttggccctttttaaagcggtgggaatggaggagagaggtttccgttgcctcctgatgtttgctcttccggcttgatctagttctctccagcctgtctattccccnttggcacaatgcggcccttgggaacactggcctcctgatgctctctccggacggcctcttgaagccctctctcttgacaagagtccttgcctgtggccctcctcttgcctgtgcttgacagacctggaccctctggtccatttcccaccaccagtttccttttacagcaggactctctcatattcttcccatctgcccgaaactcagaatcctcaggggttcctgagttcataaggccaaagagaactgacctgaggctggcgcgggtttggtggaccatcctggtgtccttggctcctcctgtcgctttctcctgggagcaggggagagatgctcggtccagggagacttctgggaggtggaggccgctcgggacggctgaggctgcaaccagacaggcggaggtgccgatcgagatgacactgtcccttggcgttggggacccggggcagggcgaggccagagagctgaacagggaggcactgatgcccagctcgtcgccgtccctgggctggccgcacacgctgaggtccgggctgaggcggccggagtcgcggctggggaagggcggaagtcggagcgggccgcagggtgtgctgcacttctgcgggggccgagctcgcagccccaggcgtcttggggtcacggttaggcttgggcgagctcgcagcttccagcgctttggggtcacggtcaggctgggccggtccttgggcactcggccgccgggacgcctccgccgccgcctcaccgggctgccggggaagtcggggtcgtcgggatcgtcaggatcgtcggactgcgaggggtcgccgatgctggcgtcgctgctgccgctgctgttgaagaaacgcctccgatcc

SEQ ID NO: 319051 - DNA, 1912 bp, Homo Sapiens
  misc_feature (155)..(155): n is a, c, g, or t
  misc_feature (197)..(197): n is a, c, g, or t
  misc_feature (1602)..(1602): n is a, c, g, or t
tccacctggatatatgcagaaaattttccgggcccgacaaggaggttcttcttttataaccggtctttggggcccccaaaaaaaggcttgcaagtctaccttttttcatacttgtcatctaatactatggatcctccccccccgaccagaaggtnaggttccgccctgcacaatgggccctggctcgggccacgggnccatccatcacatcgtggaagacttcttaccagactggactgccccgatcgggcccatcctacctttgaggcgtttcctggagacctgtttggccaccgatttgcgaagctcctatgcagagtcctgcttcctgttcgccctcacgcgccagaaagttgccacctttttgccagcaggggtacctgaggatgcagggactcgtgagtaccgagagcctttggcagcacagagtggagagcaggctcctgcgggactatgcccccacaggcaggcgcctggaggacagcagccagcagcttggcgaccaagagccactaggttcccccctggctccagggcctctggctcagtccgtcgatagcaacaaagaggagctctgactgtcccttcctaagctgtgggcacagtggccaggcctccccacctaggcccatggtcagtccctctttccccgcaacctcacactcccgccaatgcgtgattgccaaagaccactcagatcatggcagtgtctgcagcaaagccaccagatggcacgtgagggctgaaagtcggggatgcggtggtctcctccctcctgtcagggggcagaagggcatcctctgccaggtgggagctgccttccccagcccagtttgtctgcaatggagctgtcgctgagccccaggccagcccagttctgccccgtctcaagtgctcctcttccttccaagcccctcctcagatgggcctgcatcccgcctgtggaggcttcacagggaaacccatccgcatcttaagagtttgtagcaagcgctttaaaacaaaagctctgatatcctcaacaaccacaatgggcaggtgggattgttgccccagatgactgctgaagacaccagctgtgggatgtcaagtaattccagggacccccagctgggagtccccgtctgtgtcacttgccacacactgcctcaacctccccgccccattttcagcagggtttgggcttagctacagagcccaagagggtcagccctgcttatcatcataggcccagcaggctgatctcgagcagcgataggacagctccctgcaaagccatcttagcaactttctcactgagaagcaggattcagagctgctctccccagttgcaccccctgactcatcttccagctggctcttctctcccatcctactcccttctgtctccctgccctctgccatcctgaaccatgccttgcttctaacctgcctggtcaagttttgtgaaacttatcctgctgtctcgggctggcacccatatgtgctcaccatgtgtaaggtgacatttccaaatgcctttgtgtgataatgatgatgaatttggttcctagtctcttcttcattgcccttcctcaccagcaatctgcactttcccatcangcgtcttagtctcatttgtaagtgcataagataatcccagtgatttttccaagcccaggaacataagggattgcttttttcactgggtctttactaactcctcctgtatcccactcagaatttccaaggacaatccccagcacctcttgggaagggcccaggccagggtggtatccaccctgagggtgcagggaagttttgaaaaaccagcccttgaaccccaacaatgggagaagacacgcctaattctctctacttatagaaaatccccacaacctcttccccccggggggtgcggtaaaccccccac

SEQ ID NO: 319052 - DNA, 1005 bp, Homo Sapiens
  misc_feature (862)..(916): n is a, c, g, or t
tttttttgagttgtgtagccctttattagcaactaaaatagaaggtatctgttgtacaacatgggtagtaattgactataactggagatttattatattctaatacagatcatttataaatgcaatttctttattaaaaagcttccacctttttgtttgtttgtgtacaatttgcaaaactattctgaaagcggaatatatgtgcacaagtctgcaaagagtgcaaatttaggatatggtaaatgctttacaagttactttcaaaaaactgtctgccacaactgagcctttacattgtcatcttttttgatcaaaatattttgatgccagccttccttccactgccctaaactataaagcattttttaatgagttgaaattaaggaaggactacacctactagaaaaaaagagaagaaagttctattagtttgaggtttcagaatccccccaaaccaggaccagtatcgtggtaaaggctaggctgggaccccggacagagtatgagaatgtgcaggtggcatccctgaggattcagagcttcagtggaccgtgagtgctccagctgcataactcactgaactgtcttgccagtttctacactggctcgactgggcataattcaaaaacgaaaaactcatattcattccattcttctggagctctgtgatagcatttaataacaccccaatgggatgtcttccacatatagtattatggtatttcttccagtaattgctaaaagatacagggtctaattgttctataatactcatacccattttatctagatgttcaatggatctataaatcctccccctgggattcatcatagtaactgtaacggaacctttgaccttgannnnnnnnnnnnnnnnnnnnnnnnnnnnnnnnnnnnnnnnnnnnnnnnnnnnnnnaagcgcttaccaaataatttcagttctcatgaaaggcaaagcacagcttaagcctctgagagaatcattcccaagagcccttgtacata

SEQ ID NO: 319053 - DNA, 1963 bp, Homo Sapiens
  misc_feature (384)..(384): n is a, c, g, or t
  misc_feature (455)..(455): n is a, c, g, or t
  misc_feature (568)..(613): n is a, c, g, or t
  misc_feature (763)..(784): n is a, c, g, or t
  misc_feature (1493)..(1493): n is a, c, g, or t
  misc_feature (1511)..(1511): n is a, c, g, or t
  misc_feature (1514)..(1514): n is a, c, g, or t
  misc_feature (1529)..(1529): n is a, c, g, or t
  misc_feature (1533)..(1533): n is a, c, g, or t
  misc_feature (1535)..(1535): n is a, c, g, or t
  misc_feature (1554)..(1554): n is a, c, g, or t
  misc_feature (1568)..(1568): n is a, c, g, or t
  misc_feature (1575)..(1575): n is a, c, g, or t
  misc_feature (1579)..(1579): n is a, c, g, or t
  misc_feature (1591)..(1591): n is a, c, g, or t
  misc_feature (1599)..(1599): n is a, c, g, or t
  misc_feature (1608)..(1608): n is a, c, g, or t
  misc_feature (1610)..(1610): n is a, c, g, or t
  misc_feature (1614)..(1614): n is a, c, g, or t
  misc_feature (1624)..(1624): n is a, c, g, or t
  misc_feature (1626)..(1626): n is a, c, g, or t
  misc_feature (1628)..(1628): n is a, c, g, or t
  misc_feature (1630)..(1630): n is a, c, g, or t
  misc_feature (1639)..(1639): n is a, c, g, or t
  misc_feature (1660)..(1660): n is a, c, g, or t
  misc_feature (1675)..(1675): n is a, c, g, or t
  misc_feature (1677)..(1677): n is a, c, g, or t
  misc_feature (1691)..(1691): n is a, c, g, or t
  misc_feature (1697)..(1697): n is a, c, g, or t
  misc_feature (1700)..(1710): n is a, c, g, or t
  misc_feature (1715)..(1715): n is a, c, g, or t
  misc_feature (1719)..(1719): n is a, c, g, or t
  misc_feature (1725)..(1725): n is a, c, g, or t
  misc_feature (1727)..(1727): n is a, c, g, or t
  misc_feature (1733)..(1733): n is a, c, g, or t
  misc_feature (1742)..(1742): n is a, c, g, or t
  misc_feature (1752)..(1803): n is a, c, g, or t
  misc_feature (1807)..(1807): n is a, c, g, or t
  misc_feature (1816)..(1816): n is a, c, g, or t
  misc_feature (1827)..(1827): n is a, c, g, or t
  misc_feature (1836)..(1856): n is a, c, g, or t
  misc_feature (1868)..(1868): n is a, c, g, or t
  misc_feature (1874)..(1874): n is a, c, g, or t
  misc_feature (1930)..(1930): n is a, c, g, or t
gaggtcacacacgtggacgctagaataaattattcattgtatcaaagtcaacatacccactgcgaatcgcgaggacgcgacccataccctaatcattcgcaacgactacacacacaaaccagacacatgggagaggaaaccggccacgcctaacagaaaactgtatgtaaatcgtacccgtagcggcgccacgagaagataaaaagaaatcttctctcctcactcttatacactccactacatcacaacacgtaggcacaaagtacggaaaacaacatgcacgagtctgcccatcacaagagatgcagactgccggaccacgtccccagtcgtgataaacgaacggtgtttatctatatcctccaacgaatcagcaataaaccncacatgagccacatagcccaatcaacaagactacaacaaactacaatactatgctaaacacatatgcactncataggggaagaagataagagagatatacaacgcgtacggggacgagcatagaaaatcgaggctgttagggagatggagatagctacaaataggggcgcacataacgtgtctnnnnnnnnnnnnnnnnnnnnnnnnnnnnnnnnnnnnnnnnnnnnnngctaagaataactgtcaagtagcacgtcccatcctagaagactctggcaaccagcaaaaacaataaaccttgcactgccaaccacccccacgcgcgcccacaccgacccccagacctcgggcgcacagggcaaaactctggctaagaagnnnnnnnnnnnnnnnnnnnnnngggcaacgaagcaaggatagttgccagagagtagctaagtagggtaattaaaaaaaatatgcgtcatgatccactacgagttcgtgaagatgcagctgcagctggactagcactcgcatccaccggataccgggcatggggcctgcaggcacacagtcgcagccaaggcagcctgggcctgggccgcagcctcagctccctgctctgcggcttcatccacaaggcggcgtcaggcgttcctcagcaaccagatgcgggatgcccagggactggtgaacagcaaggcgggcagcggtgcggccagtgagctagcgtggccgaggccgtggtggtcctatgtcccatggagaccatcaaggtgaagttaatccatggccagacctctccaaatccaagtacaggggattcttccacagggttaggagattgtgcgggaacaccgggacttaccgggccccacaggccccgtgctgaagcagggctggaaccaggcaatttgtttctttgtcctgacatccctgcgcagctggtaccgagcggacagccccaacaaactcatgaacccgctggtcgctggggtcttcggagccattgtgggagcggccagtgtcttcggaaatgctcttctgcacgagatcgagccccagatgcgggaccttcaaagaatttcttgcccttcttgtggatgcaatgccaggacaagagcacnttcttttttttcctttgntgntagagaggttctttntccntnttcttagttccagttgaantgggtttgcaacantgccttntaanttaacattttantttttttntgggagatntntttntgcagagatntntntnttggctttntttttccacattcagttttgntgattttttccccantntccattggatcagntttggntgnnnnnnnnnnngcagnttgntctttntntttttntttgacagnttgggagagnnnnnnnnnnnnnnnnnnnnnnnnnnnnnnnnnnnnnnnnnnnnnnnnnnnntttntcagcattntggggaaaacnttttcgggnnnnnnnnnnnnnnnnnnnnnaacaggcttttnttagtnttcttttctttcaagtttatccgcaccacctctttttttccatttctatgcgaagnttgtagtcccgcagccctgcgaccagatcccgg

SEQ ID NO: 319054 - DNA, 1456 bp, Homo Sapiens
tcccatcttctctttaatgacaatgaacaacatttccccttgaacatctggatcattcatcagatgctcctgcaagctatcaaggactttctgaatctcactccgggccacacagctgttgtgcacaaccccaggtctgctgcagtcgtcctcctgaggcccagcctcactcagaagcagctctaagtccttgcttatgtcagggagaggagttcaccaataaagaaaatgactgaacacatcctcagtgttccctgggcaggcccaggaatctgatccagggtagctgctgatggggaggtcattcatgtcagaaagctttgagcgggcgctggtctctggggaaaccctggtccactcagctccagccgacacacagctttccacagggctttccgctgggccgtcagaggagctactgctgtgtgggcaatcactggtttttgctgaggttccttccacaggtagctctggctcgctccgcacaggctttgctgaacgagttaaactggcaggggaagtgttaccaccactgctgggagcaggggagccagaggcaaaaccagagtccaaatcctgggtgagtggccagatgctcagggcgccatcctctcgaagataaaggccagccctggaggggttgcaaaggtgaaagtgaaggggccaagggactggaaggcagcctggtgcacccatcggcaggggtcgctgacaagtctgatgaagagcgggaagagctgggttctgcggaccccaggggaggagctgtgcgacacagccgtgaagcattctgcacaggctttccgcatgccccaaacagcatcagagcagagctcaaagaactttgggatcaaaaatttctcagtggcttcttgtccaacagcatgacaaatatcaccaaaatttgcagcacaaaccttccgaacttgaaagagcttcctgtcaccacacagttcacagaatcgggggagtagcaggcgttcaacggtactcttactcagcattgaagccattttgcagattatctgattgtttggatctgtgaggtacctcactacaataggtatgagatattcagagagcaccactggaaaatttgatctgttttccttgtaaaaaaatggcaataggaggaatctgttccatcagctcagtccgcactgtgggctctgcatcttctgacaatctgactacaatctccattaccgtgaggaagtcttcttcattgttaccgaagtcccggaagatatcaagcagccctctggcaataatctgccggttgaaggtgttctcgctgaaagcatacttctccaggcgagtgagtggaggcaggttatcctggcctggaatgtccaagaaggccgttactctcatgttgtcgcaatctgtaccatagtcttcaaatccatagtcgtctaagtcatcctgcaagtccacaaagtacagggatctccga

SEQ ID NO: 319055 - DNA, 990 bp, Homo Sapiens
  misc_feature (8)..(10): n is a, c, g, or t
  misc_feature (17)..(17): n is a, c, g, or t
  misc_feature (23)..(23): n is a, c, g, or t
  misc_feature (35)..(35): n is a, c, g, or t
  misc_feature (39)..(39): n is a, c, g, or t
  misc_feature (56)..(56): n is a, c, g, or t
  misc_feature (65)..(65): n is a, c, g, or t
  misc_feature (71)..(71): n is a, c, g, or t
  misc_feature (73)..(73): n is a, c, g, or t
  misc_feature (85)..(85): n is a, c, g, or t
  misc_feature (103)..(103): n is a, c, g, or t
  misc_feature (176)..(176): n is a, c, g, or t
attaattnnnacgtcangtaaanataggtgatatngctnagagccaaatcatccanactagggcnatttcntnagaaatatccanaatgtcatcccagctgtnccacctgatccttcttcccattctctgccactaacatccgaattttcttcaggcaggctttggatgctctcanccagcgcaaggcatgggattatgagctcttgatcgtcctctgaccaatacaagtcctgattgctgggaaaccccaacacatcatcctcatgattgtggttgtcagagttgttctcctcagtatcattcaagaggccagagtaagggtcacattcttccacagcctgctccatttcttcatgtgcatccttcacaaaatccacattcttggtcagcatcaaaagagctgcagctttgttatctcttggtatctgaggcatctgctggcacgcaacccagacactgttgtaggaaataaggtcattgttctcagggctctgagttggagtgacggaaagtacttccatgagctgagccatgccatccacgatgtccagggtggcgccccgtaccagctttctcagggtgatcccctgatcctttggaagcaaatagtacactgcaataaatgccttgatggcagcatggacttgttcacagaacttctgggtttcctgtggagacggcagtggaagctgagagaagactatggtcagagtcgtggcttcccttgacacagtcacagctgcctcattgagtcttctccagaacatctctcgattaaactcctcggtggtctcctgggcttcgccgacccgcactcgaggcaggagcaaccgcagctcctccgccaagtgccggagctgctccaaaggcgaagccagggtggggactgcggctgcaggtgcagttgcgctcgccatctcagtcgcttgccgaaggccgcaaacacaggcctccgctgccactgccggagccgcactgcgacagccgct

SEQ ID NO: 319056 - DNA, 1302 bp, Homo Sapiens
ttaatttgatatcactggcaagttagcattttattgagaccatcaacatctttacaatgaaaacaacatactttactgcaaaaagagaataaggcagctttcctaggaatctctgagaaatgactcaggaatgagaaatcatgcaattatttttcatatatagcacagaaaaatatacgcatatggtttataaataggtgtcaatctggcctaaccaacaatctttggtaatagtgtctcttgctaaatatagataggcactccctttcaatccagcaagcattctagctccattttaaaagcaggtatcagagcctgaccatgacgatgagaggggaagagagtacaaatgagcctgaaaagtcataattcaagttcactctgagtgagctccttgattctattcatgcaatgatcaatggcattaataagtaaagggatccaactatcttctggctgaggggtcacatgacttgcttttgtaatttcaagtgccttctttaaaacagatacaagtttcgcagaattgattcgcacggtcaggtgacacataggtggatatatgctcagagccaaatcatccacactagggctgatttcatcagaaatatccacaatgtcatccagctgtgccacctgatccttcttcccattctctgccactaacatccgaattttcttcaggcaggctttggatgctctcaccagcgcaaggcatgggattatgagctcttgatcgtcctctgaccaatacaagtcctgattgctgggaaaccccaacacatcatcctcatgattgtggttgtcagagttgttctcctcagtatcattcaagaggccagagtaagggtcacattcttccacagcctgctccatttcttcatgtgcatccttcacaaaatccacattcttggtcagcatcaaaagagctgcagctttgttatctcttggtatctgaggcatctgctggcacgcaacccagacactgttgtaggaaataaggtcattgttctcagggcctgatcctttggaagcaaatagtacactgcaataaatgccttgatggcagcatggacttgttcacagaacttctgggtttccccgcactcgaggcaggagcaaccgcagctcctccgccaagtgccggagctgctccaaaggcgaagccagggtggggactgcggctgcaggtgcagttgcgctcgccatctcagtcgcttgccgaaggccgcaaacacaggcctccgctgccactgccggagccgcactgcgacagccgctccacttccgggccacagcccc

SEQ ID NO: 319057 - DNA, 386 bp, Homo Sapiens
gttaatgattacttttgttttctgctcttagtgtggatgatttggctctgagcatatatccacctatgtgtcacctgaccgtgcgaatcaatgtaagtactggctttgagggaatagctacagaacaaatgggcagaatttcactaatcactagtatttcctgtaagctatagggtacatatttattagtcacatttggatggaagtacaacagtaatgtcacagttcttgcatgcgtttggggttgataaatattcactgaagttgaattataatagccatgagctttggtagttctctcttccataatcacctgggtaatcattcagaaaagcccaaaggccttagaaaatgatgctttaaggctgggccgcggtagctcacac

SEQ ID NO: 319058 - DNA, 706 bp, Homo Sapiens
  misc_feature (39)..(39): n is a, c, g, or t
  misc_feature (68)..(68): n is a, c, g, or t
tctctagccaaacaagaaaaaaggagaagagacaaaatnactaatatcatgaaagagaatcatcactngatctcatggatattaaaaggataataaaggaatactacaaaccaactctatgctcacacatttgatcattcagatgataaaatgaacaatttcttgaaagacacaaaccaccaaaactcagtcatggagaaatgactgatgtgaacaggcttaccatgttttaaataaattgaatccattaataccttcccagaatagaaaacatcaggatgagggtttccacactggtgaattctggcaaacatttacggacaaaacgatactagtattctaccatctcttccagaaaacaaacagtggggatacttcttaactcaatctttgaggccagcacttccccaataccaaaattaaataaagacatcataagaaaggaaaattacagactaatatgtctcatgaacatgaatacaaaaatcctcaacaaaacattatcaaatcaaatccaagaatgtatacaaagaattatataccaagtggatttattccaaatatgccaggctgatccgtcattttaaaaaaatgaatcaatgtaatcaacttacgatcatttcaacggatgcaaaaaagcatttaacaaaatctaatacctattcatgataaaaactcagcaaacaggccaggcatggtggctcaa

SEQ ID NO: 319059 - DNA, 1585 bp, Homo Sapiens
  misc_feature (50)..(186): n is a, c, g, or t
aaaaaaaggttttaaaaaatttttggggggcgggggggccccacagttcnnnnnnnnnnnnnnnnnnnnnnnnnnnnnnnnnnnnnnnnnnnnnnnnnnnnnnnnnnnnnnnnnnnnnnnnnnnnnnnnnnnnnnnnnnnnnnnnnnnnnnnnnnnnnnnnnnnnnnnnnnnnnnnnnnnnnnnnnctctcataaagtagttttatttagatttcaaacaaaccaaagcagggaaaagagtcggccacggtgaatccgtccactctgtgctggacgtggctccaggacctggagctgacaggcaggaccgggcccctcggaccgctacacctgggcctcccaggctggtagtgtcaggaaacggccccccgcccacgttcccagcagcgcccccgtggctcctccggggtgcggccagtccggaagctgggggaccccggtagaagtcgggctcagctcccctcccgaggggacaggtgggccggccgctcccaccctgggcccgtccaccgagccccgagtgacgtgagtggcggtggggcagcccctcttctctgaagcacgtgaaaacccagaacagacatggggagggagaaaaagccaaaacgaaacaaccagaggagacggggaccagcacaaaacctccgtgaggtagtctgtcgtctaaggagccacgggtccggccctagtgaggtaaactcggcaagtttattctggtggtgtcaggactcctccgtgccagagtcatcctcatcgtccccgaagcagctgtcggcctcctcctccacctcgccgtcctcgtagtagtcgtcgtagaagaggtctgagccctcgtcgggcgccggcgccttggtcttcacgcagtactcggccagcgtggtgggcaccttcacgccgtcacgctccgcgtccaccttggtccccaggacctgcttccggatgatgtctgtgtactcccgatccttccccttgctctctttccacttcctgtacatcacggaggcgtccacgtttgcgggcgagaaggtgttgggctcgttcaggagggagatcacactcaggagaatggtcctgacgttctgcgtggggttccacctctctgagggcagctccccgctctgggggtcgtccaccggcgggtggaggatggagatacacacgtcccccgtctcgtagatgttagggtgccacatcttggtcaggaaccgaaaggctggtggagagtatgggtagtcgatggggaacttgaggcgcgccttgaagtagccgccctcgtagtaggtgttggggggcccgaagatggccacctcccagttgtatagatcgccctcgtccaccagtgtcacgcggaatccctcgaccggctcttcctgcagccccttgagctccagcagcagcgccttctgcgagctgggcactagcggccgagccatggcggcggcggaggggcccggggtcggagcagcgcggggccgcgcgaccaccgcgagttcgcgagacgggccgggccgcgcaccgtccgggggggagccaccggggccgccgcctgcctcctcctctgcgccggaaccgccgcccggggacc

SEQ ID NO: 319060 - DNA, 1018 bp, Homo Sapiens
  misc_feature (902)..(902): n is a, c, g, or t
  misc_feature (940)..(940): n is a, c, g, or t
  misc_feature (965)..(965): n is a, c, g, or t
  misc_feature (987)..(987): n is a, c, g, or t
ttgcgagacaaagtcctttattagaaaatatatcaaaatcccagccccctgagccaggaccagaagagggagctattccagcataggcagaaaatgcccagggaggggcttccttcaccaaacaacttcccgggaaccataaatagaataaatattcacagaggtccgaggagaagccagatcactcttctctccatggaagagggaggggcttggggtccagccctgctcctactctaggggcagggactcctaggaatcgtcacataaaatcatgacatcaaggattcacagtcataagccctacaggagaccctagagagagggacccctcaggtctacaggagcccagctccagtccagcagtgagggagaggcccctaccccctagcacggcaccagagttcagttccctcacatccctctgagaacagtgaggagctgagggtggggagaatacaaccccatgaattcggtttcatgattaaggtagacaggaaggaggagtcagtgtgaacctcggaggggctgtgtggttggcagtagatagaggcccaggcctgggctgggggccggcgttgcagcatctcttgacggaaggcttgggaggaaccaggtgggtaacgtggcccagaaggagcccgaggaccccgagggtcagtcccaatgtctgctgtgatgttggtataaagaggccccagctctcgagccagcaactggtatgtcagtgagttcatcccatcttgcgtccaggaattctgggtacggaccaggaggtcaaatctgtggggattttcctcattgcccttatctcctcggtgcttcaccatcttatagtgtcctacagatgtggggggccgagagatcttcatcccagccaggcgcaccctggtagcaatgtngttatcctcaccaccccagccccagttttcattggggnagccatttatcttcaggtactggtnaggagtgagttctgaaactccncgaagttctgggggtacgggaggctgtttcc

SEQ ID NO: 319061 - DNA, 1066 bp, Homo Sapiens
  misc_feature (978)..(978): n is a, c, g, or t
  misc_feature (1027)..(1027): n is a, c, g, or t
  misc_feature (1057)..(1057): n is a, c, g, or t
  misc_feature (1059)..(1059): n is a, c, g, or t
tgttagtctctcaatactttactggccatatcccccgatacccccacagcaatttcaccaacacagagcaactgccctcagccactctgatgtgatggagccaatccaggtgtcctagaaatatcctagaaatgcagagcatggggaaatcacagaaccctgggaaatgccataagaacctgggctctggaaagtgccatccacctcccctctggtcaggctggcggcactgacaaggcatccacagggcagccatgctatggcccagacctccggatatgcaggaaccggggcctcccacagaagtccctgcgcacagccacaagattaaggtacaggtcaggccggctctgaagccagctgctgacaagctccgggtgccttgggtccacttctaagaagatactaccagagtctttcaggagccggggtgccaaggccagaatgtgggtaatgatgtccatgccctcctccccaccatccagggccgcggggtcttcatagctgaaaggcaaagcagtgggaggtgacagcctgagaaaggggtatctgaaatgcatggagggcatgggcaaggcctccatgaatggggccctgtggaacttacactctgggctgaagggcaaatctgaggacccagagaaggagggccccaaatgggtggcagctcctcttctcttcctcccatgggcagcaccctaccaggcagcgccaggcatgcttgctgaatcccactggctgatggcctctcttgatgcactgactcatgtcagggcatgagtgtctccccacaggctgctcctcttcttggtctgggagatctggggctagcctgaccactcctgagagcccagaaagggagagcaacacccagccccatccaacatgactgctgccccatccaggactcctgggctgcccctggttctcagcccctgtgtaagagcaggatggcctggcacaaagctagcctggggncagcttttagtcccggctttccactgagccccatgcgacacagacaganacttccctctctgggctcagtatctataantntgcgcca

SEQ ID NO: 319062 - DNA, 515 bp, Homo Sapiens
  misc_feature (43)..(76): n is a, c, g, or t
tttgcctactcccggggccttcctccaccacccctgcatttannnnnnnnnnnnnnnnnnnnnnnnnnnnnnnnnngctaccctaactttgccaggcaccttttcccttccatccatcttaaaggaaggaagggacgggctgagttccccgacgagagacacacccagattttcctgcagcttggggagaggtcctcccaggagccttggtccctcctggcctgccggagtccttagccaggatggagtgctgttgtgaacttgtaccaagaggtgatgaagcacgcagttcctgatgtcgggctggctgagcacctatacctggcgctgtgaccctgtggactattccaacagccctgaggcacttaggatggttcgggtggcctggctcttcctcttctccaagttcattgagctgatggacacagtgatctttattctccgaaagaaagacgggcaggtgaccttcctacatgtcttccatcactctgtgcttccctggagctggtggtggg

SEQ ID NO: 319063 - DNA, 930 bp, Homo Sapiens
gaaagtgcacgggggcagcccgcttgccctttggtataagaagtgataccagaagttggagaaccagcatgaagaaagatggtgccatacatccagatgaggtgaataatgactgggtactggtagttacagctggacataaagtagtactgggagatgtgcagtgagaccaggacaaactggatcagctgaatggctgtcatgtgctttttccaccaaaggtagggttgtgccacagggccaaaggcagataatccgtagtacaggtacattatgacatgcacggaagagtttatcatggcatggaaagagcccattcctcccgggggcaatctttaccccccaccaccagctccagggaagcacagagtgatggaagacatgtaggaaggtcacctgcccgtctttctttcggagaataaagatcactgtgtccatcagctcaatgaacttggagaagaggaagagccaggccacccgaaccatcctaagtgcctcagggctgttggaatagtccacagggtcacagcgccaggtataggtgctcagccagcccgacatcaggaactcatagacaatgtagagggagagtgccaccagtgagaagttgtagacaatcatgaagccacggagctggaagggcttccgattagccatgatgcgaggcccaagtgagagaacgaagtacacgtaggtcaggagaatggaggtcattagcaagggggaccccatcagagggtagccctggatccggggatctgcgtgcttcatcacctcttggtacaagttcacaacagcctccatcctggctaaggactccgtaggggccaggcgggcaacggcggagcgctcggagggagcagggccagagagaagtccccggggccagcctgcctgcctgccacttcctcatctgctgggccgactttt

SEQ ID NO: 319064 - DNA, 1275 bp, Homo Sapiens
ggtttcctctgtcacttttaattaagacacaagttgagtaagcagcctccacaggctgtattcccaggcccccgcccaccctgacctttggcccagaagctactgcttcagtgtgtggggtggaggagtgagactgggtccacagtgacattattgctgacctcttctgtgtgaggaaaaaggccacgagaccctttgtggggccagccctgagtgctcctctcccaagttttaaggcagggagggggaaataactgtacagcccttttagcccccagctctggagtggcagacagcaatgaggccacatccctgggagctgcccgggggaagtgggtgaggaaccaaagccgtggtccctgtagagcagctgtggggaggggagggccagtcccctgctcagtcctgaccacataagccttggtcacaggtgtaggtggagagggcactgacggacactgccctaaggtgcagtcctgaggcacttaggtgggcgcctatctaggccatgcttctcagttggccttgaccttggcaatacctggagctccattttgctgaagtgcacggggcagccgcttgcccttggtataagagtgataccagaagttggagaacagcatgaagaagatggtgccatacatccagatgaggtgaataatgactgggtactggtagttacagctggacataaagtagtactgggagatgtgcagtgagaccaggacaaactggatcagctgaatggctgtcatgtgctttttccaccaaaggtagggttgtgccacagggccaaaggcagataatccgtagtacaggtacattatgacatgcacggaagagtttatcatggcatggaaagagcccattcctcccggggcaatctttaccccccaccaccagctccagggaagcacagagtgatggaagacatgtaggaaggtcacctgcccgtctttctttcggagaataaagatcactgtgtccatcagctcaatgaacttggagaagaggaagagccaggccacccgaaccatcctaagtgcctcagggctgttggaatagtccacagggtcacagcgccaggtataggtgctcagccagcccgacatcaggaactgcgtgcttcatcacctcttggtacaagttcacaacagcctccatcctggctaaggactccgtaggggccaggcgggcaacggcggagcgctcggagggagcagggccagagagaagtccccggggccagcctgcctgcctgccacttcctcatct

SEQ ID NO: 319065 - DNA, 1562 bp, Homo Sapiens
  misc_feature (23)..(23): n is a, c, g, or t
  misc_feature (261)..(289): n is a, c, g, or t
  misc_feature (350)..(350): n is a, c, g, or t
  misc_feature (1077)..(1077): n is a, c, g, or t
aaaggaaatttgcttaacactanagaacatttcaagacttgagttacaaaagaataccacattatttgcacttagtaattggcttccctttttacgcatgtaggcaagagaaataaaaaaactagcatatggctgaaagataaaataactaaattctatggaaacctttaaaatgaaaggtgaggcttatgttaaaagaatagattaacataatttagtaaacctatttctttgtttaacactagttaactcacaagttannnnnnnnnnnnnnnnnnnnnnnnnnnnncatatacagactggaaataacaaaattttacatgtctttttattattcttctttttcttcnagcccaggttgatgtttcaacaaacgtagttttaagttccatccattcagattttaagcattttgatttatttaaaaagggattgttcatagaaaaaaattactttgaacagtatacaggactggtgcgcagattggctatttcacaacatcagacagtacaatcagtatctgccatatggctggtctctgtagacgccctttgctgtcctcgctgaaggtgccttgtgtcttgagttagtccactcttcttgcccgtaggaatcataagtctcctcactgagtccatgtccgtaatcatagtaatcagcaccactttgggctggggtgctatagctgttatcataggaatcataactctgttcatcataagcagtgccatatccatcatcatagtcatattctccataagtctcttgtgtcgggggtggcggtggaggtctgtacccagttggggggactcctcttgctctgggagtgagaagtcctcttccccgactcactggccctcgggtggacaggactcctctgggagttggcgtccctcgtggtactacaactccaactggccgggctgtaactcctccccttcccctggttattgctggggctggtacacctcttgtacgcaaggtgggtttccctcgaaccactggaacatctgcattttctgaaccaccattcaaatatgttaactcctggagctgtgcttgcctgatctcatcatnataatcagggatgaggaactttttgatttcttccaaagcatgtcccatcctggcataagcttctgcaggtggggcaaacacttcaatgagaacatgggagatcatcattgagatggaagtacttcgcttctccacttttcctcaactcttcttccttggccttgtctctcatggaacctttcccaaggatggacatttttgtcaaggtttcttcttgtaaacgcttcagagaattgccacgtggacccaaaagtttccccacaaagttgaacttagggaactgttttacgggaattaacactttctgtcccagcttcatgttcttattaatcaccacatcgatgtacttttcttcatccttgccttctcctttttgaaacttttctatttcttggttcaccaggcgcagggcgtgcgtgaaggaggggtccagggagtccttctccgccatcagctcgggcaggtacttctcctccatgctcgcc

SEQ ID NO: 319066 - DNA, 348 bp, Homo Sapiens
  misc_feature (15)..(15): n is a, c, g, or t
  misc_feature (42)..(42): n is a, c, g, or t
tggttccagggcctnagttagagtctgaaaaatgaagccctntgggattccatggcagtgatcctaattgtgattacatccttactgattgtagggcaagaagagtggactaactcaagacacaaggcaccttcagcgaggacagcaaagggcgtctacagagaccagccatatggcagatactgattgtactgtctgatgttgtgaaatagccaatctccaccagtcctgtatactgttcaaagtaatttttttctatgaacaatccctttttaaataaatcaaaatgcttaaaatctgaatggatggaacttaaaactactttgttgaaacatcaacctgggcaga

SEQ ID NO: 319067 - DNA, 2997 bp, Homo Sapiens
  misc_feature (152)..(161): n is a, c, g, or t
  misc_feature (288)..(311): n is a, c, g, or t
  misc_feature (430)..(442): n is a, c, g, or t
  misc_feature (454)..(455): n is a, c, g, or t
  misc_feature (457)..(557): n is a, c, g, or t
  misc_feature (560)..(567): n is a, c, g, or t
  misc_feature (593)..(613): n is a, c, g, or t
ccccgagggggccaagggggtgggaattccccctggcgggatttcagggttcctctacacccccgtttgggggaggggtttccccttttcgggccggggaaggttttatattggattttccaccccctttcttcccaattaaagtgccacannnnnnnnnncgttaatttttgttattgggaggcctcgcctgggggccccccggtgagtaaaatcccccgataatgggccctccaaaaaccccccttttgggatttgtttttagaaaccctctgggtttcccccccnnnnnnnnnnnnnnnnnnnnnnnnattcccaaccccttgtttttgtccccggtttttctttgggaaaaaggtttgggccaagtttccttttccttttgggggcccgcgcccccaaaagaaaggtttttgaaaagttttttgannnnnnnnnnnnncgccgcaagggnntnnnnnnnnnnnnnnnnnnnnnnnnnnnnnnnnnnnnnnnnnnnnnnnnnnnnnnnnnnnnnnnnnnnnnnnnnnnnnnnnnnnnnnnnnnnnnnnnnnnnnttnnnnnnnnttacagttgcctgtttattatttttnnnnnnnnnnnnnnnnnnnnngacattcaaaattcccctgtggtggacaactgagttgatgtggctgatccaggctgtctcccaggttgtctcagggagcatcagttgtactagggggtgggctgttgccctggcacggctggatgaacacttgcaccagggatggccatcagaagagctgcaggccagttttgagcccatgcagctgcccctggctccagagaaggccctcgaagttgctgctgctgctgttgctgcagttgccactgccgacaccacagctcaggcccaaggtgtcagtcttgcatgttgagggttccagccgctgctctagcacaggctggtccaaaagatacatggtgtcataattctccagcatgagctctgctgggtcctcggtctgacctggcattcggcctaggggaaatgtgtcccatcgcacgtcttctgagctaacctgccatgcagagccctgcaaagctcctcttttctgggccagaagcctagcattctcggcagtgggggactcttgccctgtagagaaaggccccacctccattctgtcttcctcttcatcatcttcatcatcttcatcctcctcttcctcctgttggtcatcattttcttcctccctcctctacctggtctggcaagacgtctttctcctccttctcctcttccttgacatcattaacactgccctgctcctcctgttgctgggcctttgcttcagacccgaagctggagctggctggcttgacgctccaatacaggctgtctagtgtatatggagacttcccaatgggggaggcctcagagccctcctgcaccaggctgttttctccactctgggtataaatggaacagatgcgcagcagcttctcctgctcctcgtctggcaggccctgccccatggctttgaagatgatccgaaggagttgggggctggcccagcaaggtgagcccaagcaggactcaaccatccggggccagtcaagggaggcggagcagttgaacagcctccagccccttcttgcttcccactggcctgcagaaaatcggcgagcattccgtccagtcttggtgttggccacgatcagttcaacggtccatctgaggatgtaggtaggccggatcccgctgatccccaaggctggcagttcagagagcatcctctccaatagggcctgcgtgaagttctgggagtgcaggcccctgagcaggggctgccagaactgagagaacggctttggcaccaggacgtcattcaagtccacgttttctgtcatattctatctgcaaagctgccaactgttcaaatgtggggacaaggaagccatcatccagaaaagcatccagcacagcctccctgttctcgcatgtaacgcccttgagctctgccaggacacattctacacgtggggacgggttattccacgccttaatggccttacggtaaatacctaaatttctccagcaccgtaaactgctcctcttcgtatgataccagcagttctcgggctctttcatatagctctttatgactcagggcactgttttgcaatgagaatccacctcttcgctgcctttgctgtctccatcggcctttacatctgactccgtacttttcccatcatcctgaggctctggtttctgttctgtgatgtcatcaacaacaatgttcttatcttcctcttgatcctcttcctctatcccttccctgaactcctccaactcccaggtctctctcaggctgttctccagttggcggcaccaataggtcttctggagccaatccaggacaaagtagcagcctctgcggcagtcatttatatggggcattttcttgtgggtcagctcatggggaaggtcaccaatccgagtgcggaatatttacctcttgagccagacacttgagggggaccttggcaaactttgtcttcctctctgagataagattcacaaacctgaccaatgccatgccatagagcagtctaagttcatcagtgcccaagccaccagttacatccaagagcttacagcgtatcaggtcagcagtagaagccactgccagagggagttcgttgcctgacctgctcctccacaccgtgatgcggttaagcgcgtaccgctgcaacttatggtcgtcacagaacagataaaccgtcacctggtcccactcggccctgctgagccaggcgaccacgatgccgtgggccgagagtggcaacgaccctttccctttaacgcactttccgtaccacgcactccacacgagatccatcccctgggaacctagacctggcccggccccggattcccacgacatactgagctcaacaacaggctctgtgccgcgccgctccgcacagccttcagctcagcgtgctaccctcactcccccc

SEQ ID NO: 319068 - DNA, 1436 bp, Homo Sapiens
  misc_feature (5)..(5): n is a, c, g, or t
  misc_feature (436)..(436): n is a, c, g, or t
  misc_feature (508)..(508): n is a, c, g, or t
ataanattcctcctctccagcaagtatacagaaatcttcccttactccaatttgacgctgcaaaatcatacatgcaccccaaactgatctgttattgaaatttctttttctggtctcacccattactttaacatatcagaggaattaacataacagcctagagaacagaaataagagataataggtgcttcagtaccacccaaattatctactaagaccacagtgtgggcaacagaatgcagattcatggtagtagttccttgaatgaaagagttcagacagaatcttccacaaacacaaatttttgcggtatccaaatcttggcagagatggaatggaatgatatgagagccatatggaatcctattatgtaatatggttcgtgcagaagattccaataaagttaatggtgcttgcagctttattactggaaggncttttggttgttcaaaagtatttcccaaaagatccaagtattcaagggataaatttctaaattcactaggcnaaaaatggaagcttatttcgagctgctgacaaaaagcgaaggtttattagttgtcctatcttgcaaggagattgaatcaattcattatcgtcaagttttaaattcttaagttcctggagctggcaaaactgcacagggagtgccttgattttgttcttgctgaggtccaaactccgaagtgacttctggagtgtagaatgacacaaggctacactaaatgactccaagtgattgtcattcaggttaagttcttgaaggtgtatgaggtctcccaattgtagctggaagcttttttatatggttgtgactcaagtctaatttccttaaggctttttaagcaaagcatacgcatatcaactcggacaagcccacagtaagaagtctgaagatgttccaaggaatatggaaaattcttacttagaggatagtcttttttggatgtgataaccattttagttttaaagttttcaaattctgaagtcttcactggtgtgagcgttgaaactggtgtatcaacattacagcctctatgagccagtctcatagctgaaaggaaaccttttaaactgctggaaatggccttacttagacagatatccacaggaggctcctttaaccgaacagtggctttcccctcatctacaaatttggtgaagaattgctcaatgttctcccttagctcatagcgggtcccgcgcttgtccttcagggtggagatgagcaggaaggctcggaccggcggctgactcctggaagtctgctgacagaggctcaacacggctcggacgcccttgccccggttcctaagccccaaggcgggcaagtgccggctgatcacctccacctcacagtgtagcttcatctcgcccaacggccacaaccacgtcaagctggctttgaaacttcctccttcccgccacccggcgcc

SEQ ID NO: 319069 - DNA, 1031 bp, Homo Sapiens
  misc_feature (851)..(851): n is a, c, g, or t
  misc_feature (964)..(964): n is a, c, g, or t
atatttttatttttggtgtgttaaaaattaaaatgggttttaataaaagttttgggggtcattttaaatgagtaagtaatccgatccctcttttccggccagtatacagaattttcctttgttcaatttgacggggcaaaattatacaggccccccaaactggtctgttattgaaattctttttctggtctcacccattcctttaacatatcagaggaattaacataacagcttagagaacagaaataagagataataggtgcttcagtaccaccccaaattatctactaagaccacagtgtgggcaacagaatgcagattcatggtagtagtaccttgaatgaaagagttcagacagaatcttccacaaacacaaatttttgcggtatccaaatcttggcagagatggaatggaatgatatgagagccatatggaatccttacttagacagatatccacaggaggctcctttaaccgaacagtggctttcccctcatctacaaatttggtgaagaattgctcaatgttctcccttagctcatagcgggtcccgcgcttgtccttcagggtggagatgagcaggaaggctcggaccggcggctgactcctggaagtctgctgacagaggctcaacacggctcggacgcccttgccccggttcctaagccccaaggcgggcaagtgccggctgatcacctccacctcacagtgtagcttcatctcgcccaacggccacaaccacgtcaagctggctttgaaacttcctccttcccgccacccggcgccgccatcggggtcctcgcgcacggggcttgcccactgatctgcctgcctgttggactggtccgcnactcgggctgtcttagcacccgtgtctgtatgaagcccgcgggaaacggcttcccttctccccttaagcagggccgggtttctcgccgtggtttgcgtaaccgggactgaacnacctgggattccggggcttcgcgccgggaaaaaccggcaagtcggcgggggcgcaacgttctttttt

SEQ ID NO: 319070 - DNA, 943 bp, Homo Sapiens
  misc_feature (815)..(815): n is a, c, g, or t
  misc_feature (902)..(902): n is a, c, g, or t
  misc_feature (910)..(910): n is a, c, g, or t
  misc_feature (917)..(917): n is a, c, g, or t
  misc_feature (919)..(919): n is a, c, g, or t
gggatctgggggcggcctgggggagcagccttagtgtcttcctgctgatgcaatccgctaggtcgcgagtctccgccgcgagagggccggtctgcaatccagcccgccacgtgtactcgccgccgcctcgggcactgccccaggtcttgctgcagccgggaccgcgctctgcagccgcagacccggtccacacggccaggggctacgacccttgggatttgccctccgctcagctcgagcttccctcgtggccgacggaacaatgaaggattgcagtaacggatgctccgcagagtgtaccggagaaggaggatcaaaagaggtggtggggacttttaaggctaaagacctaatagtcacaccagctaccattttaaaggaaaaaccagaccccaataatctggtttttggaactgtgttcacggatcatatgctgacggtggagtggtcctcagagtttggatgggagaaacctcatatcaagcctcttcagaacctgtcattgcaccctggctcatcagctttgcactatgcagtggaattatttgaaggattgaaggcatttcgaggagtagataataaaattcgacttgtttcagccaaaccctcaacatggatagaatgtatcgctctgctgtgagggcaactctgccggtatttggacaaagaagagctcttagagtgtattcaacagctttgtgaaatttggatcaagaatgggtcccatattcaacatctggctagtctgtatattcgttctacattcattgggaactgagccttctcttggagtcaagaagcctaccaaagccctnctctttgtactcttgagcccagtgggaccttatttttcaagtggaacctttaatccagtgtccctgtgggccaatcccaagtatgtnagagcctngaaggtngnactggggactgcaagatgggaggg

SEQ ID NO: 319071 - DNA, 929 bp, Homo Sapiens
  misc_feature (626)..(626): n is a, c, g, or t
  misc_feature (781)..(835): n is a, c, g, or t
  misc_feature (899)..(900): n is a, c, g, or t
  misc_feature (908)..(909): n is a, c, g, or t
  misc_feature (926)..(926): n is a, c, g, or t
tgggatttcaaaagtttatctcaatctcctcattcccagacttccaggtgggaggcaggccgggcagtaatgtgagcatctcaaggacaccacagtcactgcgaccaagccagtctgtgtcctcatttacacaatgaaggcgatggaccacatagtctctgacgtcccactgcaccctgacagctgacaaatctgtttgtcctcaaagacaggtctgagagggaggaaaactgatggggatgatgagttagagctccgggctccctggggctggaggctcatccatcagctgccggaggtgagaggctgccttgtccagttttgacaattccagctggagggaagaaagcttttgttgcctctgagtccctgcctccccttctgatggggtcctggctgtgaggctgtcaagctgcttctgcaacttgtaccttcgggcggctaacagaggtagctggatctgcgggtccaccaggccctgcagctccatgtagacttgagccgtgtcactgagtggagcctgggcccagccggagggagctgctgcgcctgggggtaacaggcccacagccccacagtagcccagggtgcccaggggctccaagaaggcctcgaagaggccctgngtccccaggctctgagctctgcagcagcactcggggccgggctttggtgagctggtacgtggctcggagagcctttagcacctgcacgacctcttggacccgggagaagcgccgctccagctctggctggcgcagtgctccaagctgcaggcgcnnnnnnnnnnnnnnnnnnnnnnnnnnnnnnnnnnnnnnnnnnnnnnnnnnnnnnncagctctgccagagctcttcagccacggaggggatcagtggggccaggaggcggaggccagggnngcgcagannacaggacctgagggggncca

SEQ ID NO: 319072 - DNA, 936 bp, Homo Sapiens
  misc_feature (370)..(370): n is a, c, g, or t
  misc_feature (917)..(917): n is a, c, g, or t
aaatgtcagaagttacatgtaaatgaattcacagtcaataaagtccacgtctacctggaaatacaggctcggcctctgcactgtgcgcacacgggcttcttgtgtctattcagatgcgcagggaagctttggcactgatttattgctcttgagtcattttccacagcttaacaccacccttctcagcacacgcctctgatgcacaccgctgcgccaaggtcacggtctgtgtctccagacacccttgatgagaaaatacattttctgtcttagaagcacatttcaggaaacaagagtggcgctgaccacggtcaccatgcctgttcacaacacatctcacactatttgtcgtttatttctgatctaaaanactgaaacttttgacacgtacaccagaaacaacacattcaataacatagaagaaatgtctgcgaatgtcttttctatttgttttacacacttagttcatctaactggcagttttgtaaacataaactttaatatcaagattcaaactggaacaattttcttacaaagattgtgagttgaaatttgtcattttgtttgcgcggtgccacaccagtcccccacccccaccccacagcctttcctgcctgtttcccacatcaagggatatcagtttcatagaataaggattaaagtagctcaagcttaccagagattagcatttccacttttcccacccagctcatttctttaaaaactaatggggctattggtgcaaatttattcataatagaagtgaaccagagggccagtgggggctctttcctatcagcacatcacagagcagacagactacctgcagggagagttctgcacctcacgggcccagggccgtctcttcccagccctctccctcacatgctctgccagtctacacacactggagcaancccagctgtctccaccaga

SEQ ID NO: 319073 - DNA, 1194 bp, Homo Sapiens
  misc_feature (37)..(37): n is a, c, g, or t
  misc_feature (169)..(308): n is a, c, g, or t
  misc_feature (527)..(528): n is a, c, g, or t
  misc_feature (535)..(535): n is a, c, g, or t
  misc_feature (539)..(541): n is a, c, g, or t
  misc_feature (545)..(547): n is a, c, g, or t
  misc_feature (580)..(581): n is a, c, g, or t
  misc_feature (586)..(586): n is a, c, g, or t
  misc_feature (588)..(588): n is a, c, g, or t
  misc_feature (595)..(595): n is a, c, g, or t
  misc_feature (597)..(598): n is a, c, g, or t
  misc_feature (600)..(601): n is a, c, g, or t
  misc_feature (634)..(634): n is a, c, g, or t
  misc_feature (642)..(642): n is a, c, g, or t
  misc_feature (650)..(650): n is a, c, g, or t
  misc_feature (655)..(655): n is a, c, g, or t
agaaattgcttactttatttctttaacaatgaaatangtaataacacaataattcaggttgtaacaaagccaccaacagagcaaaacaaaaacaaagctaattaagaagcattgcttcagctcaaattagttatctcctttaaacaggaaaaacgaccattagtctacnnnnnnnnnnnnnnnnnnnnnnnnnnnnnnnnnnnnnnnnnnnnnnnnnnnnnnnnnnnnnnnnnnnnnnnnnnnnnnnnnnnnnnnnnnnnnnnnnnnnnnnnnnnnnnnnnnnnnnnnnnnnnnnnnnnnnnnnnnnngtgctgttagtgttgaaaactacaggtctaaagtaataaggaataaaaccatgcctcgaagcaattcaaaaccaagaagctgattatacaataaattttttcctctaatcctgggaaaacagggggaagcaggcaccgattcagttttcatttttctttatccatcttcagttgcccatagtagagcttaaccaacatcaaatattggaagctttgccnncccgctncccnnnttgnnnttatcactactttacattttgaaagctcttttnngacantngcttttncnncnntcccgcccatcttaagtttgcatagatgttcangtcagctntttgttcnacttncagagtcaatagaatgtattagaaagtactttattaacaagttattataaaacaatattcattttatataccacaaataaactttttggtgcagataggaggaatatttgagtttttcccacctatttctaaaactgctagaatttctttttataagatcagtaccttcaattctagaatttaaacaaaactttttgctctaagaatgcatacataaaatacttcccctacaactgtactctatccttgaacaaatccttattaagaggttcagtagtaactgtaggtatttaatgtcagaacaatctttcttcatttctcaggtttggaaatataacttcaagtatggaaaataacttttcccttaagaatacgagaattcacttagagacatctcctcaaatcagccaatcccactgcttcggctccttacatcaggactccatgtcaacctcagccccttcattcctgccctgaagtgttgcttctgtcagggtgtcttcacttaaatcttcaatgtctgccagatcaataggagg

SEQ ID NO: 319074 - DNA, 1037 bp, Homo Sapiens
  misc_feature (769)..(769): n is a, c, g, or t
  misc_feature (805)..(805): n is a, c, g, or t
  misc_feature (810)..(810): n is a, c, g, or t
  misc_feature (834)..(834): n is a, c, g, or t
  misc_feature (838)..(838): n is a, c, g, or t
  misc_feature (840)..(840): n is a, c, g, or t
  misc_feature (842)..(842): n is a, c, g, or t
  misc_feature (857)..(857): n is a, c, g, or t
  misc_feature (867)..(867): n is a, c, g, or t
  misc_feature (877)..(877): n is a, c, g, or t
  misc_feature (908)..(908): n is a, c, g, or t
  misc_feature (917)..(917): n is a, c, g, or t
  misc_feature (936)..(937): n is a, c, g, or t
  misc_feature (939)..(939): n is a, c, g, or t
  misc_feature (973)..(974): n is a, c, g, or t
  misc_feature (976)..(976): n is a, c, g, or t
  misc_feature (1011)..(1012): n is a, c, g, or t
  misc_feature (1014)..(1014): n is a, c, g, or t
  misc_feature (1021)..(1022): n is a, c, g, or t
  misc_feature (1034)..(1034): n is a, c, g, or t
tttctgggggctgcttttatggggacgacctgacagagggcatggtccgtacaaaaccgggaacaatacatacatatatatattatatacagagatgcggccctcccgacggctgggcaggggtggccgctggcccaagcagcccgaagcggccccgcccacccggttccgccccctccatctgccggggtgaagtgcgcgacccaggacttagacagccagctccttcaggggatgggggcacatctggggataggaagggcgtggggacaagaaatactgatcgaagtcatggtctatttacaggggacaagaagccaaaacggatgggatgggtggtctgtttttaaaaaatgaacaaaaacccagttagggcaggggcatgaagtggcaaaatgagatggattttgaaaggggaggggacctgggggaggtggtctcacctcccttggtccaagccccaatttggggttaaagtggggaaacagagtcgatttcacttagaaggacaggctgccagcagggcagccctggtctccaaaaagatgagtagtagtaaaattttgccctccagttaaaacattggaaaaccagtagggggtgggggcgaggctgactccctgcaatgtcagttaggcttccatggcatcgccctgggcttgggcagacagggcagcacaggataggacctgactctccagggagaaatgttcccctttgcctaagatcagggtcgctgtagccagaccccctttcctccctggcattnccaggcttgaccaggaaacctggaccccagagaggncacanaacagtccaagacgaggttatggntatntngnacctggaagaggggnaggacaaggngaatttgagngctgctgcccacgcaatggggagctgggggncaggtgtcntgaactctccctttttccnntntcactcccccttttccggaggacacatgagacannantgagggcgagggcaggccacctccgggtcgtgggnngntttatcnnccacgcaggcanagg

SEQ ID NO: 319075 - DNA, 824 bp, Homo Sapiens
  misc_feature (324)..(324): n is a, c, g, or t
  misc_feature (374)..(411): n is a, c, g, or t
aggggcggaggtcagaatgcaacagaggcggcacaatgatggggggagagggaaggcccgagaaggtagaatctcaagtcaagaggcccaggggccacccaggtgccccatgggcagggagcagcccccagttggcagatgctgggagagccccagccccgttccagtccagagacaaaagctggagtgtgtaaagtctggcagtttgatctgcaggtgcttgtgtccgtcgaccaccaggccagccctcggcagccctcggcctctgtgcctcagccccatggggcaagaaagaggctgcccttctagccacctctgtctgcncaggccatcttaagggggcctgtgatatgagccctctggtccctgaagcnnnnnnnnnnnnnnnnnnnnnnnnnnnnnnnnnnnnnnacctgtccccaggctggaagggggaggggtggggtgttgaggacaggggagggaggacaatgggaggggggttaattattgtccagtcatggaatgattcctgttaagtagaattggaattcctcagtgtttgcaagtttccttccagttctgagatcttgtccaggagcttgtccatctcctcctttctggccagctccgactcctccagaacccgacgctgtgcagtctcctttttcaggaactcgatctccttctgctggtagtccttgatgaggcgcttggccttgctgtacttgcgctccagggcctggtactgcgcctgagtctcccgcaggtgctcgtccacagcctggcacaggctctgggcctcaccccagtagccttccagtttctccatgcgctccttgatc

SEQ ID NO: 319076 - DNA, 621 bp, Homo Sapiens
  misc_feature (430)..(430): n is a, c, g, or t
  misc_feature (457)..(457): n is a, c, g, or t
  misc_feature (463)..(464): n is a, c, g, or t
  misc_feature (475)..(475): n is a, c, g, or t
  misc_feature (493)..(493): n is a, c, g, or t
  misc_feature (513)..(574): n is a, c, g, or t
  misc_feature (588)..(588): n is a, c, g, or t
  misc_feature (614)..(615): n is a, c, g, or t
tatttgattagatacagaaaacattagtaagtgtggttttcttcctcttgaaaactagctttacgaagtaataccaactccaattaaattttgacctactttaattcctcatcaatggcaccataagctggtacactcaaagtaaaccagttactttggccaccaaattaggccacctctgtttctacaataactaggatacaacggagttagcatgcctttagttactatacagtattgtgcaaacttacagactttaaaaacatttcctccatttttccaaagttctgttttcttagtgactttgattttaaacatgtttaccttagggttctaaataataatgatctccgatgagaacatgttgggtaaaaccattctctaatttgacaagcgatattctaaaagattactgcaaacctgcgatgtnaggacagggttgaaagtactatctganatctgnnggatgtttagnggactgacccccagacangggattgaaaatgttttttnnnnnnnnnnnnnnnnnnnnnnnnnnnnnnnnnnnnnnnnnnnnnnnnnnnnnnnnnnnnnntttgatagccacangtacaaggatcagcctggagcaacanngtgtga

SEQ ID NO: 319077 - DNA, 1506 bp, Homo Sapiens
  misc_feature (91)..(91): n is a, c, g, or t
  misc_feature (148)..(205): n is a, c, g, or t
atagctccgcattttttattccagactcagaaaattcagtccaggtctcggataggtgttcaatagaaaacacacactcacacactctctntatatagatgtccaatagaaaacacacacactctctctataggtgttcaatagaaannnnnnnnnnnnnnnnnnnnnnnnnnnnnnnnnnnnnnnnnnnnnnnnnnnnnnnnnnctctcttcctctttcccgcaacgtgctgtttgggagcttgaggtttctctcttcttcccaagtttctcaatgtctgggctggggaaggagggcccaggctccagcaggtacggacactgcaccctagaggcaggagcagtgggaatcagtatttccgctgccgagggaagagactactcccggaggatcggagtggggggctggcggggctggggtcctccgagtccaggctgaagaggtccctcccggtacgaaggatctgctcctccagcttcttgtgtctcttcatgtccgacagcaccttgtccaggcgggcctcccgtttctggctccgggctgagcttcctggggtgcgtctccggtcaatcagggagtcctttggtgtcactggctcatcatcaaaatcaaattccgtgggcatgtgtggtttttcctcttcctcttcttttgcctccggctcctcatcggatttctcctcttcgctctgggcctccggcgtgggaggccggcggggcaggatctcggcttgcagctccagagtaccgtgggcagccagcagttcatagagccgctggatttcggagggcgggggcatccagggctgcccatccgcaggcagctccacctcctcgtcgctgcagggcacgcaccagtcctcggagtcctcctcggcaggctcttctcccccagcgctggggacttctccctgcgcctcctcgcccccggacccctcacgctcggtctcctctcggcctccttccccctcgtcctcggccttaccggccgaggcagaggggcctccggtatcctccacggccagagcctggaggccggaggtcacttccccttcttcagacagaggcgccgccgtactggccgcagtgtctccatggccccgagcaagggacataggccactagggcagggaccctgcgacgacagatactggagtccgaagccagggtcccccagggatcgggctcccctgggggttcgggaccgtttccagccaatcacgctcccgcaggggactccgcggccagaccgcccgtccccgggagggggcgctcagtcctcaccaaggaccccgccccggagatcgaggttcggtactccgaggctcccgggccccgcagaaaccactttccgaaagagggaaagggggaggagagggacgggccactcttctcgcttccacgacgcccctctccacacccggacacggcgccttctccccagacctttcagttgtgggccacgtcaagtcagatgcccctcgtgccgaattcgccacccaggcc

SEQ ID NO: 319078 - DNA, 2343 bp, Homo Sapiens
  misc_feature (50)..(200): n is a, c, g, or t
aaaaaaggttttaaaaaatttttttggggggggagggggggcccccaaannnnnnnnnnnnnnnnnnnnnnnnnnnnnnnnnnnnnnnnnnnnnnnnnnnnnnnnnnnnnnnnnnnnnnnnnnnnnnnnnnnnnnnnnnnnnnnnnnnnnnnnnnnnnnnnnnnnnnnnnnnnnnnnnnnnnnnnnnnnnnnnnnnnnnncatggaaccaccggggatcttttaatccatttaaatacaaacatagaagatcagactctgatctgacattatttctatatttttagaaacacttttcactcataaatccaaggtgacaatggcattaaatggcattaaaaatatctacaggaaaggactaccacgaaatacaatattatgataacagttattgcattaaagtggttacttttctgtattcttcacatgtcccattgtatcactatacatttttataataaaaaatcgtaaattaagaaagaattcaagcaaagtattgttgactttataaaataattcttaaaacaaatgttcagaaagaaggcattcaactaagatagagaagatgctggatggagaggcttgcaaggtcccgggaggagctccagggtgaagctcatcactagcctttccagcagcactgtccctggagaccagaagcagtgggagccccttccctgtggcaccacggactcccaccaaggcacgtatcatgaacactgtacttgtacacgtttattacccttgggtgtatggggaatctaagagcacctctgaaatccatacttgattcctttttacattgaggaaagtgagattcacacacaaataccaagatgaccaatgaatggtggcctcgctggcaaaagcagccattgcaggtaaccaaattgcctccctagcattctgtaacccatgggcttagggaaagattaagtaacatttctttttcaaattcacttcaaatactcaactgtgttcatttaaaaaacagcaactatatgcacgagactaaacagatctcattcacactgccagcccacagaggggactctccgtaccctttcaggagggttttgggcaataaagccaaaatctgtacttaaataggtgtgtctcataagacaaatttttaactcatttattaaaggtcctaatggacattccaaactagtaacttatacctagagagagaaaatacaaatgcttactgtatagttatataaaaatagaaatccatcaagagtccaatcctcaagaaaccacacaatttgtacccaaaggctgtatatatatcaaggaaggatgacttccttccttgatctctaaataacaccctctccacatcggaggtatctggaggttgggcatttgcctaacgccacggggtccaccggcgggggtcacagctgctggctggtgaagaaggatttagtctccctgcagacaggattgacacagagcggacagctcagggtcagctgcttggaacacagctcgtttgactggatgtgtgaatgcaccaagtcggccagggccttagagaacaatggatttccattaagagactcagctcttctgatgttttcaactccacactccttggctaaaacttgagagtactcgatgtccagctcatacagcgtttcaatatggtcactggtaaatgctatcggaaccaagaggatattcttcctccccctctcacaaagccctttgatagattcgtctgtttgaggacccaaccagggcatcggaccaaccttggattgccacaccagtcggtaggggttgcagtactccagcctttccatgactttttggacagtggcgcttacctcctgaggatatgggtcgcctctgttgaccacagacatcggcagtgagtgagcagaaaacagaatgaccacctcgcttctcttctcaagtggaaaatggtccagttcctttagaatatgatctgcaaagcactggatgaggaggtgatgtgtgggccacctgtcaatagtgctccacttcatcgtgggcttccgtcccacttgattatagtatctgtaaatggcatttaagctgctgcctgtggtggagcagctgtactgtggatactgtgtgaaagcaatagccctttctaggccatctctctccatctcttcaattgcttcttctgttaaaggatggacgtaccgaaatccaatatagtatttgtgaggggctgtgttgggggacaattcatccagcagcttcaccatgccctctccctgcttggaagtccatatcttgatgggggatccgcctccaatctgcggtactgctcttgaatcttgggggttcggcgtttggcgat

SEQ ID NO: 319079 - DNA, 1049 bp, Homo Sapiens
  misc_feature (18)..(18): n is a, c, g, or t
  misc_feature (27)..(27): n is a, c, g, or t
  misc_feature (38)..(38): n is a, c, g, or t
  misc_feature (43)..(43): n is a, c, g, or t
  misc_feature (48)..(48): n is a, c, g, or t
  misc_feature (98)..(98): n is a, c, g, or t
  misc_feature (117)..(117): n is a, c, g, or t
  misc_feature (125)..(125): n is a, c, g, or t
gaacaagagatatttccncccattcanaagccctttanagatngtttnttgagacccaaccaggcatcgaccaaccttggatgccacaccagtcggtngggttgcagtactccagcntttccatnactttttggacagtgcgcttacctcctgaggatatgggtcgcctctgttgaccacagacatcggcagtgagtgagcagaaaacagaatgaccacctcgcttctcttctcaagtggaaaatggttccagttcctttagaatatgatctgcaaagcactggatgaggaggtgatgtgtgggccacctgtcaatagtgctccacttcatcgtgggcttccgtcccacttgattatagtatctgtaaatggcatttaagctgctgcctgtggtggagcagctgtactgtggatactgtgtgaaagcaatagccctttctaggccatctctctccatctcttcaattgcttcttctgttaaaggatggacgtaccgaaatccaatatagtatttgtgaggggctgtgttgggggacaattcatccagcagcttcaccatgccctctccctgcttggaagtccatatcttgatgggggatccgcctccaatcctgcggtactgctcttgaatcttgggggttcggcgtttggcgatgaatggtgccagcttattctgaataggaagtgtcatgaggtctcggtccaagaagagtctcagaaggaagtcgtgaacatctccaagagtttcagggcctcccatgtttagcattaatattccagttttcggcttcctcttctgcggttgaacttgaggttttgcaccctgggcatgctgggctgtttctgtggtgacggccgctgcagctgcacctgacttccacctccatggctgacagaccctccagctgctggatgccagcggatcgcggagcaggacgcccgcggcgcgcagggccgcagccatgtttgcgccgagtgaacgcattgcctgggcagcctcggcccgagtccgggctcctccccctcgtgccgaattcgccacccaggcc

SEQ ID NO: 319080 - DNA, 525 bp, Homo Sapiens
  misc_feature (359)..(359): n is a, c, g, or t
  misc_feature (461)..(461): n is a, c, g, or t
  misc_feature (487)..(487): n is a, c, g, or t
  misc_feature (494)..(494): n is a, c, g, or t
  misc_feature (504)..(504): n is a, c, g, or t
ttttcatggaaccaccggggatcttttaatccatttaaatacaaacatagaagatcagactctgatctgacattatttctatatttttagaaacacttttcactcataaatccaaggtgacaatggcattaaatggcattaaaaatatctacaggaaaggactaccacgaaatacaatattatgataacagttattgcattaaagtggttacttttctgtattcttcacatgtcccattgtatcactatacatttttataataaaaaatcgtaaattaaggaaaggatttcaaggcaaagtattgttgactttataaggataattcttaaaacaaatgttcaggaaaggaagggcattncaactaaggataggaggaaggatgctgggatgggaggagggcttgcaagggtccccggggaggagctcccgggggtgaaggctcatcactaggccttttccnggcagcactgtccccgggggggcccngaaggcnattggggggncccctttccctttgggcaccc

SEQ ID NO: 319081 - DNA, 665 bp, Homo Sapiens
  misc_feature (29)..(29): n is a, c, g, or t
  misc_feature (88)..(88): n is a, c, g, or t
  misc_feature (96)..(96): n is a, c, g, or t
  misc_feature (578)..(578): n is a, c, g, or t
  misc_feature (618)..(618): n is a, c, g, or t
cctcttacccctacccactaggccttttncctctggaaagcaggttttaaatcagacatagctataggtaggtagaaatcagaaaatnggggctanctgaaggagaaaagactgagcagataaggaattcgattttatttttgtaattaattggaactccaaatgttctaatatgtgagaaaaaccaatattctgcaagagtttctcagaggattactctctggtatgttctactaaatcgattgtaacactgtagataccttagagaacaatggatttccattaagagactcagctcttctgatgttttcaactccacactccttggctaaaacttgagagtactcgatgtccagctcatacagcgtttcaatatggtcactggtaaatgctatcggaaccaagaggatattcttcctccccctctcacaaagccctttgatagattcgtctgtttgagggcccaaccagggcatcggaccaaccttggattgccacaccagtcggtagggggttgcagtactccagcctttccatgactttttggacagtggcgcttacctcctgaggatatgggncgcctctgttgaccacagacatcggcagtgagtgagcagnaaacagaatgaccacctcgcttctcttctcaagtgggaaatgggcca

SEQ ID NO: 319082 - DNA, 511 bp, Homo Sapiens
  misc_feature (395)..(395): n is a, c, g, or t
  misc_feature (433)..(433): n is a, c, g, or t
  misc_feature (460)..(460): n is a, c, g, or t
agtcattctgttttctgctcactcactgccgatgtctgtggtcaacagaggcgacccatatcctcaggaggtaagcgccactgtccaaaaagtcatggaaaggctggagtactgcaacccctaccgactggtgtggcaatccaaggttggtccgatgccctggttgggtcctcaaacagacgaatctatcaaagggctttgtgagagggggaggaagaatatcctcttggttccgatagcatttaccagtgaccatattgaaacgctgtatgagctggacatcgagtactctcaagttttagccaaggagtgtgggagttgaaaacattcaggaaggagcttgagttttctttaatgggaaattccatttgtttctcttaagggccctgggccanctttgggtggcctttcacacattcccgttcaaacgagntgttgtttcccaagcagcttgaccctngagctgttccgtttgtgttcattcctgttttgcagggagattaaattcttt

SEQ ID NO: 319083 - DNA, 1780 bp, Homo Sapiens
  misc_feature (52)..(52): n is a, c, g, or t
  misc_feature (55)..(55): n is a, c, g, or t
  misc_feature (697)..(697): n is a, c, g, or t
  misc_feature (699)..(699): n is a, c, g, or t
  misc_feature (1071)..(1071): n is a, c, g, or t
tttttcacagtgagaggcacggtttattgccaggttataccctaggacggtntcnttccctccctcctagggtgggaggtcatgtgcgggagttccgctcctcttcttcgttctccagtagataggctggacggtatgtggggtgtcctcctgggctcaggcacttcagggccgggttccgcacggtattctcccgactccccagtgatgtgtatcctcggtcatacaggatacagtatgggacaaacagctgacgcagaaaatcccagatgtctctgtaggtccagtccagcagtgggttgatgcgcatgaatgcgggccagcctgggtcagtggggctgaaagggcagaggctacaggagtaggggtcagtccggcgggtgcccataaggacagcctccagctgggggtgccgtgcctgcagttcacccagggcctgcttcatgctgccctcagcttccaacatctgcagattataccttaggaagaaacagaagtaggggtcgggcgtgggctctgtcaagcttctcttggagcccaaacctccaggcccctagtacctcttgatagtgtcctgtagaaactgttccagctcagggaaaggggagatgctgcggatatacaggatctggagggggtttggaacatcagggtaatttcctctgcacagctgcatggaaaaggtgcaggagggcantncaatctttgcccccgttgaagcccacacagagctgggtgaggctgtactgagccagggaggtctcaatggtctgtagggcactgccacctttttcccaaagaagaccctgattcagcgagtttgtatacagcctcactggcctgctccacagcgttgggcatgtaggggaccagcgatccctggggcaaacgggcagtcaggtaggcaagcattcctccaggggtccttcttcctctgagtctagagtcagcttcacctgatagtagttgctgccccagtcagggtaggaaccccaggccaagcctacgtccaaaagtgggcctgggcctcagccagaatgggggcgatggaggcttcatcagcagccacantatagctcctttgagtggaactgaacagctgggttttggaatagttccttcatcccctccagcacccgccgcagcagctctggaatgcctgggaagaggtagacgtttcggacggagaccagagggaatctgaaaggttgaccagtgcaaggatctgtgccataatgcaggcgggcagaggagggcaccaatgatagcttctcccagccttcccctcctagggctttggtggctgcttccaacttggggtgtggcttcagctcatctccaaaggcctgtgccactgcctcaaaggtcacatcatcatgagtggggccgatgccccctgctgtgaggacatgggtgaagcggttggagaaagaagtgacctcagctgcaatggtggctacctcatcaggtacaactgagactcggcaaacctggacccctagggagcgcagtgtccggcacagaaagaaggtgttggtgtcctgagtgtgtcccttaaggatctcatctccaacaatgatgatgccagccgtcacgtgcgccccggagaaagttcagaggccctagatgtcatggtcctgccttctctgcccctctgcaaggccctccagtagccacccagacccccaaataggggtcgcaagcacggggggcctgccaggtctacagggcactgggggccatagcctgggaacagggggtcctgggtcgagggaacctg

SEQ ID NO: 319084 - DNA, 996 bp, Homo Sapiens
ggccgtcccaaagggggtcccttttccttcctgtcggggggttctaggagtccaagctttccgccgtgtatagttagtgtgccggcccccagtccagggttggggaacccaaggccccaggctttcgttccaaaagtggggctggggccttcagcccagaatggggggcgatggagggtttcatcggcagcccacatatagttcctttgagttggaactgaacagctgggtttttggaatagtcccttcatcccctccagcaccccgcggcagcagctctggaatgcctgggaagaggtagacgtttcggaccggagaccagagggaatctgaaaggttgaccagtgcaaggatctgtgccataatgcaggcgggcagaggagggcaccaatgatagcttctcccagccttcccctcctagggctttggtggctgcttccaacttggggtgtggcttcagctcatctccaaaggcctgtgccactgcctcaaaggtcacatcatcatgagtggggccgatgccccctgctgtgaggacatgggtgaagcggttggagaaagaagtgacctcagctgcaatggtggctacctcatcaggtacaactgagactcggcaaacctggacccctagggagcgcagtgtccggcacagaaagaaggtgttggtgtcctgagtgtgtcccttaaggatctcatctccaacaatgatgatgccagccgtcacgctgcgccccggagaaagttcagaggccctagatgtcatggtcctgccttctctgcccctctgcaaggccctccagtagccacccagacccccaaataggggtcgcaagcacggggggcctgccaggtctacagggcactgggggccatagcctgggaacagggggtcctgggtcgagggaacctgcctgttctgccccttcaccggctctttcccttgttcctttcctccgacgcgtggtcgacgatatcccgtaattccggaccgtacca

SEQ ID NO: 319085 - DNA, 1367 bp, Homo Sapiens
  misc_feature (11)..(11): n is a, c, g, or t
  misc_feature (1035)..(1035): n is a, c, g, or t
accccctgganaacaaaaaggctgtctgctcgggctgtgggaagcaaggttggttaagactctgaaatctgtccctcccgcaccccagaggacaccgcaacctctgactccgcactgacaacagcatctgaaggcatttcttctgtggggccatcactttattaaggggtcatctagaaggtgggccccctgacaaaccgcgggactgtgatcgggctccagctacttcaccaccccgggccagcctgctccaggggtcccttcctgctgagagcaggcgagaggcagtcaggctcatgaagcagccaccgggtttggctcactggaaggaatcacactggaaacatgtttagcccgcagtgcagagtggctccagaagggagaggttctggaagacgccccaacctgccgggctgctcccagagttgcacagtgaggggcaggcacccagggccgttcccaggactcaagatggggatggagatggcgtgaggaatggaggacagggctagatgggctgaccggggggaacagtgttacgaaaaggaggcgggtaccctgggctcccgtgacaaagtgcggcagggctaccccctgcagcccccatagcccccaccaccttgagaccacgttctggtcactgcctcggagccccgatgtgttggggccagggagcgctcctgcccgggtgtggggtgtgagcctcagcctctgtccgcccggcagcgcgcgtgcctcccttggtctggcctccctcggcccggtcctggcactggccgtgctagctggccgtgcttctccgcgggatacagccttccatctccagcgcctcgggccagccttcgtacttgttgctgtgcttactgttcttcacgtgctgctcaaaggggctcttgttctgcacacccttggccccgacaaacacccagctgtcccggaaggccagctccttggcgttcctgctgcccagctcactgaagagctttctggtctcttcattcatcattggtggctgggtcgtcgtaggatgccacngaacaccagggtgccttcgtgcagtggccgaataaacttcaacaggtcgttgacatctccggcccacatgtcaaaggcccgggcctcgatgagctcgccgctgacccctgtgtcaggagggaggggcccgttcaccagggcgatgttcagcccgcggcccacgttgtccttgacgctgctcatcagcatcttgtcctcgaggcagatcttgggcccaatgacgttggcggccccgctgaccacgcggaaggccaggtgctcctcaggacacggctggggcaggccacacttgtacttcctggcccgtggcgctgcagtcaccgagctctctg

SEQ ID NO: 319086 - DNA, 905 bp, Homo Sapiens
ccgggttccttgcggccccagcttcactaaaagaggctttttgggtcttttccattcattctgggtggctggggtccgttcgtagggatgccccgaacccccccggggtgcctttcgggccggggcccgaataaaatttcaaccaggttcgttgacaatctcccggcccacaaggtcaaagggcccgggcctcgatgagctcgccgctgaccccgttcaccagggcgatgttcagcccgcggcccacgttgtccttgacgctgctcatcagcatcttgtcctcgaggcagatcttgggcccaatgacgttggcggccccgctgaccacgcggaaggccaggtgctcctcaggacacggctggggcaggccacacttgtacttcctggcccgtggcgctgcagtcaccgagctctctggactggtgaagagttgctggatgcgaggaaagccactgccaggcccacccaggaggatgctgaccacgatccatgtgacacccacactgacgactaggaccacaatgcggagagggcctgccaacctcatgtccacttctcctgctgggttgggaccgccggcaagtgcactgtttgggggcaaagcggaaggacaggtttgggtgggggtcaggggcaagcctgtgcgggacccctgctgggggcgggcgcgatcggtgctacgacctgtttgtccagccgcccggccaggcagggctcctcggaaacgcgcggggaaaccctgcctggccaggaggggcctcaggaacccgttggctcacgatcttgcccacaggagcctccggggctgggacgaagatgtggttctcctgggctcgggccgttcctccgggcctgggggctggcgatgcgggccgggccggagatttctctggccgtggggagac

SEQ ID NO: 319087 - DNA, 1324 bp, Homo Sapiens
  misc_feature (14)..(14): n is a, c, g, or t
  misc_feature (623)..(623): n is a, c, g, or t
gcaaatactgcttntatttcttattcttaaatgaatttaatagacaattactgtgcgggttgctggggtacagagatgcgtaagaacatgtgtccccaaagaatggggtggagggcacaggagccaaccatggaatcctagcaggggtgtcagaggctgaagaaggtccagaggggaccgcgcagggcaaccggccaggcttcctgggaagtcagtgctggaaacaggagactgtgctcggcttggtgaagcagctccgagcctgtgatttgtctgtagacagctcggttcgggtgagccccagggctttcctgactgttaccggcctaatcaaggcagaaggcagcgtggtgacctccctcccaggcgccaggatgcagttgtgaaggcctggctgggaattgctttgaggccggaggggggtctccttccccgacacccgacaggccctctttcatggccacaggggagtggctgagcagatctcccctccccaggagaggagggcaggctgtgtgggcctggtaggagagcatgcggtaggcgagcctccggccgcagagatgccgggctctgtgcgagacgtttgccgttagagggagtgccacgtcgttctgcgatcnccaccacggactgccagggccgcaaacgagtttgggcggaagccagggcctttggggctttttgggaaactcactgtgtttgcctttgtcctctgcattttgggatttgtgagaagaagctggacctaagaatgcttcgcatagtttggcagaatttgcggagcctgttccagccgtgtgggtctggaatccgggatgcggtctctggcctgtgcaacccctgtttaacccggggctggcctctggagggcagggaggctgggagcagagagaagcactcaaggacctgagaaatgtagaaggtcttggatttgtttccctgtgtgcagtcccctctggccctcagagctgcaaaggacagacccctgggttctgggcaggggctcagctctgggattcgttcagtgcttaaaaggagggaagggaactcaggaataagaacgatcaggctggcaggacatgcagctgttgtcagagacctggaaacacatgggccagtggagctgatgggccccgtggggtgggtgggtggcagcatccaactggtcaagaatggctctgctgtggcttcctcagcatggccacagcagcccgtgttaatggcaagagagaaggcggaggtgatgcaatcctggcacagtcacagtctgctgagcaggtggtcccaaacgacatgctaagaggccggagacgtaggacac

SEQ ID NO: 319088 - DNA, 877 bp, Homo Sapiens
  misc_feature (12)..(12): n is a, c, g, or t
  misc_feature (22)..(22): n is a, c, g, or t
  misc_feature (49)..(49): n is a, c, g, or t
  misc_feature (79)..(79): n is a, c, g, or t
  misc_feature (148)..(148): n is a, c, g, or t
accacccaccanccgggttttnccctggcaatcctgacttaaaaaaacnggggaaacacccactcacccaggtacctanggacctgtccttccattattaaagaaaatggatggcccatgacaatttccttaagaaaatatttttaanggtatgatataaaataactaacgttactcaattctccccataactaggtcaccaaataagtatcccatcacactgtggataataggaaacaatggtgatttccaatctttctattttataggggctttcattaatgttcaaaacaattaccagtgaggatttcctgaagaagtacagatttctgtcaactttcaccctacatactatattccaatagtattagctgaatgattctggataattttatataatctcaagtctttagtcttgagaatttaagggctttgatattgcttcctagcctagtataaccaagcaaaagattattaactctcaaaacacgctgaatgataagacttttaatttggtagacttaataggcaaagtccctatgagtaggcaaatctgcatgttgagttttattccaggttcagttttaggttcactgtctctctctttgatgaacactgcacaaagttatttgtattacagctccttaaagaaagagtacaaattgtttacgactagttttttcatatacacgaaaaagcacaattataatttctgtcccactcagaaattaatggcaaacccatagtaacctaataaagctattttaacatgtgctaaataattcttttatctatactgttgtattgatccaaattatttatatgctctttaaaaatcttttatggaattgaaagctataactctctctcttgaagg

SEQ ID NO: 319089 - DNA, 1750 bp, Homo Sapiens
  misc_feature (813)..(823): n is a, c, g, or t
  misc_feature (1738)..(1738): n is a, c, g, or t
attacaggtgtgagccaccatgctcgctgagagcagcatatttgaaatgtcactttgagttctgagaaaaagtaaaaagccagaagacatactagatatataaatatattactgcttaaaaagatttcctaaaaagaaatgtatccagtgtatgaatcaaagtctgaaagaaagatgaagagccaccagacttctaggtaggtttacatccatcatgttcctcttggactgcctttggtttgtcgtttagttttttgctccactcaagcctgttagaatcaccatggaatacagctccagtgggaaggccactggagaagctgatgtgcactttgagacccatgaggatgctgttgcagcgatgctcaaggatcggtcccacgttcatcataggtatattgaactgttcctgaattcatgtccaaaaggaaaataagactctaggggctccagataataagggtgaagcaagaagcatttcatttgcacatctttcttggacttgggatatacagttccagtttattagcagcaactgctagggaaatgattttggtgttttgggttaattgcttctaagaaaagtttcatagtggactgtttagaagaagaaatgaaagatccagtttgggattatgaaataaaccacaaattaaaatttttgtttaaactgtccaggatctgatttaaaaatatggtctttgttttatatgattaaatggtttgttttcatagatgatatgttactcattgtaaagaccacatatttttattcagcagtgttctttaaacgctttcatttaaaaagtaacnnnnnnnnnnngcctgtgaattgagtgctctgatgtaaaacttctcatggagtgaaacagtgatttattttaaccaaacattcaccaaagcaaagaacggtttcagacctttgaactggtaatgtttggcagaatagttttaaattttgctgtatttgattacttagagataggaatttttaaaaatcaaaacaaaaaataccaccagcttagtgtaaatgacaatttggcggttttatgtctttagaaatgttttgccctttctaagccttgtgctaaaggcgtataacggtggtgcctatctacttaagggggcattctagtccttaacttaaaagttgtctaaactgtcccctccctggcttttttttgggtttggggtagacctaagggtgtttgttagtctcaaaactgtgaagtgacatgtcagaacagtccagactggtaagaaaattaatggcttcacttgaatttaaaccagctctagataggaaaaaaatcagtctcctcatttgctttttaaatggagtagtacatcccatattttagaacaagtaggggtgccttgcttaaataaaaatagcatttaatgtataattgtgtgaagggtttatggataaagctgtacttctgtcacaatgtggcagtactttctgctttaatattaaacagcttgttatttaaatattggacaaaatggctggcttcaaaatatagtcattaataaactaactattatgtgcacctgtgtaggagaatcaaaatcctgtatgctttctttgccttgttcctgttctcagggtgacgactgccaccaggagatgcagttctagttcttaaaattaaatttgcccaggtttctgacaggtgatacctggaagagagactatgtcttatcttacttaatacataaccatctttgattnccggctgagatg

SEQ ID NO: 319090 - DNA, 1084 bp, Homo Sapiens
  misc_feature (7)..(7): n is a, c, g, or t
  misc_feature (12)..(13): n is a, c, g, or t
  misc_feature (30)..(30): n is a, c, g, or t
  misc_feature (35)..(36): n is a, c, g, or t
  misc_feature (38)..(40): n is a, c, g, or t
  misc_feature (44)..(44): n is a, c, g, or t
  misc_feature (52)..(52): n is a, c, g, or t
  misc_feature (75)..(75): n is a, c, g, or t
  misc_feature (79)..(79): n is a, c, g, or t
  misc_feature (82)..(82): n is a, c, g, or t
  misc_feature (89)..(89): n is a, c, g, or t
  misc_feature (99)..(99): n is a, c, g, or t
  misc_feature (101)..(101): n is a, c, g, or t
  misc_feature (120)..(120): n is a, c, g, or t
  misc_feature (129)..(129): n is a, c, g, or t
  misc_feature (131)..(131): n is a, c, g, or t
  misc_feature (138)..(138): n is a, c, g, or t
tgctggncttcnnaggaatgaggcgctttnacggnntnnnttgnttgcggcntccttcccccttccccccgcctntttnggncctgtcnttcggctttngnattcacagctgcaactctntctatatcnanttctacnctcagaccgcacaaccttttaagttcattgttaaatgaatctgtgctttccaggaatttcctcttcttctcctggtgtcgttcctctatttgaagaagttcagcttctagttttcgctgatgaaccattaaggattggacctgccgtttgaggacctgcattctagctgttgtgacaactgaccggaacgtctggcaccacactctcattaagaatttcactgatgaggcggtggtttctctggaaacgggcggtggctgtatgcttcattgaaaagccatcatcataatcatctggatcttcagcaggctgaatgctcatgtacggttctcctttctccatgcgagattgtctctgtcgactttcttcctctaaagcagcttctgcacgactttttgcatttatgtaagcaaggtacgcgggggaattatgataggccttcatagattcattgtactctatcttttctgcttcgtattcgtttaaatattcttgtttttcttcatcagtgagatctcgccacatgccaccaataatcttgccaatctcccacaactttaggtcagggttggaagcctttacttggtcccagacctttctgctgtacctcatgtagggcatcagcggcttatctggtggctttgggggttttggaatcgtgataccagaggatgccgtgacccggctgttggtgcccgggttccctcccagcctgtagttgttgtaggcgagatgactgtatggattgtatcccacaaaccctggtgtgctgggcatttgtgttgcaggagctggggtgggaggtggggcataagatggtctttttgacattttggaagattaagttctcagttccttaagaatgaatctgagacaccgcgggcagaaaaagcgcccgcagctccggcttcgcttccctttgtcccgcgctcgccccgcccctccc

SEQ ID NO: 319091 - DNA, 997 bp, Homo Sapiens
  misc_feature (5)..(5): n is a, c, g, or t
  misc_feature (7)..(7): n is a, c, g, or t
  misc_feature (10)..(10): n is a, c, g, or t
  misc_feature (16)..(16): n is a, c, g, or t
  misc_feature (25)..(26): n is a, c, g, or t
  misc_feature (31)..(31): n is a, c, g, or t
  misc_feature (43)..(43): n is a, c, g, or t
  misc_feature (55)..(55): n is a, c, g, or t
  misc_feature (58)..(58): n is a, c, g, or t
  misc_feature (60)..(60): n is a, c, g, or t
  misc_feature (66)..(66): n is a, c, g, or t
  misc_feature (73)..(73): n is a, c, g, or t
  misc_feature (75)..(75): n is a, c, g, or t
  misc_feature (80)..(80): n is a, c, g, or t
  misc_feature (82)..(82): n is a, c, g, or t
  misc_feature (88)..(88): n is a, c, g, or t
  misc_feature (112)..(112): n is a, c, g, or t
  misc_feature (119)..(119): n is a, c, g, or t
  misc_feature (126)..(126): n is a, c, g, or t
  misc_feature (144)..(145): n is a, c, g, or t
  misc_feature (153)..(153): n is a, c, g, or t
  misc_feature (157)..(157): n is a, c, g, or t
  misc_feature (159)..(160): n is a, c, g, or t
  misc_feature (172)..(172): n is a, c, g, or t
  misc_feature (175)..(175): n is a, c, g, or t
  misc_feature (213)..(215): n is a, c, g, or t
  misc_feature (217)..(218): n is a, c, g, or t
  misc_feature (235)..(235): n is a, c, g, or t
  misc_feature (261)..(261): n is a, c, g, or t
  misc_feature (287)..(287): n is a, c, g, or t
gctantnccntggggncctctgccnncttcntacacaagcccncattgtattgcnctntnttttanccgcggntncagcncnctgaantaacaaaaggctgccgtgtgttcnccactcntcatgtnctctgtcccccaggaagnngaaagcgnttgnannactgagctgganganctgctgaatggaagtcacagcctcctcaagggaaagannncnnatttatcttgtcccttntcaccagtgggctgaggctgggctgnttttgcctcggactcgatgctactantggcatgcaggaagccaaaatcaccgggaccttcctcagaggggtcctgaggacgagctcctctcaaagagttgtgtgagaagttccggggctggagctgaggctttttcctggccaagcctgggttccctgaggccagtgtgcctgggagctgggccatcggggctggggaggatttgttgtcgcagtgaggagcatgggtgccacaagggagatgagaagaaacggtccaggggactgtgccaggagcagtgttctacccgctgaggtcctgctggcagggatgcctggaatgtgtgatctgccttgccagctgcagggccagcacggccagagtgccccaagatatggcatcccatagggtgttcggggagacacgggatagacatccattggaaggcatccttccatccatgggaccttggacccccgctcgtgcctgggccatggggacctgacctgtcgaggttaggcacaggaaccagcaaagtggaggaggtagtctgaggcccatctgggctggtggacttaggagtcaccctccagaggctaggtcccagtgtacggggaagagctcggcccaggagtcccgggaggcgccacatgtcgctgccagcaccacagagagctcgcagccgaaagcgcgagaccaacccttgggacagcggctagaaaggccgccgcgatgccccgagtggccatcccgggaa

SEQ ID NO: 319092 - DNA, 1755 bp, Homo Sapiens
  misc_feature (885)..(885): n is a, c, g, or t
  misc_feature (1116)..(1116): n is a, c, g, or t
gagcccacaattggggacaaacaaaaaccggggtggcccgggacaaggggcccgttaacccagagccacctgggggccccgggggggcccaaacagggccctgggccggccccctgtggtagggggccccacaaaccaggccggccagaccgtttgcccaacccctttccagtttaagggtgtccaaagtgtagtggcttgtaaaggggaaggccccaggcccctccgggaaaaatgggccctccagctgggcttccgcaagggccggccccttcccatttttggcgtcacccagcaggcgagggtgccccgcccgtcctcccgtgaaagtagttgcccagacccatttggaggttcccgatgtaggtggcgcgttcagtcacccatgtacttgttgtggttgacacggggcatatgggattcgagcctgggcctcatccgcggggaccacaaagagtttcacctggatgtcagagtgggtatggttgtcacgcagggcagccagagagagcaggaaggcccgcatggatggctccgagtgtccccagcagctgatgagcaggcgcaccttgacgccacgctcgtaggtggcccgccgcagcccatcgtcaatggcaggccagaacctgtgagggtgggagaactccagagtgggcaggtagttcatgacagcgacgtagatgaaactccgggcattgtccaccacgttgagtagagccttcaggtctggagtgcggccacttggacacaggggtgggggcgcactcgccaggtaggccagagcaggggttccattgaggcagatctccattggtgtctcttggttgtagcgggtgtcatagaaccggggccaagttgatgggatggagctgcctgcctggcccnagtaaccagtaggcctcaaagatcttggtcaggtctcgagccaggcagctgcagttgtacatgaccacgccccagctcccttgacctggggtcagtgaacgccagtcccatgttggcactgcccaggtagaagtgggtctggtccaccaccccagaactttggtatgcaggacgccatgggtcagcttctgcatgtccaccatgcggggcctgggcaccgctctgcagcangagcctgcaggtccgcctgtggctggggcccgctgggcttgctcacagcgatgcggacgttcacgccctttggtgccagggtctgcagctgccggaggacctcctcaccctgctgggcagagggctcctgcgtgtgggtgtcattgttggtgagggtccagtagaaggaggcgatgtccaggctgctgtgcgcaccggcgagcaggcccagccaggcctggctggtggaagggttccccgtggaggcattggggaagtccaggccctcaggaatgctttccaccaggcactgttcgcaagggtcatagcagggggctgggcgctggttgggcccaaagagatgcaagtcgccgtattcccatagaaacagctgagtcatcagggctccgaagcccacaaccgccagaatgaggaccagcaggacccagcgggctttcttttccgcagccttccacgcctcaatctcattcatgggcagctcattggcgggctcctctgcaggcaccttcagctcctggtacatcagtttaggcttcatcttccctcaaggctgggggatacgcagagcccaggtgagaaggtgggtgtgtcagggtctccaaaccctgaggggcctcggcctcgctctcaggcgtctgc

SEQ ID NO: 319093 - DNA, 741 bp, Homo Sapiens
  misc_feature (176)..(176): n is a, c, g, or t
agggaccgtgacccaaagcaccctgggtccgcgggggccccaaaagccttggcctgcccactggaatcgggcctcaaaagcaaggcggccagcgttgcccaagctgtcagctgaggtgtcaaggtcatggctgtaaggggagtcccagtccctcaggaaaatggcctcccagctgntccgcaggccgcccctcccattctgcgtcaccagcagcgaggtgcccgccgtctccgtgaagtagttgccagaccagttggaggttccgatgtaggtggcgcgttcagtcaccatgtacttgttgtggttgacacgggcatatgggattcgagcctgggcctcatccgcggggaccacaaagagtttcacctggatgtcagagtgggtatggttgtcacgcagggcagccagagagagcaggaaggcccgcatggatggctccgagtgtccccagcagctgatgagcaggcgcaccttgacgccacgctcgtaggtggcccgccgcagcccatcgtcaatggcaggccagaacctgtgagggtgggagaactccagagtgggcaggtagttcatgacagcgacgtagatgaaactccgggcattgtccaccacgttgagtagagccttcaggtctggagtgcggccacttggacacaagggtgggggcgcactcgccaggtaggccagagcaggggttccattgaggcagatctccattggtgtctcttggttgtagcgggtgtc

SEQ ID NO: 319094 - DNA, 431 bp, Homo Sapiens
  misc_feature (383)..(383): n is a, c, g, or t
ggctgtacagacaagttatttacttattataaccctgggccctttttgccctggaaagtgggggtgggccagggggcaaggccagcatgcacccccatttctttgggggctgatccctcccccagctctgctggtccccggggccacagcgtcaggccggtgggggtggaggtagaggtgggagagcaggggagagagcctgaggagccacaatggggcagacagaagcgggggtgcggggacagggaccgtgacccagagcacctgggtcccgcgggggcccagcaggctttggctcccaacttggatccgggcctcagagcaggcggcaggcgttgcccacgctgtcagctgaggtttcaaggtcatggctgtaaggggantcccagtccctcaggaaaatggcctccagctggctccgcaggccgccc

SEQ ID NO: 319095 - DNA, 1611 bp, Homo Sapiens
  misc_feature (1371)..(1449): n is a, c, g, or t
  misc_feature (1603)..(1603): n is a, c, g, or t
  misc_feature (1607)..(1607): n is a, c, g, or t
gggactgcgaagcccagctgcgcgcgccttgggattgactgtccacgctcgcccggctcgtccgacgcgccctccgccagccgacagacacagccgcacgcactgccgtgttctccctgcggctcggacacatagtatgaccattaggtgtttcgtctcccacccattttctatggaaaaccaaggggatcgggccatgatagccactggcagctttgaagaacgggacacctttagagaagcttgatcttggaggcctcaccgtgagaccttacaaagccggattccggcagagttcctctatctcgtcttgttgctgattaaaggtgcccctgtctccagtttttctccatctcctgggacgtagcaggaaatcagcatcatggttgggttcaaggccacagatgtgccccctactgccactgtgaagtttcttggggctggcacagctgcctgcatcgcagatctcatcacctttcctctggatactgctaaagtccggttacagatccaaggagaaagtcaggggccagtgcgcgctacagtcagcgcccagtaccgcggtgtgatgggcaccattctgaccatggtgcgtactgagggcccccgaagcctctacaatgggctggttgccggcctgcagcgccaaatgagctttgcctctgtccgcatcggcctgtatgattctgtccaacagttctacaccaagggctctgagcatgccagcattgggagccgcctcctagcaggcagcaccacaggtgccctggctgtggctgtggcccagcccacggatgtggtaaaggtccgattccaagctcaggcccgggctggaggtggtcggagataccaaagcaccgtcaatgcctacaagaccattgcccgagaggaagggttccggggcctctggaaagggacctctccccaatgttgctcgtaatgccattgtcaactgtgctgagctggtgacctatgacctcatcaaggatgccctcctgaaagccaacctcatgacagatgacctcccttgccacttcacttctgcctttggggcaggcttctgcaccactgtcatcgcctcccctgtagacgtggtcaagacgagatacatgaactctgccctgggccagtacagtagcgctggccactgtgcccttaccatgctccagaaggaggggccccgagccttctacaaagggttcatgccctcctttctccgcttgggttcctgggaacgtggtgatgttcgtcacctattgagcagcttgaaacgagccctcatggctgcctgcacttcccgagaggctcccttctgagcctctcctgctgctgacctgatcacctctggctttgtctctagccgggccatgnnnnnnnnnnnnnnnnnnnnnnnnnnnnnnnnnnnnnnnnnnnnnnnnnnnnnnnnnnnnnnnnnnnnnnnnnnnnnnntacctaccaccttccctctttctacattctcatctactcattgtctcagtgctggtggagttgacatttgacagtgtgggaggcctcgtaccagccaggatcccaagcgtcccgtcccttggaaagttcagccagaatcttcgtcctgcccccnacanccca

SEQ ID NO: 319096 - DNA, 336 bp, Homo Sapiens
  misc_feature (32)..(32): n is a, c, g, or t
  misc_feature (240)..(240): n is a, c, g, or t
cctttcaaggagggcatcccttgatgaggtgnatagttcacccagctcagcacagttgacaatggcattacgagcaacattgggaagaggtccctttccagaggccccggaacccttcctctcgggcaatggtcttgtaggcattgacggtgctttggtatctccgaccacctccagcccgggcctgagcttggaatcggaccttttacccatccgtgggctgggccatcagccacagcncatgggcctgtggtgctgcctgctaggaggcggctcccaatgctggcatctgtgggcgagccatggggtcagtggccagcgggcttgcactcattt

SEQ ID NO: 319097 - DNA, 1110 bp, Homo Sapiens
tctcatactacacatgaggacccccacccgacaatactgcgagattagttgttttagtaatacttttgtttgttcttacatgagtgtggtgtccctattattcactatgtatgtgtctttctccacgttgtgtggtgtctcgctcttctccagatgggtgtctatttcgaataacgtcggataactttttttgttagcctacgggttcctcagtcccatgggctttttctttgcgggacccctcctcgatttcccacctcttaaatttccagtctttccagtgggttcccctgccgagccagctggcctggagaacgagcccgggaagcgcagcacagccccgccgatcgccaggccgccgagtcggccttcgcttccaggcgccctgagtagacagtcggtcactacggggagcccggggaacatgccagactcctggaagcttcgtctgatggctgcctctccagtgaggtagctgctagagggtggtggtgagaagggctgccggccctcgggctgagggaggttgggctggagtaggaggaccttaaggaggactgactctcagtgtatgtcctcacggagccctggaagcgagtcgccagcacttccaaggagctgtccccattggtctgccctggagacgtagcctgagaccggtccagctgcagccgcaggggcgaggggctctggcggatcttgctctgggcctcggcatgcagcatgccctccgcgctttccccgttgatggccacgattatgtctccaggccggaggtcagcgtccttggctttgccccgctcggccaccttagtcaccatgatgggcgtgtggaaatccctgccccctgtgatacggaagccccagggcgctggcccggccacatccaccgtcaacgccatacctttgagccggtcagtggactccgcgctgcgggcgccgcggggaggtgcccagcccgatggcccggctctaccagttctggagcctccttcgctccgagggcaaagtaccctgcgggctgggggctggaggaggagcgctccggccggggagagcgcagctcgcggcggacgcgtgggtcgacgatatcccggaaattccggaccc

SEQ ID NO: 319098 - DNA, 1320 bp, Homo Sapiens
  misc_feature (56)..(56): n is a, c, g, or t
  misc_feature (129)..(129): n is a, c, g, or t
cgggccgggtccaccaggccttcatccaggagttggtcgatgaagtagatcccggntccacggtgacaccatgcctggctgcaggtgccgtgcagtgcgccaggtccgcaggccgggcttcgtcgattngctccacggcctctgggtagcctcccacgtcgtgcacgtcaatgcccaggaagtggccaagcccgtgaggcataaacacggcccccaggtgagcctggaccatggcgtccgcgctgccgctcaggatgtccatgtgggccagctcctccaggtggatgcggtcagccaggcggtgcatgtcaggccaccagacacctggcttcatggcacccatgacggcacgggagtccgcagcactgcctcatagacggccttctggtctgcagtgaacttgccgttggcgggaaaggagcaggtgatgtcggaagcgaagcagtaatactcaccgcccatgtcgaacaggcacatatccccattctggatcgttcggtcgttgggagctccggcgtgtccgtagtgtagcacggctgagttctcaccactgccgcagatgcaggtgtaggagctgtggcgcatgccgccccgggagtagcagtagtgctcgaagaggctttccaactcatattctttcattcccacttttacagcctttcattacctcacggtgggcctcgctggagattttattggtatagcgcagaacctccagctccatatccgtcttaaacactcggcactcaacgatctctgggtgaagaatggtattgttgacttcgaacttgctgatgccgtcaaaggaggcctccctgcagacactgccgctgtccgtgttgacgccacgcaaagtgaggaggacagagggcttctgtgacgtcaggacgctggcaatctcatctacgtactggacgtcgtccacggcatacttctccttgaagtgctccttggaatggatctttcccatccaggtggcatggctggcaggaagcctgggcacaaacagggtcgacttcccagtgtcaacatcgatgacaccatagcagcctggctcagtgacaccgaacgcccagtgaaagaaggactcctggcggaagaggaccccggtgtcggtgcagtagcgctgagtctcctccccgccctgcaggaccacgatggagccggcctgcacagcagggttcttccgcagccgctcacacaggcgctgccggttcaaggcaaagagcgccagcggcaccttcagggtttcattccccagccaaaacgagggtccggtggccgccgccatgttcgcccggcaccggcgtcacgtgaagt

SEQ ID NO: 319099 - DNA, 1865 bp, Homo Sapiens
  misc_feature (157)..(384): n is a, c, g, or t
  misc_feature (417)..(427): n is a, c, g, or t
  misc_feature (974)..(974): n is a, c, g, or t
  misc_feature (1121)..(1121): n is a, c, g, or t
  misc_feature (1161)..(1161): n is a, c, g, or t
cctgtcccttgcccccagggcgtatagtttgtgggtggcctggggggaggaatgccccccaggaaattcccgggggggagaaaccctccagggggatttccgaattaaaaaagttgggttgaggaggccaaggcccggagggttcatttctttaatnnnnnnnnnnnnnnnnnnnnnnnnnnnnnnnnnnnnnnnnnnnnnnnnnnnnnnnnnnnnnnnnnnnnnnnnnnnnnnnnnnnnnnnnnnnnnnnnnnnnnnnnnnnnnnnnnnnnnnnnnnnnnnnnnnnnnnnnnnnnnnnnnnnnnnnnnnnnnnnnnnnnnnnnnnnnnnnnnnnnnnnnnnnnnnnnnnnnnnnnnnnnnnnnnnnnnnnnnnnnnnnnnnnnctgggcgacaaagcgaaactctgtctcaaaagnnnnnnnnnnnggagattcgggtgaggatcagggtgccgggtggaaacatgggagcgagggggcagtgggatggtgagagggaaggtgctggaggctggctgagattccggcctccagcctcactattcaccgacacttaaggggcagccccgtctcccccttcgggctcatcaggagctggggcgtccacagccccatcctcactggccaccagtggctcctcctcccttttgaggctggggcctgacccagacttcagctcctccatcgccagggagccctggcgagacttccgtctgccaaagaaagtggtgagcgtgggccgacggctagacccctccccatcggggaacccagagcccttgtcgcccccggaccctcccacggtcactgtcacggccccctcctcagggacctgggctggcccagcccaggcgtccaccaccccgttacgcttgccgcctctgctcagcacgagggccccagtccgccgtttctgccgccggcgccacagcaggagcagagccacgaggactatgacccgccagcagggccancaagcacagccactggcagcatgcctcgtgagttctcatctgggttccggaagggcacagtgcttgcgttggtggaggtcgttggagacatcattgtagatagttttacgctagagacctggggtccactgcccccgctggagggcnccagagagccagttgtcatggtaacagggggtccagtggncccagtggaggtctccagagagtcagttgccatggtaacagggggtccagaggtccctttggaagtctccagagagacagttgccatggtaagagggggtccagaggtcgcctctggaggtctccagagagctagctgccgtggtaacaggggctccactggtcctactggaggtttctggagagttcgttgttatggttccacctgtcacggtgtgggatcctagagagtttgctgttatgggaacagcaggatgactggttgcatgaggggtttcctggggcactgatgacatcttgatggaaacttcctggtaggttgttggctcaggtaaaggggaaccagtgctggcacccaatggaagtcccaaagaggggatccctcattgatggaagttgagggaggtagggctgaggtctggtccccagtgctgtcggccttagggtcacttgttattgaagtggtgtacatctttgagctcaggggctcgctagtagagaccaaaggctctccggaggtgggtgtctgcactgctgttgtgctccccagagcgtctgggcttaccaccagcaccccaaggagaaggagaagcgtggccatttccaggcaaacaggcaggagcaagagctgggaccctcttaccggctcggctgataaggacgcagcactggggccaggtcactccaccacctcccgatcccggg

SEQ ID NO: 319100 - DNA, 1500 bp, Homo Sapiens
ctctttgtaagtagtgtattttaaatagctgttcaagatacacatattgtttcctttaaaaaagtctgttggagcagttttgttcttgaattttgctggtcatcctcatggtcccgagcccccctactccgggtcgtggaggcggccgagggggaggctgggggcccacgtggcccgtcctggcggcacctgcagcactgggggagccgctgaaccccgtgcttcagcgctgggggagccgctgggccccgtcttccgccacaaaccatgcatggccgccacgtgagctcaaacgtccgtttatttcaaagcagttataatttaaaattataaaaatctttccaccgctgaacgtttagagggtgaggttagacagaggacggggaggctggggacgccccagaggggaccatgtggcccacgccttcccaagccagggggccggtgggccgggcccgggtcctggcctggaacaggcgggacctgcagcgctgaccagccaagcgtggcgccgccggggcacccagtctgtgggtgccgtgtggcgctggctgagggtgggtgggaaaggccccgtgctttcccgacgggccgacgtgggctcacgagttgcttgtggcgttctcgttgctggcgaagctggaggaggacgatgacgacgaggaggagaagctcaccccagtgaggccaggggggttcgtggccgtgttctgtcccgtgaggctttttcggcagacggggcagctgtcgtgctgctccagccagggcacgatgcagccgtcgtggaacaggtggttgcagggcagctgccgcacacgctcacccagcgcgtagtcgtccttgcacacagggcactcgagcccggagcctacgtgctcctcagtgacggggacggtggggagggcctggattttctctttatctgccggtggggggcctgtgttttcaaactgattgaggagctgtgtgatgatggcatccaggccgttggccccccaggcgtagtccatagggtttgagtgcaggactccccaggggcccaggctggggatggtggcgggcgtgatgatgccgttgacgagctgctggatgatccggtgccgggacggatggtctctctcccgccggctctcagggtccctgccgtcgtcagcctgcgccccaggagggaacgtggggatctcgaagctgtcatcgaagatgccgaaagcaaactgtccgtagccctgcggcagcgtgaacaggtgctggtccatgtgctccaacggtggccggctctggtctgtgggagctgtggagggggcagaaccattttctgtgctcctggtctcttccggaagctcctcgataaaaccagactcgcatcttggacagatataatccggcaggcgcgggacgatctccacggagcagcagtggcagaagtaccgtccgggatgcggcgacgcctcggccatggccgccgccacctactccgcgccgcccgccccccgcgcggca

SEQ ID NO: 319101 - DNA, 1788 bp, Homo Sapiens
  misc_feature (210)..(210): n is a, c, g, or t
  misc_feature (328)..(328): n is a, c, g, or t
  misc_feature (516)..(516): n is a, c, g, or t
  misc_feature (744)..(765): n is a, c, g, or t
  misc_feature (1705)..(1705): n is a, c, g, or t
  misc_feature (1710)..(1710): n is a, c, g, or t
  misc_feature (1713)..(1713): n is a, c, g, or t
  misc_feature (1722)..(1723): n is a, c, g, or t
  misc_feature (1729)..(1729): n is a, c, g, or t
  misc_feature (1746)..(1746): n is a, c, g, or t
  misc_feature (1755)..(1755): n is a, c, g, or t
  misc_feature (1758)..(1759): n is a, c, g, or t
  misc_feature (1762)..(1762): n is a, c, g, or t
  misc_feature (1775)..(1775): n is a, c, g, or t
  misc_feature (1785)..(1785): n is a, c, g, or t
cgcgcctcgctgcggccgtgatgtatcatggaagggtttttcggcgtgagacatggacccccgtgtcttatgtataatttagggaccctttgtccctttaccctgtatccaggtgccaagagaaaaatttcctttacttaataaaggggaaaaatttggacgccaccatcaccgactgttgcgcggggggcgggagaacaatagagttgnccagccaagaaggagaaccgtgcgagaagaaccagataaaatagagagcataggaatatagtatcggtgaaagggtttttgaaggcttgtgtgggggggaacactcaccgcgccgtcntgggtggggaggatggggtgtgtgccgcccacaggggaggaatgttattgcacccccctcccacgggggtaaagccctttcccccacttttttgtcccgggggagacgtctggtggggctatcacaaagacataaccccggtcttttttttggggtggtttttgagacctcgtaacgccggggtgggngggggttttctctctattaaaatggggggtgtgggagggaaatattccacaagagcccccattagggtgccaatggcatcccaaggtatttttccctttagggaaaaccaagcttatggcccccaggggttcccaattaaccctactgggggccccgggcggccccaaaacggaagtgtcttagaaaagtttttttcgatgggccgaggcggcccgacaagtttctgnnnnnnnnnnnnnnnnnnnnnnctcagcatcaggtgctttttacttcagtgaaatgaaaaataatggtcacaactcaaatgaatgggaatttaatatgaatatatgcaccttaccagagatgtttgctaccaatgatatcttagcaattccatattccttacaaagtcagtataattgttgtaaaaaaatcaactgtggttctgaatacccattcacagttgacctcaacaatgtatctgatgtaggagactgagtatccgtgacaggcagaagcatgtgatggtcctcagtcccaagtggaagagctaatggtaaagtcatatcagaaggcttcacatccatagtttctgataaaggacttttttgtatggaatcctgttcactcaaagtatgatcctctgcactggagtttagagttttatctgcaccagaatggacttttgttttgtgcttctttaaatttttaatatctgtgtaagaatttccacataattcgcagataaatggtctttctcctgtatgggaccgaaagtgtttgttgagctctcctgaggaaataaaacttttcccacaaataccacatatgtgtggtttttcacctgtatgttttcgagaatgagttataagagaactagagacagccaatgccttcccacaggtatcacatacataaggtttttctccagtatgcctacggacatgataggtcagtgtgctggcttgagcgaatctctgttcacacctatcacagacatatggcttctctccactatgcttccttgcatgaatcttgagattgctagaagttgcaaactgtaagttgcatacatcacatttatagggtttttcttcaccatgatgcatgcgactatggaagactagctgacatttctgagcaaatcctttatcacacaattcacatttgtatggcttctcacctgtatgagttcttacatgcgtnttcancgnttacactgnntaaatnccttccacacaagtggnagagttagnttnnacnccttaagtattcncagttcctcncaa

SEQ ID NO: 319102 - DNA, 1050 bp, Homo Sapiens
  misc_feature (19)..(19): n is a, c, g, or t
  misc_feature (21)..(21): n is a, c, g, or t
  misc_feature (25)..(25): n is a, c, g, or t
  misc_feature (29)..(29): n is a, c, g, or t
  misc_feature (31)..(31): n is a, c, g, or t
  misc_feature (34)..(34): n is a, c, g, or t
  misc_feature (38)..(38): n is a, c, g, or t
  misc_feature (59)..(59): n is a, c, g, or t
  misc_feature (63)..(63): n is a, c, g, or t
  misc_feature (76)..(76): n is a, c, g, or t
  misc_feature (78)..(79): n is a, c, g, or t
  misc_feature (88)..(88): n is a, c, g, or t
  misc_feature (98)..(98): n is a, c, g, or t
  misc_feature (111)..(111): n is a, c, g, or t
  misc_feature (120)..(120): n is a, c, g, or t
  misc_feature (124)..(124): n is a, c, g, or t
  misc_feature (140)..(140): n is a, c, g, or t
  misc_feature (193)..(193): n is a, c, g, or t
  misc_feature (441)..(441): n is a, c, g, or t
actccttatgttctcaggncntctnaacngntgnttcngaaatacttcccacatgtttncacnttgtttgtcttgnannctctgatcnagctctcccnggagttccctccncatatgacnctgnatgctggctatattanacatagagtgttctttcagagcacagttttgctgtgattttccacgtttttcnttcactgtaacagtgtgcacaatatcttgtgctggaaaagtattttccacaactgatgtcaactcgagttctgaattatcatttatttgtgcaacttgttctactacaggtgtgggcagttcatttgcatctaggaataattcaacagatgcattctctaagatgtcactgggatattgcactgttttattctgccctgttttcggggagttgaaagccttcttcttctttttcgtttgagatgactnttttctaacgcgccttgtttaggatttgcctgaatcaaatctgtagatacttctgatgtctctcgattattataatctcgcagagtaagaagacaagtctgttgattcaattcaatgtttccagtaatactagatatctctgtagaagaaggattagcaataaaagcaaaatcttccatctttattttgcatttagtgaccacctcttccactttgagatagtcagcagcctgatgaatttctttaacattccaactgtcaagatttaaagttcctgtgtatataaactccaacagtttctgaaatccatcagccttcacctgactctgatcaagaaagacattgttctcagaagtgcttctgtagatcgcaccaaaatactcactaaaggaggccagcacattcctatgagctttaaactggaattccccaatcactatggtacagtcacagagaaaacctgcttcccgctgtttgttcagtctctctaaaaggtgctcacaatggtgcgaatactgcattttgatatcagaatggaattttacccttgatcgatagcaacccaaggggggaacacagtttcttcactctgtctccgccatcccggga

SEQ ID NO: 319103 - DNA, 1193 bp, Homo Sapiens
  misc_feature (251)..(251): n is a, c, g, or t
ataaggggtcccttaccaagaattttggggggggccccgaagaagatttttttcaattcccacaggcccaaggggggcccccctttgggtaggcaaaagggttggttaattcctttaaaccaccccccaggcccccaggtaatttccattggggggaaggcccatttcattcttccaaggtactggttccagggagtaaggtggttgagactccttccgaaagtactgggggggtacgggagggctgtatnccaaacttgttcatcgcaacggcaacatgggcggggtccccggggggtcacacacatacagattgtggtcattttctggcaagaggtccacatcgtgcaagaacaggcagtcccactcttcatcacgcagggccttctcgcaccccaacgttcaacagttttgccctgttaaatgttccatttccagcctggtggatgacatagatgccataagcaagctgctggcgctgcaagaaggggtgcaggtggtagagcagcaggcgcaggtggtgctcccgggcacgatgaggcacaatgatggctgttcgggagcggggctcacaacctgcagggcggtaccggccccctggttctacccggggattccgctccacaatctctgccagtgatggcactgggctaaaggacaccgacacaggacccactaagagaggagatcgttctggacagtagggcagaccttgaggagctggaggaccccctggggccccaggcaggtgactgaggttactgtagacatcacgagggtgagaatagtcaaatgtcggtccctgatctcggccaaatagggcactgagacttcggaagccccccagtgacaggtacatcatgacagccagctgggagcccacaagcagggccagcgtgcaaggccgctccagcagcctccgcaacatcctgggggtgagatctaggttcaagctgtcttcttagggatcatgggggctccagggggtcccggggggacagagatgtgaggcattatctaaaattggaaatgtcacagagggcagagaaaggctccatccagcactccagcagcgaatctgggaccagctggtcttttgctgcctgtcgtcaccgccaccccaacagccgggcaggcatcgctgccgccattttggaagcgggcgctgcgggggcggggtctcgcgtcatggg

SEQ ID NO: 319104 - DNA, 953 bp, Homo Sapiens
cacatatccagtgtaaatttatttttttacagcatccaataaatcccagtaaaggagctaaatgaagatcttaacatgaaaagtggtgtcagagctctttaggcaatgctgaaatgcacttgattttatgcccgtgggtggtcggcagcaagttttatttgcaaagcagcattagcaaacagaagcaattgcaccgtaaatgagtaacctctaaagtatcagtaattatatttaatgaaatgtccctcaaagtccctttgttatttgcaagtgacacattgtaaggaacttgcccatcccgctaagctgacttctcagccgcttcagtctcctgctcggacagcttctcttctgacagaactgacatccagggcgatacggagcgcgtgatgctctgcttggccaggttgtagtggtttatgactgtgtaaaatttctcccgggcactggagtcttctccgcgtagtagctctccaagccttctgggatgcactgggtgttcttgaggacgaacccatcggggcaggcgcggtcatacttgtacaccttgtagacaaccaggaagacgacgcaggtgaggaaggccagggcgaagaggaccaacacggagaccttaaacctctcggtgacaccctccgtgatgctgacggtgaactcagcaatttggggaggacgtgctttccctttcttgcggtcaggttcatactcggtcttagttttcacgaccaccttatccgggggcgggaactgcagctgattgacatcgaggggcgtcatcaggggaatggtgtcgaagccatcctccagcagcggctgcttggtgcccttctctgcgaaattgttccccaacttcaccatcgttccgggagctccgaggctgcagcccacgcccggctccggcaggtcagctcagcgctccgagctccgcgtctcctgctcctgctcgcagcaat

SEQ ID NO: 319105 - DNA, 1230 bp, Homo Sapiens
  misc_feature (578)..(578): n is a, c, g, or t
actgattcgttccccccgccacgagaagaagaagaaggtccgtaaatactgggacgtgccacccccaggctttgagcacatcaccccaatgcagtacaaggccatgcaagctgcgggtcagattccagccactgctcttctccccaccatgacccctgacggtctggctgtgaccccaacgccggtgcccgtggtcgggagccagatgaccagacaagcccggcgcctctacgtgggcaacatcccctttggcatcactgagtgaaatattgtggggctgagatccctcgtagcaacaaaaagtttgctaccatcgtcgaaggaggccatgatggatttcttcaacgcccagatgcgcctgggggggctgacccaggcccctggcaacccagtgttggctgtgcagattaaccaggacaagaattttgcctttttggagttccgctcagtggacgagactacccaggctatggcctttgatggcatcatcttccagggccagtcactaaagatccgcaggcctcacgactaccagccgcttcctggcatgtcagagaacccctccgtctatgtgcctnggggttgtgtccactgtggtccccgactctgcccacaagctgttcatcgggggcttacccaactacctgaacgatgaccaggtcaaagagctgctgacatcctttgggcccctcaaggccttcaacctggtcaaggacagtgccacggggctctccaagggctacgccttctgtgagtacgtggacatcaacgtcacggctcaggccattgcggggctgcacggcatgcagctgggggataagacgctgctggtccagagggcgagtttgggagccaagaatgccacgctgcgcaccatcactcagacgcctgttaccctgccagtgccgggcttgatgcgctcccaggtgcagatgggcggccacccgactgaggtcctgtgcctcatgaacatggtgctgcctgaggggctgctggacgacgaggagtatgaggagatcgtggaggatgttcgggacgagtgcagcaagtacgggcttgtcaagtccatcgagatcccccggcctgtggacggcgtcgaggtgcccggctgcggaaagatctttgtggagttcacctctgtgtttgactgctcctcttctactctctgtggcagtttcatatttgctaagacgaatttgctcattaaacattttgttgtattttacttta

SEQ ID NO: 319106 - DNA, 1307 bp, Homo Sapiens
gacagggtttttttattggggttggattgtgtgccgttcataataagaatctatttattttatatttaagttcataagtcacatccacattatgttcctggtaaaaattctgaaaggacacagcaaagagcagaaagggacacctccatagagtgtctatggacccatttttgctttccaactcctaatagaaatgcctgacccagcaccctctgggaaaatcaacctttgattcaaagagatgttgttcagcaatgattacagtcacagtcacagccacatgccatcagcctatcaggaaatctgaggggaggcagacaaccagaaggaaagttgcttcctctctcaccaggaagcaactctagctccaaaccagatgggtgattcagcgccacatggagaaagataattcttccattgtgtttttaggattaagaagcactcattcactcgcggaagcctttaaatgtcactggtgcctggaaccaaatgtagtcttcccaagccgtggttcggatggaaggtctgccacatgacagggtcacagtcagtttatggccccggctgggcactcgatagttgagcttgggtcgaaaccaatcttctccacagttgcggtgtccctgtgccatgacgacggtgcccatgagtggaggagcctgaagctcgctaaaggcatcagccatgaatatggctcggaagagacggcgcaaacaagctgctgtgctcaggctctggtccacgctgtagggggccagcagagacaagtcgagttcatagaactccttggggcttagggcattgcccccaaggagaatcagcactcgcggtactagtgtccgtgcaaagaagtcctccaggtggctgaggacactctccagttctgccagggcttgttggcatttcctgctgctcacctcagtggtggcccgaggtttcttcttcagcatctcctctgcctggggagaaggttttcggtaaaagtgcttaagctgttcatagggcagagggagctgctggcgttgatacatgatatgctttagaagttcacaagtaaactgacagcagccttcctggctcacaggcccaggaaacaccactggtaccatgcagtctcttgggcaaaaggcctccgaagcgttgagaggttcctgcgtagagcttgtctcaagtagttctatctgggaggcgtgagtttcttcggacttctcataccactccaaatcagggactgcggctgaggacagaacctccgcctccggcgccgccatcacgacctcccctccggtactccttgcggttagaat

SEQ ID NO: 319107 - DNA, 1030 bp, Homo Sapiens
  misc_feature (45)..(89): n is a, c, g, or t
  misc_feature (91)..(92): n is a, c, g, or t
  misc_feature (95)..(95): n is a, c, g, or t
  misc_feature (99)..(99): n is a, c, g, or t
  misc_feature (113)..(113): n is a, c, g, or t
  misc_feature (127)..(127): n is a, c, g, or t
  misc_feature (146)..(146): n is a, c, g, or t
  misc_feature (161)..(161): n is a, c, g, or t
  misc_feature (208)..(208): n is a, c, g, or t
  misc_feature (220)..(220): n is a, c, g, or t
  misc_feature (222)..(222): n is a, c, g, or t
  misc_feature (257)..(257): n is a, c, g, or t
  misc_feature (260)..(260): n is a, c, g, or t
  misc_feature (280)..(280): n is a, c, g, or t
  misc_feature (327)..(327): n is a, c, g, or t
  misc_feature (345)..(345): n is a, c, g, or t
  misc_feature (422)..(422): n is a, c, g, or t
  misc_feature (427)..(427): n is a, c, g, or t
  misc_feature (432)..(432): n is a, c, g, or t
  misc_feature (460)..(461): n is a, c, g, or t
  misc_feature (499)..(499): n is a, c, g, or t
  misc_feature (510)..(510): n is a, c, g, or t
  misc_feature (519)..(519): n is a, c, g, or t
  misc_feature (521)..(522): n is a, c, g, or t
  misc_feature (553)..(553): n is a, c, g, or t
  misc_feature (560)..(560): n is a, c, g, or t
  misc_feature (573)..(573): n is a, c, g, or t
  misc_feature (580)..(580): n is a, c, g, or t
  misc_feature (609)..(609): n is a, c, g, or t
  misc_feature (615)..(625): n is a, c, g, or t
  misc_feature (696)..(696): n is a, c, g, or t
  misc_feature (973)..(973): n is a, c, g, or t
  misc_feature (978)..(978): n is a, c, g, or t
  misc_feature (982)..(982): n is a, c, g, or t
  misc_feature (988)..(989): n is a, c, g, or t
aaaaatagatttttttgaaaaaaataattgtaaggtgagggtgtnnnnnnnnnnnnnnnnnnnnnnnnnnnnnnnnnnnnnnnnnnnnnannganttanaaattggtgtatgnattatttttgaaanatgaaatatttataaaagngtaaatataaattgnttttattttaagttttaagtaaaagaaaaaattattttgtaaagtgntagattttaggntnaaggggatgtggtgtttggtaaaaataatgaaatntgntggggtagtgaaaagaaagntaaaggttaaaaataaataggtgttttttgtttgtattgatgttttnaaaaatttatttatgganattgaaatttgaatattatataatttttatgtgttataatattatttgattttttaaaaaatttagaaatataaaantattnttagnttggaggataaaaaaatgggtagtgggnnagatttgtgtgatggagtgtgatttgtgaaagggtganttagtgtagtnaggatgtgngnntaaatgagttgtaggaaaagaaagaaataanaaataantaaatgaaggtantggtagnaagaaggtggggaatgaatgttgggtagntaatannnnnnnnnnngtagagtaattgataaaatacaaataatgatgataacctctaacatatagcttttgtgtttcagacactanttctaagtggtttgaaaatgttaactcatttagacctcaaagccattctaagatgttgtcactattactactcttttatgggatgggaactgagggatagagatattaagtagcatgcgccatgctggcatcgggggccaggcagcaggagcccagagtccacacccttaactatgccatgttgcttctatgaggaagaaaaagttggtgaagaacatttaggactctcacactaaatacaaatgcaggatagctctgctccctgatcacacatcancagtnaggntacatnntatttcttacattgcactatttgttttcattgtgggagatt

SEQ ID NO: 319108 - DNA, 1090 bp, Homo Sapiens
  misc_feature (11)..(11): n is a, c, g, or t
  misc_feature (25)..(25): n is a, c, g, or t
  misc_feature (28)..(28): n is a, c, g, or t
  misc_feature (33)..(33): n is a, c, g, or t
  misc_feature (35)..(35): n is a, c, g, or t
  misc_feature (39)..(39): n is a, c, g, or t
  misc_feature (45)..(45): n is a, c, g, or t
  misc_feature (47)..(47): n is a, c, g, or t
  misc_feature (62)..(62): n is a, c, g, or t
  misc_feature (68)..(68): n is a, c, g, or t
  misc_feature (71)..(71): n is a, c, g, or t
  misc_feature (74)..(74): n is a, c, g, or t
  misc_feature (78)..(78): n is a, c, g, or t
  misc_feature (86)..(86): n is a, c, g, or t
  misc_feature (94)..(94): n is a, c, g, or t
  misc_feature (97)..(97): n is a, c, g, or t
  misc_feature (99)..(99): n is a, c, g, or t
  misc_feature (125)..(125): n is a, c, g, or t
  misc_feature (135)..(135): n is a, c, g, or t
  misc_feature (205)..(205): n is a, c, g, or t
  misc_feature (273)..(273): n is a, c, g, or t
  misc_feature (1033)..(1033): n is a, c, g, or t
  misc_feature (1035)..(1035): n is a, c, g, or t
tttttttaacngcccccggagtctntanaccananagancgcacngnagtgtattgctcacncgctcnttnggncttntcatagancaggagcnttntncaccacgtgcccgtcgccgcccacgngtggggcagnaggtgctggataaagttctgcctttgatgaagtttccgagggtacggaactccaggacccggcgcctttntaatagccatccatgtaccagacccggctatccgcactggggccatcgtgtcagtcatccaggagccngaagcgggaccccatggcccgaacggtgatggggtttactgaccccggtcagcttcccacagcccagcttctgggcgcaggcgtggagccgggcctccagggccatcacccgttgctgcaggtcctcatacccgtaggcacccatctcctcctgaatggccgccagactgccggagagattcctcacctcctcccgcaagcgtacaatggtccgcgtgtctgccttgtactgctccaggaccgagctcaggggcaacagttccgtcatcctgtccttcagctcctggaagctcttggccgagagggacccatcagctgcccggagtgcgcatccaggtccgcatgagggtctccatgccgcgtacatactggaggtcgcgatacgtccgcaactcaaggacctccatggactgggagacgttctggaccttctccatcagttgccgcagctcccgactcctgccatctcgagagcaggtactctgcgctgggataacggccgtgcagatgcatttcccgtcaggggcctgggctgaggtgtacagctgccagccctcttctgggttctggaagagagtctgtccggccaggcctgagcacagcagcagcagcagcggcggcgggaccgtgagcggccacatgacgcgcccctagcccggcgtcccgacccccgcccgccctagcggcgcctcggcgcggggaccgccaccaggcgcgaccccgcccgcccggccggggcgaccctgcgccgccgcctccncncgcctcgccggcggccgggattccgccccacccccgccccctcgctcgctccgag

SEQ ID NO: 319109 - DNA, 1233 bp, Homo Sapiens
  misc_feature (104)..(104): n is a, c, g, or t
  misc_feature (777)..(777): n is a, c, g, or t
  misc_feature (779)..(779): n is a, c, g, or t
  misc_feature (817)..(817): n is a, c, g, or t
  misc_feature (821)..(821): n is a, c, g, or t
  misc_feature (959)..(959): n is a, c, g, or t
  misc_feature (962)..(962): n is a, c, g, or t
  misc_feature (1004)..(1005): n is a, c, g, or t
  misc_feature (1007)..(1007): n is a, c, g, or t
  misc_feature (1010)..(1011): n is a, c, g, or t
  misc_feature (1013)..(1013): n is a, c, g, or t
  misc_feature (1016)..(1016): n is a, c, g, or t
  misc_feature (1018)..(1018): n is a, c, g, or t
  misc_feature (1029)..(1029): n is a, c, g, or t
  misc_feature (1031)..(1032): n is a, c, g, or t
  misc_feature (1041)..(1041): n is a, c, g, or t
  misc_feature (1045)..(1045): n is a, c, g, or t
  misc_feature (1068)..(1068): n is a, c, g, or t
  misc_feature (1072)..(1072): n is a, c, g, or t
  misc_feature (1120)..(1120): n is a, c, g, or t
agcatcccttcagggggtctccaaaagggcaacatcaagctttttcccagtgggccttccccacctggagctggtatttccatggtggatttctaaacaggctntgagtgggagcaaaaaaagttttataatgttctggggcattggcttgaaaaggtaatcctctcatgtggacaaaatgcagagaagacgtagttccaaaatcagcagcctctggaagcttttctggcacctccttaggcaattctatttccttctcactttcaaaagctgtcatgggttgaatatcctcatttacttcatgttcttcaaagaccatttctggctcagttatatacttagcagtaggaaaagatgcgattttctttcccttataagaaccgacatgtgttcgaacttcattccttctgcttggaaatatctcgatgtatcgattaccaatttcttccctgtgtttcaacagggcttggttggccatttctggttcttcaaattgcacataggcttcccctgtttttcgcctccctctatagtccatcacaaaagtaatgtcaactatattcagtcctgcaaagaagtctacaatgtctttctcattgcaactataaggaagtcctctcaaacgaaccacaccatcatttaccacaggcgaagatttgacctgcaagctcttcattaaggcatccacatcttcattgtttatctcatatacttccacataccgctggcccatgtacatgcggtgcttctctaaggctttctgcacatcctgctctnantccatttcaattaagacatcaccccttcgtttcccatntctntttaggagaaaatgtatatcacattctcaccgttgcggattctgacagatctagaaaaaaagttaagcacatcttccatagtgcataaccagggcagtcctagaagctacgaatgagaaagacatcatccacttcctnttnttacttggacggggccaattcatactcagggggtggtggaanntnttnnangtntntttttttggantnntggctgtantgcncgtacgggacggcggccgacggnatanagccagcggcggagtagaagggcaggcaggcggcgccggtgcgccggnagctgctgcagttacagccgcagccccggagcagcgccccgagtacccagcgcgtgccggccatggactccggaggcggcgcagggcctgaaggcagtgctccagcagcgatg

SEQ ID NO: 319110 - DNA, 875 bp, Homo Sapiens
  misc_feature (112)..(112): n is a, c, g, or t
aagagataagtgctttgtgtcggagacaagttcaggtaaaccaaccaaggcagtgcctcccacagtcaaagagagaagctggagggccaaagcctaatagagttgggcactnacagctgctcatgctgcaagaggagacagctagtcaggaaccctggagattcaagacaacttgctggtcccctttgcccagggctgtggtcctaatcacagtccttcacctttcccagggttagcctgtgtttcaaatgcatatgatctgcgctgagaggacaacagggggtcaggaacctggggttctctggggggcagactaagacgactccgggatccagacccttctgcaccttcagatgggagctccaggcagctaaggggccgaggagaatgggcagagatcatgctacaaggggaggttctggggatgaggcagtaatccccaccctcagtacaggtctgggttcgccgaactccttgagcctcagtcctttggcggtcccgggctagggccacagcagcatcaaaggaaagactacccccattcctccaagaggatcgagaagctcgggacccccaagccctttctccaggagtcccatcaagccggccaggcctcgggcatggatttgcaggtgccacatgaatcttgctacacattgcactgggcatcttggcaaactgtggcttggggggcaccacaggcacagagcggacctgttggacctgaaccagagtggaagctagacgcatgcccacgccacccaggccaagagaacaggggcatagacagccgtctggactgggctgcccctcaggctccatctcctctggctgaggtggctgtggggctacctcttcatcccgggaattaagga

SEQ ID NO: 319111 - DNA, 1362 bp, Homo Sapiens
  misc_feature (98)..(98): n is a, c, g, or t
gatatgtagctcggggaggcgatgcgagcaatcgtagggagccgcgttatgtaggtgagtaaatggggggtgcagggatgatacgcggtgactaaggnagcggaaactggcgctttggtatagataggcgtgtgggttatataagtgaacattgggcgggtgacggggtgcggagagatgaaggggttatagtgcaagggctggggcagtctgacgtgtgtcgtgggggggactgatctggtgggcggcgcacagtagagtagggtgcgctcgcaggctggtgcggggacccagacagtgtggtgggaagatcaataataatgcgggaggcgcagatgtgtggtcgagcaggggggtgtggggacaggagcgtgttaggctagtggcggagagggggatagcgtgcgcggtgggtaggggtacagggatggaggataggggagtgctaaaaatatatccccaccgacaagggcccgggaaaggaaaggtttaaggttgttccaccccgcccgttaagcccagttttaatccccccctgaaaaccacccaggcttggcgcaccttgggacacgatttcgctgcttggcgatctgcaggtcctgctgccgcgcgttggcctcgcggacacaggcctggtacagcgcctcggcctcctgcgccttggcctgggcctcctctcgcgagcgccgccgccgctcctgctgcttgctaggtcccggcgaggcctggggggccgagtcctcaggggacccctgggagcgtgcccgcaggtcctcgctgcgttgcacatactgcagctgggcgcgccgcagtgcctgcaccgcctcattcatccgcttctgctccttcatccactgctccttgaactccttccgccacttctcaatctcagtccgtttggcggcgaggggctggtagtagtctcttttctgctgggccactgtctccatggccagggttcccaggctgagatcgtgctccagaaacagggtgtagatgtactgcagaggcatgtggctctgctgttgaatggacaccttgccagcttcagcgatcttcatggtgctcttagcaaactccagctcatagctggctctcttttcagtccaggcaagcagttccttggcatagcggctccaggtcttggcatattccagggctgcgtccacacccccctttgtccgaatgagccgcaagtccagttcctcccctgtgaggggtacaggaccctctggggaggggccgctccaacagctggcttcgttggtgacagtggctgtaggggtcttgtcaggttctgggtcttctgagagtagagggtctccagccagcatctcaagggtcacgttccccagtgagatt

SEQ ID NO: 319112 - DNA, 1151 bp, Homo Sapiens
  misc_feature (30)..(30): n is a, c, g, or t
acaagaaagttcagaggaattcaagaaacntttggcatgacacagacggtttattcagacctctccacccgccacagttccacatcccagttcagcaggccattctgtgacagttcctactggtgggtctgtctatgacagccccatcctgagttccaagtccatgtcctgactgagtggtgagtgtgctcactcggtgctcaggaagactctcttgcgtgcggtattggtgtaagggtgccagcgccactccacgtctgctgtggcctcctgctccagcgtgcccagacggatcatgtacagcttcagctcaaagcggggcccgacctcagtgagctccacgttgcggtggtctgtcttcttatacacatggtgccggaatgatatgtagtcgtcctggtttgcgaaggtgatgacccggtggctgtcatctttgggcacgggaaataggtatcggaggatgtcagagacccgcttgcccaggcgggaggagaagccgtgtgtgatgaggtggggcttggcctccgacatggtgcccaggtctgggatgtcatgccgcatgaccacattgcacagcgtgaagtaggcagtaggaccaaagggcaggtggctgacgatgagccccacaggtgtgccccgatgctcgtgaacgaccagcagatcggtgacgccgttggctttgcaggctcgcaccagtgcccccacttcatgtcgacctcggttcattcgctgggcgcccgggaacaccagcttcagctcctttgcaaacatcttgaggcgggaactggggtctcgggaggtagtgatcataaccttgggatcctcgactcctgcccatcggtattcatcatccacgtggctggtcacaccttcacctccagcatcatcaaactccagggacccctgtaaggccagagcctctcggcgtaactcagtgggaatcaggcggttttcttccagcgcgcgccgcagccgctccttcctctcctgggctgagcgctgcgcctcctcccgggccttgcggtacaggtactcgcggcgcaggcgggcctcgcggcgcagcatcttgagtgccgcttccacgtgggtccgggagaatctgtgggctcctccagcgcgacacagtcctcacttccgccctcaaccaagat

SEQ ID NO: 319113 - DNA, 1224 bp, Homo Sapiens
tttttttcttatttcaaaaacagggatatctgcatttaatttcattcagtaaatcaattccagttaacttaccatctcttaaaaatgggagaaagcaaacataggacgtgaaaagttaaagatgcgtgacatactggagagtaataagacatactggagagtagtaagtgcacacgtggcaattaagggttgtaatttagatgtaacacaagaaaaaaagtaaaattactgtactttattgctgtatctatgctttcccagtatagctataatactacaagggaggcccccacccccaaaagaagaaaaagtgccaccttctggtttaaaactgtggcaccttatttcttttgaaatgtcactttataaggtgtatgtagaaagcaacagcagcagttacaaaatgttgtctgagtgattctgagagctcaaaacaaggatccgcgtataggctgaagaaaaagacgttcagttaacagtgcgcgctgtagaactttaacacaagtcttcaggtggaattcctgtgtaaaccttagtagagatgcgactcacggagaccaaaagtaaaaatctctttaccgtttacagtttagtgaggtggtctgcattctcgcaaacgacttacaaagtacaagaaatgttgcgtgtgagtattaggcatagaatatttcattttcttacggaaggagcagcaggggacaggaaacctagtggacgccccgccaccacctttcccgaagatgcacacccccaggaacggcagtgcaaagcctggcagcaagccacccttacaattctttttggttgtttaaaatacaagcgctttctgacatctcaccctagcgtgtgagccccactcaacctggcaggatacaacccacgtcctcgtttagttttccccttggaattatttacaggatgcctacagatacggtacaaactagtatgaaattaatgatagtttgcgtttccagacacgctcccgtggttaaatataccacgccaattccaaagaatggttcaaagttaaggtgactcagaagcattggcatccacagccgcagaaacaggcttctcgctgactggggtggagtcgccgactctgtcctcaacggtggtgggggccttggcagtggggggcgtcacatccacagtgagtgaggagcagcgtctgccgacgcgtgggtcgacatatcccgagaattccgaccgtaccagcctgct

SEQ ID NO: 319114 - DNA, 1457 bp, Homo Sapiens
tccggaattcccgggatcggcggagtagagcggagctggcgggcgtgggaacccaggccccgccgaggcggccaggttagtgcagcaggtgggtgggtgggctccccggtgcgggcgggagaggaggtggatcttggctccgaagcgtgggcgcggcgcagatgtcaccggcggctgctccagccagctggtggcggcggtctactgagctgttcgaacaccgtgggaggcgggggacggtacggaatttggcccccgcaggctcctcgtccctgccagcactttcgaggtgcagtagggccctgcaggagagagggtgggggagaaggggctggttctgaatactttccttgagcggagacccccttgcccaccccagccgatcgcacgtgcgaaaccccagcttgagggtgggctagtgggagcctgggaagctcccctcaagcgctcgggagctgcgtactgagtagggggtgtgcccggcgggtcgcaaggagtcacaggctttcagttctgggccacgcccacaggctgtctctgtccacccagccagaggtggggctgcccccgggactgttaggtgttcagggggcaccgtgcgtggctcgtccctggaaacaggcgcagaagttgttaggtcggtacctaagcgccccacagtctccggccaccaaactttctcaggacccagcctggaagcctcagccccgcccaaaaagggacgactcctggtgggtggggcgcggggcttcccaaggaggggcttccgtgaaagaacacgtaagaagagctgccagtcggcggatgcgaaactagggccctggcctctttaccctgttaactcgacctccagcctggttcaccttccccatcttctagtactagtgagtgtgagaaagcatccccagtctccaggttcccagtactccccacctccccctcgacccccacagacctgatgggcagacaatggtcctgttcggtccccacttccaccccttggggtgggaccataaccaagtcaagcactctcaagtcaaggggccagaaagacatgaaagagggaatgtttccaggggaagtttccactctctcctactccccaggccactttcgaaggactccccccttatctcacctccgtggctggctccctattatggacccacttgtcacctgcagagtttcctgttttttcttgttttgcttttaaagaaaacaaatttattttgctcttttaatacaaagaaaatatgtctacttcacataaagcagaaaatattgctaaatacaaagaaaataaaaatcacccacaatccttccccacccccacctaccttccttcatcctgcccagagataaacaaaatgcaaacttcctgttactatccagactgtggtttggcgtaagtacacaagtattaatgttttctatgaaaagattagaaggctgggtgt

SEQ ID NO: 319115 - DNA, 1593 bp, Homo Sapiens
  misc_feature (4)..(4): n is a, c, g, or t
  misc_feature (11)..(11): n is a, c, g, or t
  misc_feature (20)..(20): n is a, c, g, or t
  misc_feature (24)..(24): n is a, c, g, or t
  misc_feature (44)..(44): n is a, c, g, or t
  misc_feature (50)..(50): n is a, c, g, or t
  misc_feature (59)..(59): n is a, c, g, or t
  misc_feature (64)..(64): n is a, c, g, or t
  misc_feature (97)..(97): n is a, c, g, or t
  misc_feature (109)..(109): n is a, c, g, or t
  misc_feature (114)..(114): n is a, c, g, or t
  misc_feature (128)..(128): n is a, c, g, or t
  misc_feature (141)..(141): n is a, c, g, or t
  misc_feature (314)..(314): n is a, c, g, or t
  misc_feature (513)..(513): n is a, c, g, or t
  misc_feature (1270)..(1279): n is a, c, g, or t
  misc_feature (1335)..(1350): n is a, c, g, or t
aatnctgcganccgtcctgncggncgcctcctccgttgtctctnccggtnatgcacacngacgngcgctgtacccacacaccctgcctgtcacatcnggcgtctcacgncagcngtcctgggcccgcngctggcttttttngcacctccaggttcaaccaccagtctgtctctgctgtgcccagggtagagcccgggggctgtgagtatgtgtggctcccctgcccgtcatcgctctggctcaagctcatgctggaagggacgcttcctctcccgacagtgcttcttgtgggcaggccagtccttctgctggcnctgggtgccgcagtaccgggccacctggcagcgcccacagatgttgaactcccggagctgcttctcaatcactgtgctgggagggtagtggcactcatagtaggtgcaagatttctcctcctcttccactacatccccgttggcattataataccgggtcacatttaggacaggaaactgttcttctatagggtctgtnggcagctgctgaattgcaagccaatacaagctttgctccctctgcttgctggaggtctcttcagccttgggccgccagccccacggcaccagttgcaggttgtccaggcgattgtccacggtcacagcgttgaggtgcaccacctggaagcccggggccacgccccccggtgccgctccctagaaacagacagcaaaccctgcatctaaccctgcatcgctgcctcccaccctcacagacatttctggtcaggtaccaaagtccttccaggaagaaatgtcagccatgtgatctgatcgggcccctggtcctttggatgagggtacctcaggcggaagctgctgagagaaacccaagcacctgatctgtggcccaaacaggacagggacacagggaggacccggcccctggacttcagagcacagacagccaaagctgtaacgcaaaaccacctaagcagatggcctcgagacagctccccatctgagtggtccctaccatgcacaccggggggggctcggcaaaacccagcaaggggagcaaccacccgtccttcaaaagctggcggtccctgggcaagcttccagcaaaaaaggcaacttggtggttgaagggcaacaaacaaaaaattccgtcctttgggtaaaggggaaaggcacaaaaataactggaagattaagggaaggcaaggcgggttttacgggggcagggggcttccagccccctgtgcctatggagtctccccagaaccccagtnnnnnnnnnnacaaaaaacttggaaaacccaccacagggggtttggaaggggatttcccaaacccnnnnnnnnnnnnnnnncaaagggtatgcgcaatattttaaaccattttcaattgagacaaattctattgggcccaaaagggatatttccacccccgggaattgccctcttataaacaaaattgtgttttttgttgaaagaaaaacccaagtttaaaaaatataatttgggacacctgggggaggagagatcctttaacccaaaaaagagcggggcaccgtgaattttttctggaggggggagagaaatcaagggctctt

SEQ ID NO: 319116 - DNA, 1457 bp, Homo Sapiens
  misc_feature (1297)..(1298): n is a, c, g, or t
  misc_feature (1329)..(1329): n is a, c, g, or t
gctgatccctgggaggaggttaagggaatcttcttccccatttttcatcggtccagttccccctacaggcaaccttgttgtctttcttggccacgtggttggctaggatgacagtggcaaagacagggaagccattggcagtgttgagggagccatcatagttgttgtgatagatgccagtcagctctatctcgtctcctggcttgcagctgtccaccagatctgcgaggagaatggcgtccttggagcggggcagccggccagccgccactttgcctggactctcctggattcggatacgctggtagttctgatagatggtctcctccatgttgacctcaaaggggccggccgactggcactcaggacaggagcctggtttcacctcctggttctgggactggcagaaaggacccaggacgaaattgcacttgttgcagttgtacttgaccatgctgagctggggcaggacgccagtgcagctggtcaccaccccactggtgcggatcagctggttcagatgcagctgcctcagcgagcgcagctcctccaccagaggcaggtgggagatgcggacatggatgtggttggtgatgcggtcgtacttggggtacatggccagtaccacttccagggcagcctcatcaaagatctgcagcagctccgccggtgcttcaggcaggaagtaggccagcacgtgctccctggctgccaagtcctcatagttcaccaccaggctctcacggttctctttgcacatgtcgctgatgcgctccttgaagacgttgtggccgtggctgtcgacgtgagtgcgcaggaagttcttgaagcggtggtggatctccagccgggggcccgccatgctcacccactcgcgcacagagtggcctttgagatcctccaggttctcgatgctctcgatcatctcctcgtcctcctcgccgtcctccgtggcccgctccacctggcggcgcttgcgggcagggcgctcctcgtcctcctcatcgctgtcatacaggagcccacggcgcatgcggcccaggccccggccagcctcccggtcacgctgccgcatggcccgctctgctgcctccctctgactggccgtcagctcctctacgtcctcatcatccagagccagtccctcggcctcataggcgtccagctctgggatggcgcggtagtccctttccatgccatctccaatgagctcctctccatcctcttcttcctccaggggcccctctgtgcctaggagcccctcggactcatcctcaaatggtggaaggtcacggcnncagggctggaggtgagggcatcagtacgccngggagcttcggccagggctggaggtgagaggatcattgcctcgccgacgctgggccgggctggatgccatggtgaaggatttcgatggttccgccatagcagtaccacgatccttttcggcactacag

SEQ ID NO: 319117 - DNA, 1372 bp, Homo Sapiens
  misc_feature (55)..(55): n is a, c, g, or t
  misc_feature (308)..(308): n is a, c, g, or t
  misc_feature (322)..(322): n is a, c, g, or t
  misc_feature (325)..(325): n is a, c, g, or t
  misc_feature (362)..(362): n is a, c, g, or t
  misc_feature (366)..(366): n is a, c, g, or t
  misc_feature (496)..(496): n is a, c, g, or t
  misc_feature (1045)..(1110): n is a, c, g, or t
ccgggatcaaccattgatttgagttcattaattcacacttcatgagcaggcactncgtcatctcattttatagatgaggaaactgaggcacagaaaggctgagagacctggcctagtgacagagccaggattcaaagccatagatcatggccccgggttatgtaggttattactgcatctgttcaggggagatggggtactgtgaggctcgtcatgggaagcctggcttggtctcaggtcagggaaggcagatgtgaggaaatgacatttatggtaaagtctgagggttgagtgggtaggttgggaanaacattccagaaanaancacatgaactacagcctggaggtggaggacctaaaangaanccagcatggctggaagcacggagtgccattgagggaggcgagctggagggctgcagcttcttgtattggcagtgctgacctcgcacagtccttgggctccagtgacttcactcagtgtttatctaacatnagtgagtgaatggtgtttgctgtttttttggtaaaggtcccaggggtatgtcgggtacacaggtcctgtctttggccataagcaaactgaaatgaggcttggtctccttcccaggatcccacaccatgcctcacatggtagaccccagtgggaagtatgtgactgcctgactcaggtgcctctcgtggtccaagccatccctgccctgtcccttccctggttgtcgccagacctggagcccctgctccttcactttgcagcctcctcttctgtcaccaactgggaacccacctcttcctgaaagtcctcccccactgactcaccggcttgccccgagcttgtcaagaatgtcccagtaaccaggggacacacactgaagtgactgaggggttaccttggagttgatgccttggctcagatccagctcccctgttttcttcctctgtaaccttgggcaacccaacccctctaagcctcggtgttctcatttgtgaagttgtggtaataatggtagcttcctggtagaattattgtaaatattaaattaannnnnnnnnnnnnnnnnnnnnnnnnnnnnnnnnnnnnnnnnnnnnnnnnnnnnnnnnnnnnnnnnntcctggtgataatcttgacccatacactggcttttggttgccattcatgaacctgccaccaatagtaacaaagtgcttggatgcaccctttgggcttatttttgggcttaaaggggcccgagggccacctagggtaaagggagccgggtctttaagaagctcaagctgcaagatatggcccacccatgtccagcctttaaaatgggaggccaaaaccatttcctttgagaatatgggttttcctttccaagaagggggactg

SEQ ID NO: 319118 - DNA, 1118 bp, Homo Sapiens
  misc_feature (591)..(591): n is a, c, g, or t
  misc_feature (966)..(966): n is a, c, g, or t
  misc_feature (1007)..(1007): n is a, c, g, or t
  misc_feature (1028)..(1028): n is a, c, g, or t
  misc_feature (1046)..(1046): n is a, c, g, or t
  misc_feature (1058)..(1058): n is a, c, g, or t
  misc_feature (1061)..(1061): n is a, c, g, or t
  misc_feature (1063)..(1063): n is a, c, g, or t
  misc_feature (1070)..(1070): n is a, c, g, or t
  misc_feature (1080)..(1080): n is a, c, g, or t
  misc_feature (1082)..(1082): n is a, c, g, or t
  misc_feature (1084)..(1084): n is a, c, g, or t
  misc_feature (1087)..(1087): n is a, c, g, or t
  misc_feature (1089)..(1089): n is a, c, g, or t
  misc_feature (1092)..(1092): n is a, c, g, or t
  misc_feature (1098)..(1098): n is a, c, g, or t
  misc_feature (1100)..(1101): n is a, c, g, or t
cggttaaaatacatttttattaaatgttagaataaatttatacacaattcacaaattctttacaaagaattgccaatctttttccaattttgtagtagtctctacacattcagaaattctgctgttaaacaggatttataaaatatttctttcagaaagcatcacaatgctaattttaggcaaataatgttttaaaactgaagtctttgcatggaggtgagctcaaacacccttattctttattgcagtgatgaaataatgagaaaaataaacattaaactgacttactaagaaaacaatgaataagtaattctgtaaacttctcaaattctcctaaaattttttattactttcagaagcaatactattgcaaggtatcaacaaccacactatgtacccaaataaaatgaatgtcagaaataaaaatactgtcacaaagaggcgccccttattgggagatgtattgaggaggtcttattacactgaaattttatggcacagatcataaactcagagtctcttcacacataataacaattcatccattttgaaatgagtaacttctcctttgtagtgttgctagtataaaanaaggtacaagttcaaaatatgctggcaacatacaaaagtggccaatagttttggtctttgagagtacaccctgcagtttaacaaagactggctttgaatcttccactcaaaagcacacttctcttccaaaaagatgactgcccaactgatgccatcccagagagcagatatcccaaccaccaacttgaaatggctgaacaaagaaaactaaccaattacttcaaagatgggaagcaaaatcaatgtcaaggtatttaaaatcataagaaattttaaaattcaatttttgaaaaatttcccctgagctttggctgctttttatatacagtctctagtaacagatgcattccatcgttccaagttgtacttataacngctataattcttggtgctaaaataggtaagttatgtcttgnacagcaagtggtagcaattantttcatggaatctttggnggggtgcagtcnggngnagcctcnttgtttcccncncntangngcnaggatntnnagttttttcggggggga

SEQ ID NO: 319119 - DNA, 752 bp, Homo Sapiens
atctatttcagtgttttctattcttgttttagcccaagcgcaccatgggttccgttgttttcccggcttcgctgcgtttattgcaggtgggtgcacctggtgggagggcaggtccggggcgaggtcacacgacctcgtcggtcaccgggatggggttgacctggggacctcccgggggtccccccgccgccgccgcagcctcctcctcgctgggcttcttgcgggcctcggccgggggccgcggcggggggttgctgggcggctgcttgatggtgcctccgatctgcggccgctcccggggcttgggctcgatgggcgtccactgctcgccacgcacagccgccagtaggtagatgccgctcgcaatggccaggcaggcggtcccaaggatggtggccagcaggaagccggcgggcaccgagagcaggagatgcaggacggcccgaacatagtaattcctggtaaagggcccgaacagcttcaccacggcggtcatgtgcttctgtccccagcgctccatggtggagcccttcttcctcttcccccgggggtactccagcaggcacacaaacacgcccgccacaatggagtaggcaccaaagtaccactgggtgaagcgcccagctgtggccacgatgcccccggtgatgaggatcaggccggacgccagcgcctgctcgttggcccacatggcccactcgatctgccccatggcgacacgaacccggctgggacactgctaggcgcgcact

SEQ ID NO: 319120 - DNA, 1030 bp, Homo Sapiens
attggggggggaattccaacgcccttagttccttgacccaggattttccttaggaaaccaggttaggggccatggttccacttaccttattggggccggcgcgccaaacggaatggtttagaaagcttttttggagggccggaggcggccgcacaagatttgggggtggtgtgttccctggggggggtccaatgaaagtctatttatttgctcgtaatgagacagaacggtacaatctgttcaacactgggctggacactgcagtgattaggggcaggtgtggggcagggtggggcctctgagcccgaggacaaatgtccatggcagagccttccagaagactcgtcccttaccctgtggggcagaaatagaaatcacatgatcgccactgattcgcagtggagagggcgctgagctgggcccggcaggcaggcagcctcagcagagattcaggcagtcagcatggtgcggccctcccgccagcactgtcaggtcagcagaggttcaagcagtcagcatggcgcggccctcctgccagcaccgtcaaggagggggatgctgctcctgcctggtgcctgccttcattctgagggcccctggccccagtcgtgagttcaatgaggggacctggggctgccccagcaccctggagatgcccgtggctgggcagctctggaggcggacggacacaggtccctgaggaccccgtctgcccagcgattgttcctccctgctccctccttcctctaggctggggcagggttggcgccgctaggaccgtctgccatggctttgtgatcactgcagctatgctgggcgggagctccggtgctccagcggcgcccctgcatcggagggcatggcagttcagcaagcagtgatcctggaatgcacgggtgtctgaggatgctagaacgtatgtgatgcaactgtcggaactgacggcatgtctggtgctccgatgctcatgggcccataaggcagggtgatgccccgttgccagcatggcctggcacgtggacgaccagta

SEQ ID NO: 319121 - DNA, 1109 bp, Homo Sapiens
  misc_feature (15)..(15): n is a, c, g, or t
  misc_feature (24)..(24): n is a, c, g, or t
  misc_feature (106)..(106): n is a, c, g, or t
  misc_feature (141)..(141): n is a, c, g, or t
  misc_feature (898)..(898): n is a, c, g, or t
  misc_feature (1072)..(1072): n is a, c, g, or t
ccatgcatgtgtgtntggcatgtncctgtgtgtaggtgtggttgcaggggttaattactgcctagaggaaggagttggaaaatggggaaaaggaccggtgtacagnaaattgcaactaatcatcctctggcctagtgtttncccctcatgtaaatggtgatatatttatacaataaaatttattacattaggtaaaacaaaactaataacgtcatgtcactgggctggcctgtttcctctgcgctgtggggaggagtggaggaggctagtactctcatgaagaacacctcagtgaggacgtagcctgctctgctgggaggtggctgcagggatgtggggaggatggagggcggggctgcgcagctcaatctcgcctccacctgggctgagcctagtaggggtgagagggctctggctgcagtgactcccaggaactagacaaacgagaccagagactgaccggggacgttctctcggtggccgcatggtgggaaactggagcctcccctgctgtctcgccttcctcctcttgaggcccagtctcctctgcgggtctctctgcaatctggcgttctttcagctcaagcgtggtgggcttctccagggcagcaaagcgctctgcccagctggccgtggacttctcaaaagcctcatgcctcttgatgagcttctccacactgtccactgtgtgtccaaagtccccgctggccaggtagggctcctgggcaatcagccacgcctcagccacagaggcatccctcgagaactggcacacctccagcaacatgcggaagcgctcccagcgggcttcccacttctcattcatctctttcctcctggacatcacctgctgcagtttctcgcggatctcctctgaggcctggtgctgccgctgcanaggggactcgccaagctccaggcaggcactgaagttcttgctccgggtttcaatctctgcattgatgccctggtgatacttcatgagcagttccacagaggagacatccctgggcctctcctgggtctcgatctgccggatgatgctctccatccaggagaggaggtcacgggncatgctgaagaagcggaatttatccgccgtgtccact

SEQ ID NO: 319122 - DNA, 1063 bp, Homo Sapiens
  misc_feature (20)..(20): n is a, c, g, or t
  misc_feature (39)..(39): n is a, c, g, or t
  misc_feature (58)..(58): n is a, c, g, or t
  misc_feature (61)..(61): n is a, c, g, or t
  misc_feature (64)..(64): n is a, c, g, or t
  misc_feature (309)..(309): n is a, c, g, or t
  misc_feature (937)..(937): n is a, c, g, or t
  misc_feature (993)..(993): n is a, c, g, or t
  misc_feature (1014)..(1014): n is a, c, g, or t
  misc_feature (1024)..(1025): n is a, c, g, or t
  misc_feature (1053)..(1054): n is a, c, g, or t
  misc_feature (1061)..(1061): n is a, c, g, or t
agttttatttctcagtgtangacatataaattgttctcnctgacatataactattaanagnaanataaaataaaacaatttaaaaagaagaaatataaattgtatttctgaatccaagtcacctgtgggggtgtagccagcattaaaataatcgccaggacccatgcaggcatctatctctgaatgaggcagtgcagcatagcagttaagagctcttgggtcagacatggatgaactggttgcatgatcttggctcgttaccaagataaagtgacacaaggtgtgtaaagctcccgagctgcaagccanggatcttcatacacatacattttagaggataatagtcctttcaaaagacacagctaaagccaataaaaataaacaaaaataggatctacttttctggaatcacaggtttgggtgctttggatatgttttatcattatataggcacttgtgtgtgtctgtatttttttgaatatacaacattttaatgagatactgcacactcccagggaaagcaattcaatctctaatccctggcttctgatctccacctcttttctacctgctgaggtaaggatgaacaacagaacttctcaattgaattctaagcttgggcctaaagacgctgtgccctctgcctttgagtttgcaccctggatggctcccctcctcccaggagacccagtagggagatgacagagcattgtagtttacactgagcagagtaaacagatgatgttaaggagactgtcagtgaagggcatgattatgcaaaataaaatacaatagtgacaagaacaagaaaataacacatggtcactcttccatcccatttctcagatgtcactacagtagtctcaattacggtagtctcaattctttagactaaagttcataggtcatccaacttatgccctggcctccttctggnattcttttacctagcagtttctgagcccacagctgagctatttgtgaccatttgcnccactatctcatttcttgacncagatggtannaactgatcaggagacatttcctagggtnngtgtggncc

SEQ ID NO: 319123 - DNA, 699 bp, Homo Sapiens
  misc_feature (516)..(524): n is a, c, g, or t
atttgagaaacccccaaatttgctctgatggcctttcttctccatttgtcatctctgggaaccttgagtctagatttagggctgaaagtctctctgctaggagctttccaaaatgcattgctttgattctgggaactgaataggaggagaacacctggactactctgagtcctgagttcaattcctcctcaactggtttccttgaaggtggctgtactggtcatcttctcgatccttgaggggctggtagagctggtcattgggcaacagagtctgcttgtctgaagctctcgactggcgaactccatcctgtccagcaatgaagtagaccccaaaggcaaggacgaaaatgctgacgatttcagcaaagagaaagccagatatggtggctgcatttaggttcaatgcagttctgacacattctgtaatacacttggagtggttttgacttgttctgtgatcctttacacatgatacatccctcgagggtccttggcattacttcccagattccannnnnnnnnatcttcagttaggaagccgatcatcttcccatctttaaaccatgtgatatttttggcttctgcatcacaagtcagaagtaccgaaccatcttcttgatagtcatacaccttaaccaagtggtttcctttgattgactgggccaaagtaccttgaagaagaatgatagccagcatg

SEQ ID NO: 319124 - DNA, 934 bp, Homo Sapiens
  misc_feature (877)..(877): n is a, c, g, or t
  misc_feature (898)..(898): n is a, c, g, or t
  misc_feature (904)..(904): n is a, c, g, or t
  misc_feature (916)..(916): n is a, c, g, or t
tcccggtgtgggtactgctgtctgtggtgtggctgtgggacccgtgagcaagcagcgacgccagcggcggagaaccgacgaaaggtgtcaccacagtgatggcagtggaggacagcacgctgcaagtagtggtacgggtgcggccccccacccctcgggagctggacagtcagcggcggccagtggttcaggtggtggacgagcgggtgctggtgtttaaccctgaggagcccgatggagggttccctggcctgaaatggggtggcacccatgatggccccaagaagaagggcaaagacctgacgtttgtctttgaccgggtctttggcgaggcggccacccaacaggacgtgttccagcacaccacgcacagcgtcctggacagcttcctccagggctacaactgctcagtgtttgcctacggggccaccggggctgggaagacacacaccatgctgggaagggagggggaccccggcatcatgtacctgaccaccgtggaactgtacaggcgcctggaggcccgccagcaggagaagcacttcgaggtgctcattagttaccaggaggtgtattatgaacagatccatgatctcctgtagcccaaggggccccttgccatcctcgaggaccccgacaggggtgtggtggtgcaaggactttctttccaccagccagcctcagccgagcagctgctggagatactgaccagggggaacgtaaccgcacgcagcaccccactgatgccaacgcgacttcctcccgctcccatgccatcttccagatctttgtgaagcagcaggaccgggttccaggactgacccaggctgtccaggtggccaagatgagctgattgactggctggctcagagcgggntccagcaccatgcgagggggngcgctngggagggggcanatcaacgctctctgctgg

SEQ ID NO: 319125 - DNA, 628 bp, Homo Sapiens
  misc_feature (475)..(475): n is a, c, g, or t
  misc_feature (547)..(547): n is a, c, g, or t
  misc_feature (549)..(549): n is a, c, g, or t
  misc_feature (556)..(556): n is a, c, g, or t
  misc_feature (582)..(582): n is a, c, g, or t
  misc_feature (585)..(585): n is a, c, g, or t
tctgtatctttaattttattgacagcagttgagagaacaggcttttgacagcaataactgccagtttctccagcctcacggcctggttgtggagctagaatccccagaggccagctgagtgctggtcggaagtcggagtcagccagcacatctggccgaagcagagggggtgccaggcttctgactggggtgggaggcagctccgactctgcctgttatagccagaaagaggccggctaaaatccaaggtgaccaggtcccagctcagtgggcagcaggcaggtggaggttctgtctgtgggtcccagctctggtctactcttggcatccctgtctccctgggggtattctagctttctgtgctctgctagaggaaggcacttgagcacacctggaaacaacttctgctgagaaagacccagccaggctcccacacttggcagcaggagaaatgttgatccagacagggtaagtnacttgcccaaggtcacacagcaatttcatgagtttcaaaacaagctggtagactcctgtccagtcccaactntnaggagantggagatttggggatgtgagggtggnctncaggtgaaaaggaccgccggccggctggccaggagctgggaag

SEQ ID NO: 319126 - DNA, 932 bp, Homo Sapiens
  misc_feature (40)..(40): n is a, c, g, or t
  misc_feature (61)..(61): n is a, c, g, or t
  misc_feature (75)..(75): n is a, c, g, or t
  misc_feature (152)..(153): n is a, c, g, or t
  misc_feature (168)..(169): n is a, c, g, or t
tcagctggtctcccgggcaccaccaatggcgggctcaggnaggccaggaaggccctgtggntgctcccttgacgntgctccacccagctttctggctgaagattctgcccgtcgctgcaggagggcgcgaggcccgtgagctggggggctgnnctccgtcagccctcnntgctccaggcagtggctcgatggtgagctggtaatctgacctcctggtgccatccttgaagggtggggacactgcgctcctggcggaagcggtaggaggccgggtacacggttttgatctggccaacattgcgctcctcaaaacgcctacgcatcatgtcctggacgccccgctggaccttggcaaaggtgggcgtctcggagcggttgtggagcatgcccacgatggtgtccatgctgcggaacatctccgccagcacctggtacttgtagggcagcacgagtcccggcaggccgggctgggccagggcatggaagcgctggtaggcgggcgccttctcgccacatggctcctcagggcggccctcggcctctggggtgcaggactccccagcatcctgggcactggccttcagcgcccggactcttgcccccagctcccgggcccgttgcaggcatgacgcaagctcagagatggtgtcctggtcctgcgcggatgtcaggtggggcggctgacctgctgccggggtggatttctttatcttctggcccggagaagggcaggctgggatgtctggggcctcgggggtactggggctggaaacctcgtccaccgacagccgcagtctcctgcgggccggtggcctggcctggtcgcgtccgggggcggcgggcgggcgggcgcgcttgcggctgccactggtagcggaggccggggcgcggagtgcgggcctggcggggctgggggtgcggcaggccagctt

SEQ ID NO: 319127 - DNA, 1777 bp, Homo Sapiens
  misc_feature (57)..(57): n is a, c, g, or t
  misc_feature (60)..(61): n is a, c, g, or t
  misc_feature (66)..(68): n is a, c, g, or t
  misc_feature (70)..(71): n is a, c, g, or t
  misc_feature (73)..(76): n is a, c, g, or t
  misc_feature (913)..(913): n is a, c, g, or t
aatggtcttagaaaagtcttcttggaagggcccgagggcggcccgaacatgtttttnttnnttttnnntnntnnnntttttttgccaaaaaactttcatttaataccaaatagttgcttaaccaagtatgaaaggctgaaagtcaaaatctgcctgagaaacttaacaaatctgcaagctggaaaccgcgtcttttccccactctctgccagacagaatcacccagtccactttcgggggcccagcagggaagctgatttaagagaagtcaacagcttttctgactacactgtggattccatcagtgcccaggcacctgcagggctgcagtaagcatctctgatgaggtggtcccgggcactcactcgcagtctccctcctggtttccttgtgggaaggggcttcatgatttcaagctcagttcccctcccactcccagaggtggagcgcatggtcatagaaggagcaggtggccaggaggctgaaggctgagtctgcttcttctgggttcacgccacagtcacgtgtggtggctgctgtagcctgcagccaggtgccattcttcctcatgccctctgtgagtggcttcattccactctggggtctggcatggccctccccatcgttatcctctctgcattcatgacagggtgttggcaactcgcttgcacccttcaggtctgccgtcttggttcctaggttgctaggaaaggaccacgagggggcccgctgcagagaacggaagagcagccaggaccagtcggctccatacaccagcgagtcgggcaatgtgtgagatgtcaggaccgtcgcctcctgcctctcctccattgccttttggcagttgaggatcttaaagccactgtgcatgcaggcggccaggagcaggtggtggtggaaagggtgccacttngattctccataccccaccctgcacaggcgtatctgccaacggctgcttcatgtttcgtgtgtcccacagtaggatgtgttcatcatagcttttgctggtgaagagaaatttgccgggtaccctggtgtcccagcccctcagaaggccatcgtcgccccctgaatacacaatttctggatgccagtaattgaaagcagcaatccaggcctcgaattgatgtgcctgccatgaggccactttctgcagcctgggcctcgtctcattcaccatcaggaggtggagctgccctgtggagtcactgctgatgatcttcaagggctggtccccggcccttccagttttcccagtggaccaatctagggacaaagccagacactgctcctccagggcaaggctggacaatggctccagcacgtggctcttctcagattccaccaggcggagcagttgtatggatccactggcatctgccaagcccaagagggcatgtccagccaccgggatgtgacaccttgattatatggtatggcccactgctcctatgccacaaaccttacagcatgttactgcaggcaagtgtgacacaacaggaagtggttgtatatcttgttctgggggccggcaggccggtcctccggccgccgcagctggtaggtcccgcacgccagcaggtgcctgcagccttgcagcgggcaccactccaccgagtccgcggtcagctcggtgtccaccgtttgcagggcgaaacagcccatcatccagccctcggggaagggcgcggagccggcagtagaggcgggtcggcggggccgggctgggtactgcgcggggcggcgatcccgggaattccggaccggtaccagc

SEQ ID NO: 319128 - DNA, 855 bp, Homo Sapiens
  misc_feature (5)..(5): n is a, c, g, or t
  misc_feature (10)..(10): n is a, c, g, or t
  misc_feature (12)..(12): n is a, c, g, or t
  misc_feature (47)..(47): n is a, c, g, or t
  misc_feature (72)..(72): n is a, c, g, or t
  misc_feature (85)..(85): n is a, c, g, or t
  misc_feature (88)..(88): n is a, c, g, or t
  misc_feature (121)..(121): n is a, c, g, or t
  misc_feature (127)..(127): n is a, c, g, or t
  misc_feature (130)..(130): n is a, c, g, or t
  misc_feature (144)..(144): n is a, c, g, or t
  misc_feature (167)..(169): n is a, c, g, or t
  misc_feature (187)..(187): n is a, c, g, or t
  misc_feature (193)..(193): n is a, c, g, or t
  misc_feature (197)..(197): n is a, c, g, or t
  misc_feature (206)..(206): n is a, c, g, or t
  misc_feature (210)..(210): n is a, c, g, or t
  misc_feature (214)..(214): n is a, c, g, or t
  misc_feature (216)..(216): n is a, c, g, or t
  misc_feature (220)..(220): n is a, c, g, or t
  misc_feature (223)..(223): n is a, c, g, or t
  misc_feature (227)..(227): n is a, c, g, or t
  misc_feature (229)..(229): n is a, c, g, or t
  misc_feature (232)..(232): n is a, c, g, or t
  misc_feature (237)..(237): n is a, c, g, or t
  misc_feature (239)..(239): n is a, c, g, or t
  misc_feature (241)..(242): n is a, c, g, or t
  misc_feature (244)..(244): n is a, c, g, or t
  misc_feature (248)..(248): n is a, c, g, or t
  misc_feature (250)..(251): n is a, c, g, or t
  misc_feature (253)..(253): n is a, c, g, or t
  misc_feature (255)..(255): n is a, c, g, or t
  misc_feature (258)..(258): n is a, c, g, or t
  misc_feature (263)..(264): n is a, c, g, or t
  misc_feature (267)..(267): n is a, c, g, or t
  misc_feature (274)..(274): n is a, c, g, or t
  misc_feature (290)..(290): n is a, c, g, or t
  misc_feature (335)..(335): n is a, c, g, or t
  misc_feature (339)..(339): n is a, c, g, or t
  misc_feature (345)..(345): n is a, c, g, or t
  misc_feature (395)..(395): n is a, c, g, or t
  misc_feature (415)..(415): n is a, c, g, or t
  misc_feature (419)..(419): n is a, c, g, or t
  misc_feature (421)..(421): n is a, c, g, or t
  misc_feature (469)..(469): n is a, c, g, or t
  misc_feature (490)..(490): n is a, c, g, or t
  misc_feature (619)..(619): n is a, c, g, or t
ctcanagagnanggagcaaaagcagacgccaggtgtcagtaacagcnaactagggacctctcctcgcccctngtcctatctgagnggntctaccccacaagagcttctatccgtcctgagnctctcngtnccgcatcgcacttngctctgcggagtccggggtatgnnncgcgcccccttgtgggtntggcgncgtngggccgccncgcngcgngngtgntcncgcngnggnggtgngngnngngcgncnntncnctntcccnngcntggccgntttgcacgcaggccangaagccggcgacgtctcgcagccctcgggaaaggtgtaccaggcngctntcaagnactcgcaggctggggttcacgaacacgcgcagggggaagggctccatttngcggagcgcgcgctggcggngcgngnactcccgacacagcgcctcggggagctccagcgccagcacctgccgcngcacccccagctgcggcgcgnttaggcccacgcagcgccgccgccgcatcacctggaccagccgttgcgtcagccgctgcagctcgggcccgcctagtgcgcccgctccaccggggccgccacgccgcgcagcaccgggtccccgacttngcacacgtgcgagaacggcggttcgggaggacccagcaccatacgcttcaggtggcttcaataggagcgccgtatctccgggccctcgacgccgtccggggcggccgtggagctgcaagcccggacaccgacggctgccgccccgccccacggcacggccgcccacagtggccaaagactcagcgcgccccacagccgggccatggcggcccccttaacagtgacccggccatccc

SEQ ID NO: 319129 - DNA, 1647 bp, Homo Sapiens
  misc_feature (1609)..(1609): n is a, c, g, or t
caaaagagcagccttctctcagtgggaaaaggcaagagcacctggcgctgggcttgctgggggagggagcagcttctcagttggttgggggagggaggtatgttccctgggccttcggagggaagtgggggcctcagcattgggggcatgggagttggggggtgcaccccaggatttgaggggtgaactcccggaggctgagggtggaccccaggagccgacggatggaccccgggaggttgggggtggacccccggggcctgagggtgcatccctggggctggtgggtgcacccctggggcctgagggtgaacggcgggggctgctgggtgcacccccggggcctgggggtgaacccccactgatgggggaggatggacccctggggctggtgggtgaaccccaggggctggtgggtggactccgggggctggtgggtgaaccccgggggctggagggtggactccaggagctggggggtggaccccagaggttggtgggtggaccccaggggctgggggatggacgccaggagctggggggtggacgccaggagctgggggatggaccccagatgcagggggatgcaccactggggccggggggtggacccctggagctggcgggggtagctggggtggtcccgggggccctgagggcgcaggccctgtggggggcatgggtggcagaggcaggcctcctggcgggggcggtggcaaagactcaggcagcggtggccgagggggcagaccgttcatcagcgggggtggaggccgcttcaccccagggggccagcagggaggctgggtggagccgggggcttctccatcttaaagtggaactggaggaagaactgcttggtctcccggttccagtgtgtccagaacttgccctccgccttgtcgatctctctgctcggcaccttgaaggcaatggtctcgtagggctcggcggccatgagcaggtactgccagcgccggtccggaggctcgatcctctgctcgtacgcagacatgaagcggtgacgtggcatgatgccctcggcgatctcagggtagtcaatctggaagaggaggctctgctggcccatctccgagtctctctgcttggtcactttgtagcccgggcggccgatcttcacaaacttcttcacctccaccttgaccttctcaggcgcgggctgggcaggggcctccttggcctccttggctgctcgccgggccaggttggtctggtgcttcttcccctgcgtatgtgccaggtagctcccctcattgttgtgaagtgtcaggcagagtttgcattcataggagcccaggtggttcttcatgaagtacgggtccttgttgatgtcgatggtctccagggccagctgccggaggcgctccctgcggtcacggttgctctcggaggaggaggccacgcccccgctcccggtcttgcccccggggcgatgctggaagtccatggtgatggccttagggctttagcagactgggagacaccagagcccaaggccgcgttatctcctcctcgtttcgccacctccacgacttcgtttggcgaacgcctcgtgccgaattcgccacacaggcctcgttacgtaggnggttttactagcttgcaatgaggggggagagaagtaga

SEQ ID NO: 319130 - DNA, 978 bp, Homo Sapiens
ctgtttcttcaaaattatctacacctgatgttgtgagcccatttgggaccccatttggctctagtgtaatgaatcggatggctggaatttttgatgtaaacacctgctatgggtcaccgcaaagtcctcagctaataagaagggggccaagattgtggacatcagcttctgatcagcaaatgactgaattttctaatccttctccatctacctctattagtgctgagggtaagacaatgagacaacccagtgtgatttattcatggattcagaataaacgtgaacagattaagaatttcttgtcaaaacgggtgctgataatgtattttttcagtaagcacccagaggcctccattcaggctgttttttcagatgcccaaatgcatatttgggcattagaaggtctgtcgcacttagtagcagcatcatttacagaggatagatttggagttgtccagacgacactaccagctatccttaatactttgttgacactgcaagaggcagtcgacaagtactttaagcttcctcatgcttccagtaaaccaccccggatttcaggaagccttgtggacacttcatataaaacattaagatttgcattcagagcatcactgaaaactgccatctatcgaataactactacatttggtgaacatctgaatgctgtgcaagcatctgcagaacatcagaaaagacttcaacagttcttggagttcaaagaatagttaagtaatataaactgtgttcattacactgctgatacaactacagatgggacagtaaatgttcagcattcttggatcagaagaaaacggactaattagatgcttcctttgtcgtggtggttgactttgaaaactatactttaatgggagaaatcatggaaagaaattctcaacagaataactgaaaactgccttttttgtaccgattgctttttgtgtgtgtggtataataaaatctttattcaatttt

SEQ ID NO: 319131 - DNA, 721 bp, Homo Sapiens
  misc_feature (3)..(3): n is a, c, g, or t
  misc_feature (11)..(12): n is a, c, g, or t
  misc_feature (17)..(17): n is a, c, g, or t
  misc_feature (20)..(20): n is a, c, g, or t
  misc_feature (29)..(30): n is a, c, g, or t
  misc_feature (36)..(36): n is a, c, g, or t
  misc_feature (55)..(55): n is a, c, g, or t
  misc_feature (57)..(57): n is a, c, g, or t
  misc_feature (61)..(62): n is a, c, g, or t
  misc_feature (73)..(73): n is a, c, g, or t
  misc_feature (75)..(75): n is a, c, g, or t
  misc_feature (89)..(89): n is a, c, g, or t
  misc_feature (98)..(98): n is a, c, g, or t
  misc_feature (107)..(107): n is a, c, g, or t
  misc_feature (111)..(111): n is a, c, g, or t
  misc_feature (120)..(120): n is a, c, g, or t
  misc_feature (122)..(122): n is a, c, g, or t
  misc_feature (134)..(134): n is a, c, g, or t
  misc_feature (138)..(138): n is a, c, g, or t
  misc_feature (141)..(141): n is a, c, g, or t
  misc_feature (150)..(150): n is a, c, g, or t
  misc_feature (154)..(154): n is a, c, g, or t
  misc_feature (157)..(159): n is a, c, g, or t
  misc_feature (161)..(162): n is a, c, g, or t
  misc_feature (167)..(167): n is a, c, g, or t
  misc_feature (169)..(169): n is a, c, g, or t
  misc_feature (174)..(175): n is a, c, g, or t
  misc_feature (177)..(177): n is a, c, g, or t
  misc_feature (187)..(188): n is a, c, g, or t
  misc_feature (196)..(196): n is a, c, g, or t
  misc_feature (211)..(211): n is a, c, g, or t
ttntctaaaannacaanatnttccttttnncttccnaccccaatcccttctcttntnactnntcgctcatccntntctactctcttccncaacaaatnattctcctncacnaccatcttnangtcctcaacccncttntcnttcagttgnaggnggnnngnnaggancncgcgnntnattagtaagnnacgcgggntcgagctcggaactncggtactgaagacgtgcagcaagctgtggcccacccagcgacctttgcagtaggtccggaagtcaaagtaatagggccgcaccttacgcaggccgccctcgaagtaataactggtttctgcaaagtgctcatctccgaagctcaccccggtccgccgcttcttcgggggcggcacgacacgctccctggttgcgccccgccgcttcttatgcttgcccgggcctggggctgcagccgagggatgctccccgcctactggggccggctccacttcccggccagccggcttcgggggcccgggggacagctcaaccttcgcgtcgccaccagcgtcaccgttttgctgatgcgaagccctcagcccgccctctgtcccaacctgggtagacactgtttctgccattgggcccttatcgccactccaagtcctggtaaggctagggcgcctaaggtcgtagcgccaatgtccaagaaccctgagccatccgcggcggtccagccacataaaca

SEQ ID NO: 319132 - DNA, 1491 bp, Homo Sapiens
  misc_feature (1394)..(1395): n is a, c, g, or t
  misc_feature (1397)..(1397): n is a, c, g, or t
  misc_feature (1404)..(1404): n is a, c, g, or t
  misc_feature (1411)..(1411): n is a, c, g, or t
  misc_feature (1427)..(1427): n is a, c, g, or t
  misc_feature (1435)..(1437): n is a, c, g, or t
  misc_feature (1457)..(1459): n is a, c, g, or t
  misc_feature (1467)..(1467): n is a, c, g, or t
  misc_feature (1469)..(1469): n is a, c, g, or t
  misc_feature (1480)..(1480): n is a, c, g, or t
agtggggaagcccaaaagctgaggggctttggggcttgctgagggctgccgcccccccgaccccggggcaagtgaagggggacgtcgtcttcttcgcggacggggctcctccctcgctgggtgagcccatcaggcagacataggtgtgcagctggatgagaagccggccgctgcagcatccaccaccaccattctggatgagctgggtctcctgcacagcgggggcccaggggattcctaaattctgacaaggagaaccggcaaggagaacttggcaagaacggacggcaggtcatgagatgggaactggtgggagaactgctcggccagcggggagtacagacatacgctggcattgggagacagcatgtagacgttgttctcacacagcgggtagatgatgatggccttgccccagtacaccagatgagctgcaagctggaaaacctgcagcaaggccaggtccgcatcttgggctagctgctgcaggttcttcacagcagatgtggtcttgatcacccgcactagggcaggggagcagtcaataggaagctcacccagcaaggacttctcatcactgagcagcagcagggcatggtaggggcggatggctttcaggctccgttcgatggcctctggggggatcagactggaggccgcatagtggatcttgtggggcaggcagaagctcacctccagccagctgttgatgtgaagccgaactacgcccgacgtgcacaggctgtcataagcttccttgaggtccctggccagcttgcacttgggcaggatgtgatggaatggggactgaggaccttcatttccatcagccatggcggacacctcatcctggagcgccaggatcagcttggcctcccgggtgaggtactggcagcggcgctcctcgtgctgcagcacggtggcgatacgacgggacaggttatgcagacagtttatcactgacgggtctgcgttggccctcagtgcaaacaccacattaaaaagaatcatagtaggtgcttccctcttcggggaaggatctgttttggagatctgccccagagcatgctgtagcagtgttgggtgcccaacaaatcgcacattatcaatcttcagttcaaatttttggccacacatttcagacttggttgccaaaattgttgccagaataacatctgaaaacctggaatcgccgtcctgctcatcagcatggtcgcccgtgttgctggcagcgtatctctacgcggcttacttgtctgggacgccgggtgctcctggcttctctggaaggggtacctgaacagcagcttattgcccctgctccccgagctcaccagaatcacgctgatggggctggtgttgtcccgcatcccgccgtggggccggggccgggnncngaggggnccagagnaggacggagccggagncggagggnnnctgaggaggacgaggcgggnnngcaggggncntgaggagggcnggggtggaggc

SEQ ID NO: 319133 - DNA, 724 bp, Homo Sapiens
  misc_feature (74)..(74): n is a, c, g, or t
gtgaccccaactggcctaaactccattcaagggcacatcttgtgcagtaaaacacgcatgtttcagggctcctnactgcaacacgtgcacctccaggctggcgctcagcgctcccagtaaaagctgcaggcggcggtgtagatagtcgccggcctttcctcctccccacctcgtgacgctttgtgctgcggaagcaaaggcccgttccattccccgtgtcttcccagcagccgccaccaatgctcctttctaggaaacagccttccattctctcttagggccgatcttagcgagagcgcgatgcgggctactggtgccggggtgggttgggggcgggggtgggaatcaggccccactgccaggagcccgggccgcgccttccgctctgacctcatccggccgcccaggcactgggcgcggcagcgaatcggcggcgcgggcggccgggaacgcccagcacaaatatttaccgccgcgcggagagtgagggcccaagtccgccctgctccgccacttaggccgccccagacgcttccctcggggctgccaccgggtcgggcgcggctgccgcggctagcgggccttccccgcaccggcgcggcccaaccgccaccgaaccttctggaagcggcggttgcctgggcccccacgccgccagaatcgtacgcccgcgcgagctctctgcagccttggcggcctgggaggcggggctcggggtggggcc

SEQ ID NO: 319134 - DNA, 595 bp, Homo Sapiens
gttttttggctgggttctagcgtagccgtctgtgtggccggtgggggacctgcggtcggagtgggagggccagtctgcacccaagaggtggaagaggacgggctttaggctggaagcgccttagaggagccatttttccaggtggggccccaggcagaggctccgacagggagcctggccatagtcgcgcagccggggaggtggatcgcgtcccagacccgagcccccgacctcagccaaacccattccttctgtccttggaggccagaggggactctgagcttcggaaagcaggatgcctggtttgcttttatgtgaaccgacagagctttacaacatcctgaatcaggccacaaaactctccagattaacagaccccaactatctctgtttattggatgtccgttccaaatgggagtatgacgaaagccatgtgatcactgcccttcgagtgaagaagaaaaataatgaatatcttctcccggagtctgtggacctggagtgtgtgaagtactgcgtggtgtatgataacaacagcagcaccctggagatactcttaaaagatgatgatgatgattcagactctgatggtgat

SEQ ID NO: 319135 - DNA, 1261 bp, Homo Sapiens
ggggtcggaaaggaaagctgtgggaccatcctggcaaccccggtgtttggctgggttctagcgtagccgtctgtgtggccggtgggggacctgcggtcggagtgggagggccagtctgcacccaagaggtggaagaggacgggctttaggctggaagcgccttagaggagccatttttccagcaggatgcctggtttgcttttatgtgaaccaacagagctttacaacatcctgaatcaggccacaaaactctccagattaacagaccccaactatctctgtttattggatgtccgttccaaatgggagtatgacgaaagccatgtgatcactgcccttcgagtgaagaagaaaaataatgaatatcttctcccggagtctgtggacctggagtgtgtgaagtactgcgtggtgtatgataacaacagcagcaccctggagatactcttaaaagatgatgatgatgattcagactctgatggtgatggcaaagatcttgtgcctcaagcagccattgagtatggcaggatcctgacccgcctcacccaccaccccgtctacatcctgaaagggggctatgagcgcttctcaggcacgtaccactttctccggacccagaagatcatctggatgcctcaggaactggatgcatttcagccataccccattgaaatcgtgccagggaaggtcttcgttggcaatttcagtcaagcctgtgaccccaagattcagaaggacttgaaaatcaaagcccatgtcaatgtctccatggatacagggcccttttttgcaggcgatgctgacaagcttctgcacatccggatagaagattccccggaagcccagattcttcccttcttacgccacatgtgtcacttcattgaaattcaccatcaccttggctctgtcattctgatcttttccacccagggtatcagccgcagttgtgccgccatcatagcctacctcatgcatagtaacgagcagaccttgcagaggtcctgggcctatgtcaagaagtgcaaaaacaacatgtgtccaaatcggggattggtgagccagctgctggaatgggagaagactatccttggagattccatcacaaacatcatggatccgctctactgatcttctccgaggcccaccgaagggtactgaagagcctcacctgggggcattttgtgggtggagggccagagtgtgtatacccaggcttgtctggaaggagaaggcctttgctgcctgaaagtctcatgtcgaa

SEQ ID NO: 319136 - DNA, 1058 bp, Homo Sapiens
  misc_feature (411)..(411): n is a, c, g, or t
  misc_feature (509)..(509): n is a, c, g, or t
  misc_feature (847)..(997): n is a, c, g, or t
  misc_feature (1006)..(1006): n is a, c, g, or t
  misc_feature (1009)..(1009): n is a, c, g, or t
  misc_feature (1013)..(1013): n is a, c, g, or t
  misc_feature (1020)..(1020): n is a, c, g, or t
  misc_feature (1029)..(1029): n is a, c, g, or t
  misc_feature (1032)..(1033): n is a, c, g, or t
  misc_feature (1045)..(1045): n is a, c, g, or t
  misc_feature (1050)..(1050): n is a, c, g, or t
  misc_feature (1054)..(1054): n is a, c, g, or t
tcagtgcaccttcaataggcaaaagctcttcaacttctcaactactgtgaacaactacacgagaaagcaacaggctggggcgaggggggctaactattctcacgatttcttgggacaccaatgggcaggagccaggtcagaaagggagagatgtgttaatggcatcacaagacaaaactggcggaggggtcagcaagagagaggaaaacatctacatccaggtcagctcacccacacattacagtaccagaatttcctggatatttaactatgtgctggaaatttttctaagtctgtaactagaatcatctcacttaatgttcaccttaggactggtgcctttcatatatccccattatacagatgaggaaactgaggcacgttaacatgccaaaggacacgaagctagtnggagtcttaaagctcaggttttaaaccctactctctcttgtctctttgagtctccaatgtcatcaggatgggccactgaggttcttcaaacctcagtnccacctgttattacataagaatgagggacttacagaaaaaaactatactatgctggtgaaatccacgaaataatgtaaatggggctgtgtctctttcaagagatcaagggaactccctaaagacaggatatcaactttattttaattattaacatctccttcccgtgtgctgagcataggactcaaagctcaggcttttacttaggtttgtcttagagaaaggaaagaggccaatcttcaatgagtcatttctcttttagtttctttgcctttggggatagaagctacagacgaatggaaatgagaattcctgctctcaaactttttatagaagtttnnnnnnnnnnnnnnnnnnnnnnnnnnnnnnnnnnnnnnnnnnnnnnnnnnnnnnnnnnnnnnnnnnnnnnnnnnnnnnnnnnnnnnnnnnnnnnnnnnnnnnnnnnnnnnnnnnnnnnnnnnnnnnnnnnnnnnnnnnnnnnnnnnnnnnngagtagcanacnagcnagtgctncatattggnaanntatgggtgtggnggtantggntgtc

SEQ ID NO: 319137 - DNA, 1084 bp, Homo Sapiens
  misc_feature (510)..(561): n is a, c, g, or t
  misc_feature (611)..(666): n is a, c, g, or t
  misc_feature (895)..(895): n is a, c, g, or t
  misc_feature (898)..(898): n is a, c, g, or t
  misc_feature (904)..(904): n is a, c, g, or t
  misc_feature (969)..(969): n is a, c, g, or t
  misc_feature (994)..(994): n is a, c, g, or t
  misc_feature (999)..(999): n is a, c, g, or t
  misc_feature (1009)..(1009): n is a, c, g, or t
  misc_feature (1014)..(1014): n is a, c, g, or t
  misc_feature (1063)..(1063): n is a, c, g, or t
  misc_feature (1069)..(1069): n is a, c, g, or t
  misc_feature (1073)..(1073): n is a, c, g, or t
  misc_feature (1081)..(1081): n is a, c, g, or t
ggaaaaggatgatgcttcgatgcctctgccgtttgacctcacagacatcgtttcagaactcagaggtcagcttctggaagcaaaaccctagaaggagcacaagtctcaggcggaggagaaaaagagatcggcttttctcctccaacgttgtcatgggcttaagcaagagcagtggagacttctcttggcccctagattgtagcacccgggtcccaatccaaaacagctaggaaatggtgcccatgaagttttaaatgttttaaaatgaccctgtgttatagtctgatttggtgttaaacaggaccttcttcccccaaaattgttcagattataaaatgtgagccattcagcccccaaggtccagggcaggcgacaggaacgagcccagcgtgtgacaaagcctaacctactttcctctttcccaagctttttcagagactctggagtggacccagccctctggggaaagacagaacttagagacatcccagttactcaccacacccatannnnnnnnnnnnnnnnnnnnnnnnnnnnnnnnnnnnnnnnnnnnnnnnnnnntcagttttaattttaattaaaaatgcagctcttcagtcgccctggccacnnnnnnnnnnnnnnnnnnnnnnnnnnnnnnnnnnnnnnnnnnnnnnnnnnnnnnnnatatggaacattttcatcatcgaagaaagtcctattggacaacacttctataaaaagtttgagagcaggaattctcatttccattcgtctgtagcttctatccccaaaggcaaagaaactaaaagagaaatgactcattgaagattggcctctttcctttctctaagacaacctaagtaaaagcctgagctttgagtcctatgctcagcacacggggaaggagatgttnatnattaanataaagttgatatcctgtctttagggagttcccttgatctcttgaaagagacacagcccatttanattatttcgtggatttcaccagcanagtanagtttttttntgtantccctcattcttatgttaaacaaggtggactggaggttgaagaactcantggccntccngaatgaanttg

SEQ ID NO: 319138 - DNA, 1808 bp, Homo Sapiens
  misc_feature (155)..(155): n is a, c, g, or t
caaaaggaaaacttatttattcttagaggtgggaatgtggggagtggggcagaacaggtggtggccctgggagagggtcccaagggcaagaggttggggatgtctcagtaaagaggggcaggtcatgaatagagcctccacccccagcaggtttntcctgggcccgcccaagcactgggctaaaacgtggaaactgggcattgacaaagtacagcgggatgtgggcaattcggcctgtggaccagcccacactgagcagggcccctttgttgaaggaaggatggaaagtgatgagctggggctgggctcctggctccccctggataatgccacagggaaggagctcaaacacagggctgtttcgagtgcgaaaaaggaggatgactggtttaccatcctgtacccttggctttcctttcataagcacagccagacgttccccactggggtcccagaccatggagtgagcctctcccccaagcctctcctcaccatctggtgtctgtattgttgtctcagacagatctgccacaatcgttgctgactttgcacctccaacgcacccctttccctcaccacaacgttctggaaaagacagggagtaaatcagtggctctcccaatacagtgaacagcagtcggctgccatctgggctccagcagccagtctgacagcgccctgatagagtaggccacctctcacaagtccacatctgggcctcccagactcgaaagacagctgaaggagtggtagccaggattttgctgccgtctggggaccagagcaggttggtcaccccacctcctcgaaaccagggaagggggacacaggtctctgttgagacatcccatacccggatagcagcatccacgggtgaagctgagagcagccgccccccactgggggcccaggccaagctggtaacaggtgtatgcccagggtgagacagcacttgggcacagccagaagagggtcgggtagacaaggaggtagggtccagggtccagataagaatgcagctctggcaggccacagccaagacagaggcactaaggggcttccaggccagagacgccacatttcgctgcagccggtgcttcagggaggggactatggtgctgctggcattatacacacggactgagtcatctagcagggccactgcaaacttgttggtgtgggggtgccatgcaaagacacgcaagcagcagctggaccaatttgtgacttgggcaaattcagcgatcagatcttcgctcctgagagacagatgggggaacagggacccatggagggaagaggcccatcgacagagtgccagggcccagccggatgccgtcttcacccactcaaacacctcttcttctgagtttgcaatttcatttagcaccccaaaaaggcccacatcacgccaaatgttgatgcatctcttccacacttgctcccggtgatggatgaaggcagttcttgtgccatggtccagccttccaggggtctttaggggatcctttgtcagttgtaggacaggaagattgatccactggccccggaagtcggggggcgggctctcatagctactgcccgtcaccagctcgttattgtgctcatatagggtgacttgaccccgaggcggtggaggagggaacaaccccagagagcacatcttgccggttcgcaggacgtctgcagtcggcaaactcctggccggaacggcacagaccgcactcccgcaactcggttcccgggctagattcgtatgcggacgggtaccgcaagggacaaacggcgaggcggaactcaacggaagt

SEQ ID NO: 319139 - DNA, 1049 bp, Homo Sapiens
  misc_feature (1039)..(1040): n is a, c, g, or t
tagttctacccatgtttattgctaccagctggtctccctccacccttctcatatttacacccaaccccttccccaaagctagcttttaccaaagttcctggtaggaggtcaagaagtgtgtccacttagccggcagtcctagatgtagtggacgctgtttgtccccaggccagttgggcaccaggaagggctactctggggattcagggcatagacttcgtactggggtcaagggaggcccccactcacagatactctcctttccttctggggctcaatgtacaccaaaaccttcagaaagcaaagttggagtggtggacccccaatgtcaagtttagtgctctctttgcttgtgaggacccacacaagtggccaactctggactcagatccacagctggcttccgagaggcaattctgtccttggaagccaggtttgaccatctgtaatcagccttgtgagaagtctcgtttgagggggccagggatggaacgggagggcgcatatcgtatgaggtatgggcattgtgttaagctgggggaagttgcagcttgtcctgaattacatggagaggaataaagtgggtgagtaggaggagccatttcatctgaaagcctgaggcccctctggtcccctcgataaaccccactggtgtcccaggccacaggtaacaggagaatagacatttaatgtcacagaatgtcagagcaggcaaggccttcagtgatcaccctttctaaccccaacccgtcctaagcctagaaagaggaagccacttggttcaagtctcataagatttagtggccaaacctctaagaaagctagggagaaggaaagtgggaatggtacctgtggatttcttcaggccttatttaggggaactggatttacccatggtcagtttgggttcttttaaatggccagcttccctagggtttttagactgacctgaaacattgacttggcccccttttcaggagcagtgcgacaggggtaggtggtgtgggggtgaggagatttggaggcttgttggtgaggnnatgggcagg

SEQ ID NO: 319140 - DNA, 2328 bp, Homo Sapiens
  misc_feature (209)..(209): n is a, c, g, or t
ggagggtcttggaacaatcaccaggcggagaaaattcctggcggcggaagaaggggtctggcacagaaagcatgggataccgggcacaacgcctccacccgccccggggatgcagagcggagcgcataaagccaaagtagagggtgggcccgacgcgctgggcgcggccgtgatgggtagcggggtgggagagggagaacgcccagacnagcgaccgacaaggagagtggtgggcacgagcgaagagacggccacagagaggggggaggcgcgggccagtaaggaaggtccattgggggtacgatggattcgcgtttaggttgggcgtcccgagggcgcgagcccacggagacacgccgattgggcgcgcttaacgagaagcaccgtgtttaggccgggcgaggcgacgctcggcaccgagcgcgagaccgcgaggctggcgcgcaacacgtcggggatggcggcgcagcgggtgacggtggagacacggacttgcttgaccgaaagccgccagagagtgtccaaggggtggggagggggtccccccccggtgggccggagcccgacgcccagcccaggcggggctagggacactgggggaaagggcaagaccaccaaagagagggaggttggcagtcgcgggagggaaactgggggccctccgggaggctaatcagggctgatgagtgtcctgaaaccagtggcaggaatgcacattccagggcttgttctagaagcttatctgtgattaagcatgcaggccttgagtcacattacttcattgttttttttctgttgcacactgcaaatggaaagttctggattccacctagggcaccatcgggaggccaatggggtcatatggagacacacgcagatcctgcagcaaagcttctaggttgttcctcagcatggcgtagggcggcttctcctcatacgtgagggccatcaccaccttcaggtacttctgcagggtctctgagggcctgatccagtgaccgcagggtcccacgaagggccccggcttatcaacaaacttctgtttttgcttcatgatgtcctcagtgttgggaaggcaatttgtccatggcagaaacccgtagagccacttcagcatgcagtagcccaggctctggaggtcgctgcggcgggagggcccgcatcccttgtgcaggtccatgctaatgaactcaaggtccccctcgtgagggctcctgctgccttccacgtaggccacgtgtttgccacttgggcaatagcggaaggcgaagccatagcctgccaaagtcacctgactctggtcctctggatccacaaagatattttcagctgtcacatttccatgaacatactcattctcatggaggaactccagggcatccagcagccggcaggccacctgcagcacagacctctctgacagcacatgctttgggctgacatccagggccgactgaaggctcctccccaggctgggtaacaccaagaacctgtatttgtcctggtgaacaccgaaacccatgcaggtagggatggccagcagtggggtcgagtacagcttcttccacttgttgacttgcagaggcttggcggcccgctggaagaagttctgctcattgaacaagcgcccatccttggcatccagtttgagtgagaacttttgcttctgtggtcctgagtcacaggtgagggtggaggtgggtgcagcttcatagagaatgccctggttgtccctgttctggaaggacttcagcttccactgtcgcccactcttgtctgtcagcactgtccctgtgggcaaagcttcaagtgaggtggtcactcggctccgcttcagcgtctgagggctctgcctggtcttctgagggctacagctggtcttctgagggctacccctggtcacctgagggctcttcctggtcttctgagggctgcttttgggggtttggggttctgctcccggagcctttggatctctcagaggaactcagagtatcttcagactcagaactgtcaccatctgagaagagggataatcggggagaggtgacggtgctggaccattttactttcttaggaagaggtttcaaaacctgggagttcagcccctctctttgagcccttggaaggatgacacatgttggattgaacaaaggtctgggaccctacatgctcctctacaggcaaagaatttccacagtaggggcagaatttgaatgccgcttggatacttttgccacagtctggacagaaggagatcatgctttatgaggtcacggtctggcccttggatttaatgggttggaaactccatcttgacagcgacct

SEQ ID NO: 319141 - DNA, 630 bp, Homo Sapiens
agtttttcgctgggcaactgagaaggtcgctgtcaagatggagtttccaacccagtaaatccaagggccagaccgtgacctcataaagcatgatctccttctgtccagactgtggcaaaagtatccaagcggcattcaaattctgcccctactgtggaaattctttgcctgtagaggagcatgtagggtcccagacctttgtcaatccacatgtgtcatccttccaaggctccgggagcagacccccaacccccaaaagcagccctcagaagaccaggaagagccctcaggtgaccaggggtagccctcagaagaccagctgtagccctcagaagaccaggcagagccctcagacgctgaagcggagccgagtgaccacctcacttgaagctttgcccacagggacagtgctgacagacaagagtgggcgacagtggaagctgaagtccttccagaccagggacaaccagggcattctctatgaagctgcacccacctccaccctcacctgtgactcaggaccacagaagcaaaagttctcactcaaactggatgccaaggatgggcgcttgttcaatgagcagaacttcttccagcgggccgccaagcctctgcaagtcaacaagtgga

SEQ ID NO: 319142 - DNA, 2085 bp, Homo Sapiens
  misc_feature (448)..(448): n is a, c, g, or t
  misc_feature (1495)..(1495): n is a, c, g, or t
  misc_feature (1956)..(2015): n is a, c, g, or t
ttgcaaattttgaaggacaatcctttattttacttgagaccttacatctttgttctagctgacagtaaatctctgggtttctgttacgaactctaagagggctgaaacttctgatattcaggtggatcacctgaattctctcagctgtcaatggcttggagaacatctcatgggcccaagtcatcaaataacctgttcctctctgtaagggcagtgtgagggactgctgtgcagacccaagcaatcccaacctggtgctaggtcatttcacttttctgaaaacctcacatcaggctgcatcctcttctgtccctggcaccaggctttgtttacacttggagccaccttggtgtgggtcaccggggacagtgtactcctctcctgccagcctccccttccccgaggtgtggtggctgcagtctcaggaagagcttggtacttgtggggncttctgttttctccctgtggagatcagtgaagactgggaggaaagctgcttcaacctgagtccggctcttcagcaggctgcacaagtggaagcaactaattctggtgctcaggctgggctctccacccaagttaggcctgctctggcctaatggatcttactgtatgagcaggacggctgcattggattgtacaactgttttgtgatgcccccagacactgtcatcctgggccgagaagaacctgctagcttgacataccccatgggcttatccttaggttttggaattggtcaacagtgaggcagtctcccttcctgaccattcttctccacccagtcacagataagggaataaccttggccatatatttgctcaataaagattgaaggaagcatggtcatagttgccctgggttcagagcataatgcatatgtgaagcatggggtgacattcctactgtcatgggtttgggatttgtaacggcaaattcctgcccgacgacagggtgtcttatgcaaaggctgacttgcctgaacgctaagaacatgacttctgtctgagctaagctggcacccatcccagggctcctctggagctaatcctttaagcaaaatgtgcttgccttttaaagatccctgaccccagctttagctttctccaccagataaccagctaatcccaggaatttgctgccccccaccagtggcttctagggaaagcaaggacctcacatgccaggtgccctagtacttgcttagtgagccatgtcatcctcctttcatttttggatggtgacagcatttttcccctctgtgctggatacagacttctcccaggatcctctcttttggagcgaagccagaggatccctacagcactcaagcttcatggtgggattaatttctgccagctctttgttgtctgtctccttaaatccttttcctggtgtgcttattatcccttttgcagtgagtacagtttattaagttgtcagccctttaatattggggaaacttaatgaggtataaatagcagggagcacattngtaacagcacagtgttttgtttttttcacccggttgctgtatgagaatggctttcaatcctttgtttctatgcctacagacagaaagcaagatgtctaatattagacatacaagttgctgcctgttataacggtggaattatacctttgtgcatgcctaggatgtttgttgttttaattagctgcaatatatacggcctgtgtacacagaatttaatcacttcggcaggttgaacaacctccatgtagataagagccagtgtaggcaaaggtttatgaaaatggacataaagtcaaagaatgatggcagggtaggatgaaggagagatacttaggaaatcctaaaagaggcggcaagaaggtacctccctgtgtaactcaccttcccccatgacagtgagtaagagacactcacaggctatgagggtacacccctagctgaatgttctgtgttgtttcctnnnnnnnnnnnnnnnnnnnnnnnnnnnnnnnnnnnnnnnnnnnnnnnnnnnnnnnnnnnnaaataaaattaaaagctcagtttctcagttgcgctaatcacatttcaagtgctcagcagccacccgtgtc

SEQ ID NO: 319143 - DNA, 980 bp, Homo Sapiens
  misc_feature (74)..(74): n is a, c, g, or t
  misc_feature (168)..(168): n is a, c, g, or t
  misc_feature (195)..(195): n is a, c, g, or t
  misc_feature (210)..(210): n is a, c, g, or t
  misc_feature (259)..(259): n is a, c, g, or t
ggttcttcttgctgcagggggcctggccactcatgggtggtcatggacaaacccttcctgtctgcccggcccancactgtggtgccttcgatggatggacacgtgtgctctttcagtgtcatctatcgtcgtgtggtttaacaatttcatgctgtacaaagaagacanaagccacgttcccatcttccacggcanaatattccaggagancttcatcatgggcccttgtgaccccagcacatgcagggacctacagatntcggggttcacgcccacacttccctcactgggtggtcgacacccagcaaccccttggtgatcatggtcacaggaacccacagaaaaccttccctcctgggccacccagggcccctgctgaaatcaggagagacagtcatcctgcaatgttggtcagatgtcatgtttgagtcacttctttctgcacagagaggggatctctgatgacccctcacgcctcgttggacagatccatgatggggtctccaaggccaacttctccatcggtcccttgatgtcctgtccttgcaggaacctacagatgttatggttctgttcctcactccccctatcagttgtcagctcccagtgaccccctggacatcgtgatcacaggtctatatgagaaaccttctctctcagcccagccgggccccacggttcaggcaggagagaacgtgaccttgtcctgtagctcctggagctcctatgacatctaccatctgtccagggaaggggaggcccatgaacgtaggctccgtgcagtgcccaaggtcaacagaacattccaggcagactttcctctgggccctgccacccacggagggacctacagatgcttcggctctttccgtgccctgccctgcgtgtggtcaaactcaagtgacccactgcttgtttctgtcacaggaaacccttcaagtagttggccttcacccacagaaccaagctccaaatctggt

SEQ ID NO: 319144 - DNA, 1077 bp, Homo Sapiens
  misc_feature (388)..(388): n is a, c, g, or t
  misc_feature (390)..(390): n is a, c, g, or t
  misc_feature (415)..(415): n is a, c, g, or t
  misc_feature (432)..(432): n is a, c, g, or t
  misc_feature (486)..(486): n is a, c, g, or t
  misc_feature (511)..(511): n is a, c, g, or t
  misc_feature (528)..(528): n is a, c, g, or t
  misc_feature (537)..(537): n is a, c, g, or t
  misc_feature (543)..(543): n is a, c, g, or t
  misc_feature (593)..(593): n is a, c, g, or t
  misc_feature (598)..(598): n is a, c, g, or t
  misc_feature (645)..(645): n is a, c, g, or t
  misc_feature (688)..(688): n is a, c, g, or t
  misc_feature (693)..(693): n is a, c, g, or t
  misc_feature (763)..(763): n is a, c, g, or t
  misc_feature (816)..(816): n is a, c, g, or t
  misc_feature (883)..(883): n is a, c, g, or t
  misc_feature (935)..(935): n is a, c, g, or t
  misc_feature (948)..(948): n is a, c, g, or t
  misc_feature (961)..(961): n is a, c, g, or t
  misc_feature (979)..(980): n is a, c, g, or t
  misc_feature (995)..(995): n is a, c, g, or t
  misc_feature (1007)..(1007): n is a, c, g, or t
  misc_feature (1010)..(1010): n is a, c, g, or t
  misc_feature (1013)..(1014): n is a, c, g, or t
  misc_feature (1023)..(1023): n is a, c, g, or t
  misc_feature (1035)..(1035): n is a, c, g, or t
  misc_feature (1039)..(1039): n is a, c, g, or t
  misc_feature (1043)..(1043): n is a, c, g, or t
  misc_feature (1060)..(1060): n is a, c, g, or t
  misc_feature (1067)..(1067): n is a, c, g, or t
  misc_feature (1071)..(1071): n is a, c, g, or t
  misc_feature (1073)..(1073): n is a, c, g, or t
gagggcagacatgtttatttgaagaggagagagctacactgaagttataaaaaaaatttataaattttactgatgacagaaggctgaaagatagtctgaggggaggtggaacagcatgagggaaggtggaacagcaagtgtgtaagtgccgtgttaagagggagcctcttgtatgtttggaattgttgagttcctcagtgtgattgcagcctcaagtaggactaggaagtaagccagttaggttggagaggtgggcaggggtcaagtgaaatagatacttgtgggctaagcaaaggagtgtgttttctctgtcagcaggcagtggcgaccttatgtgtcattttgtaagcaagagagaggcatgttcatgattcgtggtgtgaggaanancgatcccctaagatgcagactgatnccttcagattccagctnctggttcattggatctggcaacctggttttgagacagggctgttgtctccctanaaaaccccctcaagacctgactgtngtgctcgtgggcagganacaactttngatctnggctcagcatttgtgaagttccgtgtacacgctggtatctgttaggggtntcttnggcctctgataagggcgactgatttttctctgtatgaaaacgcatantccaactgtgcgtacatcacctcctgagggtctttttcatcanatttntttttattcactgtgctgtcccccgcaggctcctgggccattacagcagcattctttttgttggagcacnagcgataaaggagagagaagaggaggaggatgaagaggaagatgaccactgangtcccaatcagaacatgcaggtgtctgcagataccagatttggagcttggttctgtgggtgaaggcnactacttgaatggtttctgtgacagaaacaagcagtgggtcactttagtttnacacacgcagganagggcacggaagnagcgaagcatctgtaggnnctccgtgggtggcanggccataagaantcntcnngaatgtctntttgaccttggnctgnacgngactacgttatgggctnccctccnggananatgg

SEQ ID NO: 319145 - DNA, 1513 bp, Homo Sapiens
  misc_feature (883)..(883): n is a, c, g, or t
gaatatgaacccgtttgggttaaaaacagcaggctggtacggtccggaatccgggatatcgtcgaccacgcgtcgaaagtgttgagtaaacagaccaagttggaaacttttcagcattacctaagaagcaaaggctcaatttggctgcttcattcttatctcttctgccacagttctaacgtgcctgcatctactgaggcccagccgctgtctgattttgagctggcagagtgggaaaaataaagtgttgattaaacagcccaagttggatcatggggaatttcagaggtcatgccctccctggaaccttcttttttattattggtctttggtggtgtacaaagagtattctgaagtatatctgcaaaaagcaaaagcgaacctgctatcttggttccaaaacattattctatcgattggaaattttggagggaattacaatagttggcatggctttaactggcatggctggggagcagtttattcctggagggccccatctgatgttatatgactataaacaaggtcactggaatcaactcctgggctggcatcatttcaccatgtatttcttctttgggctgttgggtgtggcagatatcttatgtttcaccatcagttcacttcctgtgtccttaaccaagttaatgttgtcaaatgccttatttgtggaggcctttatcttctacaaccacactcatggccgggaaatgctggacatctttgtgcaccagctgctggttttggtcgtctttctgacaggcctcgttgccttcctagagttccttgttcggaacaatgtacttctggagctattgcggtcaagtctcattctgcttcaggggagctggttctttcagattggatttgtcctgtatccccncagtggaggtcctgcatgggatctgatggatcatgaaaatattttgtttctcaccatatgcttttgttggcattatgcagtaaccattgtcatcgttggaatgaattatgctttcattacctggttggttaaatctagacttaagaggctctgctcctcagaagttggacttctgaaaaatgctgaacgagaacaagaatcagaagaagaaatgtgactttgatgagcttccagtttttctagataaaccttttcttttttacattgttcttggttttgtttctcgatcttttgtttggagaacagctggctaaggatgactctaagtgtactgtttgcatttccaatttggttaaagtatttgaatttaaatattttctttttagctttgaaaatattttgggtgatactttcattttgcacatcatgcacatcatggtattcaggggctagagtgatttttttccagattatctaaagttggatgcccacactatgaaagaaatatttgttttatttgccttatagatatgctcaaggttactgggcttgctactatttgtaactccttgaccatggaattatacttgtttatcttgttgctgcaagtagaaataaaatgacatgtat

SEQ ID NO: 319146 - DNA, 1290 bp, Homo Sapiens
  misc_feature (154)..(162): n is a, c, g, or t
  misc_feature (165)..(166): n is a, c, g, or t
  misc_feature (203)..(203): n is a, c, g, or t
  misc_feature (205)..(205): n is a, c, g, or t
  misc_feature (236)..(236): n is a, c, g, or t
  misc_feature (248)..(251): n is a, c, g, or t
  misc_feature (258)..(258): n is a, c, g, or t
  misc_feature (277)..(277): n is a, c, g, or t
  misc_feature (279)..(279): n is a, c, g, or t
tttttttgctcttccaaatcattttaatgaaggcatcggcagcaggacatacaacacgcccagacacacagcatagcagggcctcgataatgagataatttccccccacgtcttgagaagaagaatactatgtctttctttatgaacactattnnnnnnnnntanncccctcacaacactctccaggacctagagcccaaganancccactgaagatccatcatctgtgggatggnggaggcagtctnnnnggagctngagggaatgtgcacagctntnggaggctgcagcagccttgcctctgccgtgaatgtcaggcagtgacaagcagcaataagggaacagagggggtggcagcagtgtttggcagctcttcagcaatcttaatcataaattcgggtaggatccagttggtggcattgccgggggggcacagaggtggtagcagctttcacctccttgggggtaggagagttccctctttttggaagagggagaagaggggcaatgcagaggaaggagcgagggagccacaggctgtcttaccaatcttgcagatctcaggtggcccacagccgcagcgtcatgagcagattaaaccccggccactttcagggggaggattcggaacccaatcactgacaggttttgaaagtttagtttcgtatctgtttcaaagctttttctcgaccagcttgacatcacaggaactttctgggctggggaagaaggtgtcttctggaataatgctgttgttgaaggcgtttgcacatgcaaagtcagatttgttgctccaggccacagcactgttgctcttgaagtccatagacctcatgtctagcacagttttgtctgtgatatacacatcagaatccttactttgtgacacatttgtttgagaatcaaaatcggtgaataggcagacagacttgtcactggatttagagtctctcagctggtacacggcagggtcagggttctggatatgtggtaaaacaatcacttgagtgccggacccgcaatgcagcacattcccaaagcctatccacaatggctcattcttttacaaaaaccttgtcatctcttcataaccacatgttttgtgtctcaaggtggaagctaaagcttctcaggcaagagagaggattcagacgcacatctcatgaatgccatggtattccttatttcgtgtcagcccttccttcctgaggcttttcctcatcctgggcccagctccagccttcatgcaggcagtctgtgtcccttggtggccacctctacctctgcccc

SEQ ID NO: 319147 - DNA, 929 bp, Homo Sapiens
  misc_feature (10)..(10): n is a, c, g, or t
  misc_feature (27)..(27): n is a, c, g, or t
  misc_feature (30)..(30): n is a, c, g, or t
  misc_feature (33)..(33): n is a, c, g, or t
  misc_feature (39)..(40): n is a, c, g, or t
  misc_feature (55)..(55): n is a, c, g, or t
  misc_feature (74)..(74): n is a, c, g, or t
  misc_feature (98)..(98): n is a, c, g, or t
  misc_feature (103)..(104): n is a, c, g, or t
  misc_feature (106)..(106): n is a, c, g, or t
  misc_feature (109)..(109): n is a, c, g, or t
  misc_feature (302)..(302): n is a, c, g, or t
  misc_feature (327)..(327): n is a, c, g, or t
  misc_feature (332)..(332): n is a, c, g, or t
  misc_feature (338)..(338): n is a, c, g, or t
  misc_feature (365)..(365): n is a, c, g, or t
  misc_feature (367)..(367): n is a, c, g, or t
  misc_feature (431)..(431): n is a, c, g, or t
  misc_feature (440)..(440): n is a, c, g, or t
  misc_feature (512)..(512): n is a, c, g, or t
  misc_feature (517)..(518): n is a, c, g, or t
  misc_feature (542)..(542): n is a, c, g, or t
  misc_feature (545)..(545): n is a, c, g, or t
  misc_feature (568)..(568): n is a, c, g, or t
  misc_feature (613)..(613): n is a, c, g, or t
  misc_feature (632)..(633): n is a, c, g, or t
  misc_feature (643)..(643): n is a, c, g, or t
  misc_feature (653)..(654): n is a, c, g, or t
  misc_feature (662)..(662): n is a, c, g, or t
  misc_feature (664)..(664): n is a, c, g, or t
  misc_feature (666)..(666): n is a, c, g, or t
  misc_feature (669)..(669): n is a, c, g, or t
  misc_feature (677)..(677): n is a, c, g, or t
  misc_feature (693)..(693): n is a, c, g, or t
  misc_feature (713)..(713): n is a, c, g, or t
  misc_feature (715)..(715): n is a, c, g, or t
  misc_feature (719)..(719): n is a, c, g, or t
  misc_feature (723)..(723): n is a, c, g, or t
  misc_feature (740)..(740): n is a, c, g, or t
  misc_feature (750)..(750): n is a, c, g, or t
  misc_feature (773)..(788): n is a, c, g, or t
  misc_feature (790)..(790): n is a, c, g, or t
  misc_feature (795)..(796): n is a, c, g, or t
  misc_feature (810)..(812): n is a, c, g, or t
  misc_feature (832)..(832): n is a, c, g, or t
  misc_feature (841)..(841): n is a, c, g, or t
  misc_feature (863)..(863): n is a, c, g, or t
  misc_feature (872)..(872): n is a, c, g, or t
  misc_feature (890)..(890): n is a, c, g, or t
  misc_feature (899)..(900): n is a, c, g, or t
  misc_feature (907)..(908): n is a, c, g, or t
  misc_feature (918)..(918): n is a, c, g, or t
  misc_feature (920)..(920): n is a, c, g, or t
  misc_feature (922)..(922): n is a, c, g, or t
gagctggaantgcgccgtggacacagncancgngggganngagcagtgtatcccnagggccagtagatacacantatagagtcattccttccccggtnaccanntnttnttgaagagtcacacgacgcggctgtgggaagggcagtcctctgtgcacatacgcgggcccagaacgactccagggagtagtgaccccctttacctgctccacctcacagttcttcacctgcccaaagttgaggatccttccatccgatgggctaatcacgctgtgcaggccacagacagggccgggctgcggnttgcagttgcgccggaagaactcgntgagnttgcgntagtgatgcaggtcctccacagcggcntntttcatgttcaccccaaacgtccagatgtacaggctgtagacgggcctgcgcagccattgtttnatctccacntgattgaggctagcgcgccaggcgcgcgtgacagcaagctctttggcatttatttttacaaagccaccctgnttacnngcctccatcccacccggctgagcnttntgagggctgcctaagggcagganttattagaggacggtcaagggccaggagcgcattttcagagcgtntctggacattgcagctcanntgccccagcntccgcctcanntccagctngntnaantgcaaccntttcgccgcgcggagntttggtccttgccgcgcctntnattnacanatcatgggccggcgcanggagggcggnacgagtttcacttgatcactccnnnnnnnnnnnnnnnncntcccnntcccccgagccatnnnatctcctgtgctttcactgntccagggcnttttgtcttcgaggctggtttntggcgcctnttcctgggtttggttcantctcggtgnntcacagnntgcagaatanantntcagggc

SEQ ID NO: 319148 - DNA, 2018 bp, Homo Sapiens
  misc_feature (302)..(344): n is a, c, g, or t
  misc_feature (1401)..(1401): n is a, c, g, or t
  misc_feature (1532)..(1532): n is a, c, g, or t
tttgggtgtgaacacgcatttatttacacattgtcatcggtaggcacatacccagcccagcccgttgaagggacagatctcaggctgtcacccatggaacctgcagacccttccctcctccagaacccttgaaggcgaacctgagagaaccaggaattttaggcttctgttcaagagctaagaactaaattttatgccttcatctgatttctttccaaaaagtccatttcattaagtattcagacttcttagctccatcccattcatactttttgctctcctactacccacccaagattgtnnnnnnnnnnnnnnnnnnnnnnnnnnnnnnnnnnnnnnnnnnnttaatacttcacatttgtacgaagcttacagaaagttttcacatatagcatctcatctgagcctcccaacagttccgtgaggtaggtattctcacctccctttttacagacagggtaaccgaaggcctcagaagaggtaacgggatttactcaaggcccacacagcctagttagtggtaaagctaggaatcgatcccagcaccccatatcccaagtcccagtgtttcaacaccacagctacctctgtaaagtggagcgacatttcttaccccagtcaggcctaaatggtggcctgaggagccaagaggctgacttctcagattaggggagggaagggctcagcagcgtcggggagagttggggtacttggccttcaactcctgtttgaactggcgatataggatcttattgtgctgattttcagcctccttttggggatggaacttcaacgcttctttgaagcccttatgaaccaagaaaccttcgttcaggacctcaaaatcaaaccccgccacatgcagctcgcaggcctggctgattcggttgaagccgtactgccgaaagcgctcgtcgaaggtgggcaccttgcctcctgccacgtagaatggctcccaggggtcctgccaaggtaccacgtaggcgggccgcagcaagctctcttccggcaggttgacccagcgggaatagttggtgggtgcctggcagggggtgcacaccccataatagaagggccgcacctcgccaacctggtagagctgcaccagctcgtttttgttcatgggcatgcggcgggctcttcggatttcgaaggcaggcaccaccagcgcggtgcctccccactggttgctctgatccagcatttcccgcaggcctctccacagcccctcgctgggcaccatgtccacatcgatcaccagggcatagttggccccctcacgagccagattcctcagcaggttattggggtaggagacattggtgcccagcgcataattaatccccgggctgggccaccctggctagcttgtcaaagacctcctggcaggaccgcagcagngcaaactcccccggctcccggggttcgggcacggctgcctcgtaacgcgaggggcacacgaggtgcatggcgaccctggcgcgcatgtcggggcagtggctgctcagcgcgtaggccagcaccgtggccantgcgcctcctccttggtggccgcgaacaccgacacggacagcgggccctcccagcgctccagcagacccgacaggtgcagcaggttgtccacgctggcgtgcgtggccaggatcacatcgttggggtccatggtggtcttcagcaggcccctgtagacgcggtaatcgccgctagcgtccaggacgcctccagaggccagcgcggtgcggagtgcgccttgacctggtccacggaccgtggggacgggggaaagaactcaaaatattggtcttgctcctcctgcccgtgcagtccggacagcagcgacaggtagagcagctgcagcatcgccaccagcatgagcgcggccagcagcagctggtagaaggcgcaccggatggcgtaggacatctgcatggctctcggggctcggggcgcgcagcaacgaccacccggccacagactacgccagcgatcccgggaattccggaccggtaccagcctgc

SEQ ID NO: 319149 - DNA, 855 bp, Homo Sapiens
  misc_feature (318)..(474): n is a, c, g, or t
  misc_feature (505)..(554): n is a, c, g, or t
  misc_feature (707)..(707): n is a, c, g, or t
gtagcgaggcctgggtggcgaattcggcacgaggaaggtttcttggttcataagggcttcaaagaagcgttgaagttccatccccaaaaggaggctgaaaatcagcacaataagatcctatatcgccagttcaaacaggagttgaaggccaagtaccccaactctccccgacgctgctgagcccttccctcccctaatctgagaagtcagcctcttggctcctcaggccaccatttaggcctgactggggtaagaaatgtcgctccactttacagaggtagctgtggtgttgaaacactggacttggatatggggtgnnnnnnnnnnnnnnnnnnnnnnnnnnnnnnnnnnnnnnnnnnnnnnnnnnnnnnnnnnnnnnnnnnnnnnnnnnnnnnnnnnnnnnnnnnnnnnnnnnnnnnnnnnnnnnnnnnnnnnnnnnnnnnnnnnnnnnnnnnnnnnnnnnnnnnnnnnnnnaacattctgtaagcttcgtacaaatgtgaannnnnnnnnnnnnnnnnnnnnnnnnnnnnnnnnnnnnnnnnnnnnnnnnnacaatcttgggtgggtagtaggagagcaaaaagtatgaatgggatggagctaagaagtctgaatacttaatgaaatggactttttggaaagaaatcagatgaaggcataaaatttagttcttagctcttgaacagaagcctaaaattcctggntctctcagggcttcgccttcaaaggttctggaggagggaagggtctgcaggttccatgggtgacaagctgagatctgtcccttcacgggctgggctgggtatgtgcctaccgatgaccatgtggtaaataaatgcgtgggtcaccccc

SEQ ID NO: 319150 - DNA, 846 bp, Homo Sapiens
  misc_feature (302)..(350): n is a, c, g, or t
  misc_feature (382)..(538): n is a, c, g, or t
ggggtgggaccacgcattttatttacccatggtcatcggtaggcacattcccagcccagcccgtgaagggacagatctcaggctgtcacccatggaacctgcagacccttccctcctccagaacccttgaaggcgaagccctgagagaaccaggaattttaggcttctgttcaagagctaagaactaaattttatgccttcatctgatttctttccaaaaagtccatttcattaagtattcagacttcttagctccatcccattcatactttttgctctcctactacccacccaagattgtnnnnnnnnnnnnnnnnnnnnnnnnnnnnnnnnnnnnnnnnnnnnnnnnncttcacatttgtacgaagcttacagaatgttnnnnnnnnnnnnnnnnnnnnnnnnnnnnnnnnnnnnnnnnnnnnnnnnnnnnnnnnnnnnnnnnnnnnnnnnnnnnnnnnnnnnnnnnnnnnnnnnnnnnnnnnnnnnnnnnnnnnnnnnnnnnnnnnnnnnnnnnnnnnnnnnnnnnnnnnnnnnncaccccatatccaagtccagtgtttcaacaccacagctacctctgtaaagtggagcgacatttcttaccccagtcaggcctaaatggtggcctgaggagccaagaggctgacttctcagattaggggagggaagggctcagcagcgtcggggagagttggggtacttggccttcaactcctgtttgaactggcgatataggatcttattgtgctgattttcagcctccttttggggatggaacttcaacgcttctttgaagcccttatgaaccaagaaaccttcctcgtgccgaattcgccacccagg

SEQ ID NO: 319151 - DNA, 813 bp, Homo Sapiens
  misc_feature (587)..(588): n is a, c, g, or t
  misc_feature (598)..(598): n is a, c, g, or t
  misc_feature (622)..(622): n is a, c, g, or t
  misc_feature (628)..(628): n is a, c, g, or t
  misc_feature (646)..(646): n is a, c, g, or t
  misc_feature (667)..(667): n is a, c, g, or t
  misc_feature (674)..(674): n is a, c, g, or t
  misc_feature (690)..(690): n is a, c, g, or t
  misc_feature (692)..(692): n is a, c, g, or t
  misc_feature (701)..(701): n is a, c, g, or t
  misc_feature (703)..(704): n is a, c, g, or t
  misc_feature (710)..(710): n is a, c, g, or t
  misc_feature (712)..(712): n is a, c, g, or t
  misc_feature (720)..(720): n is a, c, g, or t
  misc_feature (724)..(724): n is a, c, g, or t
  misc_feature (728)..(729): n is a, c, g, or t
  misc_feature (742)..(743): n is a, c, g, or t
  misc_feature (745)..(745): n is a, c, g, or t
  misc_feature (751)..(751): n is a, c, g, or t
  misc_feature (756)..(756): n is a, c, g, or t
  misc_feature (776)..(776): n is a, c, g, or t
  misc_feature (789)..(789): n is a, c, g, or t
  misc_feature (802)..(802): n is a, c, g, or t
cacggcacggcactcgtgacaacggaaggggtgggcagaaatgcaggccggaacattccacagtccagggacggttggtcattcagaaagtatgtatttccagaacactcagtagtaaggccgtctgggattgttcagggggttgggccggaagcggtaggccagcatcatcctcttgcggaaccctcatactcgtcgtcctccttggagagctccgccggccggtcaatgccgaagccagcgccgtccactgtggtggtgcccttgttcactgggttcttgatgccctggccctctgagcccagcccctcgccctccttccagcccatcttcatcagcatctggtagccgatgttctccacagtcagcttgaactccttgtactctgagtagtcaggctcaccgggcctcctttagggccttgaaggtctccataaacttttccagctcgtctggaggcaggaagtctccgatgaagtgcttgccccggcccatctttgttagctgctcggcccattccctggtcttatcatctcatgccgccgcacgctcgcgctcgctccgaggtcgcccagctcgctgtccannttctgatgantgtgatagcggtcctggtcctgtnggactnccttctcccagagcagcncgcatgttcctgcatggcccngcttgtnctgcatgatcatgtcntncatctgccncnnctcctncncccccttnagcncccnnttctggccccccnncncccctntcacngccaatagaccgaaaggccnccttttttatagncgagcgccttgangtcctgaactg

SEQ ID NO: 319152 - DNA, 990 bp, Homo Sapiens
tttcttccggggggtgtgtgtggccgtgggtctgtgatctgggtgtgttgtgtttcccgtcgcgtgttggcgcgcttggcggctctgtctggtctccctttcggggagcccgtctgggctccagacggatcgcgttcccgttttctgggcatgttccccttgggccccgtcgttgacggccactttgggcagcgtctgcctttcgtcctctgcggtaaactttctgaggggctggctgcgactccgggcgtcgttctgatctcgccactttcttcctgtagtagagggactcccgctattcttatcgtgcaaaaatgcatatctgggttatccttgtagtcctccatagctactttttctaactcgggcctccttctgccacaaagcgggccaatttctctatcactttccgagtctcggctccctctgggggtgaaactttgatctccagccactgctcatagtcctcctcctcgtcctcgtcaggggactggaagacactcgggcggtgcgccacgggcagctgcttggcgtgggagtagctcttcacagggcccggcaggctggccagccccaggcctgtccgcctgctgatgagcagggacctcttcccagcgctgggggtgggtgtgctgggaggggcgctgggcgcactggtcggggcgtctgtgctggtctgtgccttctgcaacttcagaaactgctgcaagaagctaccatcgttggcaaacttgttggaaatgcaggaagagttgtgtgcatttgtgatttcgccaggatgtgggggctgagggctggccacctgattctgcttggctttctgttccattttggcttcaatttcccgtttcttctgagcgatgagctcttcctggtgaaggatgttcatgttcatttttccagatttagggggagcaaccccaaaccaccggttagcctttcctgcaacatcccggttgtccatcttgagactcatccaatcccacaaat

SEQ ID NO: 319153 - DNA, 1034 bp, Homo Sapiens
  misc_feature (186)..(219): n is a, c, g, or t
ggggccagcgccgcgcttgctgtgggaggcgaggccgtccccgggcgcggcggcggcaaccggcggggcgcccgcgtagggtattctggccggcggaaatgccgcccggttcggggaacggcccttcttaaaccgccgggacggtaagggcgtgcggcggtccgggcccgcgttgcggcgcgggtnnnnnnnnnnnnnnnnnnnnnnnnnnnnnnnnnnatttcggtggggttcgggtgatgcaagtccccggcccgggaaaaaggggggggccctcaggggtaatcctcgtgccattttgggctttccggctggcggggctgcgaaggatgagggggttaaatgtccgggcggcccctcttccgcccgtctgtgtttcctccgggttgctgcgctgggttgcggtaactgttgttctcccgctgatattcataggaatgccgatagtctgtgtcatagtaggcatctccccgatcccggctataatcgttgcgtctgtagctgccacagtatcgccggtcatacaccctccggtcggacgaacgatcatcataactgcttcgagaacggacatggtagctgtcctctcgccgacgccgtcgtgtccggtcactactacttgaccaggagcgacttcttcgtcgcttatgctttcggctccgatagtgttcacggtaactcccccggctgcctcgctctgaggagtggtaccttcgaggatgcggcatcgttctggcggcgaggcccgtgcgcttgtcccacaggaagtccgtgatggcggcgacactgcggccggagtcccggcacccccgcggcgacgaaatgctgctccacccccccaacccgggaccctgggacctcccgccccgttcccgggctccgcttcagtcccgcccgccccggctccgtccccgcccctaagatctgcttggcgccgctcgcaccgcccccgcccggggcccgatcccagctcggtctccggctctggcctctccgctccgccgccgccgccgtgagcgagcgccacccaggcc

SEQ ID NO: 319154 - DNA, 1136 bp, Homo Sapiens
gaaggatttccctcaaggggttttcccccagggtttgggggaaaggacaaagggttcgggggttttcaggggcttaaaataaagaacctcccccttttgggggggtccttgggggacaccagggtcccctgggccccatgtcccctggcctctcgccctggggcttaagaagctttcttccggcgcccccagggggttttccaaggttagaaaaggtttccgggaggctgcgggccaggattcaaggcgatgtgggggctccatggaagacccttggttgttggtccaggaaaaagggtgaccctgttcgggggggatagtccagggagtagcagcccgctgcaggaaggcggggcagaaacgggagtagggctgttccacaaaaccccggcccagaaccaccccgggggggaggctgccccccccgggggagtgtctccggtcctggttgcagaagccacagcctccctcaggagtccagccattggggacgtagtttcccaggtagttgagctgcagcttagtgggaccgtttccatggaccacaatggggagcgtgtcgtaggccacgttccggatacgcacacggttccgatcaaactttaaaaccacttcatctaaagccccgttgaggttctgaaagatccgagacttatgatccagattaaggctgagtttctccctcagtcctgggtccaggtagagccgtgtgtagaacagctggtcgtcgtcatcatccttgtacttccactggcgcacgatttggtggatggtggtggcaaaaccgatgaatccaccagaattgaggaagcgcttccccgtgcccacctcagggtactgctccgccagcccccactcgggccagcagaagctctctgcagagaagagcaggcggctgccactctggacgaacttcttcagcagctctgtggggctgccggccagaatcacgtcgtagctatccacaaacatgatgatcatatcctcccggtcagcgtatttctccatttccttctttaaccaccggaccttctgtcctccaccaactgttcgagccacatcaccccctcgccactcctctcccaggcccagggtccgcacagtgtagttgcctcgtgccgaattcgccacccagg

SEQ ID NO: 319155 - DNA, 1378 bp, Homo Sapiens
  misc_feature (16)..(16): n is a, c, g, or t
  misc_feature (26)..(26): n is a, c, g, or t
  misc_feature (46)..(46): n is a, c, g, or t
  misc_feature (58)..(58): n is a, c, g, or t
  misc_feature (67)..(67): n is a, c, g, or t
  misc_feature (88)..(88): n is a, c, g, or t
  misc_feature (132)..(132): n is a, c, g, or t
  misc_feature (330)..(330): n is a, c, g, or t
  misc_feature (578)..(608): n is a, c, g, or t
  misc_feature (689)..(733): n is a, c, g, or t
  misc_feature (1091)..(1091): n is a, c, g, or t
  misc_feature (1201)..(1201): n is a, c, g, or t
  misc_feature (1232)..(1232): n is a, c, g, or t
  misc_feature (1266)..(1266): n is a, c, g, or t
  misc_feature (1273)..(1273): n is a, c, g, or t
  misc_feature (1281)..(1281): n is a, c, g, or t
  misc_feature (1286)..(1286): n is a, c, g, or t
  misc_feature (1290)..(1291): n is a, c, g, or t
  misc_feature (1300)..(1300): n is a, c, g, or t
  misc_feature (1322)..(1322): n is a, c, g, or t
  misc_feature (1324)..(1324): n is a, c, g, or t
  misc_feature (1328)..(1329): n is a, c, g, or t
  misc_feature (1331)..(1331): n is a, c, g, or t
  misc_feature (1333)..(1333): n is a, c, g, or t
  misc_feature (1339)..(1339): n is a, c, g, or t
  misc_feature (1341)..(1341): n is a, c, g, or t
  misc_feature (1346)..(1346): n is a, c, g, or t
  misc_feature (1350)..(1350): n is a, c, g, or t
  misc_feature (1352)..(1352): n is a, c, g, or t
  misc_feature (1354)..(1354): n is a, c, g, or t
acccacggccccaccntggaaccccnggttttgtaaaccaacggancaattatgtggnaaacaaccngcctttccacaaaatccaacngctctcccccaatagaaaacggaagtttcctatactcggagccngaaagccacgggttgccctcctatcctaccccacagcaaatagccagcctgattccacaagtatgtacctgagagccctattaggtgtgagggaaatgaagaaatgacgtttgcattttatagcctgactagataatcagttggttgaccttaagctaaaccccaaggttcaggtttcagctctcctttgttttttcnatttatatattcttcccaaggacatgcagaaatctaatttccattgcttaaatgcctttatttctttcagatcaaactgaaaaggcagaatagcaacctgatatttttggctactagggcaacatttggcagttctcaaaaaaggaaatagaaatgaccgatacgtatataaaagtttcactagaaataaaataaatgcaaattaaaacaatgaaatactatggtttcctattcaagtcgctatatannnnnnnnnnnnnnnnnnnnnnnnnnnnnnnagacagggtcacactctgttgcccaggctggagtgccagtggtgtgatcttggcttactgcagccaccatctttggggctnnnnnnnnnnnnnnnnnnnnnnnnnnnnnnnnnnnnnnnnnnnnngtatacaccactatgcccaggtaattttgttcattttttaaatagagatggggtctcactatgttgcccaggctagtctcaaactcaatttaaaaaatgcttagcttaggttctggcttgtgatgtgagggccatatgcccctagaggcatctacttgggttttgctcctgacttgtgtggataactctgtttttctgcacatgccataacgatggacatgtgaccgtttgtcggaaaaacacagttctctcaattgcttactaaagctcattcaggctaattggagaaaggaagccatctttccaggggagtaggttggttgcaaaactgtgcccaaggccaccttgcactgcagtnggggagcccttagaaagtttgggggtaaaggaatgaggaagcaactagaaaacaatggaagggacttcagatggtaaggtttctgtttagtacttatttcaattttaggnctcctgaatagtagaggtggtgacaggaggntacctgaaaccttggttatataatatacttcctnctacgangtaagtantttcngatnnaaatgaggnataattggaaatcagtggaggntnaacnncntngccgananaaacnttanancnccccgggccatggaatttgtttcc

SEQ ID NO: 319156 - DNA, 673 bp, Homo Sapiens
  misc_feature (71)..(184): n is a, c, g, or t
  misc_feature (210)..(240): n is a, c, g, or t
  misc_feature (321)..(365): n is a, c, g, or t
  misc_feature (410)..(441): n is a, c, g, or t
  misc_feature (493)..(493): n is a, c, g, or t
ttccattgcttaaatgcctttatttctttcagatcaaactgaaaaggcagaatagcaacctgatatttttnnnnnnnnnnnnnnnnnnnnnnnnnnnnnnnnnnnnnnnnnnnnnnnnnnnnnnnnnnnnnnnnnnnnnnnnnnnnnnnnnnnnnnnnnnnnnnnnnnnnnnnnnnnnnnnnnnggtttcctattcaagtcgctacatannnnnnnnnnnnnnnnnnnnnnnnnnnnnnnagacagggtctcactctgttgcccaggctggagtgccagtggtgtgatcttggcttactgcagccaccatctttggggctnnnnnnnnnnnnnnnnnnnnnnnnnnnnnnnnnnnnnnnnnnnnngtatacaccactatgcccaggtaattctgttcattttttaaatannnnnnnnnnnnnnnnnnnnnnnnnnnnnnnntctcaaactcaatttaaaaaatgcttagcttaggttctggcttgtgatgtgnagggccatatgcccctagaggcatctacttgggttttgctcctgacttgtgtggataactctgtttttctgcacatgccataacgatggacatgtgaccgtttgtcggaaaaacacagttctctcaattgcttactaaagctcattcaggctaattggagaaggaagccatctttccagt

SEQ ID NO: 319157 - DNA, 1346 bp, Homo Sapiens
gcggtttcgaggcttttattacccaaacggtgtaaaaaaacccagcccggatctggaggaaggggccagggctgcccgtctcagctctcaaccttcccagagaggggccaggcctggcagccctgtgcgtcgcgcctcctaagcagtcaaccttgtcccctccaaggacaggcatctgacccaatccaggtcccagggaggcggagtcgcaaaccctaactctggggtgtattctgctcggcctcctctccccctccccagatagctctcccagcctggggcacggacagcacagactttgcagacatcacccggggaggtttctcagtgcagacaggagctgaggtaggggttggagaggctgacctcgagaggcccccgagggccaggaaggaaaaggagtcattccactctgagaagctcaaacacaacagacttcacactgctgacgggtggacagaggccaggctcctcccctcggcaggcctctgtttctgggcccagggtggttgaggactcactgagggagagcaggtaaaagaacccgcagacagtaggcgatcatcaggtgctggcgcccctccctcctcccctgccctggctgtcagtctgtagcttcacaggtctttgctgaattccctcaccagcgtgtagcccaggcagccccagcccccctcggcctggtagccacagccctccagcatccctcccaccccccaggcggccacagccacggggaccacgagccgggcccggggctcccccatgcccccagcccaggcccgagcccgggcctccgcgaaggccagcagcctcctgcccacgccccggcggcggtgccagcgagagacagacaggcgggtgacccgggccccgtcccctgcatttgtgccaggggccagagccaggaccccacacacgtcaccggagccccgcacggccacccaggggccccccaggccacccggcggaggcagcgagccccatcgggcccgcaggcccagcttcacggcggccacagccaggaacaccggcaggaggagggccagggcgaaggaagccaggacaaagcgcaggccgctgctggccgccgccaggaggagcagggccggcggccgtgtcaaggcatggagggccacgcggttttccgtgtccttcacgccggccttcagcatctccagcaccaggggcttctcatcttccctcatctcccgcactgacaggtggctgggggccatggcaacccccaggccccggccccccagaagggagctggcgtcgtgcacctgcaccggtcgcctttggtccttcgacaaggtttcgggagcgggtctggaagggggtcg

SEQ ID NO: 319158 - DNA, 1747 bp, Homo Sapiens
  misc_feature (695)..(720): n is a, c, g, or t
  misc_feature (924)..(924): n is a, c, g, or t
ggcccaaagcaggaggaaaaaacgttgtggcttcaccattgctgtgcactgtgggataatggatggaacatggtgttaagccacgtttttcagtgtgatcttcctcagaatacccgtttgctcttcttcccaggttgaaatgttccttcttgcctatgctgtgcgccacaccatccaggtgtaccggctctccaagtacagcacggaagaattcatcacagtctaccccaccgacccacccaaggactggccagtggtaacgctcattgctgaggacgatcggcactataacatccccgtcagagtgtgtgaggagaccagtctatgaagagacgcatgctcctgaacagcctggcgacgtggcgaagatgcacaggtggctcctgggcttgggctgcaggtttgggggtctctaagaacaatctctgagaagaacccttgggcccctgggagccaagttggacaggatgtcctgaagactagcttttgataagagaaattaaccaagtctttcccctcatctatgatgcaatatatttcagtgggggccttcagagcacacctgttggacggtgcaaaccatatcttctccagaaggcaaatacttttgtatcagaggaaactcagttttggagaggaatatgttctttatatctcaaatcaaaactctctctaatggtaaactggcttctaannnnnnnnnnnnnnnnnnnnnnnnnncccctttagtagtaacgggtttctatagatcttcctatacagtctgctttaactcaggaccttgagattatgagactgacgtgctgcccactgcactgagggggcttctaacagtctgctttaagtggtataattctgggatagatctgttactggcatagtcatgacaacctctggtaatcttaccttctcctttttatgaanggaagagcaatggtttgcacttacatcttaattaaggctattttaagcagattgtttgcaacagattaagaattggtcccaaagtgggttatttcaaggcatttttgaagactggaggagcgtaggagggagtggtgagggaacctagaacttcttgctccttgtgactataacagatgtctgatgcccccagcgcactggagtctggggcttggtgcaggtggtgccccatcagtgtgcacagacactacttgcctttgtggtttagtgttggaagctttaattattctacagttccatagattcacaattttatagccaaacagtttgtatccacctgctttcagaggaggaaccaaaggccaaattactttgaggtagggcttagctggacctgggttttcctatgctcttttcatgctgtgttggagggtgtgtccactgccagatctgtgtaacccgtctgggtcaggggatgagtcacagcaaaccatcttaaaatttttcatgagtacatttaagcggaagcatacgggaatatgagtgcaaaagtgtggctgagccgcgtatgcccttgattggttttgggaagcctgagggaggcagccttcctggctatgagccatcgcctgcccaatcaggctaagggtggtgactggggtggtgaaggggcagttctgctgagcatggtctgccttatggcctgaattgtcctcaaggggtgtggactgcagatggtgttcacatgaaccggagacatcactctttaggattctactggcagcccctgaattggctcaacgtttgtggaggtggtatttcc

SEQ ID NO: 319159 - DNA, 1065 bp, Homo Sapiens
  misc_feature (54)..(54): n is a, c, g, or t
  misc_feature (112)..(112): n is a, c, g, or t
  misc_feature (150)..(150): n is a, c, g, or t
  misc_feature (881)..(937): n is a, c, g, or t
actggcccagtccttgggtgggtcggtggggtagactgtgatgaattcttccgngttgtacttggagaagcccggttacaccctggatggtgtggcgcaccagcattaggcnaaggaaggaaccatttccaacctgttccaagaccaccnagtgtgtcccacctggttgaggtggttcctcagaagctgtcctgggtcatttgatgtgtcccgagcaaacagaagcacagagaaaaatggtacttcctttcctttctctttatcattatatagttcaatggctctgtttagcattagaaattttacagcttcatagaggctatattcctccgcctcatttgtgaatagttcatcacaagctatctgtcttgcttcagcagttctcatttcagccaagcctgcccacttcttcctcagcagagtaagggactctttaattttatcaaccaggtcctcattcttcccatcaaatttcagtccaagtttccattgcttgatccagttgtatttgcttatgagtttttctggtaacagcatgagctccgggtcctgcagccagggcggcagccccacagcctggctcatggcctggaacagcgtggccctcagtgcacagtaattatcaccacggactcgccgtatggaggtgaacttctgagaaacctcttcatagcccattttcatacacgttgctttctgtgtatttcctctccattcttttttgcagtagtccatgatatccatttcaggagtacgcttaatctcggttctgatgcccctctttcatgtataagcaattctttctccttttctatttcatctgcagcacggtacatgtcctcctcatgctcggccgggaactgcatctcgggccgcggctnnnnnnnnnnnnnnnnnnnnnnnnnnnnnnnnnnnnnnnnnnnnnnnnnnnnnnnnngcgtctcggcgcagctcgcgcctggccacgcttcgggctggggcatagtcccccgactcatgcggtcgctcgcggccgaaggggttcagccggctccgaacatcccgggaattccggaccggtaccag

SEQ ID NO: 319160 - DNA, 915 bp, Homo Sapiens
ttttgctgtgcgtattaataaatattctttattttaaattttgcacattgcgctttaacattacatccaaacattttgcaagtggatgtctactttgtaaaaccatatattcagctcattgtcatttctgtacagaattataagtacaacattactttttgccactaagttgctttagtaagtctcacaggaagagaaacatttaatgaaaagagatggcttaaatcatatggcaggcctgcgcagccacgcaactaaagacacaagcctgaagaaagaactaatgaggatacctccaccgtctcccaaaacaagaaagaatcacattgatttaagataaaattttgccataagtcactaaattaagagtttttcgaaagagaaggcgcagtagtcatcgtgagtgtttcattgaaagacagagctattttatttatttaatttgctccagccgttgtcaaccagccactacaaatgggcctcttgtgatcatttaaccggcagtatttattaaatttctccttcagatgctgtcggtattgttctctattgctgtagaaagactggttattagccataaatgactgtatttcatcttgtgagataaagatttcctcatctgaagtacattcagactcatcaaggagttcaactaagctcttggcaccttttccggaatcgggaccaaacaacgtttctgtaggttctgcaaactgtggtacatttttcctatgctcaaaccaaggcaatggctgcccacccttttcagagctgcaacagctttcaggatgtgtatctttggtcttgtcacggtgaaacactgtgtgcatggtatttcctgaggtctctcgattacctggatctgtaatacagcttccaagcttctggatatgttcatcacatttcagtatcttg

SEQ ID NO: 319161 - DNA, 720 bp, Homo Sapiens
  misc_feature (676)..(676): n is a, c, g, or t
  misc_feature (702)..(702): n is a, c, g, or t
ctgaagctgcaggtgttgatcgagtcaaagagccctgacatagccatgctttttgaagaaagcctttttgcacctgaaaccccagttttgtctgccattgtggatttcctgggcagagtggagtgaaggtgccaaaagccaagaagacactgaggcagtctttaagaaagctctcttagctgtcatagcgtgccgactcagtaaccctgaagaataagtacctggattgggcttatcgaagtggtggctacaaaaaggccagagctgtgtttaaaagtttacaggagagccgaccattttcagttgactttttcaggaaaatgattcagtttgaaaaggagcaagaatcctgcaatatggcgaacataagagaatattatgagagagctttgagagagtttggatccgcagattctgatctttggatggattatatgaaagaagaattgaaccacccccttggtagacctgagaactgtggacagatctactggcgagcgatgaaaatgttgcagggagagtcagcagaggcatttgtagctaaacatgctatgcatcagactggccatttatgaagatgaagaataccgtccgctttgtgaaatagtattgcaagccagcccccgtggggaaatttgtattgagtcgatttgtaatttgctcagtgatggcaganaagatggctgtttggttttgagacanactttaattttatgttaa

SEQ ID NO: 319162 - DNA, 909 bp, Homo Sapiens
  misc_feature (137)..(137): n is a, c, g, or t
ttatgtggtccccaccgttgtcttccccccccgcatgtgtggtgtctcccctgccgtactcctactcatggcgtcttgtttctcccggtcgcagtgggtgttgtagagcggcgcgcagcgtcgccttcttttttatnatacgctccccctcccattgtgttcgctccctctttttcaggaaacattggtgtgtcgcaattgttgtggtgcgcccctcctcggggttatacaagcgtcccccctgttgtctgttctgtatgtcgcggagattctgcgagacacgcgtgcgcgtttgtgatgcgcgcgcgctctgtttgttgtgttttctcaatcataaaaattttgttaatgttttaaaaagatttaacacagttaacataaaattaaagtgtgtctccaaaccagacagccatcttgtctgccatcactgagccaattacagatggactcaataaccaatttgcccacggggcttgcttgcaatactatttcaccaagctgactgtattcttcatcttcataaatggcccgtctgatgcatagcatgtttagctacaaatgcctctgctgactctcccgtgcaacattttcatcgctcgccagtagatctgtccacagttctcaggtctaccaagggggtggttcaattcttctttcatataatccatcccaagatcagaatctgcggatcccaactctctcaaagctctctcataatattctcttatgttcgccatattgcaggattcttgctccttttcaaactgaatcattttcctgaaaaagtcaactgaaaatggtcggctctcctgtaaacttttaaacacagctctggcctttttgtagccacactttaattttatgttaacttgttaaatctttttaaaaattaaaaaatttttatgattg

SEQ ID NO: 319163 - DNA, 1398 bp, Homo Sapiens
gttttactttctttttctcttggagctgagctataagacaacaggactgaacagggagccaactgtttctttgaacagtaaatcaggaacaccaatggaccaaaatgaacacagtcactggggaccacatgcaaagggccaatgtgccagcagatctgagctgagaatcatcctggtgggcaaaacaggaactggcaaaagtgctgcagggaacagcatcctcaggaagcaagcatttgaatcgaagctgggttcccagaccttgactaagacttgcagcaaaagtcagggaagctggggaaatagagagattttcattattgacacaccagatatgttttcttggaaggaccactgtgaagctctgtacaaagaggtgcagaggtgctacttgctgtctgcaccaggaccccatgtgctgctcctggtgactcagctgggccgctatacctcacaggaccagcaggctgcacagagggtgaaggagatctttggagaggatgccatgggacacacaattgtcctctttacccacaaggaagacctcaatggtggctccctgatggattacatgcacgactcagataacaaagccctaagcaagctggtggcagcatgtggtgggcgaatctgtgcctttaataaccgtgctgaagggagcaatcaggatgaccaagtgaaggaactaatggactgtattgaggatctgttgatggagaaaaatggtgatcactataccaatgggttgtacagcctaatacagaggtctaaatgtggacctgtgggatcagatgaaagagtaaaggaattcaaacagagccttataaagtacatggaaactcaaagaagttacacagccttggctgaagcaaactgcctaaaaggagccttaatcaaaacacaactgtgtgttttattttgtattcagttgtttctcagattgataattctgtggctttgcatactgcacagcatgtgcaatttgttttgttgcttactctttagtatgtgcaatttattctgcagtttgctgtttattatacccaaaaagttaatgatatttttgagaacagttattagactagaacgcaagactcctaggttatagttacagatcccagttattatttactcactatcatttagtgggtgaatcacagtaatttccctgtaaaatgtggtacctgaagtcatatttgagattctatgaaatgtttaaatctgaacatcactccaattattaatgaaccaaatcatacgataagttactgtttgcattgaaatataatatcaaagccttttgaaatctgtaaacataaaattcctctcattttcaaatatctaaagccagttttatgttcctaaaatctcattttcttctttctagtactactattt

SEQ ID NO: 319164 - DNA, 1252 bp, Homo Sapiens
tttgattttctcataattttaatgatcaatagcttctggtgggctctggatggtacagttaaacaatagacttaaagacctcccccaaagcacgtccacaccccctcggcagcgtctgcctccatcagcattccactgcccagtcggacttccacagcctcagacccccctcttgggttatggaaatccacatcttagtgtaatgagctgaaaaaccctgggtacacccgtgatctgttattttttaaaaataacaaatactaagccaaacacctgcccaggctctgctgcctcacagagtgtggcgatctgaatactctgttgtctcttgtgggccgggtgggttttgcttcgctccctgttctactgaaatcatacggcatagagttcgtaaatcttctttacacagtacaccagggcggccagtgctatcgtgttgtgcagtctctttctgtgcaggtcgtccttccggaccagcaccaccggggtggaggaggtgagtgtgtgcagaggcaggcgcgacagtttataggcgtcgtactccacttggtacttgcagcaagggtcaaactgccaggagatcccatagagggtgcagcaggccaggctcagcacaccagcgggcagggaaatgtagtgggaataatctaagggcagcgccaacggggtgaagaggcaggcggtgcccgccagcacggccgtcttgtgcaggcagttgcccacggtgatccagcgggctgtctcgtcgccaatgcgagtgggctcaatcacaatgtacttgtactgggcttccagggcctgctccagctcgtactcaaactggtcttgggcattctccccattgtagatctcatgcacaatgtagcagtctgtggccgacaagctcaccattccaacaatcacggagggctctgggaggttcaggggccctgagacagtgaagccgagcagcccaagtaagacaggcagggctgtctgtgagctggtccgggctggcacacggtggcagaacacagatacctgcactgtgctttcctagatgggcaagtgtgtctcaaagacgccgacaggacaagtggcaatctgtttgatgtgctcgttgccagtgtgctgaattttggacaagaattcaggttacagctcagagtctgatgttcttcattacaaacactgttggttccctctctcgggcgctgccgccactgctgcccgggccaagacgcatccggaaaattccggaccggtccagccg

SEQ ID NO: 319165 - DNA, 789 bp, Homo Sapiens
  misc_feature (54)..(54): n is a, c, g, or t
gccccttggggaaggaggcgtcttggcccgggcagcagtggcggcacgcccgangagagggtgagcttgtcggccacagactgctacattgtgcatgagatctacaatggggagaatgcccaagaccagtttgagtacgagctggagcaggccctggaagcccagtacaagtacattgtgattgagcccactcgcattggcgacgagacagcccgctggatcaccgtgggcaactgcctgcacaagacggccgtgctggcgggcaccttgcctgcctcttcaccccgttggcgctgcccttgagattattcccactacatttccctgcccggtggtgttgttgagcctgggcttgctgcaccctgtatgggatctcctggcagtttgacccttgctgcaagtaccaagtggagtacgacgcctataaactgtcgcgcctgcctctgcacaacactcacctcctccaccccggtggtgctggtccggaaggacgacctgcaccagaacgagacttgcacaacacgatagcacctgggccgccctggtgtacttgtgtaaagcaagatttacgaactctatggccgtatgatttcagtagaacatgggagcgaagcaaaaccaccggcccacaagagacaccagaagtatccagatcgccacaatctgtgaggcagcagagcctgtggcagggtgttggccttaggataggaactttcaaaaaaattacagatcacgggtggtcccagggttttcagctcattacactaagaatgtggatttccataaccc

SEQ ID NO: 319166 - DNA, 896 bp, Homo Sapiens
  misc_feature (452)..(476): n is a, c, g, or t
  misc_feature (496)..(573): n is a, c, g, or t
  misc_feature (575)..(575): n is a, c, g, or t
  misc_feature (579)..(580): n is a, c, g, or t
  misc_feature (584)..(584): n is a, c, g, or t
  misc_feature (588)..(588): n is a, c, g, or t
  misc_feature (592)..(592): n is a, c, g, or t
  misc_feature (622)..(622): n is a, c, g, or t
  misc_feature (625)..(625): n is a, c, g, or t
  misc_feature (627)..(627): n is a, c, g, or t
  misc_feature (632)..(632): n is a, c, g, or t
  misc_feature (644)..(645): n is a, c, g, or t
  misc_feature (648)..(671): n is a, c, g, or t
  misc_feature (676)..(676): n is a, c, g, or t
  misc_feature (692)..(692): n is a, c, g, or t
  misc_feature (694)..(694): n is a, c, g, or t
  misc_feature (700)..(700): n is a, c, g, or t
  misc_feature (719)..(719): n is a, c, g, or t
  misc_feature (724)..(724): n is a, c, g, or t
  misc_feature (836)..(836): n is a, c, g, or t
  misc_feature (853)..(853): n is a, c, g, or t
  misc_feature (889)..(890): n is a, c, g, or t
gggggctgggcctctgtgccaggccatcccgtctttggagtgtatcctatttgaggtcaagaaatagcctgctgtccttcccaccttccctgagcagcacctacagaacagcaaccgtgatggtgtgtgaaagccacagtcagagactgctatacatttctgtgggtgggggtagggaatactggctctgttgccctcctcagagctgggaggccaagggttcactgggcttgaatcctctctaagcacctaccccattatggcctaaacctcctcagtggaccacgggaaatcatgttggaccaagggtttccatgttcaaacagtcaacaaggccctcccctaggttgagatattttttatactgaaggcccaggccccccagtatggcttgctgccagcaagcagcaaggaaacacacggggggaacgccggagccaggcaggaccagnnnnnnnnnnnnnnnnnnnnnnnnnacgcaggggttggggagggnnnnnnnnnnnnnnnnnnnnnnnnnnnnnnnnnnnnnnnnnnnnnnnnnnnnnnnnnnnnnnnnnnnnnnnnnnnnnngnttcnngccnctgngccntcaacctgctgctcctggcctgggaaaccnttnantttcntttaattcctcnnccnnnnnnnnnnnnnnnnnnnnnnnnaaccnaccactcgctctcagntnaggaantgtcgtaaagcgcccaggntgggntaggtggtctaggatacacaactccccctcaacattttgacgcgttaatccaacaggacagtaattagccgaaacttgcctggtttttcctactagactgaaagcacgcgtntagggacagggagcgantgtcgttattcatgtctgtgttctctagtgcagagnnctggcc

SEQ ID NO: 319167 - DNA, 518 bp, Homo Sapiens
  misc_feature (149)..(149): n is a, c, g, or t
ttaacctacaactagctctcagttcatgcactgtctaaagccccaggctgggttaggtggtctaggataccaactccccctcaacattttaccttaatccaacagtacagtaattagccgaaacttgcctggtttttcctacgagactngtaagccctctagggacagggacagtgtcttattcatctctgtgttcttagtgcagagccttggcccgctgttggtgtttaataaagtgtgttgatctgaaatgccccagaccaaccaagattcccagacttggcttcttcccacactgggctggagtcctcccggagctcagggggaggtgagggccccagaaggtgcacttgccatcaggcttctccctgggtcccaggaggactgcagccaggcccgaggcacctttgtgggaggtgggtagagggctgaggcagcgtcacaccttcttgccccgcctccccatctggccttccccaacccaattagaccagcgcagacataagccttccctgcca

SEQ ID NO: 319168 - DNA, 831 bp, Homo Sapiens
  misc_feature (490)..(490): n is a, c, g, or t
  misc_feature (494)..(494): n is a, c, g, or t
  misc_feature (660)..(660): n is a, c, g, or t
aatcaccactttagcagatcataaattagggtcaagatattgtaaataagttaaacatacaagtttttgctttcacattaataataaaaactaacttacttaagtatactttcataacatgtacaaccaggtttcataattgtgcatctgtcacctccccacttggctgaatctttttcttccatttcctacacctagggacagaggtacacagacatcccagggtgtgagtgtggctgctgcatgctgtgtcctagttagagcagtgttacaaatgctggtcaggatctatgattagtaacctgtgaaccacgttacaagtgaaggacattcatggttaggtggattcagttcccaggtgagctatcagcggtagtgttagggaacctaactactattctttctgtgagaaaatgcaccccaagtcccaaaagttgactaaaaactttggaataagccatgtattattagtagtgcatggatgagcacnactnatatgtgtctctgttttggagagaggtcaaattgttaaaagaactatttgcagaactacttggctattaaaaataaatgtctgccttcttcatatgcaattcattgtaactataatttctaatactgagaaagaaacaatgaagccattcagactagagagacatnattggcttgtgggattttcaagatgttttattgactatctaatttgaatctacttacaaagagaagaaaaatgtctagtatgtaaagcaatgaatgaaaataaatgtttatcctaagtcattattgagtacaaatccacagcttaacaatgtgtttttaacagcaggagag

SEQ ID NO: 319169 - DNA, 564 bp, Homo Sapiens
caagtttagggggttaaatgtttattaaatcaagcttttaaattatatatccacctacagtctataaacaaatatagtacacatgtatgtaaaaggctagcagataagaaccagtggaaaaactaaagttccctttgcacaccggcacctcatcacaacaccctcttggtgtggatgccatggggccatgctgtagtcaaaagttaaatgaaaaaccacaagtttagtttgactccgtctcctagggtggatttcattcagatatttgttccatattataggagggtggatcctagcaaggcaacagtgtagtttttacattcacagattggctgaagtagtacaaattgagctgctaatctaggtgtctccctccctgttaccatacttcataagaaatgtgaattaaaatgaacaatggaccacaggtggttataaaaatagataactcgcagagtcataaatatctacagttagtagagcagaaacttctaaaatttacctttttccataatgtgcagaatatcctaagtatgttcaagagacacagtcagcagacttcag

SEQ ID NO: 319170 - DNA, 456 bp, Homo Sapiens
  misc_feature (426)..(426): n is a, c, g, or t
aaattaggttaaatgtttattaaatcaagcttttaaattatatatccacctacagtctataaacaaatatagtacacatgtatgtaaaaggctagcagataagaaccagtggaaaaactaaagttccctttgcacaccggcacctcatcacaacaccctcttggtgtgggatgccatggggccatgctgtagtcaaaagttaaatgaaaaaccacaagtttagtttgactccgtctcctaggggtgggatttcattcaggatatttgttccatattatagggaggggtgggatcctaggcaagggcaacaggtgtaggttttttacattcacaggattgggctggaaggtagggtaccaaattgaggctggcttaatctagggggtgtcttcccctcccctggtttacccatactttccttagggnaatgtggaatttaaaatggaaccatggggt

SEQ ID NO: 319171 - DNA, 2562 bp, Homo Sapiens
gaaagacactagttagtctgttctttattttccttggaaaattacagggttacttatcaacaaaataactgtccatccggtggggaagtgccatccggtggcttctatgtacaggcccatccctgggaaccacatttccagagggggcctccccctgaggcccccattggccccctcccaggtatccaagaataaatcacatggtgacagctgccggcatgggtgagtgggacccaggcctattacccggccagagggtttgggggcctctctcctggaagcctgctctttccacaccccctttcccagccaggctgtcttggacactcccggggctccgctgaggggcacatgattcccgctttggacttcttttgagatgtcattttaacactgaggcatcctggcctcccttcccggaagatgggttatttgcagtgctgtcttttcttttagtcccggtttttgtacaaaaacaatgatactccccattggactgtatttttgcccaagaaacaaaagtgcctcaacaggtacagttctgctggtcaatctgcttccggcagggctccatggtgacagccacgcccaccccactcccggcccgatgtcattcgggtcacctcgctccaggtgtctgtatctgggtcgtaacactccacactgtccaggaacgtgtgaccatcatagcctccaaggacgtagattctcccctggtggacagtgatccccagggcacttcgccggtgcttcatgggggctacgaaagtccacgtctctgtttccacatcgtagcgctccacgctgttcagctggtcctgaccatcatagcccccagcagcatagatacagttgtgcaggacgcagacgcctgccccgcttcggatggtgttcattgctgtgatcattcgccactcgttcctctctgggtagtaacactcagctgaattaaggcggtttgtcccgtcaaagccccccacggcataaaggagacgattgaggacagccacgcccaccccgatccttcgtgtcagcattggggccaccaagtgccactcatcccgctctggctcatacctctccacactgttgtggtggatgcagccgtgggagccgccgacggcatagatgtggccatcgatgacccccaccccgatgcggttacggggcacgctcatgggggcgcagggcgaccactgattggtcatggggttgtaacagtccagggcgctggagtcggtgttgccgtcgggcgagtttttcctgccgcccacggcgtacaacagcccgcccaccacgcagccggccaggccgctccgcggcacctgcaggtccgccaaccggagccaggtgccgtcactggggttgtaagcctccaggtagctgagcgactgtcggaagtagccgcccgcggtgtagatcaggcggcccaccttgggcgcccggcagggcatcacctgcgtgggcttgtgcagggtgagctcctcgaagatcttgaccaggtagtccttgcagcgggagtcggactgcaggatctcgcacttctgcagctgcatctgcaggaagttcggcgtcaacgagtggcagcgcacggcccgcagcagcgcctggacgtagaaccgtcgctgttcgcagtcgtacttgacccagttgatgcaggcgtggaagacctcggactcgcagcgcacgttcaggtcgtcccggctgatgagggtcaccagttggcagtgggacaggttgaagaactcctcttgcttggccacctccccaaaatgcatgtagatgtactcccgggcacgctggtgcaactccacacagccaatctgctcagcgaagttggcgatgccgatggcattgctggggtccagctgctgcaccaggaagtcactgcaggcacggacaacgctgtcgatctggtacatgacagcaccgttcatgacgtggaggacacacttctcgcccatggagatggaggccgtgtaggcgaattcaatgaggcgctccatgaccttggggtggataccctcaatggacaccacctccatgccctgctcccgcagcccgttggtgaacatggccttgaagacagggctggatgaggccagcaccaccttgtgggccatgaactgggcggccggtgcatcctggtacttgacctgcagtgtgacgtcacacagctgctggctgagccgcagctcgttcatgatgccaaaggcctgcttggtatgatcctccagggtgtagctgaaggtgcggttgccatgctgggagggcgtcacctccgccttgcactcagtggaggcgtacatcaccgcgtcccctgccccctcagggcactgtgactgcaggggcaggaatcggcagcaggccccagccccgctaggcctgggatctggctgcatggggttccagaagataagcaacaccaccacctctggcactcagggaccttggctgtaggggacccgcgggcgcctccgccgtcggggggcctcggctccagggctgcgtggctgcggggtcttggttgtcggttggggagcggcctcgggatcccgggaa

SEQ ID NO: 319172 - DNA, 912 bp, Homo Sapiens
agggcgtacacaccccgcccaccacgcagccggccagccggctcgcggaacccaggtccgccaccggagccaggtgcccgtcactcggggttgtaacctccaggtactgagcgactgtcggaagtaccgctcccgctgtagatcagcggcccaccttggggcgcccggcagggcatcacctgcgtgggcttgtgcagggtgagctcctcgaagatcttgaccaggtagtccttgcagcgggagtcggactgcaggatctcgcacttctgcagctgcatctgcaggaagttcggcgtcaacgagtggcagcgcacgcccgcagcagcgcctggacgtagaaccgtcgctgttcgcagtcgtacttgacccagttgatgcaggcgtggaagacctcggactcgcagcgcacgttcaggtcgtcccggctgatgagggtcaccagttggcagtgggacaggttgaagaactcctcttgcttggccacctccccaaaatgcatgtagatgtactcccgggcacgctggtgcaactccacacagccaatctgctcagcgaagttggcgatgccgatggcattgctggggtccagctgctgcaccaggaagtcactgcaggcacggacaacgctgtcgatctggtacatgacagcaccgttcatgacgtggaggacacacttctcgcccatggagatggaggccgtgtaggcgaattcaatgaggcgctccatgaccttggggtggataccctcaatggacaccacctccatgccctgctcccgcagcccgttggtgaacatggccttgaagacagggctggatgaggccagcaccaccttgtgggccatgaactgggcggccggtgcatcctggcgccacccaggcctcgctaccttaaaccgttagagtactgcct

SEQ ID NO: 319173 - DNA, 548 bp, Homo Sapiens
ggtcctaaggtagcgaggcctgggtggcgaattcggcacgaggagcagattgaccagcagaactgtacctgttgaggcacttttgtttcttgggcaaaaatacagtccaatggggagtatcattgtttttgtacaaaaaccgggactaaaagaaaagacagcactgcaaataacccatcttccgggaagggaggccaggatgcctcagtgttaaaatgacatctcaaaagaagtccaaagcgggaatcatgtgcccctcagcggagccccgggagtgtccaagacagcctggctgggaaagggggtgtggaaagagcaggcttccaggagagaggcccccaaaccctctggccgggtaataggcctgggtcccactcacccatgccggcagctgtcaccatgtgatttattcttggatacctgggagggggccaatgggggcctcagggggaggccccctctggaaatgtggttcccagggatgggcctgtacatagaagccaccggatggcacttccccaccggatgatagtcttgggtgataagta

SEQ ID NO: 319174 - DNA, 1086 bp, Homo Sapiens
  misc_feature (58)..(69): n is a, c, g, or t
ctgggtatgacacgaacgagggtatcgttgagcggaagaagatgtgtccctgaatggnnnnnnnnnnnngaatggggtttcgggggcacgtttatggggggcgccgggcggcccactgattggtcatggggttgtaaacagtccgggccgttggaatcggtttttgccgtcgggcgagttgttccttgccgcccccgggggtaaaaaaggcccggccccccatgcaagccgggcaggccgctccgcggcacttgcagttccgccaaccggagccaggtgccgtcactggggttgtaagcctccaggtagctgagcgactgtcggaagtagccgcccgcggtgtagatcaggcggcccaccttgggcgcccggcagggcatcacctgcgtgggcttgtgcagggtgagctcctcgaagatcttgaccaggtagtccttgcagcgggagtcggactgcaggatctcgcacttctgcagctgcatctgcaggaagttcggcgtcaacgagtggcagcgcacggcccgcagcagcgcctggacgtagaaccgtcgctgttcgcagtcgtacttgacccagttgatgcaggcgtggaagacctcggactcgcagcgcacgttcaggtcgtcccggctgatgagggtcaccagttggcagtgggacaggttgaagaactcctcttgcttggccacctccccaaaatgcatgtagatgtactcccgggcacgctggtgcaactccacacagccaatctgctcagcgaagttggcgatgccgatggcattgctggggtccagctgctgcaccaggaagtcactgcaggcacggacaacgctgtcgatctggtacatgacagcaccgttcatgacgtggaggacacacttctcgcccatggagatggaggccgtgtaggcgaattcaatgaggcgctccatgaccttggggtggataccctcaatggacaccacctccatgccctgctcccgcagcccgttggtgaacatggccttgaagacagggctggatgaggccagcaccaccttgtgggccatgaactgggcggccggtgcatcctgcgccacccaggcc

SEQ ID NO: 319175 - DNA, 987 bp, Homo Sapiens
caagggcgcctgaattcgggtttttcccttcggggggagttgtttcctgccggcccaaggggttacaaaaaggccggccccaccaaggcagccgggccaggccgctcccgcggcaccctgcagttccgccaaccgggagccaggtgccgtcactggggttgtaagcttccaggtagctgagcgactgtcggaagtagccgcccgcggtgtagatcaggcggcccacctttgggcgcccggcagggcatcacctgcgtgggcttgtgcagggtgagctcctcgaagatcttgaccaggtagtccttgcagcgggagtcggactgcaggatctcgcacttctgcagctgcatctgcaggaagttcggcgtcaacgagtggcagcgcacggcccgcagcagcgcctggacgtagaaccgtcgctgttcgcagtcgtacttgacccagttgatgcaggcgtggaagacctcggactcgcagcgcacgttcaggtcgtcccggctgatgagggtcaccagttggcagtgggacaggttgaagaactcctcttgcttggccacctccccaaaatgcatgtagatgtactcccgggcacgctggtgcaactccacacagccaatctgctcagcgaagttggcgatgccgatggcattgctggggtccagctgctgcaccaggaagtcactgcaggcacggacaacgctgtcgatctggtacatgacagcaccgttcatgacgtggaggacacacttctcgcccatggagatggaggccgtgtaggcgaattcaatgaggcgctccatgaccttggggtggataccctcaatggacaccacctccatgccctgctcccgcagcccgttggtgaacatggccttgaagacagggctggatgaggccagcaccacctttgggccagaactgggcggccggtgcatcctggtacttgacctgcagtgtgacgtcacacagctgctggctgagccgcag

SEQ ID NO: 319176 - DNA, 993 bp, Homo Sapiens
aggggggcgaaggggggaaccgatgatgggacacatggggttggaacattacagggccgcggaaagttaggtttttccctcgggggggaggtttttcttccccccccgggggttaaaaacaggcccggccccccaaaaaagccgggcagggccgtttcgcggccccatgcaggtccgccaaccggaggccaaggtcccgtcactggggttttaagcctcccaggtagctgagccgactgtcggaagtaccccgcccacggttagatcaggggggcccaccctggggcgccccggacggggcatccacttgcgtgggcttgtgcagggtgagctcctcgaagatcttgacccaggtagtccttgcaagcgggggagtcggattgcaggatctcgcacttctgcagctgcatctgcaggaagttgggcgtcaacgagtggcagcgcacggcccgcagcagcgcctggacgtagaaccgtcgctgttcgcagtcgtacttgacccagttgatgcaggcgtggaagacctcggactcgcagcgcacgttcaggtcgtcccggctgatgagggtcaccagttggcagtgggacaggttgaagaactcctcttgcttggccacctccccaaaatgcatgtagatgtactcccgggcacgctggtgcaactccacacagccaatctgctcagcgaagttggcgatgccgatggcattgctggggtccagctgctgcaccaggaagtcactgcaggcacggacaacgctgtcgatctggtacatgacagcaccgttcatgacgtggaggacacacttctcgcccatggagatggaggccgtgtaggcgaattcaatgaggcgctccatgaccttggggtggataccctcaatggacaccacctccatgccctgctcccgcagcccgttggtgaacatggcctgaagacagggctggatgaggccagcaccacctcctcgtgccgaattcgccacccagccc

SEQ ID NO: 319177 - DNA, 1155 bp, Homo Sapiens
  misc_feature (15)..(15): n is a, c, g, or t
  misc_feature (72)..(72): n is a, c, g, or t
  misc_feature (89)..(89): n is a, c, g, or t
  misc_feature (870)..(870): n is a, c, g, or t
  misc_feature (874)..(874): n is a, c, g, or t
  misc_feature (886)..(886): n is a, c, g, or t
  misc_feature (910)..(910): n is a, c, g, or t
gcaccacttgcgctngttcagcaggcacaggaaggggtaaagtgagaccggcccctcgtacacctcgcgctntaggcggttcttgtctncctcagcgcccggcacagtgctttctcacattggtcctgcagggtctacagggtctccggcgcgtgcttgacctccttgcttggcaacgtggcttctccacggacaccacgcacaccctgctggccagctccatgtggagctgcttctcaaagaggcactgcagggtcttcaagggcaggtgcagcttcgggtaggacacacgcccatccttggcatacacgtccctgagcagcttggaggtgttgaccgggggcggcatctgcggcgggaggctgaaggtgggcttcaccttgtgcacggccttcagaacagtggcccgatcctcctcagacagcagaacggcggtgaagagtgcctgcagcttcagcccctcctggctcatctgttccagacacctttcgatggtcccggcgtcctggtcctgcctccccatgcactggagggcagccgcataggacagcaggtccggggtcaagccggcatccttccccatgaataacacatataccagctccttgaaggcaccctgccgcgcccagccaagcatcacggcgttgtacatgtccagcgtgagcagcttccgcttctgccgctggccgtggtggacgaccagcaggtggtgggcgaggggcagctggtcagtgagcaggcagcacttgaagaaggccaggagcctctgctgctgacctgagagctgggcctgcgagtgctgccccgacggggcctgctccacatcgaggctcagcttcccaggggcctccctgcagcagccgggccagntgcncctcccaggggntctcgggggcctggcgcgtgcagncctccaggcacccggccatctgcttgctcaggagccggggctccacctgcaggcgcctggtcagcgccttgaactccccgctctggaatggcatctgcagttcgccttcaaccgctgcatacgcatctgctgggtccgcttatccttctccagtatctttgcccagcggccacagggcaccggggtggcatccttggcccccatctggaccttcctgggtggctggaggctaccatctccactgc

SEQ ID NO: 319178 - DNA, 1937 bp, Homo Sapiens
  misc_feature (323)..(323): n is a, c, g, or t
  misc_feature (1097)..(1097): n is a, c, g, or t
cgcccttttagggaggtttttttgggttcagccactggttttcccgaaagccccccggctgccaccccctgggctccttccggaggccacctcccatgagaaaggccggtctgctctggttgctccgacccccgagtggttcagccctggctcccctggcggcggagcccccttcttcccgccgctggcggcagcaggggccccctttgcgtctcacgcagtagaagacagcaacgacgaggagcaggaggcccacgctgacggccacggccatgacggccactccagcctgggaggtctgggggctcacggcgccgaagtgngaagacatggcgcttgttcccgtgggggttggaggcttcacaggagatgccatcgcggctcagggcgctggtcactttcggggtcagagagctgctcacccaaccctgccgtccggggattgggctctgcggggctgccccccaattggctccagctgagtttggggtctggatggccgcgggcagagcagatgagtgtgacttcgtctcccttccctccagctgccatctgccttgggctctatttccgctgtctttagctctggcgagccttggaccagcagcgtgaagttctgggtgcggctgaggaccgggactgtgggcagggaggcctcacatacgtaggtgccattggaatcgaaggtgatagaactgagcgacagcatggggccatcgcccaggggagtggagtccttggtccagcgtagggcaggggtgggcaggccgtgcacggagcagttcacgactgcactgctgtttagaggtaaggaaagcaccttcccctcgctgagctccagggggtccagataggccacgcgcagctccagcgtcttggagagctgcacgtcatctgccgcgtcgtaatcctccactctgcagccataggtcccgctctggccccgggtcactccctccagggtcaagttcccctcgagattcacattcagcacttcctcctgctcatcctgaaggcggaaaagcgtatactccgggctggggctgccgtccccccggcagagcagctggacagtgtcaccctcgcgtacccagccntgctggggtggacgggctgcccacccagaactgcacgtgctccgtgggatagtgcagggtgaggtggaaggtggggctgtccaggcgccgtggcggccctcgggcaggctgtagtgggcggcgcagtggaagctggcgtctcggtcatccttgcggagccgcaggtagagggtgctggtgagggagagcagcccgaggcctcccggaccgtgcggctggtcatgtagccctctgggttcatctctacgggcacctctcaggcgctgcccgttgcgataccacgtgatcttgggggccgggttccgttccggctgttgcaggtggcgatctcctgggcagagtcctccatcacagacagtgtccctttgttgggggagacctcagtggcctctggctttgcaaacacgttgagccgcgcagtggcctcagcagtgcctgccgcccctgccctcaccacgcacacgtagtctcgctcgtcgcccacctgggcctcagccagcaccaggcgcccctgggagtccagctggtatgggggactgcggccccgggtgtcgtgcattgtgacctggagctcagagccctgcatctcagccgaggctaggcgggggcgagctcccgagcggtcggtaaggaaccattccagcatataatggtcgtgggttcccgtaggggtgcagtccagaatgacagactttcctcgcatcacctccaccagcgggggtacagacaagcgcacctccgcctgggcatctgggtgcgccgccagcaggactgcgagcaacagcagccgcggggccccgcgcgcctgggccggtgcgtccgggggctccatgatcccgg

SEQ ID NO: 319179 - DNA, 605 bp, Homo Sapiens
tggtagacaacagccaaagtttatttaacgtgggaatgcttacaataaataaagcagaggggtaaagagaaacagaacagtaccttgaggacaaagaaaccccaaacccaacacaaaaatcaactcctgccttcttctgtatgccccaggctctgagaagccactgttcctccccagggtagagagactgcaaggccggcggccagcagtgcacatccccaagcagcagctgggaccctgggtcctgaggggccactggagacctaggaagcctttgcaagggcaaaacccaatggcaacatgcccacgaaagcttcaagtcagaacgtgggcctgcaaaagacatttctgggctctgctctctcctctaggcccacacacctgctgaacagacatctgtgcccaggcacctcccagaagcccctttattataggacatctactctctgttcctgtcctcactggcccctcccatcatctctctgaagactcttattatggctgcctcctaattcttccagagcagccacacccaggactgtgacgggctctcacccactgtggggtcacagacaggcatggggctggctcccatcccagatccc

SEQ ID NO: 319180 - DNA, 1448 bp, Homo Sapiens
  misc_feature (177)..(185): n is a, c, g, or t
  misc_feature (1372)..(1383): n is a, c, g, or t
caaatgtgtcattacctataatcctgatacttctgggtgccatttcccccagagtgtcttccaagtccaatcatttccgccacgtgtttccccgcatccttctttttatcccctcctctttggccccttgttccaaaacctggtacgcgtactggccccctcaatgaacttttaggnnnnnnnnnttgtttgtttgtgaaaaatttaaaagcaatttaatttctcagtttgtgaaaaaaaagaagggagactcaagtcttgaaaacatagttttattttctcattcaggcttttgtagtttatttttacaaaatagcagacaaaatttggttctttatattaatagagaatatgtaagacatatcgaaatatatatatagcacttaagttataaacacacagcaaattcagcatcacttaaacagcaaccatattttcacataatcaggattgcataaggagataaacattatttttagcctaaatatataaataatctttgatgctttatgtcaattagtatttataaaagctagtctaaaaactaacaccacctacaaaagtgatgagctttaggctacaaccttgccatcatgccataataaagacttaaaattatagaaagccagagggaactaatcacttcagtgcaactgcagcaggtagaactacctagttatgattttaagatggacactataggaatccagaagggatgtttttgaatcttcagttgttggattctttatggtccaaacatatcttaattttggttagagttatgcccccaaatcacctaactgtgatagagggaagttgcatagggactttcttcatctctgctctcttcttttagcttcttggctgcctgtgttgataacttaatctgcaagtcaagtctctgcaggaaatctctggctgacacttcctcaggctgcacaggctgaacatcagattcttgaggactgggaggagggaggtcttccccggccaccactggctcctcttcctgagaaaaactgttatcagcagtttcattttctggagaatcaatggagttaagtccattaaacaacaaaggcttctctgatataactgggatgttcaaagttttcttcagaaatatacaatcattggtaaacagtttattggcccttttaatctgttccatctgcaaggttaagagcgaaagcagctcccgccgcggcctgccggtaccgggaagaccctgcagagcgagggagccggggagcgctgaagcccgcggccgttggggctaagagagggctatctgcaggcgtcctaggccccaggtggacccctgctccattggcgatagagccctggcagaaccctgccctggccacggcgnnnnnnnnnnnngcgttgctctgcctcctttattgattccccagcaggagccagcttgcacagaccttccagctctg

SEQ ID NO: 319181 - DNA, 527 bp, Homo Sapiens
tcactcacagcacagaagtactcagccgcgtcgctcatatgggctgagggtttcgtcaggtggaaggaggtttcactcttcttaaattcagcctcaaaaccgttgatgcctttaaccagggtggccgctgatgtgtacttcaggagaagctggagtccttggttggggtattgcacataccagaagagatatggtggaacagacgatgagtagttgcacctcagcagaaccagggctccttcagagacagagacgtggctgccaagctgggtcaccgactgggctctggttcctcccagggtaaaaatcacctcgagcactgggacgagcagcaggagcatggctgagcagtggccacgctggagggccctgagcagagcggacagaagccaagggccctgagcctcaggagctaggagcagcaggcaggttaggctggacaagtctctgcctttgaagggtttcaaaaatggttaaagaaaggctttctcttaaggagcctggatgtgttctgacctcttgttatc

SEQ ID NO: 319182 - DNA, 1808 bp, Homo Sapiens
ggcttgttttttaaataaaccaaagtcaaaaacaaactgagagtgtgtcctccacagctcttcctactctcctaggcttgccgcgtgccctcccacccagcgcctctgctggaccacggtgcagttcgctccagaaggtgggccagggcggggaggtgcgcacacacccctggcatgctgggctgcctgctggagggtgctgctgctccgtggagggcagcaggccaaggaaggggtttcctctgctcgcctaagttacagcacaatactatgtggacgtttcattgaaaattttacttgaaaaaataaaattccagatactcaggtgagacacaaacccactgttcctgctttgagacctgtgaattcttgtgggacagttccactgacagcttgcgttcccgaggtaccagtcctcagtgacctcgggaaccccaaccacttaggtcccaaagccacaagggtgccctttgtcttgctgggaagctggctgagggcctgccagggctggaggaccagctctcccgcacagggttcagggcctctcccagaaaaaagaggttttgaagtgaaaaggcaacgaggggccagagggctccccaggatgggtcttttggaggtagatttgatgcccacaacgcatgcaaggctaagacccccaacttagccaacgaagcccatggcctcagaagggctgcagcttgctcaggccgtgggccaggatgcatgctggacggttctccaaataaaaaagccccaagggtttgtctacactgcttacctgctggggctgtgagtggggagacggcggcctgcctagggctcctggtgccaggctcaggaagagtcattcattgcaaagggccggcaagtgaaccagggccacctctgtccccagcctgtgagaggagcagctagccctgagaagggcaaggatgaatgaggctgaccacgtcacaggagtcctccaagagtgacggggattcagtcatcggccacaatggagagggcccggagctcactgagtttggcctcgttctcccgctcccgctgctcatcggagtggcctggctggtcaagctgatgggacaggtctccaaagatcttgtgcatttccgagtagtacacaacctgagctcggatgagggactcaaagctgggctggaagtagtcgaggcggctgccgtagaagcgcggcatctcctccagcagctgcctgttcttggcttcaaagtcctcccgcacaggccgcagctcctctcgtgcctggtggagcttggccagcactggccccgtcttctccttttcctcatacttctccaccttggcctgcagcctcctgtagtcctgcaaggcctgttcccgcctcttcacagccatgttgaggctcgggaagacactgccgaacttttttaagggctcgatcacagtcttctggatctggttcaccttttcctgattgaaggcatccatccgcttcatggccgtgtccagggccgtcaccatgttcagaaggtcctggtcttgctcacagaggggattggagagtaagtccaaggatatcttcacggcagattttgacatggccaggtctgcgtcggtgctcttcttcatgtctttctgcagcctccgggtctgctcttccagctgctgaagttttccatactccctttcaaagtctctctccactgttttgggcacaatctgtttcttgggctgcccaatcttaaaaggaatccagctcatggtcccgaacctgcgtctgccgccggggtcctcagccacaactcgatcccgggaattccgga

SEQ ID NO: 319183 - DNA, 1439 bp, Homo Sapiens
  misc_feature (216)..(228): n is a, c, g, or t
  misc_feature (1024)..(1024): n is a, c, g, or t
  misc_feature (1044)..(1044): n is a, c, g, or t
  misc_feature (1050)..(1050): n is a, c, g, or t
  misc_feature (1282)..(1284): n is a, c, g, or t
aatgtcttcaaaagaggggccaaggcccgggccaaaagtgggccggggtagggcgatttccttttttctccctgggagggtgacccgcaaagggagtgaaatttgtgagaaaagggttaaaggggggggcttttctttgcaagtgggggaaagggcccagggaaaatttcctttggccaagcgaggaggccaggcttgttaggaaattttccgccnnnnnnnnnnnnnggcaggcaggctaaggggcctggttcagatttttttggccccttgggacggtggcatttcttttttgttcacgtctccatttcctctaaggtccctctggcatacccagtcttaagctctttgcttcttccttctggtgctctttccaactactttcccatgtaacgtaaggcataatcactgtcatctttgtatttttttcgggtcataaccaaagatttctctaatgtgcttggatatttcttcctgaggctctcgttcatcttcaataaaatcttccatttcagagtcgtattcatcatcatcgtcatgttcctcttcatattctcgctgccttttgtaaccagtagggaagggaagcctttgaggaccttgggcagctctgtagccagataggggaggcttcattccattcatctgtccattgctggaccggctaatgatattcttggaagaaattgtttcggagacaacagtgcacttaggctttatagtgggacgtgagctactaactgtttgcccaggtcccaagctgctcactggtcttcctgggactgaattactgacagtccgtccagctggaattgagccacttatggatctcccagggccactgacagaccgccccggggggcccaagccactcactggtcgtcgaagttcatgtggactgctcacaggccggccagggccacgagagctgcccaagggtcttgcagaactaactgaaccactgatgggtcgcccagggccacctgagctgcttgcaggttgtccagggccacatgtaccactnactgtccgcctagagggatntgagtnattggttggcttcttggacccactgattgatcgctcaggtcctgagctggagctgccattctggcgcctaggcacagggccagaactaactgtgggtcgagcaacccctgtgctgggctgcccaggggctgagctagagctgctgcctggctgcctgacacctggactcttagccttattgtgtggggtgaccatgggcccaggcctggaatggctaggatgggacagagannntttggctttgtgctcaacagcagatttctgagtcctgctagcagaagtctttgggacacttggtgaagaggtgctggaatgaggctttccagctccattaaaaacaggtttgtcgtggccctcacgaagtgagggttgggagctattgccaatcc

SEQ ID NO: 319184 - DNA, 1281 bp, Homo Sapiens
  misc_feature (30)..(30): n is a, c, g, or t
  misc_feature (105)..(105): n is a, c, g, or t
  misc_feature (113)..(113): n is a, c, g, or t
  misc_feature (127)..(128): n is a, c, g, or t
tattccattaaagaagttcttgcctatgancaaaggaaggaaagttacttgtcccagatgtggcaaattataaacttttgtataatgtgcaaaaggcctaacccntcatatcntacaccctccactnntcattctaagagagcctgagtaaacagccaggggctgggttttcccttgaatggctgccagatgggggttaaaatctgcttctcaccttctaggctgtagcagtgaggagctaatataaaaagaaactacaagatttcaagggaagagggaccacacccatcttcacaataaaatgtcattctcaacctagagcagaggtgctcaaacatggtattagagatgcatccaaagtaatgtttctggttagtggtttaaatactgagttttgaaaatgctttacttttagaaagaataaattactgtagatcacaagggtagccatacaacaaagtcactctcagatatttgtatgccttcttgaatgagaaaaaggcagatttcaactattagtacataaacatcttttgttatgtgtcatcatagctaaaaggttgaatactgctcctctagagcaagaaaaagcgggagcccctgggcaaaacagagcctagggagaatgccagggaagagatgagatttttggaggtaagcacagtgtcccaaaactgggggaaaagggagcttaggaaatgtgatacaaagtgaactaagcaggaggcatgtacttgaggctttaggaagcaggattaaccctctgcatgttcaaatggacatgctggtactcagtatttatattagcacagacaagaaggcagcggaacagttataccacattaaaggccagttcttgtggggagtaggtttatctttggagatggagctgattacccctcccctcagttactcatgggaaactcgttccaaggccacatagaaactgttcttgtcatctaggcaatgccagccaattggtccaatttcacagtctgcgcagaccagaaacttgatgttgcccacgtccttggtgaagcccacattctcaaaaatgaacatgtcctcaaccagccagtgttcctggaggagatcgccgtcaggcttgctgccgtcagacagagctggcttctttctcatggagggaaggaaaagctgtcggcgagagaagagagcggtccctggctgcagcacccgggagccgcaacgctggcacagcaccgccttccggtttcggccctcggctgacactaactcgctcggctgtccgctggttccatc

SEQ ID NO: 319185 - DNA, 1162 bp, Homo Sapiens
  misc_feature (1024)..(1024): n is a, c, g, or t
  misc_feature (1038)..(1038): n is a, c, g, or t
  misc_feature (1064)..(1064): n is a, c, g, or t
  misc_feature (1086)..(1086): n is a, c, g, or t
  misc_feature (1099)..(1099): n is a, c, g, or t
  misc_feature (1107)..(1107): n is a, c, g, or t
  misc_feature (1109)..(1109): n is a, c, g, or t
  misc_feature (1137)..(1137): n is a, c, g, or t
  misc_feature (1141)..(1141): n is a, c, g, or t
  misc_feature (1146)..(1146): n is a, c, g, or t
  misc_feature (1153)..(1153): n is a, c, g, or t
  misc_feature (1156)..(1156): n is a, c, g, or t
  misc_feature (1158)..(1158): n is a, c, g, or t
tgagaagggcagtaaatacatttgttcaaagttataaaacaacggcattccgttctaactgggactatttacagtgggagatggtacatactgttgaggctgtagtgggaggaagaggtgggccaccgctggacactcttgggccgaggggcaagggtggacatagcattggcatggcagcaagagacttggctgagggcaggggtggaaggatgtctactgctgaagaccaaatcccttgccactctgtcggttgctactaagtcaaacgcaaacagaaacaggaaaagacagcaggagcacagaggccagcatctccctttccttatgccatggagccaggtgccaggcgtgggctggtccatctccctcctcagcctctgccaaagggctgctccagtgctcccctcagtggaactcctcagccaggcgctctgaaaccaaccacagtccactgaagttgaccaccctaccgagacagaccaaggctcacaggtgaaaacccctttcaacaaaattccttccaggtaggaatcagaatatgatgcgtttcccatctgccgggttctgctccatgggacagtagggacacttcagctttcctccattaatgagcttattgagtgcatctcgggagataacatggccacagatgagctaaatgggagggttggaatctgacgtctgctggcggaggatggggcaagcgaacacggagtggtaccagcacttcatgcctagttcaatctcaatcggtaactcgtccttgtgattccagaccccagtgcactgccgctgctcaatcacagccttgatgttcatcaacacaggcagcgccacacagccagaggcaaagctgacgctaagggggggactccacagaaagccccagcagggaacaggcgtcccggggtaaaggtctcacagatctctgcccagtggctgctgtccagcaggtggcagtagggtgacttctccaagcccagccgcagtaacaccaaggctgcccatcatcacctggatntcccgctggtgcancgagcaaagggctggaagtgccgagnatagctgagggcttcagctgcntcgcgggacctcntgcaagangngatgaagtcagtggtgagcctgactcanggantgttnattcagnagngngctg

SEQ ID NO: 319186 - DNA, 893 bp, Homo Sapiens
  misc_feature (550)..(550): n is a, c, g, or t
  misc_feature (726)..(726): n is a, c, g, or t
  misc_feature (757)..(757): n is a, c, g, or t
  misc_feature (859)..(859): n is a, c, g, or t
  misc_feature (877)..(877): n is a, c, g, or t
ccttttgtgtcgttctcttcagaatttgcccaacattcaacacaactatcaccatcatcctctttgtcttcacagtgatgaacacaagagtcatcaccgtgttcatcatgattacaaatgccttcagtgcaggcaacatccgaaccctcccgagaacctgtttcactcccttccatgctagatgaatatccacaatcactaccattacagtgtggagataagcctttctttattttaggggaccccaaaagattgccactgctaggacaggtacatgatgtattttcattggtaacaattacttctacacaagtattaccatcttcagtgctgccacaggctttgcagctgctattttctatgaagtctgtttccttctcttggcttacttccttttcatcttctttttttaagggagtaggaatatcacacacacacttattttttcgtctattcttccttttttggcgtttcttttcttgcttgagttctcttactcgttcctcttctgaaaattcctcacaaagttgttccaatctgctaatacccngtactttttccacggtcatctcaaaactcttgcgtaaagcatcaacaccaagatagaaaagcatctgccatgtctgctcttctgcccgtagcttctgccagattcgatgcagtctttcataaagatgaattcccaagcaggtcagaacttcttcttgagctatatctattgtcttngcatgcctttctcttcgccctcctgcgaacnctggctcagcacgacccaaaagatgtgcaatgaagtctgttcacagcaaacatgtatgtgtcgttcatgtggacagcaccgcaagccttcataaagtgcagnacagtagcccttttcttngctgcagtcaagttca

SEQ ID NO: 319187 - DNA, 994 bp, Homo Sapiens
aggtagcgaggcctgggtggcgaattcggcacgaggggagcattggggctttccagctctcacagaaccttcagcatccccagctgccggtcttggcatcttcgaagtaaggagagttttagatgcttctggatgttcaatgctagcacctttacagactggagcagctcgattttcttcgtatttactttcaagagcaagaaaagtgctgggctcccacttattttctccctgtggtgttccggagttctgctccatatccaccagaaagctggcggcccacggctttggcgcatccatggcggcaatggtgtccttccctccccagaggtatcactactttttagtgctggactttgaggccacgtgcgacaagccacagattcatcctcaggaaatcatcgagttccccatcctaaagctaaatggccggaccatggagattgagtctacctttcacatgtatgtccagcctgtagtccatccacagcttaccccattctgtacagagctcaccgggattattcaagccatggtggatggtcagccaagcctgcagcaagtgctggagagggtcgatgaatggatggcgaaggaaggcctcttagatccaaacgtcaagtcaatttttgtcacctgtggagactgggacttaaaagtcatgctcccaggccagtgccagtacttgggcttgccagtggcggattacttcaagcagtggattaatctgaaaaaggcttacagcttcgccatgggctgctggcccaagaatggacttctagacatgaacaagggcctcagcctgcaacacataggccggccccacagcgggcattgaacgactgcaagaacattgccaaacatcattgaagacactccgcctatcgaggcttcatcttcagcagacatcgaaaaccgttctgattgcccaaagaaaaggattgggcagggaaacagggttaccttgttgggccccacccataattcctccctc

SEQ ID NO: 319188 - DNA, 1108 bp, Homo Sapiens
  misc_feature (45)..(45): n is a, c, g, or t
cggcggcgcggacggcgacggcgccccccctcacccggacggcangacgcctgggtggcgaattcggcacgaggggactttgaggccacgtgcgacaagctacagattcatcctcaggaaatcatcgagttccccatcctaaagctaaatggccggaccatggagattgagtctacctttcacatgtatgtccagcctgtagtccatccacagcttaccccattctgtacagagctcaccgggattattcaagccatggtggatggtcagccaagcctgcagcaagtgctggagagggtcgatgaatggatggcgaaggaaggcctcttagatccaaacgtcaagtcaatttttgtcacctgtggagactgggacttaaaagtcatgctcccaggccagtgccagtacttgggcttgccagtggcggattacttcaagcagtggattaatctgaaaaaggcttacagcttcgccatgggctgctggcccaagaatggacttctagacatgaacaagggcctcagcctgcaacacataggccggccccacagcggcattgacgactgcaagaacattgccaacatcatgaagacactcgcctatcgaggcttcatcttcaagcagacatcgaagccgttctgattggccgaggacaggatggggcaggacagggtagctgtttggcccagcccagaatcctcctctccctcaccagaggggaagagggagagtggcatagctctgtgtccagagtgtccccagctgccctgtgggctcatgcccttggcgtgggcttgtgcccttgcaagggcttggccacttggcccttctggagcagacactttgtgccccccatccccacccctcaatctcagcccagtatcagcccctcccattgcgggcctgggctagggggacccaggcactcaccgcctcctccctggtacacaggcttctgtggggccaccaagcccctcctgtgccccctcccatccatagtgcatggtgtgtggtgcccccagggctccaggacagatcaggccccaccttgtgtctacccccatccccgctgtgaacgtgccactgaataaagtcggggaaacgaggc

SEQ ID NO: 319189 - DNA, 1022 bp, Homo Sapiens
  misc_feature (453)..(455): n is a, c, g, or t
  misc_feature (749)..(749): n is a, c, g, or t
  misc_feature (825)..(825): n is a, c, g, or t
  misc_feature (832)..(832): n is a, c, g, or t
  misc_feature (834)..(834): n is a, c, g, or t
  misc_feature (840)..(840): n is a, c, g, or t
  misc_feature (846)..(846): n is a, c, g, or t
  misc_feature (849)..(850): n is a, c, g, or t
  misc_feature (855)..(858): n is a, c, g, or t
  misc_feature (861)..(861): n is a, c, g, or t
  misc_feature (878)..(878): n is a, c, g, or t
  misc_feature (911)..(911): n is a, c, g, or t
  misc_feature (937)..(937): n is a, c, g, or t
  misc_feature (940)..(940): n is a, c, g, or t
  misc_feature (944)..(944): n is a, c, g, or t
  misc_feature (954)..(954): n is a, c, g, or t
  misc_feature (961)..(961): n is a, c, g, or t
  misc_feature (986)..(986): n is a, c, g, or t
  misc_feature (990)..(990): n is a, c, g, or t
  misc_feature (992)..(993): n is a, c, g, or t
  misc_feature (995)..(996): n is a, c, g, or t
  misc_feature (1003)..(1004): n is a, c, g, or t
  misc_feature (1006)..(1006): n is a, c, g, or t
  misc_feature (1011)..(1012): n is a, c, g, or t
  misc_feature (1020)..(1020): n is a, c, g, or t
  misc_feature (1022)..(1022): n is a, c, g, or t
acgtatttaaatccactttttattctttcacagattttaacaattatacacaacttttaacataaaggtagtgaaatctcaaggataaggaggcaatatatatggcctcttctattcgttattcaggatggaaggaaattttcaaagtacagtgtgtgagattcaacactggaaaaatacatatgaaacttgtttaattggctccacttaggaccagacacagcacaataaatacagaactgcatcatctttttaaaagatcattgtaattttaacacattcttactaaagaaatacatactatcagtgaccgatctgaaactctgtaacaggtgaagggagacttacgatgaatatctgagcataggttcgctagcatcttcacactcatacataaacattcttaaagggaataagaatgatttcaaattcaaaacaacaacaacaacaaannnacaaatttggtcaaactttcttcatcataccattcattgctatcacaatcctagtttgctggtaggtttaagaaagggatagaaagtttttgaaatccttttaatttctaccagtcttagggcctcttgagtaggccactttgggagccaactgatttagcagcaccatcaagtccgtttctcaacaaaccattgcataatttctgtcaatgttctcaaaggttaaaacgagttgtatagaagaatacctttcctcaatagcaggccactgtaaaaacatgtaatctgcaagantttaaacaaaactatcctgaattctctactgattgcttctttccttaatagaccaagagataggcattacctaagnggttaantnataatntactgnggnntaagnnnnatnctttatttatgctatcncaatttgggtatttgaagattgttagccatgtncacacaccctttcctcttcccaaagnggnagcnacggtgccancctattngtcaggaagagttaatgggaactgntgcncnntnnctgttcnncnatttnngaaccatnan

SEQ ID NO: 319190 - DNA, 1095 bp, Homo Sapiens
  misc_feature (29)..(29): n is a, c, g, or t
ttattacatgtaagtaacacctcaatctngaaaagtatcagggcaacaccacacactgcagaggggcagggctcctccggcagttactcacttcccttgaaacagaagctcaaacatggagtagtcttctgtgactaaacttgttttccgccctcccaacttccagggaagaaccttcttctgaataggatttgaggtaacttaggaaactgctctcaattcggaattttaaagttggtgaggaagtcgccagaaggggaagtcccagtaggaaaatcaaggtactatcaggatgaagtcagcacgcagagcaaggccagcgaggcccaggcgccaggccttggtccctgcccacctcaacccaggccagccagacagcacggactgccctacaaggtcacctcagagagatgggggtgttctctcactgctggcttttgatgagcccaggagggctcagcctttcactatcctccctaacaggcatttggggtgcagagatgctgacgcctgaataaggttgggattcggggcccttgggaacactgggcacctggtgggtgggtggaggggcaggacgggctgcagccatgtttcccttagaaacagactgctggaattaacgaactaaacaaatgaaccaaggtgcttcaccccccaaaaaagtgagttttgttctgcgtggagcgattgcctttgggaagccaccaaggccacctgccaacaggcaaatgctgtgctgccgtctgcctggctgactccggccctcccagtcctgcaagctcatggccaggacgataacgatgacaggggcaacaccatggtcctcgctgcccttcctggggcaggagggcccagaagactgataagctaaacccagggcctccctcggctgcttatctgcccagcacctttcctctaggtcctctcctcccaccagtacaggggtctgggagggggttgcagggggtcctgaaccacagatccctggagactcagtgggagcagctgtaccaggaatcaggcaccactccgctgctgtaagtctgcgtgagagccaccctcgtgccgaattcgccacccaggcctcgctcc

SEQ ID NO: 319191 - DNA, 1818 bp, Homo Sapiens
  misc_feature (539)..(583): n is a, c, g, or t
gacagtatccacggcgtatggtagcgaggcctgggtggcgaattcggcacgaggagacgggagcccctgggcacccagaggtacaggtgctgctcttgaccatgatgagcacggctccccagcctgtctgggatatcatgtttcaagtggctgtgccaaagtcaatgagagtgaagctgcagccggcatccagctccaagcttcctgcattcagtcctttgatgcctccagctgtgatatctcagatgctgctgcttgacaatccacacaaagaacctatccgcttacggtacaagctgacattcaaccaaggtggacagcctttcagcgaagtaggagaagtgaaagacttcccagacctggctgtcttgggcgcagcctaacttttcacaagatggacccttcatttcaagcttaggctggcgttacttttgctgtctagtcaggactaatcacggtgtttcagtgcggagtgccaagagtcctatcctgacgtcaggctctgggtgtcaacctctgacttattctgcagatgctcnnnnnnnnnnnnnnnnnnnnnnnnnnnnnnnnnnnnnnnnnnnnntcggggagagggtggtagcacagggcttgggatatcggcagtgtgggaaatgcgaagcatttctcatcattcatcatctctgctacattcatgtttctgcatgtcagcgagcgacactgtccctgcctcaggttggaggttttatcagccaaagtgttttttttcatgtatcgttcgttccattcatccactctgtgccttgtcagcctttgaaaggcttggttgctcccaggctgctgttctcagggaccttaaaagggacctggttagtcttggggcagagagtatctacttgggcactctcttccaagaaagaccttgtctccattttcattagacaatgcttcttgtgtgtgttctggaagatcttctaaatggaatgcttgttgcactgttcccaggcgagtggctgccatgagacctgaggaccacacttgggggaccaatcatgtccttcaccactgtgccttagaatcgcccctggacagagttcctgggcagaggggaaagcagctcccaggccttactcaggcctcaggtccatgggttgggcagccagtctgggcccttctcaggatcctcatctccatcctcatcctcttccttcacagcatttacttggagctctttgtgacacaccatgtcagtcatgatgaatcggccaacagccagcccttgccagctgacgtcacagtctaagatgggaaactgtggtacagatagacatgaagagagcttagcagtgattgaggtggtgactaaatatacagtcattgaataaataccatgtagcaagtgtactttgtggagtgttgagtaagtggaaaatggaaagccagttgcatttagagatgataggcctaaagggaactgtcttctgtcgagaagtaaaggaaacttcatgaaggatgtagaagcttagctgcctcagagaagagagaacctgaagatctgaggcaagctggacaggagaggtggatatttgttgatggaagaattcaagtttataatcaattcccacttagcacctactgtgtgctaggaacttgaatgtgtatgtttgacaagtcctgcttggcctgatgggtgggagaaggaacctgagcctggctgagatggctaggcggagggctttgaagtccaagcagctgaactggctgggtgggtttctacctttgaaactgcaagacttgtttggagctcttaattacaatatctgatatttttacagtctg

SEQ ID NO: 319192 - DNA, 853 bp, Homo Sapiens
  misc_feature (6)..(6): n is a, c, g, or t
  misc_feature (12)..(12): n is a, c, g, or t
  misc_feature (15)..(15): n is a, c, g, or t
  misc_feature (20)..(21): n is a, c, g, or t
  misc_feature (27)..(27): n is a, c, g, or t
  misc_feature (59)..(59): n is a, c, g, or t
  misc_feature (63)..(63): n is a, c, g, or t
  misc_feature (69)..(69): n is a, c, g, or t
  misc_feature (71)..(71): n is a, c, g, or t
  misc_feature (82)..(82): n is a, c, g, or t
  misc_feature (86)..(86): n is a, c, g, or t
  misc_feature (89)..(89): n is a, c, g, or t
  misc_feature (99)..(99): n is a, c, g, or t
  misc_feature (109)..(109): n is a, c, g, or t
  misc_feature (111)..(111): n is a, c, g, or t
  misc_feature (118)..(118): n is a, c, g, or t
  misc_feature (121)..(121): n is a, c, g, or t
  misc_feature (139)..(139): n is a, c, g, or t
  misc_feature (141)..(141): n is a, c, g, or t
  misc_feature (144)..(144): n is a, c, g, or t
  misc_feature (146)..(146): n is a, c, g, or t
  misc_feature (148)..(148): n is a, c, g, or t
  misc_feature (167)..(167): n is a, c, g, or t
  misc_feature (169)..(170): n is a, c, g, or t
  misc_feature (173)..(174): n is a, c, g, or t
  misc_feature (177)..(177): n is a, c, g, or t
  misc_feature (180)..(180): n is a, c, g, or t
  misc_feature (185)..(185): n is a, c, g, or t
  misc_feature (196)..(196): n is a, c, g, or t
  misc_feature (226)..(226): n is a, c, g, or t
  misc_feature (229)..(229): n is a, c, g, or t
  misc_feature (243)..(243): n is a, c, g, or t
  misc_feature (252)..(252): n is a, c, g, or t
  misc_feature (268)..(268): n is a, c, g, or t
  misc_feature (278)..(278): n is a, c, g, or t
  misc_feature (288)..(289): n is a, c, g, or t
  misc_feature (291)..(291): n is a, c, g, or t
  misc_feature (301)..(301): n is a, c, g, or t
  misc_feature (312)..(312): n is a, c, g, or t
  misc_feature (319)..(319): n is a, c, g, or t
  misc_feature (348)..(348): n is a, c, g, or t
  misc_feature (353)..(353): n is a, c, g, or t
  misc_feature (368)..(368): n is a, c, g, or t
  misc_feature (370)..(371): n is a, c, g, or t
  misc_feature (378)..(378): n is a, c, g, or t
  misc_feature (384)..(384): n is a, c, g, or t
  misc_feature (386)..(386): n is a, c, g, or t
  misc_feature (392)..(393): n is a, c, g, or t
  misc_feature (396)..(396): n is a, c, g, or t
  misc_feature (398)..(398): n is a, c, g, or t
  misc_feature (840)..(840): n is a, c, g, or t
  misc_feature (848)..(848): n is a, c, g, or t
  misc_feature (850)..(850): n is a, c, g, or t
tatgcngacacnctngtcannttcagngcggaggttccgtaacaaatttagttctctantttnataaantncatttcattantgtngtnaattattatnaattttaagnantcatttnagnaatcaggtttctcagaantnttntntnttaaacagaagagacaatngnnttnngtngtnagatncaagggggganacaggggttgggtggaaaggaacccccccncanccaaaccccctganatagaggcncccacacgcacagganatgctaaaanaatctcaaanncnagcacaattntagagtagaanaagtcanccttttagactaataaaataaatggctgncatgntcactctgagggaangnnaaatgantgaaangnacagannggngnattggcagacaattattctagggatattttcagattttacttcatttcttgaaatgcgtgtgccatatgcaattgcatttcttgtgccaagaaactaatagaacttatttcactttacctttttttaaaatgtgaatttagttattatagttcaattttatggccttacagatggcttttattttgtttgcagctgacactgcagttcctttcatgcaaaataccataaactgtttgatgaaaatcatgcccctaatggaaactctctagtttttccatataactatcctactgtacatgtttaaacatattttatttttgctccaatggcttaatgtgaaaagctcctgcagataagtggacctgtcatgtggttaatcttgtttaagccaattcattaactgtgtactgatactgatgctatgttttttttaaatggatnttattccngntga

SEQ ID NO: 319193 - DNA, 2039 bp, Homo Sapiens
  misc_feature (162)..(189): n is a, c, g, or t
  misc_feature (579)..(602): n is a, c, g, or t
attgtgggggaggaatccccaagcccctatgttcatgcccccagggttttccctagggaaaccaggttatgcccacgtttcccctttcctctcctggggcccccgccgccaaaacgaaaggttttggaaaactttttgggggccggggccgcccgacatgtnnnnnnnnnnnnnnnnnnnnnnnnnnnngctagattttactaaacacatgtatcacattcatatatattgtttcttggccccactgccaaaggaagtcagtcagtaatttcacaaccgttatcagagtttggaagcagaaatagctgttaactaaaatctcccactgctcagactactttctgccctaatggccattactatccagtctgtattgctacaagggacccactggtaccccttttagattctatcaaaaggaacagggttttcctagaggcaggcagcctggtggtatggcacagcagaagcttactgctaatgaaatgggaacctccccctcccttgtggtttcagcacagaacctgaatgccaggaaaaattcctgggccaagaagctaaagctaaagaaaccttccnnnnnnnnnnnnnnnnnnnnnnnncaaactgtagggtcacttttgattgaggcaaaggggtcctactgtaagtggaaaagactcactcccctaacataagttttcactgtggtgggatggtgccgcccgatatgcttgatatgcttttccttccacatgttaagctaggaaacctaacaggatgtcagcagggcagttaactctggactcagagccctcaagggcatgtggcagaacctcatggacatcacaagaccatcagtctgaatccaggtcgtgggggctgtcatagccgaactccttctgcacatccagagggtacttgctccacatccgctgtctgctgctgcctctttcctcctcactcaggctgttgtagtcagcagagcctctggaatcctcatctccatcactgctctcctcctctgggtactcattgcgccagttattctcactgttctcgtcatcttcatcgtcgtaaatgtcctctggttcttgatcatcattcaccagctcccattcttggctgtagggctgcacggagaggatgttctcaatccagcctggagtggccgtctccaagtagtaaatgtcatacacatagtcatcgtgtttttgttcttcctggcgcctgactcctggtccatcctcagacacagtcaatcgctcacggatcaactctacagaattgcagaggatcacatctgggtcagatgttttgcaggagcctgcagaggcggcttcaggttctccctcctcgtggacaaggtctaacaactgaaagcccgagttcccggcggcttctgggttccccggcgtgtactcggactcctggccgctcgcggtggtccccaaggatcggcggctggaaagcacccggtagcggccctcctgccggacctcccgagccgaggcgcggagattacggcggacacgctgctggctgtcccgtgacgggcgcagaacttcccgcaggagaggctggactggttcctcctgggagcacacagtggccaccaagtggaagacattattctccgccgctctctccaaaccctccgacgtcttctgtgccgctgactcgaccgcgtcgctccggaggcgtttacaagcgagcacaagagcctccgccggctccgcactgcgcttccgcttcacccggagtacagcggtcctggcggcctccatagtggcacagaagacgtcggagggtttggagagagcggcggacaataatgtcttgcacttggtggccactgtgtgctgccaggaggaaccagtccagcctctgctgcgggaagttctgcgcccgtcacgggacagccagcagcgtgtccgccgtaatctccgcgcctcggctcgggaggtccggcaggagggccgctaccgggtgctttccagccgccgatccttggggaccacctcgagcggccaggagtccgagtacacgccggggaaccc

SEQ ID NO: 319194 - DNA, 1082 bp, Homo Sapiens
  misc_feature (946)..(946): n is a, c, g, or t
  misc_feature (953)..(953): n is a, c, g, or t
  misc_feature (963)..(963): n is a, c, g, or t
  misc_feature (983)..(983): n is a, c, g, or t
  misc_feature (1001)..(1002): n is a, c, g, or t
  misc_feature (1006)..(1006): n is a, c, g, or t
  misc_feature (1028)..(1028): n is a, c, g, or t
  misc_feature (1033)..(1033): n is a, c, g, or t
  misc_feature (1052)..(1052): n is a, c, g, or t
  misc_feature (1057)..(1057): n is a, c, g, or t
  misc_feature (1063)..(1063): n is a, c, g, or t
  misc_feature (1069)..(1069): n is a, c, g, or t
ttcaatgtcaaatgcactttactgggcccctgggtccccaacactgtcctcaccaaggctggggcaccccattcccagcaccaccagctgcccaggaagcaggacggatagagggaacacatgtggaatggctgttctcctaccccagaggtgccggatgatgttgacagcacggctgcttccctctcccctgcagcttctgtccccacccagcagcttggcctttcccatagcagggaagggggatacctggggcttcaaaccagccacctgctcctgcttaaaatggggcaaggggccatttgcaaaattcttcgaggggcagtggtgaggtagaaggggtggcagcctgctcctgtctgggagagggctgggcagacactgggagccgggcagacactgggagccgggctggctcttgcttcaggcccagagccctgggccctgctcgctgaggaagctggtggttggagcggcgaggttcagccagctgaggctggagggagtactgggtggccaggaggggtagccagtccaactcggctctcctcagcacccccagccatgggtcaccagtcccgctcagcaggttctcggtaggggaggcctaagagcctgaagacatccttctcagtgggagtgggcagcactcggccaggccccaccttgcagccatgggtgttccggaccacagcagtgctgagggcatgttctgacagactcatgcccttggttttggccagggctcgcatggagcggttgaagtgtgcagagccggtgaagtagagcagggcacaggcaaactcgctatagggcaccacgatgatgtccaggcgccggtgccgccgccctggccctgggagccggcacacccccaagtacttctgttgctgaccattctcctcttggctcaccaagtcatctgtgaggaacccttcctgccgangactgtnaaggaggggntgaagatacccggtgggacngccatctgggtgagtaannacangtcgaatcacacaggtcgcttncccgnggtatgaacaaatgcaaancaganccagantaaagnctgtgttcttctg

SEQ ID NO: 319195 - DNA, 1092 bp, Homo Sapiens
  misc_feature (13)..(13): n is a, c, g, or t
  misc_feature (15)..(15): n is a, c, g, or t
  misc_feature (33)..(33): n is a, c, g, or t
  misc_feature (35)..(36): n is a, c, g, or t
  misc_feature (43)..(43): n is a, c, g, or t
  misc_feature (45)..(45): n is a, c, g, or t
  misc_feature (56)..(56): n is a, c, g, or t
  misc_feature (74)..(75): n is a, c, g, or t
  misc_feature (99)..(100): n is a, c, g, or t
ttctggtccaaancnaaattgaggcatcgtcgnannccaagantnacattgttttntgagcaagcaccattttnncagcccaccagctaacgcactccnntttagctccttcttgatgtaataaaaggttgtggagagttgtaatggcataaaacaacacagaatccactggtgaaccaagcattttcaccagggcaggaatgcctccagacttaaagatggccagtaagccctcacgatgatgggaaaggttatgcaaggtcccagcggtacaacgagctgtttctacatcatttgtattctgcatggtacgtacaatagcagacaccatctgaggagaacgcatgatagcgtgtctggaagcttcctttttagaaagctgatggaccataactgcagccttattaaccaccacctggtcctcgtcatttagcagttttgtcagttcagggattgcacgtgtggcaagttctgcatcatcttgatagttaatcaagtttacaactgcatgtttcagcatctgtgatggttcagccaaacgctggacattagtgggatgagcagcatcaaactgtgtagatgggatctgcatgccctcatctaatgtctcagggaacatagcagctcgtaccctctgagctcgagtcattgcatactgtccatcaatatcagctacttgttcttgagtgaaggactgagaaaatccctgttcccactcatacaggacttgggaggtatccacatcctcttcctcaggattgcctttaccactcagagaaggagctgtggtagtggcaccagaatggattccagagtccaggtaagactgttgctgccagtgactaacagccgcttttctgtctggttccatggccatgtccaactccatcaaatcagcttgagtagccattgtccacgctggattttcaaaacagttgtatggtatacttcaaataccctcaggggaacaggctcctcccgccgcgggagtccgaccgtcctcgactgcggtggcggctcggcggggactgaagctgctcctcagaccttcctaccgtctccgcctcccctcgctctccgctcccggggccg

SEQ ID NO: 319196 - DNA, 329 bp, Homo Sapiens
  misc_feature (173)..(182): n is a, c, g, or t
ttttcagttttggaattctttattactttgaacccaagagccactgataactggcacaatccaatgaaacagaggaagcagcagcttaaacaaaggaaaatacatttaagattataagtctgggggggcggttacaagcttaaaaagtgacccagacagggatatcattgctnnnnnnnnnntccccttgtgacctgggtacattttgcaaagccacaggtttgcaatgttacacaagggccaaaggaggccatgagttgtctttggttgtggggacagagggtaactgttcatgaaaatagtgagtgtctgaagattaagaaaatcat

SEQ ID NO: 319197 - DNA, 1376 bp, Homo Sapiens
  misc_feature (44)..(97): n is a, c, g, or t
  misc_feature (440)..(440): n is a, c, g, or t
  misc_feature (478)..(478): n is a, c, g, or t
  misc_feature (508)..(510): n is a, c, g, or t
  misc_feature (518)..(523): n is a, c, g, or t
  misc_feature (528)..(528): n is a, c, g, or t
  misc_feature (531)..(531): n is a, c, g, or t
  misc_feature (536)..(536): n is a, c, g, or t
  misc_feature (540)..(540): n is a, c, g, or t
  misc_feature (545)..(545): n is a, c, g, or t
  misc_feature (704)..(704): n is a, c, g, or t
  misc_feature (710)..(710): n is a, c, g, or t
  misc_feature (717)..(717): n is a, c, g, or t
  misc_feature (735)..(735): n is a, c, g, or t
  misc_feature (816)..(816): n is a, c, g, or t
  misc_feature (863)..(863): n is a, c, g, or t
  misc_feature (888)..(931): n is a, c, g, or t
  misc_feature (1258)..(1302): n is a, c, g, or t
  misc_feature (1320)..(1320): n is a, c, g, or t
  misc_feature (1343)..(1343): n is a, c, g, or t
ctcttttaccattcctctctttttgttctcgcccagagtgggtnnnnnnnnnnnnnnnnnnnnnnnnnnnnnnnnnnnnnnnnnnnnnnnnnnnnnnaactccccatccccctatgcagggtgtcatttcaccatccacatccacatccttgtttgtgtttctggccctcgtcctccctgcctctcatctgcctccccaacccccacctacccactgctcccaggggtctctccaggggcagggggattttaggagatggggtgggggccagcccctactggacccttgtaatctgatttggagaccatccccccgatgggaccagcagccccgccggcccactgggggtccctcttaacatctgcttgttgcgggggtcagtcatgagtgccagggtctggctggggtcttggcactgtcttcctggccggggcctganaccttagcccccagccggcctgagtgggggatattganacccccagctaaagcacaagcaccttagtnnnccctcctnnnnnnccgcntcntgggntgcnacccnaccccagcgtttaccccaaagcacaatgccctggtcacttggcaagcggctgggcctgacggaggccgaggggcagaccggggctccagccagacccctgaaaggaagcaggtgctcccccacttccaggccttagttggggtgggggggccagctccngggccnggggtcntctcacccccaccccctngtcctgggtaggcccctgcctgcccctgtctgccttttcctcgggtgtccctcctcgagcccctgtggcattggcttgggnggcagagcccacttgtttcagggacccctaggaggtgccccctggcncccaggactgtgtgtgggtccggcnnnnnnnnnnnnnnnnnnnnnnnnnnnnnnnnnnnnnnnnnnnnaggaaactcctcaccaggagagccaaagacagggttgtgccttaccccaggagccacccctgtaccccccttgccctgccattcaccctccacccctacccctgggcggcctgctgctttttccttctcttcctcccctgccctgagctgcatggttcccccaccctgggcagccaggaaggaatctgaatggagaatcaccaaccaccagagaaaaaagactgtggggccctcccctgccaactccccttccctggccgcccactcaacccacacctctttcacgcaggacaggctgcccaccctgtccacgtgaagtgccaacgnnnnnnnnnnnnnnnnnnnnnnnnnnnnnnnnnnnnnnnnnnnnnagtgagattgcacatttnactactgtaaggagaggagcggngttggcaaatgtgaaccatgagaatatcagtga

SEQ ID NO: 319198 - DNA, 446 bp, Homo Sapiens
cagctgcatgaggctggaatgggccttgaggagcccgggggtgcccctggccccagtgtaccccttcccccatcacaggtgatggcacccccttctgttgttggaatgggcttctggggtctgactggtgtttagtgttgcaacttagcctcagctggtgggatggtggtggtctttggggatcccctggccccagggtccatctccaagagcctgtgtgccctgcagggtgtggggctggcctcgctcgtggcacctctgctgatctcacaggccatgggactggccctctatgtcctgccagtgctgggccaacacgttgccacccagcacttcccagtggcagatgctgaggctgtggtgctgacactgctggcgatttatgcagctggcctggccctgccccacaatacccaccggtaagaggctgggctggttgttggggg

SEQ ID NO: 319199 - DNA, 2087 bp, Homo Sapiens
gaaacagacactcatttatttccccagaaggaggcagaatggggtccttggggagtctctgtcccagcccggacaggcagatctcacttccagaagagcacattccagaaaagcagccagcaggggtagaggcccagggacagcagtgggaagagcagggcgccgtagtgttggtgctccagcacaccctgggctagcgctgccaggaagagctgccagccctcggccagtgacagtggcgcctcctgcagctcccgccacaggaacaggctgccaaggagcgtggctgccgggctggtcagcaccagcagggcagcatagagggtccggggcccatgaggcttggcaagcgcagcagtgggcaccatggtggtggccagcaggaagcccagtgagaagttggtgagggcgatgcagcccagctgcagtgctaggtagatcagggctaccagcttcagtgccatccagcccctgtctggggcctgtgtgcttaccacccggtgggtattgtggggcagggccaggccagctgcataaatcgccagcagtgtcagcaccacagcctcagcctctgccactgggaagtgctgggtggcaacgtgttggcccagcactggcaggacatagagggccagtcccatggcctgtgagatcagcagaggtgccacgagcgaggccagccccacaccctgtgatgggggaaggggtacactggggccaggggcacccccgggctcctcaaggcccattccagcctcatgcagctgcatccacagttccagagccttgagaccaaggaccaggagcaagaagccgacagcgggcatgtagaggccgatggagacgaagcgggagaggccggggagcaagtagaggaagaaggactggtgcaggcgctccaggaggtggttgagcttgcggaacatgccctccaaagccttgcccactgccaccaggtcatacttgtactggcggaagctattgatgccacgcagggttagggcctccacacggtagcgcaggaagaggccatgggagccgtgggggcggccggaggcctgccgcagaaccatgagcagcagtgtctgcaggccctgcagcggtccatccaatgatgtccagtcctcgggctgcagcttgccctgaagcgtgcacaacaggccccctttctggcagaaggtctggaagagattgagcaggtcaaggttgggcagctgcccgttaagcccctccacggccacatcgaggctggtgaccacatcactgctcagctccagggccacggctgcctgaatggccccagctcggccctgcaggggagacgactgcatgccagtgacattgacatcgtggtaggcttcaagccaagcctcagtgcccagaaggtcatgttctgttaccaggaagacgatatctttggcccaataaatctgcccccggaagtgggcagccagtgccagcagcagccccacagcctggctgttggtagagtcagagccacagggcacggtgagcacaagcgactcggtgctggcagcacgcggggcccgcaggatgccgtacacgttggtgcccgacaccatatagcgctcgtgggtctcatctgggaagggcagtttccgggagaaactctgcgtgtagacctccagccctactgaccgcatcgtccgttcaagccaggccactggcagagcccccgacttcttgcggtgggcggcgaagtcccgggcaaaagcccgggcacggtctccgcccgcaaactgctcctccaccatggtggagcccatggcgttctccgacatgtaagtgcgctgggtcagcggcgggaaaaccagcgccaagaaccaggcgatgcccgccacgtagctcagcacgcacaacggcgcgttgaggcgcagcactaggcgggcgagcgcgcgccggcgaaccgggtccgacaggaggcccatggcggggcagggcggcgcggctacggaccctctcccgcctccaactaccgccgcggtgcccacaggctgctcctgtcagacccggggacccgtctcgcccgcacttccggtcccagagacgctcgcgacggcgcgcat

SEQ ID NO: 319200 - DNA, 934 bp, Homo Sapiens
  misc_feature (21)..(21): n is a, c, g, or t
  misc_feature (460)..(460): n is a, c, g, or t
  misc_feature (481)..(481): n is a, c, g, or t
  misc_feature (532)..(532): n is a, c, g, or t
  misc_feature (534)..(534): n is a, c, g, or t
  misc_feature (540)..(540): n is a, c, g, or t
  misc_feature (550)..(550): n is a, c, g, or t
  misc_feature (554)..(554): n is a, c, g, or t
  misc_feature (560)..(560): n is a, c, g, or t
  misc_feature (572)..(572): n is a, c, g, or t
  misc_feature (575)..(575): n is a, c, g, or t
  misc_feature (583)..(583): n is a, c, g, or t
  misc_feature (590)..(590): n is a, c, g, or t
  misc_feature (592)..(592): n is a, c, g, or t
  misc_feature (598)..(598): n is a, c, g, or t
  misc_feature (621)..(621): n is a, c, g, or t
  misc_feature (628)..(629): n is a, c, g, or t
  misc_feature (632)..(633): n is a, c, g, or t
  misc_feature (636)..(636): n is a, c, g, or t
  misc_feature (641)..(641): n is a, c, g, or t
  misc_feature (658)..(659): n is a, c, g, or t
  misc_feature (661)..(661): n is a, c, g, or t
  misc_feature (670)..(670): n is a, c, g, or t
  misc_feature (673)..(673): n is a, c, g, or t
  misc_feature (679)..(679): n is a, c, g, or t
  misc_feature (683)..(683): n is a, c, g, or t
  misc_feature (694)..(694): n is a, c, g, or t
  misc_feature (700)..(700): n is a, c, g, or t
  misc_feature (713)..(713): n is a, c, g, or t
  misc_feature (724)..(724): n is a, c, g, or t
  misc_feature (729)..(729): n is a, c, g, or t
  misc_feature (737)..(737): n is a, c, g, or t
  misc_feature (746)..(746): n is a, c, g, or t
  misc_feature (751)..(752): n is a, c, g, or t
  misc_feature (757)..(758): n is a, c, g, or t
  misc_feature (772)..(772): n is a, c, g, or t
  misc_feature (775)..(775): n is a, c, g, or t
  misc_feature (785)..(786): n is a, c, g, or t
  misc_feature (790)..(794): n is a, c, g, or t
  misc_feature (796)..(796): n is a, c, g, or t
  misc_feature (806)..(807): n is a, c, g, or t
  misc_feature (810)..(810): n is a, c, g, or t
  misc_feature (812)..(812): n is a, c, g, or t
  misc_feature (840)..(840): n is a, c, g, or t
  misc_feature (842)..(842): n is a, c, g, or t
  misc_feature (845)..(845): n is a, c, g, or t
  misc_feature (851)..(851): n is a, c, g, or t
  misc_feature (853)..(853): n is a, c, g, or t
  misc_feature (855)..(855): n is a, c, g, or t
  misc_feature (878)..(878): n is a, c, g, or t
  misc_feature (885)..(886): n is a, c, g, or t
  misc_feature (888)..(888): n is a, c, g, or t
  misc_feature (891)..(891): n is a, c, g, or t
  misc_feature (894)..(895): n is a, c, g, or t
  misc_feature (902)..(902): n is a, c, g, or t
  misc_feature (906)..(906): n is a, c, g, or t
  misc_feature (910)..(910): n is a, c, g, or t
  misc_feature (913)..(913): n is a, c, g, or t
  misc_feature (915)..(915): n is a, c, g, or t
  misc_feature (917)..(917): n is a, c, g, or t
  misc_feature (919)..(919): n is a, c, g, or t
  misc_feature (924)..(924): n is a, c, g, or t
  misc_feature (927)..(927): n is a, c, g, or t
  misc_feature (930)..(930): n is a, c, g, or t
ttttaaaatgagaaacaagcntttgtgtttattaaccaaggagagggaagtcaaagcaatgcagactcctaaccagtccctcctatagtctgcccagctaggccagctgccaaggactaggaagagcagtggataggcccctccccactgccccgaccccagggtgagttctgctgggtaaggaagaggaagtcagcaaaggacagaggccaaggaaggaaggaggaaacagagccgctggggagacaggtttcaggagatcccttggcccctcactcacagtgggggaggggcaaagcaccgcaattgcagccccacaagaggaactaagcaggagttcactcatgtcaaaaaccttgtattgggggaggggaggagggggttctcaggtgtccaaagccaagaacaaaacccttggagagtcagttcttgcccaacaatggctggtccagcctctaancctttgcctccataccaagtncacaacagggtggagcctctgacacggccgtttaaaaaatggatgcaaaanangtccanggaccacttncctnttttanatccgtcctttngcnaattccangccccantngcgccnagccttgtcagcggcggggctcncgccgannccnntcnttaancccatgacaaccacttnnancacgcgggncantgcgcnccanccaccggacancgccanaggggaacgcgcncccggggcccnctccngcaacagngaccgagcngcggnngagannggcccccttcaganctnaacggcccanntttnnnnncnggcggggganncgntntccgagctggcccgttccaggtgggcananccnaccctntngncttctccgggttccggccgcgcngttaaanngngtnganntcggggntacnatanaanangntngctcnatncgntttg

SEQ ID NO: 319201 - DNA, 1292 bp, Homo Sapiens
  misc_feature (145)..(145): n is a, c, g, or t
  misc_feature (857)..(857): n is a, c, g, or t
  misc_feature (931)..(931): n is a, c, g, or t
  misc_feature (1250)..(1250): n is a, c, g, or t
  misc_feature (1288)..(1288): n is a, c, g, or t
ctcggaacgctgtcccccgcagcgacggcccgttccacctcgcgatctgccgggtacccgggcggcgtggcgctcggcctccagggatccactgtgcggtgccaaaaaagaggcggaggctcgcggcacagctctcccggcgcantctcgggccgccgccgccgccgctcccaggcccgtctcccggcccgtggcagtcggggctcgcggagaaaacaagtccagccctgctgggagttttctgccacacagatttgcggaagaacctgaccgtggacgagggcaccatgaaggtagaggtgctgcctgccctgaccgacaactacatgtacctggtcattgatgatgagaccaaggaggctgccattgtggatccggtgcagccccagaaggtcgtggacgcggcgagaaagcacggggtgaaactgaccacagtgctcaccacccaccaccactgggaccatgctggcgggaatgagaaactggtcaagctggagtcgggactgaaggtgtacgggggtgacgaccgtatcggggccctgactcacaagatcactcacctgtccacactgcaggtggggtctctgaacgtcaagtgcctggcgacccgtgccacacttcaggacacatttgttacttcgtgagcaagcccggaggctcggagccccctgccgtgttcacaggtgacaccttgtttgtggctggctgcgggaagttctatgaagggactgcggatgagatgtgtaaagctctgctggaggtcttgggccggctccccccggacacaagagtctactgtggccacgagtacaccatcaacaacctcaagtttgcacgccacgtggagcccggcaatngcgccatccgggagaagctggcctgggccaaggagaagtacagcatcggggagcccacagtgccatccaccctngcagaggagtttacctacaaccccttcatgagagtgagtggccctggctcctccggtgggcgtggctcggcacagcctgcagcccggtgctggcctccgcagggagaagacggtgcagcagcacgcaggtgagacggacccggtgaccaccatgcgggccgtgcgcagggagaaggaccagttcaagatgccccgggactgaggccgccctgcaccttcagcggatttggggattaggctcttttaggtaactggctttcctgctggtccgtgcgggaaattcagtcttgatttaaccttaattttacagcccttggcntgtgttgtcggacattgtaatgcatatttataagagangttt

SEQ ID NO: 319202 - DNA, 405 bp, Homo Sapiens
aatgccgccatccgggagaagtctgcctgggccaaggagaagtacagcatcggggagcccacagtgccatccaccctggcagaggagtttacctacaaccccttcatgagagtgagggagaaagacggtgcagcagcacgcaggtgagacggacccggtgaccaccatgcgggccgtgcgcagggagaaggaccaagttcaagatgccccgggacctgaggccgcccctgcaccttcagcaggatttggggattaaggctcttttaggtaactggctttcctgctggtccgtgcgggaaattcaagtcttgatttaaccttaattttacaggccttggcttgtgttatcaggacgttttaatgcatatttataagagaagtttaacaagtatttattcccataaa

SEQ ID NO: 319203 - DNA, 1411 bp, Homo Sapiens
cagagaggaggaagctcctgccggctgagcgggcctggaggaagtgagcagcggggctcctgcctcccggcctggtccccgaagaccccagaagaacccggaacttgcttccattcggaatccagggaccaccctttgcactcagtaggcctttgttttcctgcgtggaaagcggttgggcttgggaggcgatggagccggagttcttgtacgacctgctgcagctccccaagggggtggagcccccagcggaggaggagctctcaaaaggaggaaagaagaaatacctgccacccacttcccggaaggaccccaaatttgaagaactgcagaaggtgttgatggagtggatcaatgccactcttctccccgagcacattgtggtccgcagcctggaggaggacatgttcgacgggctcatcctacaccacctattccagaggctggcggcgctcaagctggaagcagaggacatcaccctgacagccacaagccagaagcacaagctcacagtggtgctggaggccgtgaaccggagtctgcagctggaggagtggcaggccaagtggagcgtggagagcatcttcaacaaggacctgttgtctaccctgcacctccttgtggccctggccaagcgcttccagcccgacctctccctcccaaccaacgcccaggtggaggtcatcactatcgagagcaccaaaagtggtctgaagtcagagaagttggtggaacagctcactgaatacagcacagacaaggacgagcctccaaaggacgtctttgatgaattatttaagctggctccggagaaagtgaacgcagtgaaagaggccatcgtgaactttgtcaaccagaagctggaccgcctgggcctgtctgtgcagaatctggacacccagtttgcagatggggtcatcttactcttgctgattggacaacttgaaggcttcttcctgcacttaaaggaattctacctcactcccaactctcctgcagaaatgctgcacaacgtcaccctggcgctggagctgctgaaggacgagggcctgctcagctgccctgtcagccctgaagatatcgtgaacaaggatgccaagagcacactgcgggtgctctatggtctgttctgcaagcacacgcagaaggcacacagggacaggacgccccatggagccccgaattgaccctcactgcctccaaagcccagagcctgacctgtcagcccagctggagggcccgaggctgcagggtgtcctcccacagtcccgctgtttcctgtgcattcgtgacccgcttccctcccaccctgtctcctgtctccatcgttggattatctttgaacccccttgtgtggatcattttgagccgcctggccttgctcagtttattttaataaaagtattctggg

SEQ ID NO: 319204 - DNA, 1702 bp, Homo Sapiens
  misc_feature (1632)..(1632): n is a, c, g, or t
atgaacttttcccggcccacatccctaggccttcctgatgcgcttgcctgctccctggtctctctgcatggggaaggagtgttcccagcttgcaaactccagctttgcctgtgagaggaacaagcgtccctgatccagaaggtgttcggatggagatggcgagttctgctggctcctggctctctggctgcctcatccctctcgtcttcctccggctgtctgtgcatgtgtcaggccacgcaggggatgccggcaagttccacgtggccctactagggggcacagccgagctgctctgccctctctccctctggcccgggacggtacccaaggaggtgaggtggctgcggtccccattcccgcagcgctcccaggctgttcacatattccgggatgggaaggaccaggatgaagatctgatgccggaatataaggggaggacggtgctagtgagagatgcccaagagggaagtgtcactctgcagatctcttgacgtgcgccttgaggaccaagggtcttaccgatgtctgatccaagttggaaatctgagtaaagaggacaccgtgatcctgcaggttgcagccccatctgtggggagtctctccccctcagcagtggctctggctgtgatcctgcctgtcctggtacttctcatcatggtgtgcctttgccttatctggaagcaaagaagagcaaaagaaaagcttctctatgaacatgtgacggaggtggacaatcttctttcagaccatgctaaagaaaaaggaaaactccataaagctgtcaagaaactccggagtgaactgaagttgaaaagagctgcagcaaactcaggctggagaagagcccggttgcattttgtggcagtgaccctggacccagacacagcacattccaaattcatcctttctgaggaccaaagatgtgtaaggcttggagacagacggcagcctgtacctgacaacccccagagatttgatttcgttgtcagcatcctaggctctgagtacttcacgactggctgccactactgggaggtgtatgtgggagacaagaccaaatggattcttggagtatgtagtgagtcagtgagcaggaaggggaaggttactgcctcacctgccaatggacactggcttctgcgacagagtcgtgggaatgagtatgaagctctcacatccccgcagacctccttccgccttaaagagcctccacggtgtgtggggattttcctggactatgaagcaggagtcatctctttctacaatgtgaccaacaagtcccacatctttactttcacccacaatttctctggcccccttcgccctttctttgaaccttgccttcatgatggagggaaaaacacaggacctctagtcatttgttcagaactacacaaatcagaggaatcaattgtccccaggccagaaggggaaggccatgctaatggagatgtgtccctcaaggtgaactcttctttactacccccggaggccccagaggtgaaggatataatcctgtccttgccccctggccttggcccagcccttcaggggctcaggggtccttctttttagggatatgccacattacctgctcccattaccatccagcccagcaccctggacttnagtcgcctggcccaaccccatgattatgggacgttttttcaccttaacccaatccagacctttttgtggt

SEQ ID NO: 319205 - DNA, 1286 bp, Homo Sapiens
  misc_feature (215)..(215): n is a, c, g, or t
  misc_feature (531)..(644): n is a, c, g, or t
  misc_feature (1243)..(1243): n is a, c, g, or t
aaaacattgttgctggaattgactctgaaacaactgttttcaaatctcttaaggcccccgttttaggaaacctgaccatttggtcggtaagggacctaccagttccctaatgccggggtcaggtgggggggttcttctggtataagttcttgcccctgccccccggagggcggataagggcttagcgcttctgtaaaccaacctttgaaagccantgcccccgcccatgggctcgcgttgtcattattgccaccggcgtctcaaccgccccagattttgggtagctcatcgattcctttcttttctgaggaccgtgctgtcacaatcaaaacacacagcatctgctgagtagaaagctttcctcagctctgagtggaggaccatcgctggaagaattttcctcgtttctccagtgctagatttctaggagacgacactcttctgttccttccctagataaaaacgcagcacaaagttctgtctacagatttcctcaagaaagacctgtggattctgcaagagcaagagccnnnnnnnnnnnnnnnnnnnnnnnnnnnnnnnnnnnnnnnnnnnnnnnnnnnnnnnnnnnnnnnnnnnnnnnnnnnnnnnnnnnnnnnnnnnnnnnnnnnnnnnnnnnnnnnnnnctgtgtcctgggcctccggggctcctgcggctgcaaccttccggctgcagggggccagcgccggctccgacgctcgggcgagcagttcccagggaggtgagctgtgcagacccagggcctccaccgaacgctctcttgagatctgctgataagcggggtggcttctgatgagttctgcaagtgcttctgtaaacttaaaagggagtccgctcaaaggcaggaatgactctacaagggtgaattttcaaatctgccataggggcctcgggcctcagcagcatccagagccctacggacgggcaggttcttacgtctcaactcccatcgcaccagtcctgcagctttctaaaggtatccagcactttctaccttgcattctatcttcatcttcgctaggcctcacagcaccgcatgattccgggggagggtgcttatcagactcgcgtgtggccccacggcacctagggcaccgtcgagcacacggtccgggaagctccaatgaaacggaacaaaccgcgagatcaggggaggtaggaggcccaccctacgccctgcccccgcggagcacaagccccgcctgcgtcccgagctcccgggtnccgcaaagctgggccccaaagagctccaacgccgatcccggga

SEQ ID NO: 319206 - DNA, 1738 bp, Homo Sapiens
  misc_feature (1653)..(1653): n is a, c, g, or t
  misc_feature (1686)..(1686): n is a, c, g, or t
  misc_feature (1697)..(1697): n is a, c, g, or t
aacagaagttgatgagtctcaagcaacaaaagaaattttggcacaaaaatgtaaaacttactctaccaagacaatacagcaagattcaaataaattgccatgtcctttgggtcctctaactgtttggcatgaagaacatgttttaaataaaaatgaagctactactaaaaatttaaatggccttccaataaaagaagtcccatcacttgaaagaaatgaaggtcgaattgctcagccccaccatggtgtgccatatttcagaaatatcctccagtcagaaactgagaaattaacttcacattgcttcgagtgggacaggaaacttgaattggacattccagatgatgctaaagatcttattcgcacagcagttggtcaaacaagactccttatgaaggaaaggtttaaacagtttgaaggactggttgatgattgtgaatataaacgaggtataaaggagactacctgtacagatctggatggattttgggatatggttagttttcagatagaagatgtaatccacaaattcaacaatctgatcaaacttgaggaatctgggtggcaagtcaataataatatgaatcataatatgaacaaaaatgtctttaggaaaaaagttgtctcaggtatagcaagtaaaccaaaacaggatgatgctggaagaattgcagcgagaaatcgcctagctgccataaaaaatgcaatgagagagagaattaggcaggaagaatgtgctgaaacagcagtttctgtgataccaaaggaagttgataaaatagtgttcgatgctggatttttcagagttgaaagtcctgttaaattattctcaggactttctgtctcttctgaaggcccttctcaaagacttggaacacctaagtctgtcaacaaagctgtatctcagagtagaaatgagatgggcattccacaacaaactacatcaccagaaaatgccggtcctcagaatacgaaaagtgaacatgtgaagaagactttgtttttgagtattcctgaaagcaggagcagcatagaagatgctcagtgtcctggattaccagatttaattgaagaaaatcatgttgtaaataagacagacttgaaggtggattgtttatccagtgagagaatgagtttgcctcttcttgctggtggagtagcagatgatattaatactaacaaaaaagaaggaatttcagatgttgtggaaggaatggaactgaattcttcaattacatcacaggatgttttgatgagtagccctgaaaaaaatacagcttcacaaaatagcatcttagaagaaggggaaactaaaatttctcagtcagaactatttgataataaaagtctcactactgaatgccaccttcttgattcaccaggtctaaactgcagtaatccatttactcagctggagaggagacatcaagaacatgccagacacatttcttttggtggtaacctgattactttttcacctctacaaccaggagaattttgaatttaaaaataaatccaaacattttccttcatattatcaatgcttatatattccttagactattgaaattttggagaaaatgtatttgtgttcacttctatagcatataatgttttaatattctgtgttcatcaaagtgtattttagatatnctctttctccaggggaagtggggatattttgtncattttccacncagaataaaaaaatgttctgtgccttgcctctcttgtttaa

SEQ ID NO: 319207 - DNA, 983 bp, Homo Sapiens
aaagcaggctggtacaggtccggaattccgggatatcgtcgaacccacgcgtcgctgggcgggccctggtcaggttgcagtttcacttttaggctctgggcacctccagctcctgctcgccggacggctcccagggagagcagacgcgccagacgcgccaccctcggggcgccgacggtcacggagcatggggtcggcctttgagcgggtagtccggagagtggtccaggagctggaccatggtggggagttcatccctgtgaccagcctgcagagctccactggcttccagccctactgcctggtggttaggaagccctcaagctcatggttctggaaaccccgttataagtgtgtcaacctgtctatcaaggacatcctggagccggatgccgcggaaccagacgtgcagcgtggcaggagcttccacttctacgatgccatggatgggcagatacagggcagcgtggagctggcagccccaggacaggcaaagatcgcaggcggggccgcggtgtctgacagctccagcacctcaatgaatgtgtactcgctgagtgtggaccctaacacctggcagactctgctccatgagaggcacctgcggcagccagaacacaaagtcctgcagcagctgcgtagccgcggggacaacgtgtacgtggtgactgaggtgctgacagacagcagaaggaggtggaagtcccgcgcaccccacaagcgggagggctcgggccgggtttccctgccggaggcccgtgcttgacgggtgagggccaggcatttgacgccagacgaagacggggcacatccctcaggaggaccgaggattcggggggcgcggtggtattggcttttgactgggcagtcgttcttccgggtaagaacggggactcaggcacgcggagggcaagggcacgagcagggcggcaaggcctcgggctcggagggcccaacactgggggccggacggggcagagcag

SEQ ID NO: 319208 - DNA, 1176 bp, Homo Sapiens
  misc_feature (796)..(796): n is a, c, g, or t
ttcaggcaccattttttataaaaacgcatagtctcatttttcactctttaaaatcacattcaaaaatcggcaaagaaacgccccggggaatgagtagacgggaggggagggtgcgccaacccagccccgggggggagaaggcgcgacaccacacaggcagcgcgactggcacgagggggcatgcggtgggcgaggcggcggcactgacaggacgtgggctgtggggctggccagcctgggcgggggtacactgatgggccaggatggggggcacactgataggccccagccagcctccttgctgtgctgcccgcccacctggccggccccgtcctgggcagatggggtcgcacccagcccagcatcagcgagacctcaggccaggcgaggccagtttggcgccaacctgcaggtgccttgctgtggtccctgagcccgggtgctgggggttggggcaagaggggacagcagggagggtagcagcacctgctgccaatgccactttctcagccaagccccgcagtgtcagggaagtgggagtggaggcagccagtcacacagaggcttttcctgaataagggcacaggagcgcgagtcactgtgggaggccttgagggccagggagacaacgggcccctcctctcgccaacactgtggagcaggacagttcagggcctgcccctctgcagcaggagggggtgcagtgggaaaattcaagtcggatccctgttctgtgcctgcccctgttgaggggggatgggccacccagcagtgcccatgggcacaggagtgcagncccacagagcccagggtggcacagcttggtgtggcatcatccctcggggaaggggcgggagggctgtgctcttcccccacaggaagacactgggagcgggcagcccctgaagttaggacagagggcgccgggcagcggctggggttggtgcagcaggagcggaggcaagcgggccccttccgggggagctgggccaggctggggccacgggaaatcacaataattacaaaataaaaccttttccgcttggcgggaaaacaaataataaaaattcgacaaaataaattagaggtttataaaaggcgggtgggcgggtcagaggcgttggaactgccgcgctggaccagcggcaccttgctcagctccaccacgggcgagcg

SEQ ID NO: 319209 - DNA, 1008 bp, Homo Sapiens
  misc_feature (14)..(14): n is a, c, g, or t
  misc_feature (19)..(19): n is a, c, g, or t
  misc_feature (31)..(31): n is a, c, g, or t
  misc_feature (38)..(38): n is a, c, g, or t
  misc_feature (189)..(189): n is a, c, g, or t
gatcccgcccgatnaaatnaatagatgcatntgtggtngcgatatctgttgcagtctgcgccatgaggttgagctgctggtggagacggtgagagtgattggcattccagcaaatttcagttactcctccccaggatagagctgagcggcggctacaggctttctcctccttgtcgcccccttagcacncggcacagcctcacacaccagactgatggcctccctggtgacctgagtccgggtgttgaagtccagggcacgcattgactggaggacctccacacaacccatgtaccgaaccaagtaggaaaccccgggtcccagtgactgttgtcgttgggatgcagccagccccgcgtgggcttattgactaagctcccgtgtcgggtccactcctcgcccccaagctggcccccttccacccgagtcctgcgcccgccgcctccactcagcttgttcatgtcctggaggaggggtagggggcctgagtctggcatggctgcccctacgatcccctccccatcatcagctgcccttcctggctcccccttagaccctgggcgccccccagccgggttggccagcctcaggttgctcatccgggggaagaaggagcacagggtagtgggactatcgtccccaggcagaggaggcaggatgggccccagggatgaagctgatggggaaggcagctcctccgggggggtggacccagaagccccttcctccagcgatgacagagactcattccggagtggattgtacttgggcttggggggcaggagatccatagttgaggtgaaagaggggctgctgcccagcctggcccccctgccagtttgggcaagggggccaggcagggggtatccccaggcccttagcctggttggacctctgtggcccaggagtcacagaagtcctggggagggagagggacaagtggcttccgctccccagctcagacccagacagtttcaggccccatccccgcccaacgtggagcctctt

SEQ ID NO: 319210 - DNA, 1234 bp, Homo Sapiens
  misc_feature (524)..(524): n is a, c, g, or t
acagttacgcgccgcacggatcatggccgcagcctctctggggcagctgtttgagggcatgaaggcgttcaaaggcaaagaccagcaggtgcgcctcttccgcccctggctcaacatggaccggatgctgcgctcagccatgcgcctgtgcctgccgagtttcgacaagctggagttgctggagtgcatccgccggctcatcgaagtggacaatgactgggtccccgatgccgccggcaccagcctctatgtgcggcctgtgctcattgggaacgagccctcgctgggtgtcagccagcccaggcgcgcgctcctgttcgtcattctctgcccagtgggtgcctacttccctggaggctccgtgaccccggtctccctcctggccgacccagccttcatccgggcctgggtgggcggggtcggcaactacaagttaggtgggaattatgggcccaccgtgttagtgcaacaggaggcactcaagcggggctgtgcacaggtcctctggctgtatgggcccgacncaccagctcaccgaggtgggaaccatgcacatctttgtctactggacccacgaagatggggtgctggagctggtgacgcccccgctgaatggtgttatcctgcctggagtggtcagaaagagtcgtactggacatggctcagacctggggtgagttccgggtggtggagcgcacgatcaccatgaagcagttgctgcgggccctggaggagggccgcgtgcgggaagtctttggctcgggcaccgcttgccaggtctgcccagtgcaccgaatcctgtacaaagacaggaacctccacattcccaccatggaaaatgggcctgagctgatcctccgcttccagaaggagctgaaggagatccagtacggaatcagagcccacgagtggatgttcccggtgtgaagctgcaggctgtgttccagatccaccgacccgtagcatctcgtcacgtcagcactcgcctccctaccaatgattcacctgaagtgcaatacgaaataaaaggccagcgggcggcgtctgggtctctggcgcccccatgtggttgcgacactcccaaagccgtaagggccgacccaggcatcttggcccccagcccctcgtcgcgggttcaggtccgcccattactccttgtcgtgcggtcaaggatacaccttggccccgattccggatctctccgttctcaggccagacccctggtgctgccgtt

SEQ ID NO: 319211 - DNA, 942 bp, Homo Sapiens
  misc_feature (834)..(834): n is a, c, g, or t
  misc_feature (869)..(869): n is a, c, g, or t
  misc_feature (881)..(881): n is a, c, g, or t
  misc_feature (893)..(893): n is a, c, g, or t
  misc_feature (909)..(909): n is a, c, g, or t
  misc_feature (917)..(918): n is a, c, g, or t
  misc_feature (921)..(921): n is a, c, g, or t
  misc_feature (924)..(925): n is a, c, g, or t
  misc_feature (930)..(930): n is a, c, g, or t
  misc_feature (933)..(933): n is a, c, g, or t
acagttacgcgccgcacggatcatggccgcagccgctctggggcagatctgggcacgaaagcttctctctgtcccttggcttctgtgtggtcccagaagatatgcctcctccagtttcaaggctgcagacctgcagctggaaatgacacagaagcctcataagaagcctggccccggcgagcccctggtgtttgggaagacatttaccgaccacatgctgatggtggaatggaatgacaagggctggggccagccccgaatccagcccttccagaacctcacgctgcacccagcctcctccagcctccactactccctgcagctgtttgagggcatgaaggcgttcaaaggcaaagaccagcaggtgcgcctcttccgcccctggctcaacatggaccggatgctgcgctcagccatgcgcctgtgcctgccgagtttcgacaagctggagttgctggagtgcatccgccggctcatcgaagtggacaaggactgggtccccgatgccgccggcaccagcctctatgtgcggcctgtgctcattgggaacgagccctcgctgggtgtcagccagcccacgcgcgcgctcctgttcgtcattctctgcccagtgggtgcctacttccctggaggctccgtgaccccggtctccctcctggccgacccagccttcatccgggcctgggtgggcggggtcggcaactacaagttaggtgggaattatgggcccaccgtgttagtgcacaggaggcactcaagcggggctgtgaacaggtcctctggctgtatgggcccgaccaccagctcaccgaggtgggaacatgaacatctttngtctactggacccacgaagatggggtgctggagcnggtgacgccccnctgaatggtgtnatctgcctggagtggnagacaaanntantgnnatggntanactggggga

SEQ ID NO: 319212 - DNA, 917 bp, Homo Sapiens
  misc_feature (397)..(397): n is a, c, g, or t
ccaaaaacgagccagatgctttaatgggctgcctccagggcccatcggctcatcagaatcccttaaatgaggcccagagcttgccagcctttggttgagctcagcactccacaggcaggtggctcacagcaggcctggctgatgggctctggcttggggagtagcagggtcctcagtccagatcttcagagaccttctaggactgagctgccactcagcctacctgcaccagtccctgagtcccagcagctgcttagcttctagaaaacataagtttcctggggataatgccagggggtgggggaggcagttcagggaagcactgatgtcaattcaggacaggcctggggcctcctggggtggcggcagcagcaggcccagaacaaggacgccagcnccaggctgcatccctgcaccagtagcggggattgggagcagggagttcaggctccctcagggagctccaggctggagtagggccaacccaaccccaaatgctggggggtgactcctgaaagtgtgagttacatccactgcctaaggtaccactctacgatagccaagtcctaggacacacgaagactttctataggaaggttctctgcctccaattctaggccctgtcccagagaggaagcagagaccaaatggtgacagggtatgtatcaggcagcatccccacaacaaccctgtgaggtaggttgcgttgtcccattttacacatggggaatgagggctcagcagaggtgaagtttcttgcccaggtcctgcagcaagaacacgagccgggattcaagcccaggtctgtcgggctccaaagcccatgtgtgttctctaggcaagaaatagggagtagtcctatccaataaagacctcacgttaaaagctcaggggctcttcagcccaccctgaatggg

SEQ ID NO: 319213 - DNA, 1547 bp, Homo Sapiens
  misc_feature (68)..(68): n is a, c, g, or t
tttttacaaagtttaaaagtactttttattgcagacattttcatatacaacgttagtgaaatcgaganccccccccatggtgaagacatatattcctatcttataaaaacattcaagtaaccctgggcgttttcatgttattctcttttttagtacctggggattggctttggctagattttctattttaacccatgcttcttcccgttctttcatttttagcttctcttttagtttctctgctttgaactgttgtgtacagtcatcaaatagcttttggttcatctccatgaagagcttcagggcgttgtatatcaagccatgtattgtcttgttccaatgggtctttgagttgcggtacaaggaaggaaacatgatgggcagaatcttcgctgcgttgtcactgattaaactcatgatgtattcattattccagtaatagagagctcgctctgccacctggaagtgtgggctggagacacatttggccaactgccggaagaggggttccatgatcttcacaaattctgatggttcaatgacatctaaaatctcttctaattcgtttaagaacattacttcttttggactgtgagtctttggccagtatttgagaagtgccatcaccactggttccgtgagggtgctgtccttttctaaaaactgcactacacagtatgccagctggggatggtagacactcagagatttcactttgtgcaaaggtagtaacaccttcaataagaaaatcttgtgctcttcttttagtggtaaggcaaatccattaattatacttcccaatatttccagtaactctgctatgccattatgatgctctgtttcataaataaacctataaaatatattatttatctgttttctgatgtaagctctcaagcctaggaatttcccatagattctgtgaagggtggttttaagaaaatctctctcccgaggatcttcactgtcaaagagctctaaaagctgcaatacaaacttctgatcaatatatttcttcgctatattaggttggaaatctggagactctaaaaatcttaagaaaaattcataaacaagctgtagatgaggccaggctgcttctaacgttggttcatcttcctccgggtcaaattccgctcccgtaggattggaggaaggtggtaatgttcgaaacatgttaactgcaaacatatggactacttctgggtaaataggctctgtgatcacattccgattatgggtgatatattctaccatttcacttaaagcagctcgttttacttccttccactttaggtcacttagtggatcagaaacaaagtcaaagaggacgcaacactgacgtaacttctggataaaaagcttctcttgatcagcaggaggaacatctcgaatatggagaaggaccacgggctggaaaggcccattggagttggccgcatccaccaccatcctgctgcccgctttattacatgtcaacatctagacttcagcgggaaaggcaatgggctccttaaggcaagaaaccagcctccattttagtttaa

SEQ ID NO: 319214 - DNA, 414 bp, Homo Sapiens
  misc_feature (56)..(56): n is a, c, g, or t
  misc_feature (65)..(73): n is a, c, g, or t
  misc_feature (398)..(398): n is a, c, g, or t
ttcaaagtttaaaagtactttttattgcagacattttcatatacaacgttagtganaatcgagannnnnnnnnatggtgaagacatatattcctatcttataaaaacattcaagtaaccctgggcgttttcatgttattctcttttttagtacctggggattggctttggctagattttctattttaacccatgcttcttcccgttctttcatttttaggcttctcttttaggtttctgctggctttgaactgttgtgtacaggtcatcaaataggcttttgggttcatctccatgaaggaggcttcagggggcgttggtatatcaaggccatggtattgttcttgtttccaagggggtctttgaggttgcggggtacaaggggagggggaacatggnggggggcaggaatctt

SEQ ID NO: 319215 - DNA, 774 bp, Homo Sapiens
  misc_feature (6)..(6): n is a, c, g, or t
gcattnaaaaatatattcatttattcatatatatattcactttacaatactgcattttaacatacataaaaatctaaagcgtttttaagaatttttcaaagtcctgtactgatgctttggcaatctcttcacaaaatatttcatcaggaatagatactagtttgtccaaagagatgtagttaggttttgctggatcatactgtgctcttcctaaataggtaagaaacaagtgtctttctttgaccttaaacagccttgtattaaatacctgtgggaacttgacaatgatgtggtggggaatgctcatcacattgtgcacaaaatcaaacgtctcggtaagtttcattttatttgcagttaacatctttgggattctggtgatcatatgttgaatttcgttatgtttaaaaccaagttcaagacgataaaccttcatattttctttcacgggttccagacttccagttagcagccttgggagacgaactaccagatctctagtcttcttcacactaagttcaagttctttctgaaaaaatcccaatctgttatccagtctttccactgaaaagttcagcaaaaatggtgcttttctgaccatctgtgcaacatctgctttactgaaattttttgaatgcagataagccaccctggtcttcagattttcaaggtcttcagagaaaattgcatgatttttttgtcaggaatgctcccagttggttatcctctatacccacatctttaagaaacagaagcatttgcttaatgtctttt

SEQ ID NO: 319216 - DNA, 938 bp, Homo Sapiens
  misc_feature (10)..(10): n is a, c, g, or t
  misc_feature (18)..(18): n is a, c, g, or t
  misc_feature (25)..(25): n is a, c, g, or t
  misc_feature (27)..(27): n is a, c, g, or t
  misc_feature (32)..(32): n is a, c, g, or t
  misc_feature (37)..(37): n is a, c, g, or t
  misc_feature (151)..(151): n is a, c, g, or t
accatttttntgggctantacctgntngctgnaggantccataggtggcagtggtcccaggggcccagtcatctgggtgccagggggcagagcttgaggaggtgaagacacatggttgggctggctcactgagggccctccaaaactctgntccaggcaggagtggaccagtcatcgaaggcagccgaggaccccctgaagctgggggtgtgaagctggaggcctgtgatggggcagatcgctggggagtctggatcccaggatgaccttgggcctggctaaggggaggagcctggccctgaggataggagccatacagaccagagttagggaaacttcctgaggctgaagccagcgatgttggtgggccaaagcccagccctgaagaaggaggggctggggccacagcaccgctgatctgcattccagacagctgcgtagccacctgtgcacttgtcgggggagggccatagggctgaagcacaggtggctggttgcccacaggggccaatggggacccaaatggctgagacccaggcagcctttgcatctgaacagtggagcttggcccattctgtacatctccttggccaaactggccatatgcagcctggccacaaggagcctgtgctgttgaggctggaggtgcccccgaggaaggtggggctcttgacataccttggggaggtgtttgctgatagcctggtactgggccattgtaggctccatagggaatggcgggggctgtggaccctgattgcccaccgtagctggactgatgataccctgggtagatgggctggggctgcccaaatggtggcacaggtggaactgactggttgacgttcattatgaaagcattcccaatttgatctcacccggctccagatccaggttagacttcgttcctaacgtcaaggctcccaggctccacatcc

SEQ ID NO: 319217 - DNA, 1305 bp, Homo Sapiens
acatcaccacaggtcgcctttccccgtcggtatgaaccacatgccacacacagcagcccggagttaaaggcctgggctgctttctggactgtctgctcaacctctgtagcctcctccctgggcatacgttccaggaagtcactgtaatgcttcaggccgatggcctgctgggttgtcagggaggcctggctgcggatgtcttccagacttcggaagccctgttggtaccacatctgggcagtcttggtcccagctccccagatgttggagaagagctccaagacaggcacgctctcactgatatggtccagcttccgcaaatgcccgctctccaggatctctatgattttctcagccatccgcttcccaatcccagggatactgcaggcctcctggtacgaggtgacaggcttatggaagctcttgagggcattgatggccttggcatagcccagggccctccacttgtctccctgaacactgtaggctttggccagaacttccagcttctctgtgatatggaggttgtgattggtcgccttctggcttgagggctgtgcacagacccacttatccaggacagcaggggctgggctaggctcacaatctccctcaagggaggtggggtagtggccactgatgagggcttccagatcagctgcactaacctgggtttcttccccatcagtggcttcatcatcagagatgggctgggcttgggtgtttggtgcctcttttgccttttggggaggagacacaggcctggtgggaggaggaggaggagaaagggctgtctgaagcagggcctcatgggtgccaggaggaatagaagcatcctgctctgccttgctgggctgtggatggtccaagtacctactggggatgaagatgctgaatccagctacatccaccagcctcctctcctgaaggcacaagctcagccaggctgacttcaccagctgagcacccgggggcagctggggtagtctgagaaggcggagggctcgctcatagtccatgccttcatccaccacaatgtgagtgacacctgggccctgggcagggcatagctggccgccatgctgaacaatctgcttctcaaagagttctgcccgggctcgtccaatgccagtgcgcacaacatgggcccgaagggagctcagccactcttctgcttcttctccctcttccctcctaggaatctttgcaagtacttttgatgatgcatcagcatgaattttctgccgcttgggaaatgccttcaagatacccctgggatccattgaagtatggctggatcccggc

SEQ ID NO: 319218 - DNA, 1603 bp, Homo Sapiens
  misc_feature (540)..(540): n is a, c, g, or t
  misc_feature (879)..(879): n is a, c, g, or t
  misc_feature (908)..(908): n is a, c, g, or t
  misc_feature (1559)..(1559): n is a, c, g, or t
  misc_feature (1563)..(1563): n is a, c, g, or t
tcttgacaagtgccaaaatggcgatgcctaccacctagaactggattgtgcgctccatttctttcacctcaaagctggccgccaccgctgccacctgctcagagtgaaataatgaaggtggtcaacctgaagcaagccattttgcaagcctggaaggagcgctggagtgactaccaatgggcaatcaacatgaagaaattctttcctaaaggagccacctgggatattctcaacctggcagatgcgttactagagcaggccatgattggaccatcccccaatcctctcatcttgtcctacctgaagtatgccattagttcccagatggtgtcctactcttctgtcctcacagccatcagtaagtttgatgacttttctcgggacctgtgtgtccaggcattgctggacatcatggacatgttttgtgaccgtctgagctgtcacggcaaagcagaggaatgcatcggactgtgccgagcccttcttagcgccctccactggctgctgcgctgcacggcagcctctgcagagcggctgcgngaggggctggaggcggcactccagccgctggggagaagcagcttgccatgtgccttcagcgcctggagaaaaccctcagcagcaccaagacccgggcccttctgcacatcgccaaactagaggaggcctcttcttggactgccatcgagcattctctcttgaaacttggagagatcctggccaatctcagcaacccgcagctccggagtcaggccgagcagtgtggcaccctcattaggagcatccccacgatgctgtctgtgcatgcggagcagaatgcacaagaccggcttccccactgtccacgccgtgatcctgctcgagggcaccatgaacctnacaggcgagacgcagtccctggtggagcngctgacgatggtgaagcgcatgcagcatatccccaccccactttttgtcctggagatctggaaagcttgcttcgtggggctcattgagtctcccgagggtacggaggagctcaagtgaacagctttcactttcctcaagattccacaggttttggtgaagttgaagaagaactctcatggagacaaggacttcactgaggatgtcaactgtgcttttgagttcctgctgaagctcacccccttgttggacaaagctgaccagcgctgcaactgtgactgtacaaacttcctgctccaagaatgtggcaagcaggggcttctgtctgaggccagcgtcaacaaccttatggctaagcgcaaagcggaccgagagcacgcaccccagcagaaatcgggagagaatgccaacatccagcccaacatccagctgatcctccgggcggagccaactgtcacaaacatcctcaagacgatggatgcagaccactctaagtcaccggagggactgctgggagtcctgggccacatgctgtccgggaagagtctggacttgctgctgctgccgccgccgccactggaaagctgaaatccttcgcccggaaattcatcaatttgaatgaattcacaacctatggcagcgaagaaagcacnaaanccggcctccgtccgggccctgctgtttgacatctccttcc

SEQ ID NO: 319219 - DNA, 1191 bp, Homo Sapiens
  misc_feature (81)..(95): n is a, c, g, or t
  misc_feature (102)..(103): n is a, c, g, or t
  misc_feature (330)..(330): n is a, c, g, or t
  misc_feature (439)..(439): n is a, c, g, or t
  misc_feature (441)..(442): n is a, c, g, or t
agtaacatactgcttttcttcacattcacacgggtcttagaaaattattgccttttcccctggagaaataactaacagacnnnnnnnnnnnnnnngtagtannacgttgcaaaatctgcaaatcccagaagtccacagcttgaagacaacctccaggggcagggaggaaaacaattgtcacaagagacataagcacacagaaggacaggcagctgaggaaaccagtttgcaccgccactgacccaggatacctagcaagtacccttctcctcctggaatctactgctaccacctcgaaggtatgacttttttggtctatgatctgaaganctcttttcccaaaggaagagttgctctgagaagaggtggaatgagacaagttcaagtatgactaagaatcatgccaaagtccaaggtcagtgaagaacccatggcaaangnnatccagaaaagccaacatcttgctacttcaaccaactacttcattggacccaagagggtgtctacacaacatttcagggttcaaatccggatgctgatcatgtccctacaaaccctgtagggttactttcccaactagacggtgatcagcttatgccccgaagcaaacagagacagacattgaaactgccaaagttcaaaaaataaggtggaaattgtgcttccttcaaaatgaattggcttcataactgccttttctcctggtccagcaacttctttctcccacgttgctgcaggtatttattgccttatgcttgaaatgaaaaggcgaactctgaggtgcaaggactgggcagtcccaagagggcaggggtctggaagtacagtagtcagcacatgctgtgctcccgtaatggcttggccttccttcagtcccgagaacctaccctgaggtccgtctgaagttcatttgcaagcctggtgaccactcactatctcactggggcagcatgacagaatgaggtcttcagtattgcacaggtatgaaatgtccatgagtcttaaaaacaaaaatcacagttgctcttggggctgggccgattcctccatcccagttttagcaggatgtggccgttgccacagggcttctgctgagctctgagactgttgagtgggtaggcaccggtgccagcaccgaggcagggaatgtgcagtaggcaccctgcatgtcagggctcagtgtctgcaaat

SEQ ID NO: 319220 - DNA, 1112 bp, Homo Sapiens
  misc_feature (798)..(798): n is a, c, g, or t
  misc_feature (805)..(805): n is a, c, g, or t
  misc_feature (831)..(831): n is a, c, g, or t
  misc_feature (852)..(852): n is a, c, g, or t
  misc_feature (856)..(856): n is a, c, g, or t
  misc_feature (899)..(899): n is a, c, g, or t
  misc_feature (925)..(925): n is a, c, g, or t
  misc_feature (927)..(927): n is a, c, g, or t
  misc_feature (946)..(946): n is a, c, g, or t
  misc_feature (967)..(967): n is a, c, g, or t
  misc_feature (985)..(985): n is a, c, g, or t
  misc_feature (988)..(988): n is a, c, g, or t
  misc_feature (1014)..(1014): n is a, c, g, or t
  misc_feature (1016)..(1016): n is a, c, g, or t
  misc_feature (1021)..(1021): n is a, c, g, or t
  misc_feature (1023)..(1034): n is a, c, g, or t
  misc_feature (1039)..(1039): n is a, c, g, or t
  misc_feature (1043)..(1044): n is a, c, g, or t
  misc_feature (1048)..(1048): n is a, c, g, or t
  misc_feature (1052)..(1052): n is a, c, g, or t
  misc_feature (1066)..(1066): n is a, c, g, or t
  misc_feature (1068)..(1068): n is a, c, g, or t
  misc_feature (1078)..(1078): n is a, c, g, or t
  misc_feature (1085)..(1085): n is a, c, g, or t
  misc_feature (1091)..(1092): n is a, c, g, or t
  misc_feature (1098)..(1098): n is a, c, g, or t
  misc_feature (1105)..(1105): n is a, c, g, or t
  misc_feature (1110)..(1110): n is a, c, g, or t
tatgaaacaaaacctcagcgaacgtttatttctcatcatatggaactggtagcaaagccaaagatttctgcacttgaacactggataccactccctacccacccagtgaacatttacagtcatcacatgccctctagaacccagatccccatgccggggcctcttctctcctgcacaccttcttgcagggagggctttcaggccggaagggggtgccggttgcttctccgcgcctgcacgggtatttaatgtggcacactggccaggctcctctcctgccccgcccagcagcagcacggcccttgcctttcttcagtgccctccaaactggtcagagaggaggcacagactgctagaagaagggcaagagaagtcgtaattcacagtcatttgctacagaaagtgcctggaatcggtccttggctgcttctgcctggaagcaacccacttaagccccaggagaggggacagatgagatactgggatgggggtgggagtcctcagaaggcacccaggagacactggctgcagaaatggggtccctgatcttgcaagaaaatccgcttgctgttggcaggttggcctgagaatcccaggggcagcttcagacattgtggggactcagacccaccctctcagtctgcagctgtggcgagttagaggtttggcaatgtagccatggtcacctggccatggcccaggggcagggtccaaacaagaaccctggtgcctcccgcccctcctgctgagccatggtgccacctaagccatctagaaaggctcaactttttgggaganatctgcngcagggccactggaggcaggagagtngggtgctggcctctgcgaggnaggntgcagctctgggagaacagaattctccctctcctcctcctctnacacactgtggctccaggttggaacncnaagcataaaggaccaaatnaagaggatttatatctaatantcctcctcttcagagggnatntgacagcaaggctccaactctctagnanatctncnnnnnnnnnnnnttctngctnnttcntgangctcaaccattagngnggggaaaggnaaagggnaagganntaaaanttgactnggttngg

SEQ ID NO: 319221 - DNA, 1104 bp, Homo Sapiens
  misc_feature (4)..(4): n is a, c, g, or t
  misc_feature (8)..(8): n is a, c, g, or t
  misc_feature (13)..(13): n is a, c, g, or t
  misc_feature (15)..(15): n is a, c, g, or t
  misc_feature (26)..(26): n is a, c, g, or t
  misc_feature (31)..(31): n is a, c, g, or t
  misc_feature (37)..(37): n is a, c, g, or t
  misc_feature (46)..(46): n is a, c, g, or t
  misc_feature (52)..(53): n is a, c, g, or t
  misc_feature (56)..(59): n is a, c, g, or t
  misc_feature (62)..(62): n is a, c, g, or t
  misc_feature (69)..(69): n is a, c, g, or t
  misc_feature (80)..(80): n is a, c, g, or t
  misc_feature (84)..(84): n is a, c, g, or t
  misc_feature (99)..(99): n is a, c, g, or t
  misc_feature (102)..(102): n is a, c, g, or t
  misc_feature (119)..(119): n is a, c, g, or t
  misc_feature (162)..(162): n is a, c, g, or t
cctncagnttatngnctcaggaacanccagngtgggncagccccancccccnntgnnnnttnacatgcnctttctatganaagnggttgtgttggtgcnccnccactactcttttctgnttgttgagtttgaattgtgtaacatctttgatcagtgggtgtntctgtaatgaaggaggttcaagaggctgtgctttccaagtgatagtctataggagtgtttaatttcttgcagctccatctggttgctgcatttgaagcatggcattaatttgtatttgccctgttctttgacctaaagttgaagggtttagagtttttaacctgatctgtagagcagagaggttgaaagcacttaactcttgtttagtatcctcattgccttgctgcctgggtatctggcccctttccataaacatttcttttcagttcatgtagttctttaatagaaagctgctattatgtatattgtcatttgtgaaggaagttggagagtcacagctttactgtgacaggttttgcccaaggctttgatacctgtcacccagggtatcttaaaagcaagttgttctcccactactttcctttccctctgccctgccattcctattacaatgctgtgaaaaaagttctgcttcttaggtgaatgggtactttctattttgtttctaaacgagcaattttgaggatgaaatgggaagatatcattgcttccttttttgcacctattgggtatgtacactctggccgaagggagtccttatgtttagtttcaaaatatattactttcctggattctcttcttcactttttctgactttgggtccattttcttttcattgcctccttttccaggcagctctattcttgcagagccatagcaggacatgttaaaattccaatagaaaacactaaaaggaaagtctgtggaatcactagtgactaaatactgggaacctattttctcaatcttcctccatgttgtgttctttgtattcttgagatgataatatattatgtatttgaattcctgaaaaatggaaaatgtttaagatatatgtatataaagtgtatgctgtattggtgcaataatggtaattaaaaa

SEQ ID NO: 319222 - DNA, 1648 bp, Homo Sapiens
  misc_feature (58)..(58): n is a, c, g, or t
  misc_feature (60)..(60): n is a, c, g, or t
  misc_feature (140)..(140): n is a, c, g, or t
  misc_feature (155)..(155): n is a, c, g, or t
  misc_feature (209)..(209): n is a, c, g, or t
  misc_feature (246)..(246): n is a, c, g, or t
  misc_feature (457)..(457): n is a, c, g, or t
  misc_feature (460)..(481): n is a, c, g, or t
  misc_feature (537)..(537): n is a, c, g, or t
  misc_feature (587)..(587): n is a, c, g, or t
  misc_feature (607)..(607): n is a, c, g, or t
  misc_feature (1051)..(1064): n is a, c, g, or t
tccactcaagttttacactagacagaaaccgtctctaaacaatatattggtggttgtngncaaagtggcctttaaaaaggggttcactctgctaaaaggaggctcatcctgataattgcaatcactaacaactagaaaanactaaaccgtgagtncaagcttgaaaaataaaatgtagcactgggacgctattaaaactcattgtaacnaagttgaacagtaactttacttaaatgacatatcgcncccatatgaatccacagaagaggaggactacagggaaatataaggtggcagaggaccacttctgtcaaggggtaaagaaaaacactccttcgctatcagggaagggagaaaaagagaaaaggaagaggaggagggactgaacttttcagagaaactgcaagtacttgttaccctctgggccagttctccacctacaggttggataagatcnccnnnnnnnnnnnnnnnnnnnnnntcaaccccacttgcccctattttgggacaaattagaccctccaataggagaataanagttttatctagccgcccccaccccaaaatggggctgacgggagtgagcngctgcctggctggcagggantggattctcctctcttccctttcgcatcatgtgcttttcaggcgccatgttgggctcctaacaggcggctgctccactcggggccaaatccctattcccacccaccaacagctcgctcccaggtcccccttcacctccttccaacccacagaacacaattaccaaaaagggtgcttggggaaaatgggagacccactctcccacttcccagggaattaaaatggcttatgttaactcttacttccccaaaccacaacctgcctttaagtctcccccaccccaaagggctctattcaaagcgtgtgtgtgtcgggatatacaatgcggtggcctaaaaagggagttggaaagcggaagtgggactccaccctttatcctccccactccctcccccccagaggcccatgctcgaagcctgggccaaagaccgagcctgagttggannnnnnnnnnnnnnttggagagaaggaacactgtcccccttgggatggaagcgagacctgggatgaggctgacactaaaatcagggagtattagaagtaataggaggctgcggggtgtataaaaaccttggcggtttgggcctcgatgagagagacgatctccttggcgaagggcaggttctcctcggctagaatggtcagcatattgatgtgcggcttgctattgaaggtcaggtcttcgagcgatgactgataatcccgacaggcgtcctcccgggcccccgcagcaccggcctcggccggcgtctgctctgacattgcgccgcggcccccctccgaggtccgctgcagctgaagctgaagccgctctggataccccgcctcccttccgactcctcttcctctccccggctctctcgcggctccggcttcaccacatgctgaccgcggaggggggatgggggacgacacagggggaacctcgggtatgaaacgccgccgtctcgcgggtgatctccgtccacttccagccgccacagaagcttctttctccacagacacaaaatggcggcggcagtggcggctccatcccgggaat

SEQ ID NO: 319223 - DNA, 944 bp, Homo Sapiens
  misc_feature (7)..(7): n is a, c, g, or t
  misc_feature (17)..(17): n is a, c, g, or t
  misc_feature (24)..(24): n is a, c, g, or t
  misc_feature (28)..(28): n is a, c, g, or t
  misc_feature (31)..(31): n is a, c, g, or t
  misc_feature (34)..(34): n is a, c, g, or t
  misc_feature (37)..(37): n is a, c, g, or t
  misc_feature (41)..(41): n is a, c, g, or t
  misc_feature (49)..(51): n is a, c, g, or t
  misc_feature (54)..(54): n is a, c, g, or t
  misc_feature (62)..(62): n is a, c, g, or t
  misc_feature (72)..(73): n is a, c, g, or t
  misc_feature (79)..(79): n is a, c, g, or t
  misc_feature (111)..(111): n is a, c, g, or t
  misc_feature (113)..(113): n is a, c, g, or t
  misc_feature (115)..(115): n is a, c, g, or t
  misc_feature (120)..(120): n is a, c, g, or t
  misc_feature (123)..(123): n is a, c, g, or t
  misc_feature (134)..(134): n is a, c, g, or t
  misc_feature (140)..(140): n is a, c, g, or t
  misc_feature (148)..(148): n is a, c, g, or t
  misc_feature (150)..(150): n is a, c, g, or t
  misc_feature (168)..(168): n is a, c, g, or t
  misc_feature (170)..(170): n is a, c, g, or t
  misc_feature (175)..(175): n is a, c, g, or t
  misc_feature (178)..(178): n is a, c, g, or t
  misc_feature (191)..(191): n is a, c, g, or t
  misc_feature (203)..(203): n is a, c, g, or t
  misc_feature (583)..(583): n is a, c, g, or t
ggtacangcccaaaagnaaaaaangtcnaancancgntccnttaaaaannntcntcaatccnattggagttnnaaaccngcggccggctgggctggagccgccgcaggccngntnatcgncangccggcaagcngagcgngcaggggngnacgtccacccggcggacngnagagntantgggcggcggtcncggaggggtggntgggggaggacggccggctcccgtcggcccgtccaggagtgcggctggcctcggcaggggacacggggctgtcacacaagtcgatgaggctgctgaggatgtccaggtccagctggggccgtcggcaggggccaggcagggctcggcggctgggcgtgagcactgtgcggcgagtctcagggctgaagagcggctgtttgaacagcaggggctgcacaggctcctggcgggtgttggccacgtgcaggctcttgacgtacttggccttgtcggcctccagggctccacagcgctcggtttccgggctccaccatctgccggcccccgtagcaggtagccagggaccctggtccgcaggcggcaaggtagggcgggggcgnacggggctccggggctcagcgtgtgcacaggcatggctgctgcatatcccgagggctttagtctgcggagaccggagagatgaggagccagagatccgggcagaaagtaggcagctggacaccggccactgctggagcccgcgctaggcgtgtcccggctcctctcgcgcaggctttggagaggctgacagctcggacccgggccggtagtggccgctcccaacgacgcccaggaggccccagccccgcgtgggcacctttggggtcccctttggagctgccctccgcggtcgagctgagcgggtggccctaactgtcgaaggcccccaccgcagggaaagtccctggggcatcccgggaa

SEQ ID NO: 319224 - DNA, 1993 bp, Homo Sapiens
  misc_feature (878)..(878): n is a, c, g, or t
  misc_feature (963)..(963): n is a, c, g, or t
  misc_feature (1104)..(1104): n is a, c, g, or t
  misc_feature (1142)..(1142): n is a, c, g, or t
  misc_feature (1163)..(1163): n is a, c, g, or t
  misc_feature (1167)..(1167): n is a, c, g, or t
  misc_feature (1250)..(1250): n is a, c, g, or t
  misc_feature (1887)..(1887): n is a, c, g, or t
agcgcctggccaccgtggtgaacgacgagcgtttcgtgtctaaggccggcaagtccaactaccagctgtggcacgagctgtgcgacctcatctcccagaatccggacaaggtacagtccctcaatgtggacgccatcatccgcgggggcctcacccgcttcaccgaccagctgggcaagctctggtgttctctcgccgactactacatccgcagcggccatttcgagaaggctcgggacgtgtacgaggaggccatccggacagtgatgaccgtgcgggacttcacacaggtgtttgacagctacgcccagttcgaggagagcatgatcgctgcaaagatggagaccgcctcggagctggggcgcgaggaggaggatgatgtggacctggagctgcgcctggcccgcttcgagcagctcatcagccggcggcccctgctcctcaacagcgtcttgctgcgccaaaacccacaccacgtgcacgagtggcacaagcgtgtcgccctgcaccagggccgcccccgggagatcatcaacacctacacagaggctgtgcagacggtggaccccttcaaggccacaggcaagccccacactctgtgggtggcgtttgccaagttttatgaggacaacggacagctggacgatgcccgtgtcatcctggagaaggccaccaaggtgaacttcaagcaggtggatgacctggcaagcgtgtggtgtcagtgcggagagctggagctccgacacgagaactacgatgaggccttgcggctgctgcgaaagggcacggcgctgcctgcccgccgggcccgagtactttgatggttcagagcccgtgcagaaccgcgtgtacaagtcactgaaggtctggttcatgcntcgccgacctggaaggagagcctcggcacctttccagtcccccaagggccgtgtacgaacgcgcatccttggacctgcgtatcgncaacaaccccagatcgttcatcaactatgccatgttcctggaggagcacaagtacttcgaggagagcttcaaggcgtacgagcgcggcatctcgctgttcaagtggcccaacgtgtccgacatctggagcacctacctgancaaattcattgcccgctatgggggccgcaagctggagngggcacgggacctgtttgaanaggntctggacggctgccccccaaaatatgccaagaccttgtaccttctgtacgcacagctgggaggaggagtggggcctggcccgngcatgccatggccgtgtacgagcgtgccaccagggccgtggagcccgcccagcagtatgacatgttcaacatctacatcaagcgggcggccgagatctatggggtcacccacacccgcggcatctaccagaaggccattgaggtgctgtcggacgagcacgcgcgtgagatgtggctgcggtttgcagacatggagtgcaagctcggggagattgaccgcgcccgggccatctacagcttctgctcccagatctgtgacccccggacgaccggcgcgttctggcagacgtggaaggactttgaggtccggcatggcaatgaggacaccatcaaggaaatgctgcgtatccggcgcagcgtgcaggccacgtacaacacgcaggtcaacttcatggcctcgcagatgctcaaggtctcgggcagtgccacgggcaccgtgtctgacctggcccctgggcagagtggcatggacgacatgaagctgctggaacagcgggcagagcagctggcggctgaggcggagcgtgaccagcccttgcgcgcccagagcaagatcctgttcgtgaggagtgacgcctcccgggaggagctggcagagctggcacagcaggtcaaccccgaggagatccagctgggngaggacgaggacgaggacgagatggacctggagcccaacgaggttcggctggagcagcagagcgtgccagccgcagtgtttgggagcctgaaggaagactgacccg

SEQ ID NO: 319225 - DNA, 1665 bp, Homo Sapiens
  misc_feature (1244)..(1244): n is a, c, g, or t
  misc_feature (1528)..(1528): n is a, c, g, or t
cggggattgttgtgttgcagaaatccggcaatcgacctgaggacttgcgagccgctcagctcccgggacgtttggagctgctgctaaataatttctgctcagccatgtcgccggctccagatgcagccccggctcctgcgtcgatctccctgtttgacctcagcgcggatgctccggtctttcagggcctgagcctggctcaggggagagagaaagcccagaaagaaagctactccagggtcctatggatatttcagagaagttattttgttcaacttgtgaccagaccttccagaaccaccaagaacagagggaacattataagcttgactggcatcggtttaacctaaagcaacgtctcaaggacaagcctctcctgtctgccctggactttgaaaagcagagctccacaggagatctttccagcatctcgggatcagaagactcagactcagccagtgaggaggacttgcagacactggatcgggagagggctacatttgagaagttgagccgacccccaggcttttaccctcatcgagttcttttccagaatgcccagggccagtttctttatgcctaccgctgtgtcctaggccctcatcaggatcccccagaagaggcagaactgctgctacagaacctgcaaagtagaggtcccagagactgcgtggtgctcatggctgcagctgggcactttgctggtgctatatttcaaggaagagaagtggtgacacacaaaacttttcaccgctatacggttcgggcccagcggggcacagcccaggggcttcgggatgcccgaggtgggccatcacactctgctggagccaacctgaggcgctacaatgaagccacactatataaggatgttcgtgacctgctggcagggccaagctgggctaaggcgctggaggaggctggtacaatactgttgcgtgctccccgctctggccggtctttgttctttggaggcaagggagcacccctgcaaaggggggatccccgactttgggatatccccctcgccacccgcagacccaccttccaagagctacagcgtgtgctccataagctgaccactttgcatgtctatgaagaagaccctcgggaagcagtcagactgcactcacctcagacacactgggaaacagtaagagaggagagaaagaagcctactgaggaagaaataagaaagatctgcagggatgaaaaggaagcgctggggcagaatgaggaatctnccaaacagggtttgattactatctggcaactgtcagatctgagtttctgtcctaaaaatgcactggcaaattccctactctcataactgacccatttccttatttaaacacacacccacagtgtctatcttaacaattactgagacatgtttagtgacctttccaaaactattaactcctttggtaaggatgttttccccaaagctaagaaattctttgtgtggagcaaatgcctggattgtgtgcatggactcaacatggttatctttgaatggagctggggnttgaggttaaggctggttccagcgtttcttattgggcggaccctaagctccttaccggaggcccaggacttgttttgctgggctgaaacccattttgagggaataagggaccactttggagggtcctttattggggg

SEQ ID NO: 319226 - DNA, 1832 bp, Homo Sapiens
  misc_feature (1619)..(1619): n is a, c, g, or t
  misc_feature (1623)..(1623): n is a, c, g, or t
  misc_feature (1632)..(1632): n is a, c, g, or t
  misc_feature (1816)..(1816): n is a, c, g, or t
  misc_feature (1828)..(1828): n is a, c, g, or t
ttttctttttacacagaatatatttaattccatcatataagctaggaacaatgttaaccaacagaaaatgtgatcacgagctacatacaatagatcaaatgaagcacacatccatgaaaaaatcatgccaattaaatatactctgcatttccattaatattagtatgctattctttgattttttttgctgataagcagtcaaaacatttaaactcaaaattgacaaatcaactagcttgctttttgtcatttggaagactaccattattcaaatttattatgtaatacactcatccagataatgaaacatctgcgaaaaaaagtgtgggaatcacctcatctgtgcataaaatggctattatacatgaatgcagacgtttgaagttagaaaggaatataactcaaatagcaaaaggtcctaattacagagtttacaaataagcagttttattttcaaaagtacatagtaagtccagactgggctattgccaaagaactaatctttagtctacttcaacatgttacatggtattcctgactctacagactatcagcatctgtggaggttagctcctaaaggtcccaaagaacaggaaacatgcaggaataaaggactcctcatgaagagcaggtgggagcgagtgggcaggcctgtatcttctcagcaaagtaaggattgagtatagagagctgtttgtcttaactgggcttccctgaagaatctgagccaaactggaagaaaccagcctcatttccagtgttgagatgttagctgtacagtggctgtacaactgcagagtttatttatagaattagaaataattttttaaaattttaaaaggttttgtgtaatcattaaccagagatgatattcacaaattctggtaaaaatttgactctccaactatcaccatatcaacaggaaacagggccatgccaccagggaggactgtctcagctgccatttagggagttgacccctttgctctctcgagaccagttcctgaaaggagggcctgttttgtacagatgtggccatggagctcatggggcccttgtatcacttataaaaatacatatctttggcaggcgaaacgttcattctgatttcactaattttcatgtatccatttcaaaggcctataacatacatagtaatttagttttctaggtgcataatttgaatctagggtcttacagctaggagacaagatgaatagagctaattgtcaggcactcctattttaacatggctatttttttctgttagttcacatattaccagcaattagtatattttttgaagcttttgtgaaactatgccctgtgatgctcttccaactcagggataacaatacatatggctgtgtctgagatatacatttttctgaaatgtcaaaggtctacttctcaacattctaatggattcacacattacttattattattactgattcttaacgaccttggtacttcctgcagcagtcttctaagtgactggtctgggagtcccagtttttatgttctccattttgagtttaccctgcccatgttctcactgaacgtctggtaataacggcttttagaaatcttgactgaaaaacaaacagggccatggngctntcaggtgtnggaactctttgagcaccaggaactgtgctaagtgtcttacatgtgttctcattcagagatcagagtgaggtaggtactatcatcgccactttaaggatgaagacagaggcttaaagcagtgaagtcacacagccagggactggccaacaaagatctgaacccaggtagataggactccagaacnacaatcaccctngaaa

SEQ ID NO: 319227 - DNA, 1830 bp, Homo Sapiens
  misc_feature (19)..(19): n is a, c, g, or t
  misc_feature (23)..(23): n is a, c, g, or t
  misc_feature (34)..(34): n is a, c, g, or t
  misc_feature (36)..(36): n is a, c, g, or t
  misc_feature (81)..(81): n is a, c, g, or t
  misc_feature (94)..(94): n is a, c, g, or t
  misc_feature (164)..(164): n is a, c, g, or t
  misc_feature (233)..(260): n is a, c, g, or t
  misc_feature (284)..(284): n is a, c, g, or t
  misc_feature (292)..(292): n is a, c, g, or t
  misc_feature (304)..(304): n is a, c, g, or t
  misc_feature (1424)..(1424): n is a, c, g, or t
  misc_feature (1426)..(1427): n is a, c, g, or t
  misc_feature (1432)..(1432): n is a, c, g, or t
  misc_feature (1451)..(1451): n is a, c, g, or t
  misc_feature (1459)..(1459): n is a, c, g, or t
  misc_feature (1462)..(1462): n is a, c, g, or t
  misc_feature (1464)..(1464): n is a, c, g, or t
  misc_feature (1472)..(1473): n is a, c, g, or t
  misc_feature (1475)..(1475): n is a, c, g, or t
  misc_feature (1495)..(1495): n is a, c, g, or t
  misc_feature (1499)..(1499): n is a, c, g, or t
  misc_feature (1511)..(1511): n is a, c, g, or t
  misc_feature (1525)..(1525): n is a, c, g, or t
  misc_feature (1536)..(1536): n is a, c, g, or t
  misc_feature (1538)..(1538): n is a, c, g, or t
  misc_feature (1540)..(1540): n is a, c, g, or t
  misc_feature (1542)..(1542): n is a, c, g, or t
  misc_feature (1545)..(1545): n is a, c, g, or t
  misc_feature (1561)..(1561): n is a, c, g, or t
  misc_feature (1573)..(1573): n is a, c, g, or t
  misc_feature (1611)..(1612): n is a, c, g, or t
  misc_feature (1663)..(1663): n is a, c, g, or t
  misc_feature (1672)..(1672): n is a, c, g, or t
  misc_feature (1692)..(1692): n is a, c, g, or t
  misc_feature (1694)..(1694): n is a, c, g, or t
  misc_feature (1711)..(1711): n is a, c, g, or t
  misc_feature (1713)..(1713): n is a, c, g, or t
tgtttattgtttatgattnacanagaaaattatngnctggggttatagaacaataaaccaaccattacatttagacctggncttttgaaaaaantgcattccattttaacaattcgtatgtatctaacaaatacataaatccagatcacaaataatcttaaganttaaacaattaagaaacacaaagaataccacatagatctacctttaaatatcagcattcatattataannnnnnnnnnnnnnnnnnnnnnnnnnnnttaggttaagtcacaacataaaanagagaaanaagataaatgcnattttattaatattcatacttatttctaatttaccttcatatagtcttaactttttcaaaaaggatcccaggatatgatcaaataatatttttagtatctgaacttgccagccttagcttataccagagcttgttaccatgaaaatcctaaaaacctcaattttccttttcttttttaaaatttaagccaactcttattcaacttttcttcttcacagcagctgtttatagatagtagggagccaagaatgaaggacagtaacagatggaaagcaaaaagtacaacagctatcttaagttcagctctcaacattgctggttgagtttggaaccaaaacctcttaacaactggcagataatagctaaatcttaacagacaaagaagaaatattttctttgggacagctgctatctagaagaaaaccaaggtcccttaatatagtctaaatataatgtgtggcttattatagagaaatctttagcaacgtaagtttaaccagtaagtgtcacaactgatcaacagtacttaaaaggaaacaaacaaaaatcacactagccacaaatttccaccatatacacatgaaattaattttaatctgttttgactccttgacactaactgatcattaatgaaatatgatatggaaagatcacagagtagaaaacaagcaaagattagtttatacaacagtgactatatacatcagagggaaaacatgctagctaatgcaacattaaggcctgaatgtaagcatttcccaagtcacagaagccccaaagaactcctaaattacaaattcatcacattacatgcatgcaatgttcacttttgttttacccataaaaggatacacagtattttgctgtaaataccagacacatttacaatatatgcaaaaattagaatgcaagtgttttgttccttatatttaagcctcttttgtgccaacagtgaaaattcatttatttttaagaatgaaaaaaggagacgggttttaattactcagagaattacacgaataagatgtaactctgcatttgggaagccatataaattttccttttatgtgcccaaactaaattatcaatgtaccagttagatggacatacactcactttntnntttanttttttacttgctcaattnttctacantcntnattttttnntnttaacatcaaatcacttttntaantgaatttttttntccttgtttgcacntactcgtccantntntntgntcacctgaaggagacnttgtgcttcttngtttggggttatttaattacaaagatgaccctgtgcannttttcagaccttccaaaatactgtagaagcaaaattaccttaaactaactntaagcattnttaaacaaatgtgccatgantnttctgggccttcaagtntnattttaaccaaggagaaacaggttgggtaagaggttagaaagagtttcataaggccatctaattcagctcattgtaccaagccctgagcacactagattctttgtatgctttactaa

SEQ ID NO: 319228 - DNA, 2124 bp, Homo Sapiens
  misc_feature (318)..(318): n is a, c, g, or t
  misc_feature (320)..(320): n is a, c, g, or t
  misc_feature (379)..(379): n is a, c, g, or t
  misc_feature (406)..(406): n is a, c, g, or t
  misc_feature (414)..(414): n is a, c, g, or t
  misc_feature (426)..(427): n is a, c, g, or t
  misc_feature (431)..(431): n is a, c, g, or t
  misc_feature (435)..(436): n is a, c, g, or t
  misc_feature (445)..(445): n is a, c, g, or t
  misc_feature (563)..(563): n is a, c, g, or t
  misc_feature (580)..(580): n is a, c, g, or t
  misc_feature (642)..(642): n is a, c, g, or t
  misc_feature (650)..(650): n is a, c, g, or t
ttcagcctctaagaaatctttaatttcagcccgcacggagccctgcaagaaggtgagggaataaatacaaaaggttaagatgcagcatgccagcccccagcctgcaagggatggggggatgcttgttggccgcgatttctctcgtccgcaaaccggggcaggacacgctgtgagccaccgagctctgaaagtgacagtgttttccagcggtctgttaccccttgcaaagggaagttcctgcacccctagtccacaggttcctgggaaggccgttccttctcctgtccactaggagtgcgccagaggtccacgcccgangngcctgagggctctactagccccatcccagggtgtgcgtcacccacagagggtcccaganccctgcccagggggtgacacgcccggngatggggntcctgagagatnngcanccanncaagttctnaatcccctgattttcttcaccttttcatccaccctggcatcccaaatggcgcgttttgctccttccctttcaaaggagggaaactgagtcaagcaagggcaggagtaccctggggggnggctgtcctggtgagangcagagaagagagcggccagcagcgggccgtccgtcccccgactcccttgcgtgtgggccgnggctgganagatagcccagggacattaggggtcccttcaagccattcccacctcccacccgcccgcgggtgccgcctgccccaggtggggcctgggtcacagcaggttgatctcgtccaggtagcgggcgagcaccgagtcccgcacgtccttgaagaccttgcggatgttctgtgtgtctgtggcacatgtgtagtggctgaagaggcgtcggggtcgtgcgcccttcttgctgccctcgggggccgtccacgcacccggtgtacatcctcgtgtacatgtccaggatgaacctcttggctgcctcagcatcctgcttagggccctggaaactggggaaataggtagccaggtgggaggtggggattttctcctccaggatgtcggttttgttgagaaagaggatgacggatgtgcttttgaaccagggtagttccaggatagtcccaaacaatgcgaggctctccttcatgcggttctcctggttgttctcctccaggcactggtcgtattcactcagtgaggccaggtagatgagggcgatcacgttctcgaaacaatggatccatttcttacgctctgacttctggcccccgacgtccacgatccgcaggttggttttctgcacggagaagcagtactcgttgatgccagtggtgggcatgcggctgcggagcacgtcctgagctgtggggacgtagccctcctcggtgatgcgctccaggtgggacaggtagtacacggctgaatcgagcaggtggaattcccgccgacgctcatagcaggcccggatgccggcatccctccacagccactgcatggccgcagcgtagcgcttctcaaacgtggtcactttataggggtcctggctcatgaccaggctagcgtggtgcttgctctcgggcctgctgaatggaatctgcagccgctccatggcctcgatcatggcccgcatggacacgaagatgttctggtagaccaggggccggaagcccttgcgcttctcctccgagtagccggcgccgtggatgatccgcatctgcttgatgaaggtgctctttcccgctctcgcctgggcccaaaagcagcagcttcagctccccggggtcctgcttcttctgctccaggaggatccttgttgatctcctggtccacccgggcggcggccttctcatcctccgtcaggcaccaggggcagcagcgccaggtcagcgagcgggccatggtgcggtggcctcagtcggcaccgggtggcatcgcccccgggcccctgctggccagggcaacccccagcccagccggccctggagagggctccgggcaaccgggtgcgcagggaggctgccttttccttgggggtcaccccccagggacctagacttccttgcctgaaacacccaggaagcccggctcggcggtggcaaggcttgagtgctgggaacagggtggggacgggaggaggtggggaggccagggctcccc

SEQ ID NO: 319229 - DNA, 1415 bp, Homo Sapiens
  misc_feature (147)..(158): n is a, c, g, or t
ttttaaaaaaaagcgagccataagtcaaggccagaaaaaggctgcctttgccgttgacaaaaggtgagaaggtgcgcgaagtgtacggagggagagatgtacatcccctgataactgtgaaataaaaaccatttgttaaaaatatgnnnnnnnnnnnntctcctcccgcgggcagaggccccggcccggactcggcagcgccacccgcccggcagccgcaggctccgtggaaggaaggtcctgccccgtgtctccatcccgtctccctgggcctgggcgctcagaccaggttgtactccttgaggttgagctgcaggatggtgtccttcacggccgcgaacacgaagcggatgttctccgtgtcggtggcacacgtgaagtgtgagtagatgatcttgtcgctgtcggggttcaggtccacgaacatcttcaggatgaactcccgcgccggctgggcgtcccgctggggaccatcggactcggggaaagtagtccaaccagttgcgagtacaggatcttgtcctccagcaggtccttcttgttgaggaagaggatgacggaggagttctggaaccaggggtaggtgatgatagtccggaacagggctttgctctcctccatccggttctcgttgtccgactccaccaggacttggtcgtattcgctgagggcgacgagaaacatgatggatgtcacgttctcaaagcagtggatccacttcctccgctccgaccgctggccccccacatccaccatccggaagatgatgttttccaggtcgaaagggtactcgatgatgccggtggtgggcacgcggacccgcagcacgtcctgctgggtgggccaggtagcccaaggtggcgatgcggtcaacgtcggtcaggtagtacttggcagagtcggagagctggtactcgcgcctgcggtcgtagcattcctggatgcccgggtcctcccacagggtcttgatggcactgacgtactgatgctcgaaggtggtcaccttctccacgtccacctcccggatcaggagcgcattggccttgttctgctcgtacttgtagaggatcttgagcgtctccatggcccggatcatggcctgcatggcggtgaagatgttctggtagacgagcttggtgaagccgcgcttgtcctcctccgagtagccggcgccgtggatgatgcgcatctgcttgatgaacgtgctcttcccgctctcgcccgtgccgagcagcagcagcttgagctcgcgccgggcgtcgcgcttgtcccgccgcagctgcttctcgatctcggcgttgatccgcttggactccttcacctcatcgctcaggcaacacgccatcacctcgtgcggaattcgccacccaggcctggggctgggtggtgagggcgggggggagagaaaaaaacaa

SEQ ID NO: 319230 - DNA, 1098 bp, Homo Sapiens
  misc_feature (153)..(174): n is a, c, g, or t
  misc_feature (276)..(285): n is a, c, g, or t
cgctcccgggtttccccccccgtacgcgaaaattctatccgcgaggggggacacagagggtaaaactcccggggggggatcggttttcacccccccgttttggaagggttgtccgagcgggggaaagtcgttcaggattttcccccctccgcnnnnnnnnnnnnnnnnnnnnnnttaaataggattaaagggcccctgggtccccggtagaagaaccccaaaagcccctggaggcccatctggaattttttaaaaccactcgttcccccccggggnnnnnnnnnnggggggatcccaaccctatttatggccggggtttctttggaaaacagtatggcccacttctctttccctcgggggcccgcggcccaaagaaaaggtttaaaaaatttctggaggccgcggggcggcccccaaaaccaagttttcatttgttgttttctttctcgcgggaaaaaggattgggtggactttttcacaggggtgttttttatattactcttagcggggttatttttaagatttaatttttcaggaaccggtatttattatcaaagtcatattcgatgtcaacaagatgccacaactacaaaaaaaattgcgcacattgcaatctcaatgcaaacagtcaaatggaaccccagtcattaaaaaagtaattcaaattaccccaaaaagcaactgaattttttaaacatctttatacatccagccaacaaattaaaatggttaacaagaaaaaatacaaattcagaggtctcgtatcgatgtttaaaaaaggcaactgcttaagcgtttctatcaattcgaacgtcaatctctcggccactcagcttcatgccattcatcatccggcaggctctctttgttcacctactggttactcgaacttaaccacaccacacctctttgacttcccattctccatcttgatgttatcgttcatcaccacctcctaactcgtaagacattaatctttactttttcctatgtgaactcctactgcccaatctctcacaaatatctcgcaggctcttcttgtccacctcatatacatgctcctttaacttcaccaaaacaactctgcaaatcttcttc

SEQ ID NO: 319231 - DNA, 1030 bp, Homo Sapiens
  misc_feature (8)..(8): n is a, c, g, or t
  misc_feature (16)..(16): n is a, c, g, or t
  misc_feature (33)..(33): n is a, c, g, or t
  misc_feature (37)..(37): n is a, c, g, or t
  misc_feature (39)..(39): n is a, c, g, or t
  misc_feature (46)..(47): n is a, c, g, or t
  misc_feature (50)..(50): n is a, c, g, or t
  misc_feature (87)..(87): n is a, c, g, or t
  misc_feature (90)..(90): n is a, c, g, or t
  misc_feature (94)..(94): n is a, c, g, or t
  misc_feature (123)..(123): n is a, c, g, or t
tgatgtgnccaggtcnctcccccccttcagttnatancnttgggtnnggnccactttctggcaaactccacacagagtcttcaaagntgncganaaaagcagcatctggcagttcctgggcanatcctctggatgcggatgctctgatcttggtggccctgagtggctatcatgacatcagcctcatccagaacaaacaccttgattttcttgggatcaatgaacttgagcttggagcaccagtccagcacagtcccaggggtgccaatgacaatctgctcactgatcttctggcctctttccaatttattgcctcgaacagcataagctagcttcagttcagggtaaaatttgcccatttgttcaatcacttttcctgtttggagggcgagctcatacgttggggagagacatagacactgggggtatttgtttgcaggttctacttggctaagcatggccagcacgaaggcagctgttttaccagtaccagactgagattgggcaattaagttctgtgggggctcagcaagcatcagtggcaatgcgttctcttgtatcttggatggacgattgaaacccatggcatagactccttggagaagctgtggtttcagccgaagctcttcaaaagacttcaccgagtacagaggggagtttggatcccgctgcaggacttccacttggtttgtgttatcaacaaggttgcttctgatcagcttgttgagtaaggactgggcagctctgtcctctttctcttcttcatctgtcttctctgcattggcattggtcttgacaacagcaccattggtatctggtttgattttctcttccttaagatgcaagttgctcagcgactcagccgcagcttcctgctcgtccaccgccagggcccatgagtcagtggccatggtcccaggcgcgggtgggacgctcgtgctggtggattcgagggatggcacgagggatcgtgggctccgggggttcgcggcaggctctgctccagccccactacaaggctgcatcccgg

SEQ ID NO: 319232 - DNA, 1808 bp, Homo Sapiens
tccaaaaggtaaatctctgtgtattcatgcctaatcttccaaggttgtgtaaataatttttttctaccatcccccatcatttgcatacatttttgtcaagtccaaacataatttgaagtgaggtaggtagtttctctctacttgtgccgttgtccttggggtgatgtcggggcctgtgccctgaacgcacttgtctcctgtgcaggggcagtgccaggggctggcatcagtggctggtggagcttctcagttggctattttctcaatctcgtccaaatcatctgtgtccaatctttctatcttcttattaaaatgctcctggattctgttcaggatgttcatgctgtgcttgctgtccaccatgttcactgccaggcccctcttgccaaagcggcccgtgcgcccgatccggtgcaggtaggtctcattgtcaggattcccgtccttgtccacgggaagatcaaagttgatgacgacagacacttgttcaacatcaatgccgcgggcacacacgttggtggtcaccaaaaccttctctttgccctctcggaagcgctcaatcaccgcagccctctgctccaccatcatctccccactcagcagagccacctggtggccttcttttgagagctctgctgccagccaactagctgttttgcgagtatggcagaagatcatggcttgagcaatggtgatggccccgtagaggttacacaaggcctggaacttctcgtctctgctgctgcacaggacatagtactgcttgatggtatccagggtctcttcctcacgcttcagtttgataacatttgggtctgggaccactttctgggcaaacttccacacagagtcttcaaaggtggcggagaaaagcagcatctggcagttcctgggcagcatcctctggatgcggatgctctgatcttggtggccctgagtggctatcatgacatcagcctcatccagaacaaacaccttgattttcttgggatcaatgaacttgagcttggagcaccagttcagcacggtcccaggggtgccaatgacaatctgctcactgatcttctggcctctttccaatttattgcctcgaacggcataggcaagcttttcagttctgggtaaaaatttgcccatctgctcaatcactttttcctgtttgaagcgccagctcatatgttggggagaggcacagacactgggggtatctgtctgatggctccactcggctgagcatggctaagacaaaggcagctgttttaccagtgccagactgagactgggcaatcagattctgtgggggttcagcaagcatcatgggtaatgcgttctcttgtatcttggagggtcgattgaagcccatggcatagactccctggagaagctgtggtttcagccgaagctcttcaaacgacttcaccgagtacagaggggagtttggatcccgttgcaggacttccacttggtttgtgttatcaacaaggttgcttctgatcagcttgttgagtaaggactgggcagctctgtcctctttctcctcttcatctgttttctcggcagtggtactggttttgataataccattggtatctgctttgactttctcttccttgatctgcaaattggtcatcgacttgacagccgcttcctgctcgtccaccgccagggcccacgagtcggtggccatagtcccggacaagggagacccacttgtgaaaatatgcgctgcaccacgtcgcaacgcgggccctaacctcgccaccggcgcgagaatgcacctcacgcggaccggaagcggcggtgagcac

SEQ ID NO: 319233 - DNA, 1322 bp, Homo Sapiens
  misc_feature (149)..(149): n is a, c, g, or t
aaattccccctggtcaataacttcccattccaaaatttttgttccagctttgggccccggtgggacacctgggggtaagaaccaaatacggaaggcgctcagaaactcaccgggggtctcctggctgccgtgactgagtaccaggggcntaggcagagggagcaaccgagagaagagaaggcaagaccaggcccagccctttcatcggccctcgccagatcactctctctcaaggggtcaggattcagactttcgtgtttctctccaaatctgaagtttacaaaagtagccgagctgctcatcagggatatgcaagtctgctttctgcagcagagaacagaagtgaaagggagaagggatgagcaagaaagtctctggatttcaggagaaggaagacagccccaagggcaggagaaacacttgtgaagggtccattgaagagacagagagggggcagctctggcctctctgctgccacttccctcattcgatgcacagcggtggggctcacaccattttccactcagcctcttccgcacaacctgcacatctatcgtttcttcaggggctggagctggttccacgatgcctagccaaaatcaggaggggggtcctggggccagcgactaccactgtgaccagattattataaagatgggggaatgtggctttaaaaaagtggggaaaggacccaattttccaaaatgcaaattttttcttctattgccccccatcatttgcacctatttttgtcaagtccaaacataatttgaagtgaggtaggtagtttctctctacttctgccgttgtccttggggtgatgtcggggcctgtgccctaaatgcacttgtctcctgtgcaggggcagtgccagggctggcatcagtggctggtggagcttctcagttggctattttctcaatctcgtccaaatcatctgtgtccaatctttctatcttcttattaaaatgctcctggattctgttcaggatgttcatgctgtgcttgctgtccaccatgttcactgccaggcccctcttgccaaagcggcccgtgcgcccgattccggtgcaggtaggtctcattgtcaggattcccgtccttgtccacgggaagatcaaagttgatgacgacagacacttgttcaacatcaatgccgcgggcacacacgttggtggtcaccaaaaccttctctttgccctctcggaagcgctcaatcaccgcagccctctgctccaccatcatctccccactcagcagagccacctggtggccttcttttgagagctctgctgccagccaactagctgttttgcgagtcc

SEQ ID NO: 319234 - DNA, 423 bp, Homo Sapiens
tccagactcgcaaaacagctagttggctggcagcagagctctcaaaagaaggccaccaggtggtcttgctgagtggggagatgatggtggagcagagggctgcggtgattgagcgcttccgagagggcaaagagaaggttttggtgacccaccaacgtgtgtgccccgcggtgaagcaagaggacgtgtcccacctggtctgccaggctcggggtcccaggcccaattagagccagaaatccttgtatacagggaagtcggatggtctcagggagatgggtggggttggtgacactattcctttctaggagagactgtttggatttccctgaggtggtaagaactcacacatgccaggtgcggtgctcatgcctgcaatcccaaggcaggaaaattgcttgaaccctggagacagaggttgca

SEQ ID NO: 319235 - DNA, 2363 bp, Homo Sapiens
  misc_feature (1814)..(1814): n is a, c, g, or t
  misc_feature (1889)..(1889): n is a, c, g, or t
  misc_feature (1904)..(1904): n is a, c, g, or t
  misc_feature (1922)..(1922): n is a, c, g, or t
  misc_feature (1930)..(1931): n is a, c, g, or t
  misc_feature (1933)..(1933): n is a, c, g, or t
tctttactcaccattttaatactgccgccaactataacagattaaaaatgtacacatgacaaagtggaaaaaagtcccaaaatgcaacagtttcagcaaaagaacatactggctaaggattactacagttaacatcggtacagtaaaaacgatggcaaacagggatttggcaccacatttacaaagtaaaagcatgcactgttaatacactttagatgtttctcaacagaaaaggccatgaagatggaaaacaagaggcaccatgtacaaaactccctataactgagacaaacaagcaagaatcaaagtggtcaatttagtaaatatgtagcagcaaagtcactggttctgtttggaatttagcaatttgcatttctgattggcagctgccctgggtgtgtctgtatccaagaagctgactttatcatactacatcagcagtaatttggtaatctgcacaaacaaggttaaccttcaaccataagcttaaagaaaagagagaactagaatcttattgcagaactttccaatgtaattaccatatggaaaccataatggtactttgagcaggataataacataaatttcatttaaaaagttgtatttatagccccagtaaccggaaagaattataagtaattatggaagtattatattctgaccataccaagagttaaaaacaaagagttcctactaaagaggaatattttcaagatgatctggtcacatcatgtgcatagttaagattgtttgttttaataaagattcttttgcaaataaagaaataaaatttagtaaagttattcttctcttgatgaaaaaaccttaaaaatgaaccactggtggtttaagaaggggggaaaaaaagagtaagctacatattgaagttctagaatgcagcacctcaacttcacatcttccataagcatttaagattaagaaatccaagtgatgtcttgacgatcgaatcacactttatagttcttccaattccaatgtctgactttagcatctcatgtcaattaaaagttccctaatacaaaatattgtgctaaagagtgctaagattctgcatgctgctgccattccctggtcccgttcatgcttgtagctgccccatgagacagcaaaaggtgtctggtctcaacactccacactgtagtaactttcactaacatccatgcttctcaataaagtccacattcctttaagttgtttttaatgatgacatctgtaacagcatcaaaaacaaactgcacattcttcgtgtctgtggcacaggtgaagtgagtatagatctccttggtatcttttcttctgttcagatcttcaaactggcattgaatataggcagctgcctcttcatatgtattggaacctgtgtattctggataacagatagttaacggactcctctttattttttcctcaaaaaggtctttcttgttaaggaagagaatgattgaagtttctgtaaaccatttgttattacaaatgctgtcaaacagtttcatgctttcatgcattcggttcatctcctcgtcctcagccagaacaaggtcataatcactgagggccacacagaagataattgctgtcactccctcaaaacagtgaatccacttttttcgttctgatctttggccacctacatcaaacatcttgaagtataggtctttgaaggtgaaatgtgtttctacaatgcctgtggtcttcactctcgtccgaagaacatcttgctgagttggaatgtagttagactgggatattctatccagatcatttagataatatgaagcagaatcattgagctnatattccctggttctgttgaagcatgcttgtaccccaccttctcgccataaccgtttattcactcctgcttgttntggagtcttgactcntttttcagcactgccagntaaaacanntnattgccgggcttcatctgccctggcagcttccccaaagtcaatctttagccgtcccatggctcttatgattgcaatgatggactgtatagtattgctgtagacaactactttatattgtttacattcatcctctgaatagccatcctcatgaatgattttcatctgtttcacaatggtgcttttaccagattctccagcaccgagtagcagcagcttcacttctttggccgctttttccccgtcctcccgtaagttgcggtcgatcatcttgcttcgctccactgccgccttgtcttcggcgctcaacgtgcagcccatggcggcggcgggagaggggacacgggcccggactcactcacaccacggaaactgcggctcggcaggctgaggcaccgtctattgctgggcggtggccctctccgtcagctc

SEQ ID NO: 319236 - DNA, 1677 bp, Homo Sapiens
  misc_feature (59)..(59): n is a, c, g, or t
  misc_feature (137)..(137): n is a, c, g, or t
  misc_feature (178)..(178): n is a, c, g, or t
  misc_feature (210)..(211): n is a, c, g, or t
  misc_feature (285)..(285): n is a, c, g, or t
  misc_feature (289)..(289): n is a, c, g, or t
  misc_feature (311)..(311): n is a, c, g, or t
  misc_feature (321)..(321): n is a, c, g, or t
  misc_feature (334)..(334): n is a, c, g, or t
  misc_feature (336)..(336): n is a, c, g, or t
  misc_feature (360)..(360): n is a, c, g, or t
  misc_feature (364)..(364): n is a, c, g, or t
  misc_feature (402)..(402): n is a, c, g, or t
  misc_feature (436)..(436): n is a, c, g, or t
  misc_feature (448)..(448): n is a, c, g, or t
  misc_feature (450)..(450): n is a, c, g, or t
  misc_feature (476)..(476): n is a, c, g, or t
  misc_feature (510)..(510): n is a, c, g, or t
  misc_feature (514)..(514): n is a, c, g, or t
  misc_feature (795)..(795): n is a, c, g, or t
  misc_feature (1351)..(1351): n is a, c, g, or t
  misc_feature (1363)..(1363): n is a, c, g, or t
  misc_feature (1366)..(1366): n is a, c, g, or t
  misc_feature (1381)..(1392): n is a, c, g, or t
tgttgtcttgcgagttgtaaggaaaagtgcctttttaactgtttccacgccggtaagantctcccaccccaccacctcgggtcgacggagcaatgcctagagcaagagttgttcttgctgaactgcgaattgcaacngttccgtgttcttgcacttggcggttccccccgccccatcnaaaattgtgaattaagctccttgattgcaaanntggagaatgcatttggccagttatgcaaagtggcggaggtggcggggtcgggggcggggggtctctttcggaanaatncagtgcatggtttattagctanaatgaggaancgagaggtgctanangggatttgtggggagcgagcagcntaanttgttttaaatagcgggacccgtggcaggaagtgcttnatagaattgtacggaagagctgatgttgcttgtnaggttttgtaantnattctcctaaccgcttggcagataanctgttggtctgcacttgttttgcttgcacgtctnagcnaaaagcatttcgtgcagaatctacagatagaaacaggcggttttgcatatagatggccgtggacaaacattttagccttccatctgtgattggggacaagtgggttacttttctggtagctcagacactgcctgggattctcccggaaagctctgcacttgaaagggaaatgttactcattttccttttagatttttaccctagattctaacttcttattgccaggaactttttctgtactgtttctctttttgcattttcgtttctatttctaattgaangacaaaggggaaatttttattgatagttacagataggtaatgttacagaatgtagtacagaactttgctgaaaagcgacagtagaaggcttactaaaatttgatgtttttcaagaaaaatatcttgtaacttcagatattgacctcacctccttgactcaatttccttgtctatacatggggattttatgtggcaggatcattgtggatttcaagagataatgcaaatgagagcccagcattgagtctgccaaatggtggtttgaaaatgtttccttcccattccctgaaatcaacagcttcttcttggttacagaccttaatttttggatgttctgtttgcaagaatctttttttccactacctcttcttttgctccctgcataatggttgcttgtcttcctgcttctagaggtgagcatccatccttgggtgtcttatttccagcttgaataacacaaatcaaagcaaaactgtttacttttcttgagggtaactttggtgcctaggtgggtagttagtgtgaagagagagttttacctcttgcttccctggcnacattcttctcnccnaaaagattttgtaannnnnnnnnnnnaattcctcctctttgcctaccagctcttctgttatcaaaaggctaatcctctcattagttacctgtaaataagtctttccttgaatgctttctgtgtcaggtacttattaaaacgcacatcgcacataaacggttgcttcccacacgtaattcttataacacctctgtgaggttttatcccccagttgttttttaagaattgaggagcactatgaaaacacatgcacacgtatgtttattgcagcaccatttacaatagcaaagacttgaaccactcaaatccca

SEQ ID NO: 319237 - DNA, 397 bp, Homo Sapiens
agattcagttgtttgcgggcggccgggagagtagcagtgccttggaccccagcacattccaccccggtcatcagacaaaggcaccctcagagctaccccctgctccttctcaggctccatctggcctgagcaccctgccccagcgagtcctccggaaagagcctgtcaccccatctgcacttgtcctcatgagccgctccaatgtccagcccacagctgcccctggccagaatgtgatggagaatagcagtgggacacccgacatcttaacgcggcacttcacaattgatgactttgagattgggcgtcctctgggcaaaggcaagtttggaaacgtgtacttggctcgggagaagaaaagccatttcatcgtggcgctcaaggtcctcttcaagtc

SEQ ID NO: 319238 - DNA, 1250 bp, Homo Sapiens
tttacaaaaagcttcagcctttattaaacaaaggaggaggtagaaaacagataagggaacagttagggatcccttctttcccctatacatacacagacatacaaacacacgcacccgagtgaatgacagggaccatcaggcgacagattgaagggcagagggaggcagcaccctccgagagttggcccggacccaagggtgggctgagacctgggccaggggcagccgttccgaggggttatgcctgagcagtttggagatgaggtcctgggctcccgtgggcacagaagcggggaactttaggtccaccttgacgatgcggcgataggtctcgttgtgtgatgcactctcaaagggtgggttccccaccagcagctcatagcaaagcactccaatgcaccacagatccaccttctcattgtgcatgcgcccctcaatcatctctgggggcaggtagtccagggtgccacacattgtcttcctcctcagggagggcgcatgcacagaccagccgaagtcagcaatcttcagctctcccttgagccctaagagcagattttctggctttatgtctctgtgaatcaccttcttcccatggcagtacattagagcatctgccaactcctccatgatcgtggctgttcgctgctcgtcaaatgtgcagctcttctgcagctccttgtagagctccccgcggggggcatactctagaatcaagtagatcctcctccggtcataaaaatagttgtagagacgcaggatgttgggatggtgcaggtgggcctggatttcgatctctctgcgcagctgatgctccacgccctccttctctatctgggacttgaagaggaccttgagcgccacgatgaaatggcttttcttctcccgagccaagtacacgtttccaaacttgcctttgcccagaggacgcccaatctcaaagtcatcaattgtgaagtgccgcgttaagatgtcgggtgtcccactgctattctccatcaccttctggccaggggcagctgtgggctggacattggagcggctcatgaggacaagtgcagatggggtgacaggctctttccggaggactcgctggggcagggtgctcaggccagatggagccgtctgtcggccgtagggccaggggtaggagttctccttctgggccatccttagagagaaagggggaggagagctggggtccaaggcactgctactctcccggccgcccgcaaacaactgaatctccc

SEQ ID NO: 319239 - DNA, 851 bp, Homo Sapiens
ctggtacggtccggaattccgggatatcgtcgacccacgcgtcggtagcagtgccttggaccccaggctccatctggcctgagcaccctgccccagcgagtcctccggaaagagcctgtcaccccatctgcacttgtcctcatgagccgctccaatgtccagcccacagctgcccctggccagaaggtgatggagaatagcagtgggacacccgacatcttaacgcggcacttcacaattgatgactttgagattgggcgtcctctgggcaaaggcaagtttggaaacgtgtacttggctcgggagaagaaaagccatttcatcgtggcgctcaaggtcctcttcaagtcccagatagagaaggagggcgtggagcatcagctgcgcagagagatcgaaatccaggcccacctgcaccatcccaacatcctgcgtctctacaactatttttatgaccggaggaggatctacttgattctagagtatgccccccgcggggagctctacaaggagctgcagaagagctgcacatttgacgagcagcgaacagccacgatcatggaggagttggcagatgctctaatgtactgccatgggaagaaggtgattcacagagacataaagccagaaaatctgctcttagggctcaagggagagctgaagattgctgacttcggctggtctgtgcatgcgccctcccctgaggaggaagacacttgtgtggcaccctggactaccttgccccagagatgatgagggcgcatgccatgagaaggtggatctgtggtgcatcggagtgcttgctatgaactgtggtggggaaccacccttgagagtgctccccagagact

SEQ ID NO: 319240 - DNA, 1353 bp, Homo Sapiens
  misc_feature (68)..(68): n is a, c, g, or t
  misc_feature (587)..(944): n is a, c, g, or t
  misc_feature (1013)..(1014): n is a, c, g, or t
  misc_feature (1282)..(1282): n is a, c, g, or t
  misc_feature (1329)..(1329): n is a, c, g, or t
gaagggtgtgggccagggaaaagggggaaataagcagaaccctgggaaaggcaggatcacccgtggtnccctttaataccttccccaactgccctgaagtccccagaagtcatgggacacaaacactcccagtcccccactgtctctctagcctctgatatgcattctttccctgtgtatatacatgcccttttccccataaaatgcaccagtctctcaccacactaattctgagtacttcagagtctcacaggtcattctgggtctagaataggctccccaactcagtgattataagtaggaagaggaaaagcaacacatggggattctgagccaggctttatgacaactaattcctgctggagagaagagtcctgatgatgggctgtctccagatcctatcttatcttcatgccattgtatgggctataacctctgcctgtaactctctctgctaatttttattttggcagttttaattaacccacaattgctgagggcaattaatacctaaaagaaagtttgattcctcttctaagatatcctaggtagtgtcatttctaaagaagacttggtgatcactgctnnnnnnnnnnnnnnnnnnnnnnnnnnnnnnnnnnnnnnnnnnnnnnnnnnnnnnnnnnnnnnnnnnnnnnnnnnnnnnnnnnnnnnnnnnnnnnnnnnnnnnnnnnnnnnnnnnnnnnnnnnnnnnnnnnnnnnnnnnnnnnnnnnnnnnnnnnnnnnnnnnnnnnnnnnnnnnnnnnnnnnnnnnnnnnnnnnnnnnnnnnnnnnnnnnnnnnnnnnnnnnnnnnnnnnnnnnnnnnnnnnnnnnnnnnnnnnnnnnnnnnnnnnnnnnnnnnnnnnnnnnnnnnnnnnnnnnnnnnnnnnnnnnnnnnnnnnnnnnnnnnnnnnnnnnnnnnnnnnnnnnnnnnnnnnnnnnnnnnctgctgttgtgggtaataggggaggtgaaattggggggacaattcggcctctttgtgtccagaggttgnncagttatcgagtgaggtcgatcagaagtctaaagggatctttcaaatggatagtgagttgccttttcctataggtgacaatcagagatttaatgttttaagtatcatataataggtttttctcctgattgtgaattgtaagtgttggtaatacagaaaatgagaaagtataaaccacccccaatcccaatgcccatagaaacgttgttaacattttggagtactttctattagtgtttatttttcccaatcctagtatttttagtaanactactgtttagtaaatgatttttggtaactaatttcaaaatttatncttcaaccgttattattagaatgt

SEQ ID NO: 319241 - DNA, 1051 bp, Homo Sapiens
  misc_feature (453)..(810): n is a, c, g, or t
  misc_feature (813)..(813): n is a, c, g, or t
  misc_feature (820)..(820): n is a, c, g, or t
  misc_feature (822)..(823): n is a, c, g, or t
  misc_feature (828)..(828): n is a, c, g, or t
  misc_feature (838)..(838): n is a, c, g, or t
  misc_feature (843)..(843): n is a, c, g, or t
  misc_feature (854)..(854): n is a, c, g, or t
  misc_feature (922)..(922): n is a, c, g, or t
  misc_feature (933)..(933): n is a, c, g, or t
  misc_feature (937)..(938): n is a, c, g, or t
  misc_feature (941)..(941): n is a, c, g, or t
  misc_feature (943)..(943): n is a, c, g, or t
  misc_feature (946)..(946): n is a, c, g, or t
  misc_feature (950)..(950): n is a, c, g, or t
  misc_feature (967)..(967): n is a, c, g, or t
  misc_feature (983)..(983): n is a, c, g, or t
  misc_feature (994)..(995): n is a, c, g, or t
  misc_feature (1007)..(1007): n is a, c, g, or t
  misc_feature (1010)..(1010): n is a, c, g, or t
  misc_feature (1018)..(1018): n is a, c, g, or t
  misc_feature (1027)..(1027): n is a, c, g, or t
  misc_feature (1031)..(1031): n is a, c, g, or t
  misc_feature (1034)..(1034): n is a, c, g, or t
  misc_feature (1042)..(1042): n is a, c, g, or t
aacttttaaaactcaagttttattgcaatacatcttgcattacattctaataataaacggttgaagtataaattttgaaattagttaccaaaaatcatttactaaacagtagttttactaaaaatactaggattgggaaaaataaacactaatagaaagtactccaaaatgttaacaacgtttctatgggcattgggattgggggtggtttatactttctcattttctgtattaccaacacttacaattcacaatcaggagaaaaacctattatatgatacttaaaacattaaatctctgattgtcacctataggaaaaggcaactcactatccatttgaaaagatccctttagacttctgatcgacctcactcgataactgcacaacctctggacacaaagaggccgaattgtccccccaatttcacctcccctattacccacaacagcagnnnnnnnnnnnnnnnnnnnnnnnnnnnnnnnnnnnnnnnnnnnnnnnnnnnnnnnnnnnnnnnnnnnnnnnnnnnnnnnnnnnnnnnnnnnnnnnnnnnnnnnnnnnnnnnnnnnnnnnnnnnnnnnnnnnnnnnnnnnnnnnnnnnnnnnnnnnnnnnnnnnnnnnnnnnnnnnnnnnnnnnnnnnnnnnnnnnnnnnnnnnnnnnnnnnnnnnnnnnnnnnnnnnnnnnnnnnnnnnnnnnnnnnnnnnnnnnnnnnnnnnnnnnnnnnnnnnnnnnnnnnnnnnnnnnnnnnnnnnnnnnnnnnnnnnnnnnnnnnnnnnnnnnnnnnnnnnnnnnnnnnnnnnnnnnnnnnnnnagnagtgatnannaagtnttctttaganatganactacctaggntatcttagaagaggaatcaaactttcttttaggtattaattgccctcagcaattgtgggttaattaanactgccaaaanaaannttngncgngagngttactggcagaggttntagcccatacaatggnatgaagataanntaggttttgagncanccatcatnagggctctntctncanaggaattnttgtgataa

SEQ ID NO: 319242 - DNA, 152 bp, Homo Sapiens
gctgagggcaattaatacctaaaagaaagtttgattcctcttctaagatatcctaggtagtgtcatttctaaagaagacttggtgatcactgcttgtattagtccattttcacagtgctatgaagatactacctgatactgggtaatttatt

SEQ ID NO: 319243 - DNA, 858 bp, Homo Sapiens
  misc_feature (19)..(20): n is a, c, g, or t
  misc_feature (27)..(28): n is a, c, g, or t
  misc_feature (32)..(32): n is a, c, g, or t
  misc_feature (36)..(36): n is a, c, g, or t
  misc_feature (66)..(66): n is a, c, g, or t
  misc_feature (68)..(68): n is a, c, g, or t
  misc_feature (71)..(72): n is a, c, g, or t
  misc_feature (75)..(75): n is a, c, g, or t
  misc_feature (77)..(77): n is a, c, g, or t
  misc_feature (89)..(89): n is a, c, g, or t
  misc_feature (92)..(92): n is a, c, g, or t
  misc_feature (99)..(99): n is a, c, g, or t
  misc_feature (104)..(104): n is a, c, g, or t
  misc_feature (128)..(128): n is a, c, g, or t
  misc_feature (138)..(138): n is a, c, g, or t
  misc_feature (141)..(141): n is a, c, g, or t
  misc_feature (143)..(143): n is a, c, g, or t
  misc_feature (150)..(150): n is a, c, g, or t
  misc_feature (177)..(177): n is a, c, g, or t
  misc_feature (194)..(194): n is a, c, g, or t
  misc_feature (199)..(199): n is a, c, g, or t
  misc_feature (202)..(202): n is a, c, g, or t
  misc_feature (209)..(209): n is a, c, g, or t
  misc_feature (212)..(212): n is a, c, g, or t
  misc_feature (251)..(251): n is a, c, g, or t
  misc_feature (271)..(271): n is a, c, g, or t
  misc_feature (275)..(275): n is a, c, g, or t
acatttccacctctctatnngtctttnntcantttncctctctttgtttgtctcaccctttatttntnggnnttnancccccactccanggnctggggnccttnttcccccttccctcaaacctgggngcgtataggnagnanaaccctnaccactgagtaatacagccccaggggngggaggagaccccaggnagggnggntgggggnagntctcttctctccccaggacccaggctgtggatcacgggncctgccagcttgagtgtagngggnggggggactctacccttctcagccccaccagcccccctctgcccaaccacaattttcccttcctccgccttcctctccctctcctgtttacactccccaaatgcgcacaggctgttatcatgggtcctgagtcatcccacacacagcctgccccagcgtccctgcccccagctggccgcagggcccgccccatggagccccctgccgccctgggctaatgggagccagatggccgcctggtgactcagccaccgggcctgtgggaacccaggcgtcccgccttcccatgcccccacacccggctcctgctcccccagcagacacacacaggagggcctggccactgttgagggggcacacagggcaagggtcaccaagtcggggcctagggactcctcatgcctctgagatggaatggtggtatcctgccgtgccaagcctgaaggaccctcaaaactgcctcctggagtccacggttcctgacctccgagcctcagctatgccctctgggtcaaccagaattagagccagacagggaaagtgagagctggatggaggcagacaagatgctcagagcgactat

SEQ ID NO: 319244 - DNA, 734 bp, Homo Sapiens
  misc_feature (44)..(44): n is a, c, g, or t
  misc_feature (113)..(113): n is a, c, g, or t
  misc_feature (129)..(129): n is a, c, g, or t
  misc_feature (139)..(139): n is a, c, g, or t
  misc_feature (152)..(153): n is a, c, g, or t
  misc_feature (159)..(159): n is a, c, g, or t
cttccttgactgaggcaatacattttgtgttacttgtataatanaacagtagatttacataccagactggttgattggcttcaaaccaaacagtccaataactgacgcattanatctttattgactaancagcttaaancattactactatnncctttnatttgttgttgtgaattttactcagaattaaagataaatgattagtaattacaggaaaactaacttgtaaaaatcttaaagacattgaatgggttaatgtactgagcagctacggaatgcaaggcactgtaggagtagggtgagtatactccccacaagggctcagggtcaggcaggggaggttagataaaaacccacagccatacactagctggcctgtcctgagggttgtgaggcacaaaatgctaggagactagagaagtaagaaatgtcttgacatgaggagaaatcaaggaaagcatggttttagaacatgtgtgggatgttttttgtatcgagactgaagaggctttttaaagtggagggaaggcaaactgaggcatagagatgccaataccaggtcttgtcaggaagaacagagtccaatttggctgcaggatagggcatatgtaggggaggggataagactggcatgggggcagagggggacttgaatgtcaggtgacagagtcaaagcttgcactcaagtaggtgattgataggtgatactaactcccctgaacctgtctcgtgcc

SEQ ID NO: 319245 - DNA, 1028 bp, Homo Sapiens
  misc_feature (932)..(932): n is a, c, g, or t
  misc_feature (961)..(961): n is a, c, g, or t
  misc_feature (973)..(973): n is a, c, g, or t
  misc_feature (977)..(978): n is a, c, g, or t
  misc_feature (1001)..(1001): n is a, c, g, or t
  misc_feature (1010)..(1010): n is a, c, g, or t
  misc_feature (1017)..(1017): n is a, c, g, or t
ttttcttctcgggctgcaaacaaagggaagcctgcaacaagttaagctgaagaccgaagcaagagctggttcaggtggcagccacagcagcctcagggacctcagcaactatggcctcctgcccagactctgataatagctgggtgcttgctggctccgagagcctgccagtggagacactgggcccggcatccaggatggacccagaatctgagagagccctgcaggcccctcacagcccctccaagacagatgggaaagaattagctgggaccatggatggagaagggacgctcttccagactgaaagccctcagtctggcagcattctaacagaggagactgaggtcaagggcaccctggaaggtgatgtttgtggtgtggagcctcctggcccaggagacacagtagtccagggagacctgcaggagaccaccgtggtgacaggcctgggaccagacacacaggacctggaaggccagagccctccacagagcctgccttcaacccccaaagcagcttggatcagggaggagggccgctgctccagcagtgacgatgacaccgacgtggacatggagggtctgcggagacggcggggccgggaggcggcccacctcagcccatggtgcccctggctgtggagaaccaggctgggggtggcctctcagagtctgagactgggcccatggaggaagtggagcggcaggtcctcccagaccccgaggtgctggaagctgttgggggacaggcaggatgggctaagggaacagctgcaggccccagtgcctcctgacagtgtccccagcctgcaaaacatgggtcttctgctggacaagctggccaaggagaaccaggacatccggctgctgcaggcccagctgcaggtgggcacaggcaggaggggctgggctagggtaaccacctaggcnaggcgtctgtctagcatctccccaaaagnatgtttctattnaccnncatctgacctccctctccactanataggggtntccagtnttggttaatcc

SEQ ID NO: 319246 - DNA, 1992 bp, Homo Sapiens
  misc_feature (37)..(37): n is a, c, g, or t
  misc_feature (57)..(57): n is a, c, g, or t
  misc_feature (65)..(65): n is a, c, g, or t
  misc_feature (102)..(102): n is a, c, g, or t
  misc_feature (198)..(210): n is a, c, g, or t
  misc_feature (383)..(383): n is a, c, g, or t
  misc_feature (455)..(455): n is a, c, g, or t
  misc_feature (488)..(488): n is a, c, g, or t
  misc_feature (603)..(603): n is a, c, g, or t
  misc_feature (615)..(615): n is a, c, g, or t
  misc_feature (626)..(626): n is a, c, g, or t
  misc_feature (641)..(641): n is a, c, g, or t
  misc_feature (691)..(691): n is a, c, g, or t
  misc_feature (1762)..(1762): n is a, c, g, or t
accattccagggaaacggcccaccgtgggccggggcnggcacccacacccgtccttnccccatgngttatcccctttcctagaagaccttccttggaaaatnggtaggattaccatatccatatgtccttggaaacatcctgttgactatttctgtacatcacagtaaaaagtacaagactgcaatggcataaaggcnnnnnnnnnnnnngcattataaccagcagaaataattgaggcagatactttgtaatgtctcagatgtgaaaactggttatctggatatttggcaaaaaatactgactctgtcaaatgaacaaacctggaacaagaaatagtttcaaaatggaaatatagaaatcgcagttaacattgttttaaaanatcaaatccaaattaaattttgcccccccagatatcactagagcttatttcttacaaacgcatcattgagcnaaatgtcaggtcctgtgtataggggccttatcnaagcctttttggggtcattattcctgtgtgtgttccttctttttagctaaaacaaactcaaaaacagaagtgctgtttcaataacaacaaggttataagccaatgaagtgaagtnaatggttttccnttgtctcaggntttgctatccaagtnattcgtgtgtccagtgaccccaggtaatcagatgccacgtgcagcagaanatcaggttttcagccactgggaaataccaacgggatagtgttgccgacaatggcagtgactctaggggttttcccactggtgtgttgaagtctcgttccactttccgctctaccaatccagcttcagatcagccttactccatatgtgttttcctcctcgcttcagaaacatcttttcatcaaatccactgaattttatagcttcttctacaccaacatccaggatggacttggaagggtccttccgtccctttctacagttcagaaagcgcatatattcatccagaataaggtaggagtctttcatcttctggttagattcaggcaccaagcaggacacttctttgtggcgctccaagaatctttcaaattcttcatcaccaataacaaatctttctgcttctcttagagcatcttctccacaattctcaccctcaattaagaggcactgggacactttccagcggacagggtttagtgctttgatctgttccgtcatgtcctcttccacgttgtaacgatttatgacagaatttatcttgaaagcgactttattatccctacaccacctcctcagcttttgaaggttttccacatggttcttctttccttggccacggccaataaggacattgacttcctcgtcaaagctgtcacaggagatagcgagaatgtccaaatactcaccataattctggaaccacctctcccggatcaggcttccatcgctcacgatgctcacgctgggcagccgcaactctactttgcagaacctcaccaacttgcccaggtattctccccggtcttgaagaaatggctctccacctgaaaagttgatcttctccataccagcttccttaagcaaaagcaatcctctctttgcttcctcaaggggcagcacaaaggatgttttggctgtgtggaaacagaagccgcatttgtagttgcactggcgagtgaagtgatagttgacgctggttggggtggtgggcagaggagggtcctcttcctcctctttggtctcatctggccctctcaggaccagctgctgctttctcctcttggtagctngcagccagaaggttgccctcagccagcagaacagcgggaccaggctcctccacagagagctcagaggttgcctgaacacactcaagagcttcccagcaaaagcagcaggtgtaagcacccacattgtggcagatgcctggagcagagcagtccctgtatgccagggactctctttatatagggatggaaatcagcagtctctgagcaacctgtcattggggagcaggaca

SEQ ID NO: 319247 - DNA, 1285 bp, Homo Sapiens
agaaaatgttattcttttattatttcaaggaggtaatacatagcccaatatggcaaagcaaaagggaattagaggcagcaaatggccaggtttttctaagcgcctcatgctgcatctctgagctcctgtctgcccgcagcccacagctgcttacatgaaggccaggtcagtagacagatggcccaacttgatactccactgactgagaaagggctcaatgtgcagcacagcagaggcactgccaggacccagcacgctgggcggcaccccacgctgccaccaccagctacagaggctagtgccttagtagcagccagtgtgtctagcacttgattttattcctgtgagcctagagtgggcaggacgtgaataaatcctgagtcataagttaaggtgaaagacttagtagtgttaatactcttggtgagaaaagacaacacagtcttggaggagagtgggcttggagtctggtggaagaaagatagaaacccccagaagggcctcggcctgcaggcactgccttgaggccatcagagggggttttcacggtacatgatagggaggagtgaggcaggtgggcactggagggctgtttcctctggcacagttgaactagagggtcactttccactcataattggtttcctaggtctaagtcaccacacctggggctgaagcaagtcttgcctgtgcaccaagcgtggccttggaccctggagagatgcaaggctcagttctccagtgttgaagtggaaggactcccaactgaaggagatctttctctccccacctccagctcttttcccttacaaatgaccagggtgcaagtcgagaggcagaggcacctcctggtgcaactccaccacagtcttacagagaactcatcttggtgggacccaaagcccagccttggcatgaagcagacttattcccacccatcggagggcaccccagtctggtgactgaaatggtggcgtgccaagtgggagtcagcagtggctctggatgcccgtaatactcagatgccattcatctctgtgtgatcgtccctggctggagagctggtgaggagggactgcttcctcctggcatgcactgttcaccaaccacaccacgtgggctgatagatttttggtttgacaggtgtggaaagaatttttaaaaccagccactgtgttctccaaacccagagccattggttttgtttgacaagaaagtaccaagagaaccacagctccactgaggctaaggcttgtgtagcacagaatgcagtatgtattgaaac

SEQ ID NO: 319248 - DNA, 1375 bp, Homo Sapiens
aactctttccccaaaattcccattttccccaggtggcaaaaaggaaaattccttctacccattaccatttcctggccatttcccacataaaaatgatgtttgcaccttggttaccccctacccatatcggtttcacctttccaaacgcttctccaaaattgggattcagcacccaatcttcagcaattctattttggaaaagatgtgtatggtaaacccgtgtctgaaaacagctgcccctgggtgcctataacagcaatgccagagtctaattatatgaacatatctgccatttcagaaatcgcccttacgttttcttgtctgctcgggtacatcctggagaaactaatgcaagttgggttatgaaaggaacgttggaatatctcatgagcaataaccccactgctcagagcttacgagaatcttatatttttaaaattgtccctatgttaaatccagatggtgtcatcaatggaaatcatcgctgttctttaagtggagaggatttgaataggcagtggcaaagtcccaagtccggatttacatcctacaatttaccatgctaaggggctggttgcaatacttggctgccagtgaagcgtttacccttggtttattgtgattatcatggccattcccgaaagaagaatgtatttatgtatggttgcagcatcaaagagacagtgtggcataccaatgataatgcaacttcatgtgatgttgtggaggatacgggatacaggactttgcctaagatactgagccatatcgccccagcattttgcatgagcagctgtagcttcgtagtggaaaaatctaaagaatccacagcacgtgttgtagtttggagggaaataggagtacaaagaagttataccatggagagtactttatgtggctgtgatcagggaaaatacaagggtttacagattggtacccgagaactggaagagatgggagcaaaattttgtgttggtcttttacgtttgaaaagactgacctctccattggagtataatctgccttccagcctgcttgactttgaaaatgatttaattgaatcaagctgcaaagtaactagccctaccacttatgtcttggatgaagatgaacctcgattccttgaagaagttgattacagtgcagaaagtaatgatgagttagatattgagttggctgaaaatgtaggagattatgaaccttctgctcaagaagaagtactttctgactctgaattatcaagaacatacctaccttgagcccgctgccatctcttgttaactgcaaagaataaatgaaatatcttggtttttatttcccaggaagcttgagagaaatgagtttatacagagctgactcaaaaagacaaaaagta

SEQ ID NO: 319249 - DNA, 542 bp, Homo Sapiens
cattggaggccagcagcgtggcctgctgcgaaatgagagtcaccaggcgtctaagcaggaaggacagcagcaaggaaaagccagcaatgtagagattcctctgggcacggaaaagcttcatgtggaagtgctccatggccccgggattgttctggaggttcaccttttccgtcacatcatcatacttccgaatttcgcgcacggcatcgatgaccaacagcacaaggatgacaatgagaaccacaaagaaggtgttgccataggacactaacaactccaccagccgggacttgaaaatcttctgccatcttttaggagaaatgaagggaatgcagagaagcaacacaacaaagacctccgcatagaggaaggtggcaactgcagtccactgcagactcatcctgttgctagaaggtttcccacaggaagatgtgagcttgtttcagtagccctcgcgggccccagcgcccacccagagcgaggggcctccgacttggccccggcctggcacaccgtcccggaggcccatcccggccgctcct

SEQ ID NO: 319250 - DNA, 1364 bp, Homo Sapiens
  misc_feature (36)..(36): n is a, c, g, or t
ccgacagggtttggtggttggcgaacgggctggcgngggaatagcacaccatgacaacttttattgccctcaagagaaactccagtccacctgctccacccaccctcctgcgggaccaaagaaaacacccagagggcaaaacaaaaaggggctcaaaccaacaggaagtcagccccaccgcaagccggactacaactaactcgtgctctccacgctcaggcgtggaagccaaggctgtgccaggcctggccaggccaagcaggatgacagcaaacgcattctgaacgtgtagcaatcaggtcccctgtaatgtgcttggagagtgtggacaagggccgagatgacgagctatgagctgtggaagggaatgggggaagcagaagggcacaaacagaagtactggagggagaggccgggctctcaggaagcagcaggcacgtgccaggtggaagccagctgcaggcaggggaggaaggaggcccttactcttccttcttgtccatgggaccatctactgcagcctgcagctttgcgtgctcctccagcaagcggtcgtactccttggtgaggccctcagactgcttccgcatggccagaacctggttttcagctttctctagtttttgcttagtgctggccagctcgtcctttagcttctgcaggtcagccttcaggctcctgttctcttcctccaacttcacctcagcattcccgacatccaacttgcctccgtcaacagcagctcccttcttgagctggtcattctcctccatgtacttcttggccgcctcactagcactctccgcctgctttttaaaggcttcattggaggccagcagcgtggcctgctgcgaaatgagagtcaccaggcgtctaagcaggaaggacagcagcaaggaaaagccagcaatgtagagattcctctgggcacggaaaagcttcatgtggaagtgctccatggccccgggattgttctggaggttcaccttttccgtcacatcatcatacttccgaatttcgcgcacggcatcgatgaccaacagcacaaggatgacaatgagaaccacaaagaaggtgttgccataggacactaacaactccaccagccgggacttgaaaatcttctgccatcttttaggagaaatgaagggaatgcagagaagcaacacaacaaagacctccgcatagaggaaggtggcaactgcagtccactgcagactcatcctgttgctagaaggtttcccacaggaagatgtgagcttgtttccgagtttcccacagtcaacgtgcaggccccgccgcagcaaccgaactctcccacagcagccccggccccgcccctcataccgcggccggaaaccgga

SEQ ID NO: 319251 - DNA, 1427 bp, Homo Sapiens
  misc_feature (182)..(230): n is a, c, g, or t
  misc_feature (423)..(423): n is a, c, g, or t
aatggaggggtggatgatacgctattcggtttgaggggggtgtcaaaaggagaaacgcgcccggagggtgaagtgcgcaaattggggggtgttagaggggcagtgagggaaatgcaaggggccgcactcgtagaatcatggatcttcgcaattgaagttgggggttttttgcccggttccannnnnnnnnnnnnnnnnnnnnnnnnnnnnnnnnnnnnnnnnnnnnnnnnaagcaggggggggcaggcaaaacgcattggtgaaaggtggagcaattcagggtccccctgtaatgtggcttgaagcattgggacaaggggcccgagactacgaagcttatgagctgtggaaagggaattgagggaaggcagaaggggcacaaaccagaaggtactgggagggaggaggcccgggctctcaggnaagcagcaggcacgtgcccggtggaagccagctgcaggcaggggaggaaggaggccccttactcttccttcttgtccatgggaccatgtattgcagcctgcagctttgcgtgctcttccagcaagcggtcgtactccttggtgaggccctcagactgcttccgcatggccagaacctggttttcagctttctctagtttttgcttagtgctggccagctcgtcctttagcttctgcaggtcagccttcaggctcctgttctcttcctccaacttcacctcagcattcccgacatccaacttgcctccgtcaacagcagctcccttcttgagctggtcattctcctccatgtacttcttggccgcctcactagcactctccgcctgctttttaaaggcttcattggaggccagcagcgtggcctgctgcgaaatgagagtcaccaggcgtctaagcaggaaggacagcagcaaggaaaagccagcaatgtagagattcctctgggcacggaaaagcttcatgtggaagtgctccatggccccgggattgttctggaggttcaccttttccgtcacatcatcatacttccgaatttcgcgcacggcatcgatgaccaacagcacaaggatgacaatgagaaccacaaagaaggtgttgccataggacactaacaactccaccagccgggacttgaaaatcttctgccatcttttaggagaaatgaagggaatgcagagaagcaacacaacaaagacctccgcatagaggaaggtggcaactgcagtccactgcagactcatcctgttgctagaaggtttcccacaggaagatgtgagcttgtttcctgccccctccagcacgtgtgtcaacacgtccagagcggcctctcccgacgatccctgccccaggaagcccgagatttccgacgcccgtttaactgaaaggcgttcttcgggaagagcagtgccagggcaccaagaggaggacgcctcggcacccatcggg

SEQ ID NO: 319252 - DNA, 924 bp, Homo Sapiens
  misc_feature (79)..(89): n is a, c, g, or t
ggccctcaaggagaaaattccagtcccccctggttcaagccaaccttcctggggggcccaagaaaacacccagagggcnnnnnnnnnnngggctcaaacccaccaggaagtcagccccccccgcaaagccggactacaacttaactcgtgctctccacgctcaggcgtggaagccaagggctgtgccaggcctggccaggccaagcaggatgacagcaaacgcattctgaacgtgtagcaatcaggtccccctgtaatgtgcttggagagtgtggacaagggccgagatgacgagctatgagctgtggaagggaatgggggaagcagaagggcacaaacagaagtactggagggagaggccgggctctcaggaagcagcaggcacgtgccaggtggaagccagctgcaggcaggggaggaaggaggcccttactcttccttcttgtccatgggaccatctactgcagcctgcagctttgcgtgctcctccagcaagcggtcgtactccttggtgaggccctcagactgcttccgcatggccagaacctggttttcagctttctctagtttttgcttagtgctggccagctcgtcctttagcttctgcaggtcagccttcaggctcctgttctcttcctccaacttcacctcagcattcccgacatccaacttgcctccgtcaacagcagctcccttcttgagctggtcattctcctccatgtacttcttggccgcctcactagcactctccgcctgctttttaaaggcttcattggaggccagcagcgtggcctgctgcgaaatgagagtcaccaggcgtctaagcaggaaggacagcagcaaggaaaagccagcaatgtagagattcctctgggcacggaaaagcttcagtggaagtctccatgccccgggatgttccctcgt

SEQ ID NO: 319253 - DNA, 508 bp, Homo Sapiens
  misc_feature (32)..(32): n is a, c, g, or t
  misc_feature (37)..(37): n is a, c, g, or t
  misc_feature (45)..(45): n is a, c, g, or t
  misc_feature (76)..(76): n is a, c, g, or t
  misc_feature (83)..(83): n is a, c, g, or t
  misc_feature (101)..(101): n is a, c, g, or t
aagcccaacaacgtggccctgctgccgaaaangaaantcaccccngcgtcctaaagcgggaaggaacagcaaccanggaaaancccagcaatgtaagagantccctcctggggccacggaaaaagcttccatgtgggaaagtgcctccccatggccccccgggattgttcctgggaggttcacccttttcccgtcaacatccatccatacttcccgaaatttcgccgcacggcatcgatgacccaacagcacaaggatgacaatgaagaacccacaaagaaggtgttgcccataggacactaacaactcccaccagccgggacttgaaaatcttctgccatcttttaggagaaatgaagggaatgcagagaagcaacacaacaaagacctccgcatagaggaaggtggcaactgcagtccactgcagactcatcctgttgctagaaggtttcccacaggaagatgtgagcttgtttccgagtttcccacagtcaacgtgcagccccgc

SEQ ID NO: 319254 - DNA, 1582 bp, Homo Sapiens
  misc_feature (257)..(257): n is a, c, g, or t
  misc_feature (414)..(414): n is a, c, g, or t
  misc_feature (876)..(876): n is a, c, g, or t
  misc_feature (883)..(883): n is a, c, g, or t
  misc_feature (896)..(896): n is a, c, g, or t
  misc_feature (1425)..(1425): n is a, c, g, or t
  misc_feature (1429)..(1429): n is a, c, g, or t
  misc_feature (1542)..(1542): n is a, c, g, or t
  misc_feature (1550)..(1550): n is a, c, g, or t
  misc_feature (1562)..(1562): n is a, c, g, or t
gatcgagattaaaaaagaaaatctaaaatgggatgattcagaggaagtagaaataaacaaggctttacagagaaagtccagaggagtttattggcactctgagctacaaaaaggcttggagagtgagccaacatcaagaaggcaatgtagaaattctccaggggagagtgaggagaaaaccccatcccaggagaagatgagtcaccagagtttttgtgccagggacaaagcctgtacacatatcctctgtgggaaanactgctctcagagtgtgcactctccccacaagccagccctcaaactggaaaaagtatctcaatgtcctgaatgtgggaaaacctttagccgaagttcttatcttgttcggcatcaaagaatccacacaggcgagaagcctcacaagtgcagttagtncgggaagggctttagtgagcgctccaacctcactgcccacctacgaactcacacaggggagaggccctatcagtgtgggcaatgtgggaaaagcttcaaccagagttccagcctcattgtccaccagaggacccataccggggaaaagccttaccagtgcattgtctgtggaaagagattcaacaacagttcccagttcagtgctcaccggcgcacccacactgggggagagcccatacaagtgtgcagtgtgtgggaaaatcttcaacaatagttcccacttcagtgcccaccgaaaaacccacactggtgaaaagccttacaggtgttctcactgtgagagaggcttcactaagaattctgccctcacccgttatcagacagtacacatgaaagcagtactctcatcacagggaggaagagatgcgttatgagtttgttggtaaactgttagattaagtncctcagntcagcatgtatgngctttcttctgctgtggagagatctagccagtccctgactttgctacagacctactgactactggatcttaagacccatgtctaggaccaggagtcggcataaggacgctgacctctccgtgctgtgcctgtgactccagagtcctctcttactgtgacttaaagtttgatggagagaaagctgtaggatccataaattctaccaggaatccagggtcttcctgttcctagcactgagaatgggcacccagtggtccaagaacactttctgggctaacatagtcctcacacagggctgagaaagaaagtgtctcctttcctggaaagcacatgtaaaagttaagggcctgaatctcttctaaaccaataattgacctctaggcacccaccgtaatactgctaccttcagggcagaagacactgctctttgtaacccagccaccaccaaaaagcaaacagaaagaaggaaggatggttaagccattggataatactgaatctgtttccctcagtgacttaaccttagagnaagnacaacatccaggttaattttttgtaagatttctccttttattattgccctcatcatagttcctgattgtctcttaaagtaagtggtttatagacattactatttctgataatnatttacanactactataaancaaatttataaacattacta

SEQ ID NO: 319255 - DNA, 950 bp, Homo Sapiens
  misc_feature (883)..(883): n is a, c, g, or t
gatcgggactcaccaccacgaggtcaggcgatgtggtctacaccggcagaaaggaggacatcaccgctaaggcaagccagtgaagatgctggaccaagcccacagaccagagctacaaaatatccagcagaggagcctgcttcagcctggaccccatccccaccgcctgtcaccacctcctcctcaaaggatgaggaggaagaagaagaagaaggagacaaaataatggcagaactccaggtatgtggatgaggtgactgacattggctccttgcctcccgcctgggtctctccagccatggcactcacagatttgttagcgagaaggccagggaagcgcatggaccgggaccatagaagctgtgtcttctggccttagcctttgctttcccaagatggcgctgaacaaggctctcaggatgcctataagatgtgcaaggaatgaccatttcacaaaacgactcacgctttcctacctctggctgtaaaattgactttcctttctttccatcttaagagattctgcttcatttcaaaagcaagtaagataaggattagaaataccagccattgtcctgtcttgataaggacagactgaaggacacgttacgtgggttcccgttccttggctttaccacttagagccactgaccttggatcatggactcaaggccaatgactggcctcctgtggtccataaccaggtccctgttcaatatcaatgtcatcttttcagatattctgaaaagctgaattattttgttttccattttccttggtctatttgagaaatgatactgtatcagttttagatatttattttttaactatgacacagtccactcataggatgaaggatggcgtgccaaggctgtgcccgaanactgcatcccacattcccatcacggatgtgattctaccccaggtctctgtcctgagaacttgtctca

SEQ ID NO: 319256 - DNA, 865 bp, Homo Sapiens
  misc_feature (13)..(13): n is a, c, g, or t
tggcggaggaggnggggcgactttccccccagcttttccaagtcctgttccgaatttggagaatcttctgaaagttccaccttgtccactggggcatctccccttggcagtgggcctgtggctggcggcatctccagatttgttattgacttcatgatattggcctgagcttcttctaggagcttttcaaactctttcccattatagtgatccagattttgccttttttcttcccatttcttttctgctttctcgatagacactgccctgttcttggcactcacactgtggatttcttcaatgaacaagctctgcatggcagacccattcatgggtatctgtggggactgcggagcctgcgacatctgcagagtggaggttgcttcctgggggacggctggggagctggccacgtgaggcaagttctgagcagggttcagcagggccacggagtgctgggagggctggatgaccacaggggagctctgcgcgtggcgaaccatcatgccggacaaaggcaccacttccgacttcgcatcgccaggggcacctgtgctgtggaagggctggccggaggtgtgggctgcctcctcctgactcttcaggacttctgcggctgtggccttttccatagccatgtactgtgcggcttgggctgcgtccgtgcctttcaggagcccatcagtgacatgtctttcagggtagctacagcctctcccacttgacgcaggaggaaagccccgtcttccacgtctttcagagtaaccaatcggctggctgccgtggagtccttcttcaagtcttcaacaaagtcttccaactcgctgcgggagcaaggacaccagcacatagagctgaacacgag

SEQ ID NO: 319257 - DNA, 370 bp, Homo Sapiens
  misc_feature (99)..(181): n is a, c, g, or t
  misc_feature (349)..(349): n is a, c, g, or t
agaggctgtagctaccctgaaaggtaaactttctgctgggtcgggggaggagtctgagctgtcttctctgcggtgtttaaaaatctgccacatagaggnnnnnnnnnnnnnnnnnnnnnnnnnnnnnnnnnnnnnnnnnnnnnnnnnnnnnnnnnnnnnnnnnnnnnnnnnnnnnnnnnnngtaggtgcacatccccctcttcttggagctggtattagagtgggtgctgtaagatttcacactaaatgattccagtaacactttctatttgctaggctcttacagtgcaccgggatgcatgtgccaaacccgttaaaaacacaaggtgggaggatcacttgatcccanggagttcaagaccaccctggg

SEQ ID NO: 319258 - DNA, 910 bp, Homo Sapiens
  misc_feature (879)..(879): n is a, c, g, or t
ggtccagttggaaagagggagaagaggaaagaggccctttctgtccaggaaagaggcgcttgcgcttctggtgcaggacgagggccagcatggcgaagaaggtgaagatgaagaggatgaagatctggccctcggtgatcaggtaccagtagtacaggccactgggtgccaccaggagcagggcaggccctggaatcaagctctcagctttagaggcagtaaagcagccgctgaagtacatgaagaggatgaggaagaaggggatgtaccacatgcagtgacccaggtactcatcataatagtagagcagctcaaaggagtcgatcagcgtctccggcttgagattcttgatgatggggttctcacggacagacaggtggtgctggtagccactgaagagcaggcggtggttgacagagtcaccttccaggtggatttttttacccatgatgaagatgttgtattttctcttacgtgtttggagcgtggcagggttcggggggtaccgttcgttgtgtttgagtaagagaaagggcgtgatgtcgttgtagggccatgtggaagtagtccccaacactgggcttgttgagtggaaaccactcgagagggaataccagcatggcaatgggacgcccaaagtccagaacccagttctgcagtgtgaagtagaaccagaggtcgaggtggaagggagccgtgcgggcagcctcatcagcgctcacagagccatgcctggcctgcaggaaggaggcgcccagctgcgcgcctgggccgcccgtcgctcccaggtgctgccgcctccgcgtcgcctccatggctgccccgcaggcccctcggccctgcctttccgaggaagagaccggttcagctcggctgccncggcggaggccgccgcaaattccatcccggg

SEQ ID NO: 319259 - DNA, 1135 bp, Homo Sapiens
  misc_feature (823)..(823): n is a, c, g, or t
  misc_feature (825)..(825): n is a, c, g, or t
  misc_feature (1069)..(1069): n is a, c, g, or t
cccacggaggcggctggacggacccccgacggttggacgtacggactctgcttcgagagtaggccatggacaccttcagcaccaagagcctggctctgcaggcgcagaagaagctcctgagtaagatggcgtccaaggcagtggtggccgtgctggtggatgacaccagcagtgaggtgctggatgagctgtaccgcgccaccagggagttcacgcgcaccgcaaggaggcccagaagatgctcaagaacctggtcaaggtggccctgaagctgggactgctgctgcgtggggaccagctgggcggtgaggagctggcgctgctgcggcgcttccgccaccgggcgcgctgcctggccatgacggccgtcagcttccaccaggtggacttcaccttcgaccggcgcgtgctggccgccgggctgctcgagtgccgcgacctgctgcaccaggccgtgggtccccacctgaccgccaagtcccacggccgcatcaaccacgtgttcggccacctagccgactgcgacttcctggctgcgctctacggccccgccgagccctaccgctcccacctgcgcaggatctgcgagggcctgggccggatgctggacgagggcagcctctgaaccccggcgccgcccaaccgcgcccctcgcgccttttggggctctcctgctgggcgcgggtggggtttgtgggtttttttccacctcttttctcccaatcggactccggccaaactcccctagacagatgggtgacctgtctcctttgagaggatgctgaggcatctgtagcagctgtttcaacaccaatgtcacctntnctcctgggccccgccaatggggagaggaattgggggccttactctggggacacccttcaccccgtttgactttttgggccacgccgacccctgggtcgctttgatgtaaaagccaaaagctgctggctcccacttgaacatgttgccctggaattttattccttgcccaaggactacgggttacacggtgaactgggggaagggagtgttaggggcaagtgcggaccccccttcataactacgnctaccccaggacctaagatatctgtttgaataggactacaatggatagtcaatatctatctgagag

SEQ ID NO: 319260 - DNA, 1028 bp, Homo Sapiens
  misc_feature (431)..(431): n is a, c, g, or t
  misc_feature (484)..(484): n is a, c, g, or t
  misc_feature (564)..(564): n is a, c, g, or t
ccggaagtgtgggcgcggctgcggtttaacccgcggtggcggcggcgacggcggccctggcagggaaggatggagacgctgaaggataagaccctgcaggagctggagtgagttgcagaatgactcggaggcgattgaccagctggccctggagtcccctgaggtccaggacctacagctggaacgggagatggcactggccaccaaccggagcctggcagagcggaacttggagttccagggtcccctggagatcagccgctcaaacctctcggatagataccaggagctccggaagctcgtggagcggtgccaggagcagaaggcaaagctggagaaattttcttcagcactgcagccagggaccttgttagaccttctgcaggtggaaggcatgaagatcgaagaagagtccgaggtgagagggcgangcgacacccctcttccctggacggggtgtcagtccctgcagcaggggcccttngaaggagaagcagatgtctgcaaagcatggaacaagggagctttcgtagatggcagaggtgaaggacatctttagtcctngggaggccttttgggtataaataacaggaacccagtcccactagctgaagcagaaacgggtgacagtggacaagggcagctcgcagccctggatggtagggcagcacagcaggaggcccccaggggctgaggccagctccctactccactctccctgcttcctgcttccctccggccacctcttcagcctctgtgggcaaactggtgctgtccactctgtgtctgggtggaagaagcttttaggccctcccagtccctgggctagtgctcatccaggtgttcagcacatatatgcagtggccactgtgggcctgacatgatgccaaggtgccaggacagaggtgaccacgacagagacagtcctcgccttcaagggactgacattctagtgagggagacagtgcatgtaccatatgtcagttgtgagaaggggcgtatgggcaggaaagagtaggttctccctg

SEQ ID NO: 319261 - DNA, 3071 bp, Homo Sapiens
  misc_feature (76)..(76): n is a, c, g, or t
  misc_feature (238)..(238): n is a, c, g, or t
  misc_feature (248)..(248): n is a, c, g, or t
  misc_feature (512)..(512): n is a, c, g, or t
  misc_feature (535)..(535): n is a, c, g, or t
  misc_feature (594)..(594): n is a, c, g, or t
  misc_feature (670)..(670): n is a, c, g, or t
  misc_feature (767)..(767): n is a, c, g, or t
  misc_feature (919)..(919): n is a, c, g, or t
  misc_feature (926)..(926): n is a, c, g, or t
  misc_feature (1113)..(1130): n is a, c, g, or t
  misc_feature (1359)..(1374): n is a, c, g, or t
  misc_feature (1844)..(1844): n is a, c, g, or t
  misc_feature (1918)..(1942): n is a, c, g, or t
  misc_feature (1962)..(2227): n is a, c, g, or t
  misc_feature (2823)..(2839): n is a, c, g, or t
  misc_feature (2850)..(2851): n is a, c, g, or t
  misc_feature (2855)..(2855): n is a, c, g, or t
  misc_feature (2860)..(2860): n is a, c, g, or t
  misc_feature (2863)..(2863): n is a, c, g, or t
ccagggcgatggcatgtcttccagatttctagacatatccagtcttatggtgctgcgatcaggccgctgggcgtgntactcgttctccgcgctatggcataggcaacatactaggcgtccatctatactcctgcatctatattcctcggtgacacagctttagtatggtgactgttaggcgcatcagatgatggggcatatcgtggtatgatctgtgggtgatctgcacatcgatgancaccactcgngacacgcgtcctgcgcagcgtcgctgtactggcgggctggagtggtgtgcagcggggacatctcgagatcggtgaacgagagccgtgcttgcggcgtcctcaggtgtcgacgtcggtctgatgtgcagcgagacagatagcgtatagttatatattccggaggcagccggatagccacgacagtagcggacgatgatggtccgtcgacacctcgtcctcgatgtaacgtcggctcaacccgtatacatatctcacaatcctgancgtcacactatcacagactgagntttatgatacctacgctgtgtgcgatgtgaggggcggcgtgaggattcagcagccgttnagtacgctctgacgtgcgagcatagcaggtcatcgtagtcgtcgacgggaaggagtacgctatactgtgagatgtngcgtcgacagcggcagaggatagcgcgccgcagacaccgcgatatggtgtagcatagaatgcacgtacgatcatatatctgttctgaggcagggagngcgcgcgtacattaggcgtgcgagtgtgacgtggagagcgtgtgcgtgcagcgagtacgacacctctcacacacgacatgttctcccgacacacagttgtcctccgcccgacacaggcacggccgcgggccacgtcgcgcgatgctataacnctgtagnagcggtgagtgtgcgcggcgggccgcgtagggcggccggcgggtcgcgggcgcggttgggccgcctgtcggtgctcgcccctcgcatggtcccgtctgtctagaaccgtcgtcggtgcgattagttcgttggggcgggaattcattgtgatctcggtttgctttatgggaggtggggtatactagannnnnnnnnnnnnnnnnntcacgggtgaaaggtttgatgggggtcggctcgctcgttcctgttgtgtggcgggttaccgtcttttaaggggttttctgccggcttcgtgggggccgccggccgaacgtgacaaattctagatgttcgcctccgggctcggggaggggggaggtgttcttttccttgtttgttcgtgcttgttcttttgcgtttgtggtggacaaaaatggttggtttttctgtttgnnnnnnnnnnnnnnnngaatacaagacttagttctcatttatttgtgattttgcaggtgttcaaaccaatgaatgaaaatcaattatctcttcatatcaatgaaattcactatttcactattatcttcagaatcatagtgatcaaaaccctacctgaaaatggtaatacaaaagagaactattaatacaaggtttcagaagactgtgcaagttaaaataattggcattaaaacgacacacaacaaaccaccgaaggtttggtcccttttctctctgatatgtggcctctgatctctttcttagggcagtggttttcaacgtctgtgtagcagaatcacctgaaaagctaacagaacatatagaaacccaggatttgtatttgtatttaaatgtaaatacaaaaggtctgggtctctgtatctttacaaagttctccagcaatggtttccaaaccaggcttatcacaatcaccagggaagctctganaacaacaacacattcctaggcttcatccctagaaattctgattcagtaggtttgaggtcgggacccaaaaatcnnnnnnnnnnnnnnnnnnnnnnnnnggagatggagtttcactctnnnnnnnnnnnnnnnnnnnnnnnnnnnnnnnnnnnnnnnnnnnnnnnnnnnnnnnnnnnnnnnnnnnnnnnnnnnnnnnnnnnnnnnnnnnnnnnnnnnnnnnnnnnnnnnnnnnnnnnnnnnnnnnnnnnnnnnnnnnnnnnnnnnnnnnnnnnnnnnnnnnnnnnnnnnnnnnnnnnnnnnnnnnnnnnnnnnnnnnnnnnnnnnnnnnnnnnnnnnnnnnnnnnnnnnnnnnnnnnnnnnnnnnnnnnnnnnnnnnnnnnnnncaggacccaaaaatcttaaaacatttttaaaaaattttaacaaacttcccaggtattcccgaccagccagatttgggaaccactgacttaggacacttatttaaggtctatcacagaacttcaggcctcagagtttagtaagaatatcgataactttgggtaggttataaatcaccatcctagagataatttaacaaattaaacggtctagtagtgatttgatactaaaaagccctgcccaatttagtacttaaattacctaatgattttctgtctatctactttcctaccccaggctaggacctgcacataatatgtttcctatgactaagtgcctacgtgttcacaaagttgccccagtggaggttgttaacttctctcttttcttcttccattcagattcccaaagctgtgaggagcagacctatttcgaagcatcacagccagctgatgtcacttgcagtattatgcattaagacatcaacccagaaacctgcaaatgggagacactaggcaatcctatcatgaggattaagctctttgtggaagaaaatgctttcattgcatgagataggtagtttaaaaatgactattcnnnnnnnnnnnnnnnnngagaacggagnncttnttttntanccatgcttgattgctttggtgtgattttccgctcattgtattttttgcttgccatttttatgtgattcttccaccttcagtgttccgatgtgttggcgattactgaccctatccctttccgcttggcctacttttggacctgtcacgccgagactgggtttttgtccttgtttacaatttttgtcataagttttcatggcccgacgtg

SEQ ID NO: 319262 - DNA, 1756 bp, Homo Sapiens
  misc_feature (82)..(82): n is a, c, g, or t
  misc_feature (1187)..(1187): n is a, c, g, or t
  misc_feature (1498)..(1498): n is a, c, g, or t
  misc_feature (1660)..(1660): n is a, c, g, or t
tctttcctggtgtcccgtcgcggcttgggacccggcaagatgggcaagaagggcaagaaggagaagaagggccgcggcgcgnagaagacggccgccaagatggagaagaaggtgtctaagcgctcgcggaaggaggaggaagacctggaagcgctcatagcccatttccagacactcgatgccaagaggactcagactgtggaagttccgtgccccccaccctcaccaagacttttttgtataacgagctctatgtctacaatatcagaaaggacacctggaccaaagttgatatccccagtccacctccgaggcgctgtgctcaccaggcggtggtagtgcctcaagttggcggacagctgtgggtctttggaggggaagtttgcctctcccaacggagagcagttctaccactacaaggatctctgggtcctgcatttggccaccaagacctgggaactagtcaaatcaacaggcggtccttcgggtcggagtggacatcggatggtggcctggaagagacaattgatcctgtttggtggcttccatgaaagtacacgggattacatctactacaacgacgtgtatgcctttaatctggacaccttcacatggagcaagctgtccccgtcagggacggggcccacacccagatcaggctgccagatgtccgtcactccccagggcggcatcgtcgtctatgggggctactcgaaacagagagttaagaaagacgtggacaagggcacacggcactcagacatgttcctgctgaagccagaggacggaagagaagacaagtgggtttggactcggatgaacccttcgggggtcaagcccaccccacggtctggcttttccgtggccatggccccgaatcaccagacactgttcttcgggggtgtctgtgacgaggaagaggaggagagcctgtcgggcgagttcttcaacgatctgtacttctacgacgccaccaggaaccgttggtttgagggacagctgaagggacccaagtctgaaaagaagaaacgcaggcggggcagaaaagaggagcccgaaggtggtagcaggccggcgtgtgggggagctggcacccaggggcctgtgcagctggtcaaggaggtggtggccgaggatggcaccgtggtcaccattaagcaggtgctcaccgcgccaggctcgtcggntcagccccggtctgaggacgaagacagccttgaggaggccggcagcccctcacctggtccttttccacgctccaacgccattctggctttgaagcatggggtgctctacgtctatgggggcatgtttgaggccggcgaccgccaggtcacccttagcgacctgcactgcctggacctgcacaggatggaggcgtggaaggccttgttggagatggacccagacactcaggagtggctggaggagaccgactcggaagaagacagtgaggaggttgagggcgccgaggggtgggtcgactacaaacacacgngaaggatagcggtccggaagacttatagcccctgccagggcgcctggcaagtggctgtgccaccttccgcccggacccaaccgggttgagtgaagcttttgggccaagggggcgtcctaccccaggaaggagcttaagggtgttgcgccaggcccggggggnaaccttttcccatgggttaatctttgacccgcgacttggccgggagttaactgataggcacggcagggggtctcccacaccccctggggttgggga

SEQ ID NO: 319263 - DNA, 1541 bp, Homo Sapiens
  misc_feature (16)..(16): n is a, c, g, or t
  misc_feature (21)..(21): n is a, c, g, or t
  misc_feature (29)..(29): n is a, c, g, or t
  misc_feature (61)..(61): n is a, c, g, or t
  misc_feature (89)..(89): n is a, c, g, or t
  misc_feature (97)..(97): n is a, c, g, or t
  misc_feature (102)..(103): n is a, c, g, or t
  misc_feature (239)..(239): n is a, c, g, or t
  misc_feature (251)..(251): n is a, c, g, or t
  misc_feature (339)..(339): n is a, c, g, or t
  misc_feature (722)..(722): n is a, c, g, or t
gttattattacacctnttttncagatgangtaaaatagatcagagagattagataattttntcatgttcatacaggtaatatgtgacantttcttanttttnncccagatgtgtcagattctaaaggccttattctttagttctctactttacagtttcccattgtcctttgaagaacacatttgggcttgctctcagactcgccaacataaatcatcatttacatatcagggcatgtntgagttccagcngttcactgaaataaaatccctgatccttaaccctcccatctcaaatacagtgaaaatttattttaatgataatgatggtaattttttntttgacactttttataatgctgatgttaaagtcaagaagcatttctctgtaatggaaaaaatgtctcatttttcttcctactgggcggtcagaagttggattttagaaaaaatatattgaatagggattataccgccttccttccttaaacctcataaagcaatggagtaggtggataagaagaaatagaaccaatttctggaaacaactttggagtaatgatcatagaagttacagatatccaagaatgcctaaagaaatatatctgtccttccatacccacgacacacaaataggatttatagttaggagagaaaggatagagtcagtcaaacgtccaaggttcttgtgattggtgccatgatagaaggattgagctttancgagcaggcttatgttctcctgagtttgtgggtgaagctctgagtcactggagatttaaggtcaaatattcatgctctcagaattaaggaggtattcttgattacacagaattgggaggtgaggaaatttcctctcttgaattacagcagtttgcattgcaccacatggctatggtagagatggttacgcataattccagcaaggtgagaatcagcagtagagacaccatgccatttgatatggagcccatgtaattgcataggtccggtgactctgatgaagagtgacaactccttaatgactggatattaactgctatatttagtgagagaaaagcagtccccactagtgcaattgtagcactggcaatgttcattccaaaactgttctgtatccatgttcttgtgggttttatccctgctacaacagacaaggttcctgaactacagaaaaacacagcaccccaaatcgggtagcctgtgtagaaggtgaagaaaaagaagtgcttttggaagtggtatgggtattgcagggaacccaggaagacaccccaagccagaatcattgctgcattcaggatctggatggcgcccaagaacttgtaattttgctttcttgataatctggtgatccatctatggggctggtagacagaagtattcagcttttctggtcccgcctcactgcctggggtaccatgggcagaggctgaccccagctctgcattatcaacttcgtgggaggccattggggttgtttatggcttggaggcttcaggctttggcagacggctttcctcccaagtccaccttgtcgca

SEQ ID NO: 319264 - DNA, 1919 bp, Homo Sapiens
  misc_feature (174)..(174): n is a, c, g, or t
  misc_feature (222)..(222): n is a, c, g, or t
  misc_feature (233)..(233): n is a, c, g, or t
  misc_feature (390)..(390): n is a, c, g, or t
  misc_feature (413)..(413): n is a, c, g, or t
  misc_feature (415)..(416): n is a, c, g, or t
  misc_feature (439)..(439): n is a, c, g, or t
  misc_feature (451)..(451): n is a, c, g, or t
  misc_feature (486)..(486): n is a, c, g, or t
  misc_feature (528)..(528): n is a, c, g, or t
  misc_feature (1846)..(1846): n is a, c, g, or t
tttaattatatgtcttctgaaatacaaaagatagaataaatcatagcataaaaggggataagatatgataacatcatgatggccaattaatacacataaatgggctttttctggacagacaccaaattacttaagaggattaagagataacttcagaaggagcactacctgggnagattgtttgggcatttaaatactgatttccaaagtgctaggatgggncaagtccaagncaaggcatttgtgggtcacatggcacatacatctcaacaggttacaggatggatgaggaaactggtcactaggtacaatttggaaacaaattcacctactctaactggctcacctggaaatgatcttggaacaaaatctctagaagtgtggcttgcnatttttttcttcagacatattcngnntcattttatcatctaagcggggnatcctatcaggnctgaatagggcaaggcattgtgtttcttacatgcngaacatggtgtttttctatttggttccatcaactcccaagcntttcaggcccacgggggtgagagttccttcaatgctgacaggtttgctatttctaacctatcatcgacagccttcaaggggtcccgtcgaggcatcaagactgctgtctgtgtctgaggccagcgtctgctcagtggacatggatgaaatgtcattgttcgatgaagactgagaaggagtggcgttgctacttactgctgcctctgtgctgaaggctgttcttttacaacgccattcttgcttctttcttcccaatccagtgacttctttgtaaattagctctttccattcttcaattgcatgttctctttcttccaactgggcatcataaatttgaggtggtggggcttctgcttcggcggggtcataccaaacagtgatgtatgggtgacgcagagcttcgtctacagagatccgcttgtcaggatcaatcactaacatttttgataacagatctctggcttgacttgtttttattttgtctcgctcagattctgatgggaatatccaatctggaaagagttcttcaaatttgattccaggatactttggtctgttttcgacataattcctcacagttggctgaagtttcttcatgaactctgctgatggtgttcccagctgctcaataactttattccactgatcaatatggtcagtgccttggaatatcacacaacctttcaccagctctcccatgatgcaacccactgaccagatatcaacgttctctttgtagcccatacccaggatgacttcgggcgcccggtagtaccgtgtcaccacgtaaggggtcatcatgaagttagtgcacgctgtccgggccaggccaaagtcaaggatcttcagggtgcagtctgatttcacaacaatgttgctaggcttcaaatctctatgaattataccagctgaatgcagatgtttaataccacaaagcatctggtaaagaaggtaggacattctttcatgatccagctccatgtgaataacctgacataagttagcatgcattaattgcataaccaaatacacatcttgaaattcttctagagtttttttgtggtgtaaacacatttaacaaactaattatatttttatgattgacacattttaagaggacaagttcacgataagctctctttgcatgagtttggttctgaaaaggacggcttagtttcttgactgcaacatttatcccaagaactgtatcaaatgcagcacaaacaatcccttgggccccagagccaattggtttcagctgctggtaacgttttaggacagtgaaggttgagtctgccacttgcacactataaaactnactgtcacatttactgtcgctcatgatgcagcgtcctgcaatatcccgaagggtgggcaagtttcagatccct

SEQ ID NO: 319265 - DNA, 1344 bp, Homo Sapiens
  misc_feature (387)..(387): n is a, c, g, or t
ctttcgtggaacatccgaggtttgttttcgtggggtttttctcccaatttttcttggaaaggacccagtcgctttttcaaagatattttttgaaagggtgctccaacgaaataacaatgggggggccgcctcgcggagaaggcagtcgggtttgtggagggcaattgtgccaggtgtttggcagggtatagggaggatgcggacatttgttcgtggccaggtgctgggccaaatgaaaggtggagtgggaaaatgagtccatgttttgggagtggtaacccttggttttcagggctgtgaacagggcctttttcagccccaaggattctgcgctgtggaatgctggatacttggcccaggttggtgaggctgccagcatgtgggatngagacgtgcacctaccgcttcgccaattagggctgacaggctggggggctacttggctcatcttggagcgcaggtaagtgtgtaggctctggcggtattcagataaagacaccacacgactggagaagctctcgatgtttatcaagtcaatggcagatatgtccatgcccatggaggaccgtgaggcatccagaatagccttagccttggccccatccattgtcagctcctccagcttctccagcttgtcctcattcagttcccttcggtttccaataaactgggcaagacggcagtatgtggcattgtcgttgatgatcttcaccagctccggaaagtgatacccgtaccactccctgacacgcatagagaaggtattgatgtccttatccagctggtccaggaggctaatggactggatgatcatattgtccacccggttcacattaaacttaactttggcacgggaatagctgtgtcccagccccagctgtgctttacaagctgacagatcggtcagacccttcaccagattgtggaagtgcagacgaactcctcgcaggatctcagctatgactcctccagtctggcagttgtaccctaactcctcctgtattgcggcaccaatcttgggatccccaactcccaagagtactttcttctttttggacggcaggtgggtctccaagagcaggcggaggtcctcatgaacaaccccttcagacacggcgttggcattttccaaggcaacctgggatgaggcaaagggacaaaaggccaccagacgaacgatgctgtggaatttgcccaggttgagcacggactcctccacctgcggctgcagcagactgatctcctccacttccttcagcgccagcagcgcgtagccgaccgcgtgctcaaacagcacgtgcaacagcaccatggcgccagctcccgggttcggctcgcaatccc

SEQ ID NO: 319266 - DNA, 782 bp, Homo Sapiens
ctttaggccttggccccccatcgcatggtcaggtccttcccagtttttcccagctttgtcctccttccagttccccttcgggttttccaattaaactgggccaagacggccggtatgtgggcattgtcggttgatgatcttcccccggctccgggaaagtgatacccggtaccacttccctggaccggcatagagaagggtattgatgtccttatccagctggtccaggaggctaatggactggatgatcatattgtccacccggttcacattaaacttaactttggcacgggaatagctgtgtcccagccccagctgtgctttacaagctgacagatcggtcagacccttcaccagattgtggaagtgcagacgaactcttcgcaggatctcagctatgactcctccagtctggcagttgtaccctaactcctcctgtattgcggcaccaatcttgggatccccaactcccaagagtactttcttctttttggacggcaggtgggtctccaagagcaggcggaggtcctcatgaacaaccccttcagacacggcgttggcattttccaaggcaacctgggatgaggcaaagggacaaaaggccaccagacgaacgatgctgtggaatttgcccaggttgagcacggactcctccacctgcggctgcagcagactgatctcctccacttccttcagcgccagcagcgcgtagccgaccgcgtgctcaaacagcacgtgcaacagcaccatggcgccagctcccgggttcggctcgcaatccc

SEQ ID NO: 319267 - DNA, 979 bp, Homo Sapiens
gggggggaaattgttcaggccccttcaaaggagtttttaccggttacttggcaccctgttgcaagaaatttctggaagatggccatcaggtttcttcccccccttttgggggggaaggactgccagtattgagtgaaggtaaggcacgtgaagggttacagcttgtctgatggtcaatcagcagttcctctgggtagagctcctcacaaaaattcacaaggcaacatgatctcgtcagctgcaccctttatgtcactgagagacctgggaccgccatgagactggtcggcctcacatacggccctccagaagtcctgctctgccacactggaggcttggccttcattttgcagacttagggccaacatgaagtccaagtttgcactctcttcaccaccctctttggggggctgttggcctctattcctttcctgcctctcttgttcttcaaacagattattctgaattgaaacctgggctgtaatgttcctttggttggtagttctattgtggaaaacatctgattcaaaggctctcaggggccttcgcggcagcctcatgggtgggtccagagcctcaatttgtctgaggagttgggatgcaatccagattccatcctgaccccaagattcatcatatgcattaggaggtatggcaacctcatttctcttttcctccccctctctcccacaaacttcagggtgagtcttcagatctttcacaaggacattgcgaccacagttgccacatagttccgtccgggcaccacaataatcttcatgttccttcagtttgagaatggaaagttctaaatcacagtgctggcagacagcaagccgcaaagggcactcagtctcctcatgcttctttaacagcctcttctccaacttcttgttacatttgcaggtcacctgacagtgttctgcagccatgtgagtctccacctcgtgccgaattcgccacccaggcctcgctacct

SEQ ID NO: 319268 - DNA, 1425 bp, Homo Sapiens
  misc_feature (865)..(865): n is a, c, g, or t
ttttttttgtaacgaaaatacagtgaagacactaagcaaacactggtccaatgggggctctcctcacttcccgagatggtcaaatggcacacttgtctgtgaggctgggatccgggagaccttttgccgcccagtgaggtctgaggaggatacgttggcgggcgcacccctgtgcagcctcatactcaccttcctgtcccggtcgacccgcgagatcgctctgggagaagtattgccagccggctggatgcgggaggctggcgtggaagccacgggctcggcggcactgcggagccggttggcagtggcccccgtgggtgggccagggggcagggctcgggtcgcggacccccgtagctgccccatcctctcctcgcgttcgtgttctcgccgctcccggtccacatcctcgggattccgggctgcaccgaatttcagcatgttccagtcaaagacgtagtcataggagaagccctgccggtggaagaggttgcggaagagctgacgtaggtaagagtagtcgggcttgtcgtcaaaccgcagggagcggcagaagttgaggtatgttgagaattcggagggatagcctttgcagaggacctcgatgggcgttgacatcttcttctcgctgatccgttcatacttctggcgcttggtggctgctttgagcccctgccagggcagggagcccaggttgaagtacatgagcacgtagcccaggctctccaggtcatctcgacggctttgctcaatgcccaggtgcgtgttgatggaagcgtagcgggcgtgccggtcaggttcttgttttcccggtagggaatgtgctggtgggtgcgggcgtcccggtacttcttggccaggccgnaagtcgatgatgtaagaccaggttgcccttcttccccagccccatgaggaagttgtcgggcttgacgtcccgtgtggatgaagttcttggagtggatatactcgatgcggctgatcatctggtcggccaagagcagcaccgtcttgaggctgaatttgcgggaacagaagttgaacaggtcctcgaggctaggccccagcagctccatgaccatcacgttgtagtcgccccttcagctccgcaccacttgatggacgggatccccacgccaccctgcatcatcttgtagaacttgctctcgatgtgcagctgggggtgctttgtcttcacacactccagcttgatggcgacttcctcaccagaggcgatgttggcacccaggtagatatctccgaaggacccgctcccgatcttccgtcccaggcggtacttgttccccacaccgtagctccatggctcactcttgcccgccggcgacgcgtgggtcgacgatattcccgagattccggacccgtaccagcctgcttcttttacactagcaacaggcttgttctatactc

SEQ ID NO: 319269 - DNA, 2073 bp, Homo Sapiens
  misc_feature (679)..(679): n is a, c, g, or t
  misc_feature (685)..(685): n is a, c, g, or t
  misc_feature (737)..(737): n is a, c, g, or t
  misc_feature (908)..(908): n is a, c, g, or t
ctttacacagatttaagccaataatttttagcaaaatgatacaaaactgtcttaaccaagtagaagattggtagttacagtggaatcgtcagggagtacagggcggccaccactggagggagctgaggccctggaaaaggagtctgattctctgcaattctctctctgcttttcttcccagccccgttacaaccgagttcacgtggggggccgcagtgcagccccagcggtggcagctcttggagtctgtccgtttagtatgtttcccccacgagcgtcgctgggtgagtggcctggagagctcccggtgttaacatttcgatcctagaccgggggacgtgtcactagtaaagccattggtaacagagtagatcagccatgcattgtctgcccttcacagcaataaggagagttctcatcggtgcacgacagactgaagaccactggaagccacccgaccaggaatccagtgctgccttccgatgggagacgagcagctacttgccgtggtgttcgaaaggaatgctattctgtgaggtggacatgcgagaggtatcttgtcggcctgtgaggtcggacgaggagatgttgacgggggccccgcggtgcagccgcatactcactttccgctctctctccatgccggagacgggccggggggaggtgttagccgtgtgtnaggtanaggtgaggggtgtggggggagccacttcctgcgtcccccgcagcggccggangtgttagaagggaggccgcgggtagccgggttccgcgagtgtctcagccgctcctctcggtccctgcgctcccgctcggcgtcatcggcggcccggctggcaccaaatttgagcatgttccagtcgaacacgtagtcataggagaagcccctggcgatggaacagattccnggaaaagctgccgcaggtacgagtagtcaggcttgtcgtcaaaccgcaaggaacggcagaaattcaggtatgtggcaaattcggaagggtagcctttacacaacactttcgatgggggtggacattttcttctcgctaatcctttcgtatttctgtctcttggtggcagccttcagcccctgccaggggagagagcccaggttgaagtacattagcacgtagcccagagactccaagtcatctcttcgggattgttcaattccaaggtgcgtgttgatggaggcgtaccgcgccgtccccgtgaggttcttgttctcacgataggggatgtgctggtgggtgcgtgcatcccggtacttcttggccagcccgaagtcgatgatgtacaccaggttgcccttcttccccaggcccatgaggaagttgtctggcttcacatcccggtggatgaagttctttgaatgaatgtattcgatgcgactgatcatttggtcagcaagcagcaggacggttttgaggctgaatttcctggagcagaagttgaagaggtcctccaggcttggccccagcagctccatcaccatgacgttgtagtccccctctgccccgcaccatctgatggtggggatgcccactcctccctgcatcatcttgtagattttgctctcaatgtggagctgagggtgtttggttttgacacattcaagcttgatggcaacctcttctcctgcagcaatgtccgtaccgagatagatgtctccgaaggagccgctgccgatcttccggcccagccggtacctgttcccgactctcagctccatggcggcggcggcccgattcgctcctgccctcccggccgcttcctgggtctgaactctgggaggcggcgccgctgctgccgctactgcgggtccggctcccggctccgcccccctcacggccccgctttcagccatcgctttccatgtcgccccgccgctcccagcgcctcaatacggggcggatgggacagtccgagcgccgccgccgctgctccaggcccctaaccggtcaccgcattgccctctccccgccgcggatggactcgactcttcagggcctaaatcccctttcagctgacccgacagcgtgggttcgacgatatcccgaaattccggaccggtac

SEQ ID NO: 319270 - DNA, 1424 bp, Homo Sapiens
  misc_feature (103)..(103): n is a, c, g, or t
accacatagcagccccaggatgcaggctggttctggcctatctgtttggtccaggatgagataagataactcctggcctcccaccatggttaccctgcaactnggttgacaacttttcccaggaagagtaagctctgggtggtgacctcccaaaggagcaagaggaaaggcctgttgaagtgggcatgtgggtctgacatggtgttcagagatgggggctgggagaggaggcctgaagcagccccggcctcggtccccttctcactcatgtccaccatcgccttgtgtgacaccttggagatggttttgttgagctgcccagtgactcctgagaagtcagcttctaagttgagtatgttggtgagaccaatttggggaagtatgtcttccaggttatatgttccagaaattgaaaaccttggcaagtgcaaatccaacagactgggcaggagcaattggccccattttctcagggtctgtggctgcagagcagcctccacctgcttcattttccccgggtcagggaggaccagcagcgccaaggcatttcctctgtattctatctggaggacagtgcaagccaaatcctggtcatagaggaatctgtgcatttccttttggtgcatcatggggacctggagagaagtcctctcatccacaaagaaacttgcctgcttctgggtctggtagcgactgaaagggtgcttccacttggctttgaagaagatgtaattggcaagaaccatgaacgtgtcctggctgaactccgggaggcagtccacgacttgcccgtatgtttgccttctcaaatagtcattaatctgcctcccagttgtaacagaatctgtgaagttggcagaaaaagcaaaagctccataaagctccttgatgctgtccaaatagtgctgccgaggctttagtcgcttgtctaggaacagggagtttcctacttttagttcgagtttggggctgggcagggcaagggtgtggaggaggctccggaagccctggtggatgtcggcttcaggggtttctgtgaggttgaatcccaggccctccaggatcagagctgaggtgttagcttgggccccaagagagagcagggccagggtggtggagatgctcactggcgagaagaagatgtttccgggggcgtctgctgccagctctttatacaaacgcaaagcaaaattggtaatggtgggtgtgattctgtggtaggcgggggctggctctgagagctgatgcctggggggttgaggcccctgcagacttttatctccatgggcaagaaggggctgacagtggacagaggccaggatccctgttcccagtagccaaagccaagctggacccattctagagcaaaggcactgagcaggggcccaggtcttcagcactgcatcacctctacatcccgggaa

SEQ ID NO: 319271 - DNA, 986 bp, Homo Sapiens
  misc_feature (941)..(941): n is a, c, g, or t
gggtgtgtgtaggaggcctattagttgaagagagggagcggtgtcgagactcccttcgctattcgtgtggcgatcccttaaaccccgcccgttgggggtaaccccgtccctgggaagaaagccgctttggttgccaccaccccgccggtttccttggaagcacggaaggcccgccgaatgttaggcccccccgacccccattggggtaggcaagccccgaccagaaaaaatgattaggcccgcttttgggtagcgggaagcgcttgcatgtctaccaagtacgtggtgacagtgaagaaggtggaagcgcagcacagcaccgaccaggtgaggatccagaggcgcgcgaaacgcgtctcctcctgtgagaagaacatggaaccatcgggccgcgcaggttcgcagggcgcagcacaatcacgctcgcccagaaacttgtagctgagataggatggcaccttgaggacgcgcgggcagtggaaggggtgctccagcgtggcgtagcgcgggggagcgccgccgccgcccgggccacccggggtgcccccggcacccggctgcagtcccggcggcggcgcggtggtgagtagcgcgggagctccgtcctcggagtggttctggccgacgcagatctgctcggcgccgtggcgcgggaagtgctcgcagcgcaggcgctcgggccactgaaaaccgaacttgttcatgagggcttcgcagccctggcgcgcgcgctcacagatagagcggcacggcgggatggcctgttccagcacggtgcacacgggtgcgtacatggagcacaggaagaagcgcagttcgggcgagcactgcaccttcaccagcggatagaactggtgcacctctaggcctgcgtcctcctggttcgtgtggcccagaaggttgggccctcgtgccgaattcgccacccaggcctcatgctngggtgtgtggggggccgggattttctttttcttcctctctctttc

SEQ ID NO: 319272 - DNA, 1479 bp, Homo Sapiens
ggaacacaaacaccagtatattttatgtgcacaaatgtgaaaaggaagagacagagggaccaacggagacacagagcaggcaatgggcgcacaaaccggtcgtgtgtccttctcaagagctgcccaactgggagacagtcccacccacctcaaaggccctttagcagagctggggcctgcatctcctccaggtctgggtggcctcagggtggaaggcactctccctgccatggctcccctaagggctgggcctctaacctgtctgcatcccagggtgatgcctacacagcccagggcttcataaatgcaggttctcatgaactgacccactcagcagctgcctccccaggagacccacgcagagtgagggaccaggacaaaagggcttcatggggactccctaggtattattgctgtgaataagcataggccattgtgactcactggcattgaagaggggacagggcacatgggatgcctagcagatgtccgaagcagttcaaccatgcagggcaacacattgcaatctgtaactcagagatgctgccatgtctagtggagagaggcccaggacaccagaggttcatgaacagccagcaaacactccccaccagcacccttaatgcttggcagggctgggattattccaaactttgagtccctggccactaagggattggggccctgatacccaaaaaagcaagaattgaagtctgggctatccctggtgagatctgaacctgtagatcccgtggtcaggccatgggttgttgccttcctttgctggaggtttgatgccttatgaggggcaactggagaaatgggacacctagatggagcagaaacacaatgctggatgttgccaggcacacaggcatacccccaggacctcctgcacttgggaaagtataggacccagagaggaaatggtgccagggaatgcccacaaggcaacttctggagcagcaagacctggtgggccaatcaaggatttgctctggctgagaattatggaggcatcaacaagctggccactggactgagttgtggaatgcaagtgtgaaggtgggtagtgtggtctaggggcccacatggaaggcctgaaggggtgctgggagactaagacaacatggagttggagagagaaccaaggaaacaattgcccagagagaacggggaagccagacaatattctcctcctggaattttctccacctatagatggaaaacaatctacttccaccggaagcctgattctctgtaacccccaaagccctggaattggggccacaataaaatcaaaaggagggctggccactgcagaaagtagttcatccctggatttgaggagcctgcccaggaaataggctagggaataccctttcgttctgctctggacggggctaactgcagaaaatcctgccaaaggcagagtctgcaagcttttcttcagacctaggacacaactgtggccatccc

SEQ ID NO: 319273 - DNA, 283 bp, Homo Sapiens
actggtaccaacaaaacaagttccttttattacctggaaaccatggaaaaagaaacctaagtgctctggcccagtcctggggctctgggaggctcacgctccctcctcaggctggggacccaggtctgtccgtgccctcatcttcctcctctgccatgaccacctcctccagggtacgtcctcgaagtttgctctccactaacaccttgcacgtactggcaggtggtagcccttcctccacgtagcgacccctcaggaacacaactctctcctctccgtccaa

SEQ ID NO: 319274 - DNA, 1080 bp, Homo Sapiens
gtatattccctttccccactgaaagtttggatgttgtttttcatatagtcttctgcctttctgcaggagaaaccaaagtacttttttccaatatctttaggtttcaaggtttttcatccaactttgacattaccccgagaatccattttctaaaagacagtgttcaatgagagctggtccatagggaagtaatgggttaagcaccctcttcagtagttcacccttaggtgcgctggctactatttcagtcaacctttccaaagtaagcaaaggttcagcagctctagcatgatcaagtggatagcgttcacgaacagcaaatttaacatcatctgcctcatcagttcgaaaccttagaatatttaaaattacgtactcataatctgtaagaacaatgttccccctatcatagagctcaatgattaaatggtaagcagcttcatcacttccaaattgaaaatctacaattctatccacaccaagctgttttgcactgactaatctccgactcttcaaatgttttcggcacttcatggcaaaactagacggcatcatattcttaggccactcaaattctgttgtatgaattcgtatgccagattcaagtaaaagtgtagctttaaagtccggtttttgaagacgaataaggtatgtcttattatccacatcataaacattgtttactctcattcctagcaagctagcattcagctccgcgagtacggcgcggaggtcaatggtgctaaagcggctcttcatggcgaggcccgagggtcactaccgcaatttcctctactgcccggccggactcgacgccacttctcctccgcgcaggcgcacttggcggagctctacggccgcgcagaagacccaatattcctcgaggcgaacgtatttgtgtcgcttttctgaagatttcgattgtcaagttgcagctgactctcttcattgtaccaaaattcaaattcgaataaagattcaaactgttctcttgaaactgcattccttcctggaacccttacggaccagtctggttaccgtgccccattgtgtcttgggcgtcaagtcagccttcatagt

SEQ ID NO: 319275 - DNA, 482 bp, Homo Sapiens
  misc_feature (452)..(452): n is a, c, g, or t
  misc_feature (454)..(454): n is a, c, g, or t
caggtggagcgtgggagatgtcaggtgccaggggagtcctggccggattccatcgctccaggtgtttctaccgcctgcgggtggacagacggcggatggagctgcggaaagttccctcctcttcatcgggttccccagtcctctgctgctggttgaacttgcaccggcatcttctgctcagcacgatgaggatgcccaggatgaagaggatcccggcgatgacgaggcctccgatctgcagggactggtagtcgtaagtgaacgggtcgtgttcctttggactttctgccttggccatggtgaggagacccacacagaaaaccaagatgtggccaagagacgccattgtccctggaggaattctgctcgctcaggccaccatggcaacagcctgccttcccccactcagggggtcacgcacaggcctgccggggtgaggcccagctgccacnantcgctacaggctgcccctgtgggaaagg

SEQ ID NO: 319276 - DNA, 301 bp, Homo Sapiens
  misc_feature (52)..(52): n is a, c, g, or t
  misc_feature (250)..(250): n is a, c, g, or t
  misc_feature (279)..(279): n is a, c, g, or t
ggggccttctttcagcaggggacagcccgattggggacaatggcgtctcttngccacatcttggttttctgtgtgggtctcctcaccatggccaaggcagaaagtccaaaggaacacgacccgttcacttacgactaccagtccctgcagatcggaggcctcgtcatcgccgggatcctcttcatcctgggcatcctcatcgtgctgagcagaagatgccggtgcaagttcaaccagcagcagaggactngggaacccgatgaagaggagggaactttncgcagctccatccgccgtctgt

SEQ ID NO: 319277 - DNA, 1195 bp, Homo Sapiens
  misc_feature (114)..(114): n is a, c, g, or t
  misc_feature (289)..(289): n is a, c, g, or t
  misc_feature (294)..(294): n is a, c, g, or t
  misc_feature (791)..(818): n is a, c, g, or t
  misc_feature (1183)..(1183): n is a, c, g, or t
gagagacagttgggttctactcctccgtcttcggggccatgcagctgttgtgccttctcacctgccccctcattggctacatcatggactggcggatcaaggactgcgtggacncccaactcagggcactgtcctcggagatgccagggacggggttgctaccaaatccatcagaccacgctactgcaagatccaaaagctcaccaatgccatcagtgccttcaccctgaccaacctgctgcttgtgggttttggcatcacctgtctcatcaacaacttacacctccantttgngaaccttgggccctgaaaaccattgttcgaggtttcttccactcagcctgtgggagtctctatgctgcagtgttcccatccaaccactttgggacgctgacaggcctgcagtccctcatcagtgctgtgttcgccttgcttcagcagccacttttcatggcgatggtgggacccctgaaaggagagcccttctgggtgaatctgggcctcctgctattctcactcctgggattcctgttgccttcctacctcttctattaccgttgcccggctccagcaggagtacgccgccaatgggatgggcccactgaaggtgcttagcggctctgaggtgaccgcatagacttctcagaccaagggacctggatgacaggcaatcaaggcctgagcaaccaaaaggagtgccccatatggcttttctacctgtaacatgcacatagagccatggccgtagatttataaataccaagagaagttctatttttgtaaagactgcnnnnnnnnnnnnnnnnnnnnnnnnnnnncgccccctaagtcaacgctccattgactgaagacagtccctatcctagaggggttgagctttcttcctccttgggttggaggagaccagggtgcctcttatctccttctagcggtctgcctcctggtacctcttggggggatcggcaaacaggctacccctgaggtcccatgtgccatgagtgtgcacacatgcatgtgtctgtgtatgtgtgaatgtgagagagacacagccctcctttcagaaggaaaggggcctgaggtgccagctgtgtcctgggttaggggttgggggtcggtcgcttccagggccaggagggcaggttccctctctggtgctgctgcttgcaaagtcttagaggaaatnaaaaacaaaaca

SEQ ID NO: 319278 - DNA, 542 bp, Homo Sapiens
cagtctttacaaaaatagaacttctcttggtatttataaatctacggccatggctctatgtgcatgttacaggtagaaaagccatatggggcactccttttggttgctcaggccttgattgcctgtcatccaggtcccttggtctgagaagtctatgcggtcacctcagagccgctaagcaccttcagtgggcccatcccattggcggcgtactcctgctggagccgggcacggtaatagaagaggtaggaaggcaacaggaatcccaggagtgaagaatagcaggaggccccagattcacctttagggcaaggagagagaaacagagtcaagtaggtagtcatctgcccttaagcctcccacagggaggagaaaggcggccatttttctccaggtcctggagccagaataaatacagctagtacttattatgtgtagtcattgttccaccagtatctcacttaatgttcagcaattctgcaaagtggctgagatgagacttctcaggtataacaagtggcagggcctggtggtgcccacac

SEQ ID NO: 319279 - DNA, 466 bp, Homo Sapiens
  misc_feature (51)..(51): n is a, c, g, or t
  misc_feature (53)..(82): n is a, c, g, or t
  misc_feature (138)..(138): n is a, c, g, or t
  misc_feature (203)..(203): n is a, c, g, or t
ggcccgtagattttataaatcccaagagaagtcctatttttgtaaagactncnnnnnnnnnnnnnnnnnnnnnnnnnnnnnncgccccccctaaagtcaacgctcccattgactgaaagacaagtcccctatccctanaggggttgagctttccttcctccttgggttggaggagacccagggtgcctcttatctccttctancggtctgcctccctggtacctcttggggggatcggcaaacaggctacccctgaggtcccatgtgccatgagtgtgcacacatgcatgtgtctgtgtatgtgtgaatgtgagagagacacagccctcctttcagaaggaaaggggcctgaggtgccagctgtgtcctgggttaggggttggggggtcggccttccagggccaggagggcaggttccctctctggtgctgctgcttgcaagtcttagaggaaataaaaagggaag

SEQ ID NO: 319280 - DNA, 1407 bp, Homo Sapiens
  misc_feature (3)..(3): n is a, c, g, or t
  misc_feature (93)..(93): n is a, c, g, or t
  misc_feature (149)..(149): n is a, c, g, or t
  misc_feature (417)..(417): n is a, c, g, or t
  misc_feature (1169)..(1169): n is a, c, g, or t
  misc_feature (1194)..(1194): n is a, c, g, or t
aanaaaaaaaagagatggaaggagggggagaggccaaagggtcggcattcccttcatccagccgggccagaagtatgggccattctcaaaaanccactgctctttggagccactcgagaggttcacagtggctcccttctgaggcagtngcagtgggctcacagcagccacactggaaccacagtgcacatgtggggatgtgggcagcctcctggatcactcagggacagtttggactcagggcccactccctgctggggctctggacgggccttactggtgcataggagagggaaatgataagaggaaatggcttctgactaggcctttccaagcgcatctcatgttttcagcttagatgatttgatagcaggtgttgtaatcctgagggggaaatgggtgacgaggaacactgcnactcaaagccaagatggccttatcaaaggcatacaacatgagccttgtgggtactgcctcaccaaccactggtggctggttgtgctgtttttacttggctcaagggctgctgggaaggtttgctgcgacaaaggcctgcatggcctacagagaaacccatccatccgcaggtgggggtgtggcttgaaagacctgctcttagttcccttctttaccctcctgcttgacatggagatgaggctccaggagagagagtgtaatggagttagtaagagaccctcatgaagtttcttgaggcaaacccgcaggctcatccactcctcttctctcggcagggggtagtgtcaaagtgctttggttgtcacaagacccagacacctaggttcccagtttggctggcccaagagttcttcatgaggcaaaagaagtggcagctggtgtcctaggtagagagcagccatacagacaccacatgtgttcctcctggctccacacagacgtcgtgtccagcaacagtctgatccttgcggtaagctatacaatgttctctgccccaggaaggggcccctgagggggtccacggtcctgcttactgtgcaactgggccagctgtagaactggcatgttgcacaggggacacactttacgaacctccagccacttaataaggcacctgcagaaggagacaccacagggggaagatgtcagtcctatgctcatggcacggctgttctgctgaacatctccatttntgtcacccagacaacgtctgctgtntggtccaaggagctcccctcctaggtggtgaacggatgtcaccccctggagagagggaagagacagagagaaggagtggggagaggccaaggggtcagcaatcccctcttccttccagagcctcccatcttccacgtgtgaagccacagatagtatgtgatactctcagttacccatgacttcttacaagaacaaaatacactgagcagggat

SEQ ID NO: 319281 - DNA, 1201 bp, Homo Sapiens
  misc_feature (73)..(81): n is a, c, g, or t
ttagcccacgggttgtgggtagagaaatatcaacggcgagactttgcccagggtttttatcccaggaaagggnnnnnnnnngggcaggggccaactggccaagcaccattcagggattgtactccttgccaggggcctgctggatggaaccatcccagtggctccatgctaaagggcaggggtcaccttggggcgtgcagtgcgcggtggagcaggggcaggagccccgcctgccagaaggagtagcagccatccaccagcttgttgcagcggccctgaaatcctccttcaaatcgcatctgccggcttgtcacccattgtaataagctcttcaagttcaaggaacgttccctcttgaggattaccagcgcggccaggccacagaaggtatagccaccatgggcttccatccctggtaccccgccaatgccaccttcccagttctgacaccttgctatccattcagcagtgccctcaaagaggtctggagtgatgatgttggtcagcgaggctacggaggcagcacagtatgcgcttctcacatccacctcacctccgacatgcatgagaaaggagccgtcaggttgcttcagggagtacaaatactgaagaagcttctctctgttaatgatgtcataggcctcctcggtgccaatgatgcacaatgcattgactgctgcatatgtgggtgcaaggtgtggatactgaccgggtcctcctccaaagccaccttctgggctctgacacagctccaggaactgacacacatctgtagccactatctgggggatgggttcatctagcagttccaagctgtgcaggatccaatagcagagccatgggcggctggcatccagacactcataggcatctgtcagttgtcgaaggcctcttttcagataatggaagtgcttctccctctgcaaaacaagccttggtacaaggtggttgaacttgtaagaactgaagacctcttggatcttttcttctacttttgcctgttctatggacgtgactgtttccaccgagtcgtcctgcaaccgctctcgcgcgtgctcgggcctcagactgtacagcggctctgaccagacgggggaggaagatggagggcaatagtaggtgaaagaactcggagaagccatgatcaggagagcagcagacagtgtgtaggactctgcttcgttaagcaacaacgcgcatt

SEQ ID NO: 319282 - DNA, 1282 bp, Homo Sapiens
ttgcagtttaagatcattttattgaagagcaagaggtgggagaggtagggggcaactacagctccccaccagccccaccagggggaattggacccctccctgcctcctgcccaagtggctccccctgtattatgggggggactttgtgcaaactctgccccgagggggtggggagggtggagggtgagtgtgaaatggcagcggttggggctggcagctgtgctactgggcactggggggcttgtagggctccaggaggagggccgagaaggtgttgaccttgtctgccccccgcacctcatggggtaacagcggcagcttcacgatgtggaagtcttcatacaggtcctccatctggtccagatacttggcctggatcttgtgacgggcctcacacatcttgcagggcttctcggggtcggggaagacgagctggttgacaattatattgtgtgtgtcaatcttgcacttggccagctcctggatcagcctctctgtctcatacagggacaggaactcagcaatgcatacgcagatgaaagttgtctgctcagggtccttgaactgttcgctgactgagcggatgacgggcagcgtctcctccagcttggaggccagctggtctgcgttcatgtcccccaggcccagcatgttgcacatctgtgagatgaaagggctgatctggttcttgatctgcataagccggcccaggccccgctccacgatggtggggaagttgagcagcctcagggtgtggcccgtgggtgccgtgtcaaataccaccaccgagaagttcatgcccttcaccagcctcatgacctcggcatagctcatggcctcatcgatgccgggaaatgcgctcatggcctcctgcatcatcttcttgcccatgctcagcatgttgtcctcctcgaagaactcgtcaggcagctccgccacgcccaggctggggtcaatctccatagcaaagaggttgtcatagcctttgaccttggtaggcacctttgagaacttctggtcaaaagcatctgagatgttgtgtgctgggtctgtggagatgatcagaacactctcacgccccttggagagctggactgccaggctgcagctgcaggtggtcttgcccacaccacccttgcccccgacgaagatccacttcaggctgcgctgctcgatgatgttgctaagtgtaggctccagcggctccacatcaggagcatcttcgaactcctctgcctcaaccccccacccggccacccctgccgccattttggaactgccc

SEQ ID NO: 319283 - DNA, 1061 bp, Homo Sapiens
  misc_feature (1)..(2): n is a, c, g, or t
  misc_feature (4)..(4): n is a, c, g, or t
  misc_feature (8)..(8): n is a, c, g, or t
  misc_feature (17)..(17): n is a, c, g, or t
  misc_feature (25)..(25): n is a, c, g, or t
  misc_feature (28)..(28): n is a, c, g, or t
  misc_feature (39)..(39): n is a, c, g, or t
  misc_feature (43)..(43): n is a, c, g, or t
  misc_feature (45)..(45): n is a, c, g, or t
  misc_feature (60)..(60): n is a, c, g, or t
  misc_feature (91)..(91): n is a, c, g, or t
  misc_feature (100)..(100): n is a, c, g, or t
  misc_feature (130)..(130): n is a, c, g, or t
  misc_feature (160)..(422): n is a, c, g, or t
  misc_feature (830)..(833): n is a, c, g, or t
  misc_feature (845)..(845): n is a, c, g, or t
nnanggantccattttntttttcanttntttttccaaanaaancnaaatatttaacattnaaaaaaatgcaatctaaagtataccaaactntaacttacntagtaaatgagattagaaactattgtcagngtcatcgtagtgaattattattattattannnnnnnnnnnnnnnnnnnnnnnnnnnnnnnnnnnnnnnnnnnnnnnnnnnnnnnnnnnnnnnnnnnnnnnnnnnnnnnnnnnnnnnnnnnnnnnnnnnnnnnnnnnnnnnnnnnnnnnnnnnnnnnnnnnnnnnnnnnnnnnnnnnnnnnnnnnnnnnnnnnnnnnnnnnnnnnnnnnnnnnnnnnnnnnnnnnnnnnnnnnnnnnnnnnnnnnnnnnnnnnnnnnnnnnnnnnnnnnnnnnnnnnnnnnnnnnnnnnnnnnccacatcctagtaccaactttatcacttctgatggcattaggacacacaggccatttataagagcagtgtttgagacctcctgtgtgtcacttccaatcctcttggccttcatactaaagtcactgatgtggcaaccagtttcaagcagggctgaaccttgcctcttgctctggggatgtctcacttcctgcccctgggcttctcaccagctacaggaactgcctagcacttgggtatgtacaacctggaagaggtgtggggccaccccatcccctcctcaaagaaattcacaggcacagtatgaggctaaagtaacttccatcttggatgctaatctaccatgttgacttctgataaccagttcctggaatgccctctaagatttctacttttatctattaaaagannnnacaaaaacaaanacacactgtaaatcctggccttaagcaagttataggctaagttgtaaacagcattcttgcctttccctgaggaggtgacttcagtgtctcacatgttccttcatgtacccccttttctctatggcatataagccctgggtcggggggtaactgtggggatcactgcctgagacatggcttctgtgcataagtccctattaaatgtttctttctgac

SEQ ID NO: 319284 - DNA, 373 bp, Homo Sapiens
  misc_feature (202)..(202): n is a, c, g, or t
  misc_feature (328)..(328): n is a, c, g, or t
  misc_feature (353)..(353): n is a, c, g, or t
  misc_feature (362)..(362): n is a, c, g, or t
ccacatcctagtaccaactttatcacttctgatggcattaggacacacaggccatttataagagcagtgtttgagacctcctgtgtgtcacttccaatcctcttgggccttcatactaaagtcactgctgtgggcaaccagtttcaaggcagggctggaaccttgcctcttgctctggggggatgtctcactttcctgcccngtgggtttcttcaccagcttacagggaactgcctaggcacttggggtatgttacaacctggggaggagggtgttggggggccaaccccattcccctccttcaaaggaaatttcacagggcacagtnttgagggttaaagttaatttccatnttgggatgnttaattttacc

SEQ ID NO: 319285 - DNA, 956 bp, Homo Sapiens
  misc_feature (66)..(123): n is a, c, g, or t
  misc_feature (237)..(250): n is a, c, g, or t
  misc_feature (682)..(693): n is a, c, g, or t
  misc_feature (834)..(866): n is a, c, g, or t
taccgcgccctctctaactcgcctctctcctctgcacctccatgccacccgccactcccactgcgnnnnnnnnnnnnnnnnnnnnnnnnnnnnnnnnnnnnnnnnnnnnnnnnnnnnnnnnnnaacgtccccacacacattaacaagcactacagaccctctcccccgccaagcccaggccagctattacccgaggggcctggggaaaatttgtatttccgagaggaagagtcattnnnnnnnnnnnnnntcacaaggacctcgccatttcaccaacagtgctttggccagtactggcaagcatttgtggttcaactggttccaccagccaggaatatgaaagaaccccccagttttagccaaaggtgtaacaacattttttccctgacagcttacattccaatcattccataccataccgctccactccacagttttataaacctgatcttaagatgtaactaggtactatgtgtgctcacaataaaaactaactaaaaacaaatcagagggtagcagacaagtaaacaaagtttccagtaaggcatcaggagatcactgctggtgggcccctcactttaccagcttaaagaagttttgatttttatttctcagcaaactcaatattcagaagctttaccagcagactcaagtcaaaggttttaaatacagtttacctcannnnnnnnnnnnggtaaatatttcatataaaacatgaactcaagttctacttcatttaaaaaactgaatattttaatagtaaaaatatatgtttatatttctctttttaaaaagacatttaataacaatacttcataagactggatttaactnnnnnnnnnnnnnnnnnnnnnnnnnnnnnnnnnaagttgtccaggcagagatacattaaggcaaaggctcctggagaggtacgtccaccttggctgtgggctggagactcaaggtgaacaccc

SEQ ID NO: 319286 - DNA, 1130 bp, Homo Sapiens
  misc_feature (1042)..(1052): n is a, c, g, or t
  misc_feature (1060)..(1060): n is a, c, g, or t
  misc_feature (1062)..(1062): n is a, c, g, or t
  misc_feature (1089)..(1089): n is a, c, g, or t
  misc_feature (1098)..(1099): n is a, c, g, or t
  misc_feature (1103)..(1104): n is a, c, g, or t
  misc_feature (1113)..(1114): n is a, c, g, or t
  misc_feature (1116)..(1116): n is a, c, g, or t
  misc_feature (1118)..(1118): n is a, c, g, or t
  misc_feature (1122)..(1122): n is a, c, g, or t
gtggcgagcggatcatccgcttccggagtcgaggttttcgggcttgtaccgcttggcggtgcggcctggtgtcggcttgcaggttctttctgtgtttgttctctgccctgccaaggccgtagagctggtgcgtgcgggtagcggggctctccgaggagccgcacgccggcggcaccatggtccacctcactactctcctctgcaaggcctaccgtgggggccacttaaccatccgccttgccctgggtggctgcaccaatcggccgttctaccgcattgtggctgctcacaacaagtgtcccagggatggccgtttcgtagagcagctgggctcctatgatccattgcccaacagtcatggagaaaaactcgttgccctcaacctagacaggatccgtcattggattggctgcggggcccacctctctaagcctatggaaaagcttctgggtcttgctggctttttccctctgcatcctatgatgatcacaaatgctgagagactgcgaaggaaacgggcacgtgaagtcctgttagcttctcagaaaacagatgcagaagctacagatacagaggctacagaaacataaatgagctgactttagtgagcatagcagtgggaacaaggtcaaggtccttttgaaacactgcagcgatcttaattttgttagatttggagttcaataaatggagtatcctgagttgcccttgctcttctggcctggcctgcacagggcccagggagagatttgttcttgtgtgacttagagctgggtgtgggtactaattagcttttttcgactttgtcttgggatagacagtggctatgggaggattggacttttgagttgggctctgggtctcttggacaactttacaatttactggcttccaagacttcctgcttcaaaacccccagccagactattcatggcccattcagatcttcatgttcatcccacaagtgcgagaacagttaacctttcttaattgatttttgtaattggaggtttataattgtcttgcctaatgcatattctcnnnnnnnnnnngagacggngnttgttctgttgccaggcggagtgcggnggggaatcnngctnntgcatctcnncncngggntcaaaggt

SEQ ID NO: 319287 - DNA, 1753 bp, Homo Sapiens
  misc_feature (1588)..(1618): n is a, c, g, or t
cagagaacaatggcagatggatcgagtacgacaggacagaaaccgcgatcaacaacctcaaccccgccttctccaagaagttcgtgcttgactaccacttcgaggaggtacagaagctcaagttcgcgctctttgaccaggacaagtccagtatgcggctggacgagcatgacttcctgggccagttctcctgcagcctgggcacgatcgtctccagcaagaagatcactaggcctctgctgctgctgaatgacaagcctgcggggaagggcttgattacgatcgctgcccaggagctgtccgacaaccgcgtcatcacactaagcctggcgggcaggaggctggacaagaaggacctctttgggaagtcagacccctttctggagttttataagccaggagacgatggcaagtggatgctggtccacaggactgaggtgatcaagtacacactggaccctgtgtggaagccattcacagtgcccttggtgtccctgtgtgatggggacatggagaagcccatccaggtcatgtgctacgactatgacaatgatgggggccatgacttcatcggcgagttccagacctcagtgtcacagatgtgtgaggctcgagacagcgtcccgctggagttcgagtgcatcaaccccaagaagcagaggaagaagaagaactataaaaactcgggcatcatcatcctgcgatcctgcaagataaaccgagactactccttccttgactacatcctgggaggctgccagctcatgttcaccgttggaatagactttacagcttccaacgggaatcccctcgacccttcctctttgcactatatcaaccctatgggcaccaacgaatatctgtcggccatctgggctgttgggcagatcattcaggactacgacagtgataagatgtttccagctctgggattcggggcccagttacccccagactggaaggtctcccatgagtttgccatcaacttcaaccccaccaaccccttctgctcaggtgtggatggtattgcccaggcgtactcagcttgcctgccccacatccgcttctacggtcctaccaatttctcccccatcgtcaaccacgtggcccggtttgcggcccaggccacacaacagcggacggccaccgcagtacttcatcctcctcatcatcaccggacggggtcatccagtgacatggaggagaccccggcatgcccgtggtgcaggcttccaggcttgcccatgtcccatcatcatcgtgggcttgggcaatgcggccttcgctgccttgggagttcctggatggggacagccgcatgtgcgctcccacacggggaggaggcagcccgcgatattgtgcagttcgttccctttcgagagttccgcaacgcagcaaaagagaccttggccaaagctgtgctggcggagctgccccaacaagttgtgcagtatttcaagcataaaaacctgccccccaccaactcggagcccgcctgagctccagtgcccagcagcagcatgtcagctgagcctcctgccctcccccaggaacatgcacgctcactctgcttccttgtgggtggccnnnnnnnnnnnnnnnnnnnnnnnnnnnnnnncaaccggacctccacccccaacttcctccagcccagctgggcttcctttgttggagtcaactgttgatgcttccaggccaaactggcttcctctcctcctctccccacctttgccattcttaagtattgaatgta

SEQ ID NO: 319288 - DNA, 870 bp, Homo Sapiens
  misc_feature (184)..(184): n is a, c, g, or t
gctcctgcgggtgggcagtggcccgcgccccttatttcagctgggatcctcaccatatcgaaacaatttgactgccagaactggcgatccccattcccatagcagagggagggaaatccccttcaggaagtgccccaaagtcccccatcaaaatagatggctcgttccctccaaaaaggttctncccaaatcctttaaaattcccctccaaacccatgggtatctgcataaacgctgcattatgatttagtttagacctcatttgctgcaggggcccttggctgggttggagcccattcgggtccaatttgttaataaaagttagaaacggaacgttgtagcgcttcatctgacgattgacagtcatggtctggcactgtacccctccaacagcacagagaacaaggactgcaccatccaacactctcagggccctttccacttctattgtgaagtccacatgcccaggagtatctataatgttaatattgacatctttccacatggtgtaagtggctgctgactgaatagtgattcctctttgtctctctagttccatggaatccatgacagcaccaactccatctttacctttcacctcatgcatctttgcaattctgccagtgtagtaaaggactcgttctgttaatgtagttttcccagaatcaatgtgagctgagattccaatatttcgtattttttcattaggaatcacccctgatgaagaccatcggcaggccttccaattaacctgcttcctctgccagcctagggaggcgggggcccttccgcgccccagagccgcgacggctgcagctcccaggagtctcatggcaagcgcagagcacgcgtcaaagtcccgtggcgccg

SEQ ID NO: 319289 - DNA, 547 bp, Homo Sapiens
ttcaggccagaccagaacatttttattggtttagtcacttaggcatgctaaggtccccctgggttagggagatttcagccgtgagtgtgcaggtgtgcatgcacatagggggatatctattgggatgcagagaggtgagagcagctcttcagaagcgctggcaaaagaagaatgtgtattgaaaccatgacgggttagaagctcctaactccacttccagggctgccttcagaaatcctttctcttgaccatggccatcaacacaagggcgctgaccagcacagcatacagggtggccttccctagcaggatctcatagaggatggtggcagacaggaccccttgctggtaggacaccgaggtaaagccacagtctgctctaccccaggcctcggcgctgacgatctgggtgacgggtttggccctatcctgggtccactcgtcattctccgagagcccgtagaactggacttgacagcggaagtggttgcgggggttctgccagaaggtggccgagaccctcaggcggctgctcaggcagtatctg

SEQ ID NO: 319290 - DNA, 1096 bp, Homo Sapiens
gtccaaagcccccctggagggtgggcaaggagaaagcttaagctttattttaatggtggggcaaatggggtgagaaggtggaaaagggacctgaaaggcccttctgagggttaaaccagggcttcccgggaccgggacccaacggtccccaggaataagttccaggatggaaaagggcatcttcccggggttggagttccttggtgattttggatccccccctagggactgctatctgctttcgtgtcgggttactgtagtctctgtccggccctcactgtccaccacagtccggcgctcctccactatcccatctggtttagtgatcttggtcacagagatgctcttgaaataggatttgggctggggctgtagaaccgggccaagaccctcctgggaaacctgggaatcaagatcattgtcctctctggttctaggatgggggtccataggccatacatcatcaaacctatgaaatggcctctgggagccccagtctggtgctggttggggggattcacttcttgcatcactctccaagacccccccaaagatcctgggctggtgactatctggatacttaagcattgagtcccgaagtgtctgtccctcccgtagtctctcaccaggtgtctctgactcaggacctggaagttcaggaggatgggaaggcaaggtccaggcccccatatcgctgaagatgctattgaaatctcgtactaggtcatcaaagccgaagttatcgtggaaacgtatccctcctcctgggctgaagctgaagccgaagccaaattcctcaggggggtgctgaggactatggaaccttgggttcccacggccccatgagcccccttcttcttcttcttcctcatcatcatcttcatctcgagtcatccctccaaaaaagggatctctgtggctccgaggtccaggaaagccgaaaaagccccggaagagatcaaagaggctcattcccgtactgggacgcgaacctttgaacccctccagtggtccattcgcagacgggggaaacctgcgcagccctgtgagaaattgagcgaggcgtcagcccacgctaccggaaagcaagcccccc

SEQ ID NO: 319291 - DNA, 1750 bp, Homo Sapiens
  misc_feature (45)..(45): n is a, c, g, or t
  misc_feature (71)..(71): n is a, c, g, or t
  misc_feature (96)..(200): n is a, c, g, or t
  misc_feature (210)..(210): n is a, c, g, or t
  misc_feature (217)..(232): n is a, c, g, or t
  misc_feature (239)..(239): n is a, c, g, or t
  misc_feature (244)..(245): n is a, c, g, or t
  misc_feature (247)..(248): n is a, c, g, or t
  misc_feature (250)..(252): n is a, c, g, or t
  misc_feature (254)..(254): n is a, c, g, or t
  misc_feature (256)..(256): n is a, c, g, or t
  misc_feature (258)..(266): n is a, c, g, or t
  misc_feature (268)..(268): n is a, c, g, or t
  misc_feature (270)..(275): n is a, c, g, or t
  misc_feature (277)..(279): n is a, c, g, or t
  misc_feature (281)..(295): n is a, c, g, or t
  misc_feature (297)..(309): n is a, c, g, or t
  misc_feature (311)..(325): n is a, c, g, or t
  misc_feature (438)..(451): n is a, c, g, or t
  misc_feature (479)..(487): n is a, c, g, or t
  misc_feature (568)..(580): n is a, c, g, or t
  misc_feature (667)..(675): n is a, c, g, or t
  misc_feature (686)..(687): n is a, c, g, or t
  misc_feature (689)..(690): n is a, c, g, or t
  misc_feature (694)..(788): n is a, c, g, or t
ttcgcgggcgggcaggcagcgaccgacgccaacggacgccgaacngccgcgcgcacgcagcgcgccagcanccaccagcgcaccgcggcaccggannnnnnnnnnnnnnnnnnnnnnnnnnnnnnnnnnnnnnnnnnnnnnnnnnnnnnnnnnnnnnnnnnnnnnnnnnnnnnnnnnnnnnnnnnnnnnnnnnnnnnnnncccgggcgcngccaggnnnnnnnnnnnnnnnnggccacnccccnngnncnnncncncnnnnnnnnngncnnnnnngnnncnnnnnnnnnnnnnnncnnnnnnnnnnnnncnnnnnnnnnnnnnnnttttttgtttagagctgctccgggcggcagtttgtgcactggtgaggcgggggggtttctttttgaggaccctgcgccttcggcagaacccgcaaggcggtcgggccggcccnnnnnnnnnnnnnnagaagcccctggggctcccccggggggnnnnnnnnnggggggcagccacaccccttttgcattccgtttgttttcctgggggcacccctggccgttttttttttttagatttgcggnnnnnnnnnnnnnggacaaggttttctaaaggattccgggggggcccgggggcccccaaccacttgtggccgcgcccccaacgcaagggtttgggaatannnnnnnnnggttttgggtnncnncctnnnnnnnnnnnnnnnnnnnnnnnnnnnnnnnnnnnnnnnnnnnnnnnnnnnnnnnnnnnnnnnnnnnnnnnnnnnnnnnnnnnnnnnnnnnnnnntagcataaataaaggttttattggtcagtttgggtgagtgacaaactgacatggccccagttcactattccacatatccaagcccctgaggtggcaagagaagctaagcttattaatggtgggcaatgggtgagaggtggaaaggacttgaaggcctctgagggttaacaaggctaccgggaccggaaccaacgtcccaggaataagtccaggatggaaaaggcatcatccagggctggaggtcttggtgattctggatcacccctaggactgctatctgcttcgtgtcgggttactgtagtctctgtccggccctcactgtccaccacagtccggcgctcctccactatcccatctggtttagtgatcttggtcacagagatgctcttgaaataggatttgggctggggctgtagaaccgggccaagaccctcctgggaaacctgggaatcaagatcattgtcctctctggttctaggatgggggtccataggccatacatcatcaaacctatgaaatggcctctgggagccccagtctggtgctggttggggggattcacttcttgcatcactctccaagacccccccaaagatcctgggctggtgactatctggatacttaagcattgagtcccgaagtgtctgtccctcccgtagtctctcaccaggtgtctctgactcaggacctggaagttcaggaggatgggaaggcaaggtccaggcccccatatcgctgaagatgctattgaaatctcgtactaggtcatcaaagccgaagttatcgtggaaacgtatccctcctcctgggctgaagctgaagccgaagccaaattcctcaggggggtgctgaggactatggaaccttgggttcccacggccccatgagcccccttcttcttcttcttcctcatcatcatcttcatctcgagtcatccctccaaaaaagggatctctgtggct

SEQ ID NO: 319292 - DNA, 858 bp, Homo Sapiens
ctttgggtgtcggggttaccttaatgtttggttcccggcccttcccttttccaccaccattccgggggttccttccatttatccccatttgggtttaagtgattctgggtcccagagattgtttttgaaattaggattggggctggggctttagaacccgggcccaagaccttcctgggaaacctgggaatccaagatcattgtcctttctcggttctaggatgggggtccataggccatccatcatcaaacttatgaaatggccttctgggagcccccagtctggtgctgtttggggggattcacttcttgcatcactctccaagaccccccccaaagatcctggggctgggtgactatctggatacttaagcattgagtcccgaagtgtctgtccctcccgtagtctctcaccaggtgtctctgactcaggacctggaagttcaggaggatgggaaggcaaggtccaggcccccatatcgctgaagatgctattgaaatctcgtactaggtcatcaaagccgaagttatcgtggaaacgtatccctcctcctgggctgaagctgaagccgaagccaaattcctcaggggggtgctgagggctatggaaccttgggttcccacggccccatgagcccccttcttcttcttcttcctcatcatcatcttcatctcgagtcatccctccaaaaaagggatctctgtggctccgaggtccaggaaagccgaaaaagccccggaagagatcaaagaggctcattcccgtactgggacgcgaacctttgaacccctccagtggtccattcgcagacgggggaaacctgcgcagccctgtgagaaattgagcgaggcgtcccc

SEQ ID NO: 319293 - DNA, 792 bp, Homo Sapiens
atttgggggtataagggggatttttgggtcccccagagggatgtttctttgaaaaatagggaatttggggcttggggggcttatagaaaccgggggcccaagaccccttcctggggaaaccctgggaatccaaagatccatggtccttctcctggtttctagggaatggggggtcccataggcccatccatccatcaaaccttatgaaaatggccctctggggagcccccagtctggtgctggttgggggggattcactttttgcatccattctccaaggaccccccccaaagatccctgggctggtgactatctggatacttaagcattgagtccggaagtgtctgtccctcccgtagtctctcaccaggtgtctctgactcaggacctggaaagttcaggaggatgggaaggcaaggtccaggcccccatatcgctgaagatgctattgaaatctcgtactaggtcatcaaagccgaagttatcgtggaaacgtatccctcctcctgggctgaagctgaagccgaagccaaattcctcaggggggtgctgaggactatggaaccttgggttcccacggccccatgagcccccttcttcttcttcttcctcatcatcatcttcatctcgagtcatccctccaaaaaagggatctctgtggctccgaggtccaggaaagccgaaaaagccccggaagagatcaaagaggctcattcccgtactgggacgcgaacctttgaacccctccagtggtccattcgcagacgggggaaacctgcgcagccctgtccc

SEQ ID NO: 319294 - DNA, 1726 bp, Homo Sapiens
  misc_feature (1476)..(1476): n is a, c, g, or t
  misc_feature (1544)..(1544): n is a, c, g, or t
  misc_feature (1567)..(1568): n is a, c, g, or t
  misc_feature (1587)..(1588): n is a, c, g, or t
  misc_feature (1592)..(1592): n is a, c, g, or t
  misc_feature (1601)..(1601): n is a, c, g, or t
  misc_feature (1603)..(1603): n is a, c, g, or t
  misc_feature (1615)..(1615): n is a, c, g, or t
  misc_feature (1632)..(1632): n is a, c, g, or t
  misc_feature (1635)..(1635): n is a, c, g, or t
  misc_feature (1640)..(1640): n is a, c, g, or t
gtacttgcagcttcatggtgagtgaggccagacacactcagacacggcgatggccccggattttgtgttttaaagtgtttcgtcagcatttttgacttcatgttaacacttgtcttttgaaccaaggttttttctttttaaaacctgatttcctattccctggagctctgctcctgtgaacatgtttttgtgtctttggtggccccttcggcctggtgaagtttccgttcaaacgcggccggtgcccacgtggacaggccgcccccgtgtttgcactcacaggttgcacatctgcccccatggcaggctcacggcatcctttctttgccttcacagagcctgtctaaagacccgggcttgtcaagaggagcatcttcatggtgctcagcaaactactacgatcggagccgactgcagtttgttaagttgatttcatttaacgagtaactttggtgtctgcttactgtaaggactatgctcgggaacttgggagtgaaaaggaagatgctgtcttacctgtctgtgaaacgtgctttgtaagatgtgttccaagtgtaacgtcgttgagtcatgcttcagtgtgccctggttgtgctgagctcagggcctgcccgcctgtgttccaggtctcaccaacggctttgggggtgcgaggagcgagcaggagccgggcggcggcctggggaggaaggccacaccccgacgacgctgtgcctccgagtccagcatctcctccagcaacagcccgctctgcgactcgaggtgggcaccgcggccctgcgcttcccaccacgcagctcccagcaccgcccgccccgcctggctgtcctggaagccgggacattccagctcccatcttagtgttctctgaaaaattctggcctgggattcatgtgtgctctgcccttgtggacagtttcccatgctgcatattaatctgctttatagaattcaagcagaagtaggaaaaacactgcgtgaaataggaacacacttttagaatctgcaatgaggttttacacttgatctttacctcccagaatctggcaatgagcacagccctgcctgtctgccctgtgaaggccactttggcctcctgagtcccccctgccacaggttcactccctccagacctgcgcacccacaggcccgtctggccgcgggggtgtcaggcaggatgcgtggccagcttggtggcggacagctcacgggacgaagcccgagtgaggctgaaggcaggggcggggcgcctgactccctctgctcttcctcccgaagctttaatgcgcccaaatgtgggcggggcaaaccggctcttgtgcgacggcacacgctggaggaccgcagtgagctgatctcctgcatcgagaatgggaactacgccaaggcggccaggatcgcagccggtgagtcgcccggacctgcctccatggctctccacacctcctggttagcgtcttagggctcgactgctgnggactggactccggctcagggagcatggtgccctgtgtggagccccaccctggccaacctccgggggnaagggttcatcacacaccgaggnngctctgggctgtggcctgnncggngtgctggcngnaggtggcgcctnctccattctgccctcgnttncctgngggacgtccagctctgtgtggctgctggttgccagcactgtcaagcttctgggggtggtttagggtcagggggcatttgcaagtgc

SEQ ID NO: 319295 - DNA, 1343 bp, Homo Sapiens
  misc_feature (35)..(35): n is a, c, g, or t
ggagaaacagtacctgctccttcctcaagcgcaancctccattgctatggataccgaatccacttattctggatattcttactattcaagtcattcgaaaaaatctcacagacaaggggaaagaactagagagagacacaagtcaccccggaataaagacggcagagggtcagaaaagtctgtcaccattcaacctcccactggagagcccctgttgggaaatgattctactcggacagaggaagttcaggatgacaactggggagagaccaccacggccatcacaggcacctcggagcacagcatatcccaagaggacattgccaggatcagcaaggacatggaggacagcgtggggctggattgcaaacgctacctgggcctcaccgtcgcctcttttcttggacttctagttttcctcacccctattgccttcatccttttacctccgatcctgtggagggatgagctggagccttgtggcacaatttgtgaggggctctttatctccatggcattcaaactcctcattctgctcatagggacctgggcactttttttccgcaagcggagagctgacatgccacgggtgtttgtgtttcgtgcccttttgttggtcctcatctttctctttgtggtttcctattggcttttttacggggtccgcattttggactctcgggaccggaattaccagggcattgtgcaatatgcagtctcccttgtggatgccctcctcttcatccattacctggccatcgtcctgctggagctcaggcagctgcagcccatgttcacgctgcaggtggtccgctccaccgatggcgagtcccgcttctacagcctgggacacctgaggtaagaggcaacatccaggaggcagaaaggatggctgatgtcttgctggggagacagctgctctgtagcacgtgaggggtggtgacagatgccaagagctaggaccagagtctgactcttttctggtttggggaggagatgcgagggtggggagggtgtccatgttcattgagtttctggacttctagatggtgcggggcagttgctggctctcacccaggttgagattttgctgggcttgttctcaaagttattggcagctcccaaaaatgatggagaaaggagatgcatagtgatggctgccttctttgactctgaaattggccaatggacaacagataaagtgaccagcagctccattttgtcccaaatgtgacatctggtttaccatgttgtcccagtggaataatgaattgttccttttttcccactctcagaggcctggtttgggcagtaaattatatggtcatccgaggaccctccaa

SEQ ID NO: 319296 - DNA, 814 bp, Homo Sapiens
  misc_feature (680)..(680): n is a, c, g, or t
gatcacatgaaacactttatttattacagcattgttttaactcccttataaccaagattatccatatttattgcaaaagcaacaatatcaaagaatgctttaaatgcaattaaatttgtttaatatagataaactataagtaataagattgttttcattataatataggtgtcacacatttctcctggtaactaagaaagataaatgggcagataaaacataacagtacgaagcatctagaatacgtaaattttattactggaagtctctccctagcaatggacaaactcaaccacattcaacacataaggaaaccagggacaagagaggctggcattcttcactctacaaatacttagggcactgactatgtgccaggcacttggctttgtgctagggatataaaattaaacataccaggtacccgtaccccaggagctcacagcccaagataatgggatgagtgtcctgaaagcagaaattatcacacagcttaataattattgtgagaaatgcatgctcaagatgcaaggtgcaactcatccaggcttgggagcaactcttgtgaatgagctgacctggaaggagatgcagaagtcagacagagaggttatgaagcagcgttctaggaaggccaaagtgcgggcaagcccagtgcatttaatgaccaaaggagtganagtacgagggaactctagtcctgggtttaggagacaatagtctcctgactccctgttcagtgctattttagaatactgcctgtgtattgacaagtctgtgaagattcagcacatacatcaatactcttgcatag

SEQ ID NO: 319297 - DNA, 1827 bp, Homo Sapiens
  misc_feature (29)..(29): n is a, c, g, or t
  misc_feature (31)..(31): n is a, c, g, or t
  misc_feature (57)..(57): n is a, c, g, or t
  misc_feature (82)..(82): n is a, c, g, or t
  misc_feature (124)..(124): n is a, c, g, or t
  misc_feature (162)..(162): n is a, c, g, or t
  misc_feature (165)..(166): n is a, c, g, or t
  misc_feature (168)..(168): n is a, c, g, or t
acttattatttttttcttgaagttccagngngcatttctgttgttcctatgtgagtnagcccttgatttttcacattaaggngggaaagctaagcatgttacttgaagttattttttcccagtnaccatcatgttgatcctgttcacaacgatatatgcgangtnntnttaagcttagtctttgattctgacagaggtattctatggactgctgcattgaaaagggcttgctgttttcatccaacacctctgtgttgtgtggtcttgcttcatattaaatgcttgagatttactctcaacttcacatgtttgtgcatcactttctttgcagtaactttctgccccagctgtatccataatattgcttccacaattctgcgtattatagccactatccatctgaatgttgctgctttcacaaggaatgacactgctttcagcaagaggtgacatgcacatatgagagttttcaatactgaaggcaatgccacttacaaaatcagtcatgggtaaactgccattatcaaccggctccttaatccaagtggtctcatctgctatctctataggatcaaccatatccacagtgttattgtctttctccctttcaacatcctgcaacagtgctaattctttctcagaagcactggactgattttgtgtaacagacatggcagtcacaaccaaatgtgtaccatgggtagaagcctcattactaaactgccgtaggtgtattccagcagcatccatggcgggggatgagacatctgtggaaggaatattctctttatcttcctcatcttcaccttgagtctcaagagtaaaaggtatctgaatcactgaggtccgatactgagtaccaccactatacatctgaagtctcataggagaccaatttttaattggcgagcagccatctatataaggacttctgatacacggattagttatcccattagaatttgttccagatgaagcatcaggagaatgaacagtaaacttcctttgttctgagagtggagtctctcctatctgaaattcaattggtgagaaagtgggtgaagaaataggcgaaggactagttatgcttcccaagctgtatttttttgcactagcctgaatagggctagaagaaaactgccccgaacttggtgtctgcaaggggctcctacactttacaggagacaaatctattgaataaaacatctctagtgatgtttgaacaccactgtgaggacttccgggagaagccgaaggtaaggagtcggagatgcttccgttcccatctaaaaacagctttcttctgagggatgaagaactgaggtttccaggagattgatctgcaaattcatcagctctaaaatagtcacctaatatattttctaaattaaaatccacaggaagagacagcaatgtctgacaagcagcatcgcttttctcagaatgaatggtcagcttttttccaactggagagtcactatttatgttagtgcatttactggaatgacattgtgaaagctgtttcccttcatgatcagtccaaggagagggtacgatgacatctttagtgaaaaatggtaattttgttgatttaaaaacagaaggactggcgagagtttgttcatggagattagaataatcactaggactttcaaaaggatttaaaacagggatccttcctggagtttctggtgttatttgcatctttgattccttgacatctcccatagcacagagagaaaacggtgcgtacaaaacgaagcccccagtaccgactccagggagctccgggggccaggccagcttccacgacaggcatagactccc

SEQ ID NO: 319298 - DNA, 1539 bp, Homo Sapiens
  misc_feature (469)..(469): n is a, c, g, or t
  misc_feature (496)..(496): n is a, c, g, or t
  misc_feature (579)..(579): n is a, c, g, or t
  misc_feature (978)..(978): n is a, c, g, or t
  misc_feature (1064)..(1064): n is a, c, g, or t
  misc_feature (1100)..(1100): n is a, c, g, or t
  misc_feature (1175)..(1175): n is a, c, g, or t
  misc_feature (1254)..(1299): n is a, c, g, or t
gggatcgcaggggtaactggatcccccgacttcagcccaggccctggtctgaccaccctgggagcagggactttccacagtcagctggacgcacactcagcccagtaaaagaggggacccatcccgggagccccggggagggcacagctgcctcctcccgggctcccctgccacctggtgcctacctgccccctgctccctgccgggtccggtcctcaccccatcttcatctggccttgactctgcccttgaggggcctaggggtgcagccagcctgctccgagctcccctgcagatggaggaggccatcctggtcccctgcgtgctggggctcctgctgctgcccatcctggccatgttgatggcactgtgtgtgcactgccacagactgccaggctcctacgacagcacatcctcagatagtttgtatccaaggggcatccagttcaaacggcctcacacggttgcnccctggccacctgcctacccacctgtnacctcctacccacccctgagccagccagacctgctccccatcccaagatccccgcagccccttgggggctcccaccggacgcnatcttcccggcgggattctgatggtgccaacagtgtggcgagctacgagaacgaggaaccagcctgtgaggatgcagatgaggatgaggacgactatcacaacccaggctacctggtggtgcttcctgacagcaccccggccactagcactgctgccccatcagctcctgcactcagcacccctggcatccgagacagtgccttctccatggagtccattgatgattacgtgaacgttccggagagcggggagagcgcagaagcgtctctggatggcagccgggagtttgttaatgtgtcccaggtactgcatcctggagcggctaagactgagcctgccgccctgagttcccaggaggcagaggaagtggaggaagagggggctccagattacgagantctgcaggagctgaactgagggcctgtggaggccgagtctgtcctggaaccaggcttgcctgggacggctgagctgggcagctggnagtggctctggggtcctcacatggcgtcctgccctngctccagcctgacaacagcctgagaaatccccccgtaacttattatcactttggggttcggcctgtgtcccccgnacgctctgcaccttctgacgcagcctgagaatgacctgccctggccccagccctactctgtgtaatagaataaaggccnnnnnnnnnnnnnnnnnnnnnnnnnnnnnnnnnnnnnnnnnnnnnngtctgagtcagagatttggagatgtctctgtgtgtttgtgtgtatctgtgggtctccatcctccatgggggctcagccaggtgctgtgacaccccccttctgaatgaagccttctgacctgggctggcactgctgggggtgaggacacattgccccatgagacagtcccagaacacggcagctgctggctgtgacaatgtttcaccatccttagaccaagggatgggacctgatgacctg

SEQ ID NO: 319299 - DNA, 1300 bp, Homo Sapiens
  misc_feature (988)..(988): n is a, c, g, or t
  misc_feature (1040)..(1040): n is a, c, g, or t
  misc_feature (1056)..(1056): n is a, c, g, or t
  misc_feature (1119)..(1119): n is a, c, g, or t
  misc_feature (1135)..(1135): n is a, c, g, or t
  misc_feature (1161)..(1161): n is a, c, g, or t
  misc_feature (1168)..(1168): n is a, c, g, or t
  misc_feature (1172)..(1172): n is a, c, g, or t
  misc_feature (1183)..(1183): n is a, c, g, or t
  misc_feature (1195)..(1195): n is a, c, g, or t
  misc_feature (1197)..(1197): n is a, c, g, or t
  misc_feature (1214)..(1214): n is a, c, g, or t
  misc_feature (1218)..(1218): n is a, c, g, or t
  misc_feature (1240)..(1241): n is a, c, g, or t
  misc_feature (1251)..(1253): n is a, c, g, or t
  misc_feature (1255)..(1255): n is a, c, g, or t
  misc_feature (1260)..(1260): n is a, c, g, or t
  misc_feature (1267)..(1267): n is a, c, g, or t
  misc_feature (1270)..(1270): n is a, c, g, or t
  misc_feature (1284)..(1284): n is a, c, g, or t
  misc_feature (1286)..(1286): n is a, c, g, or t
atttttttcaggacttcgctttcgggttcccttgtcctgtgttgtgtaatgcccccgttatggcactagaaatattttttattagccgaagctaagtatagtgggactttggctgatcccgagctcggaggacagccggggtgatccgtttccccccgaggatcgaggtggtgcgctctggacggggttgtgcattctcgccgcgcccgggcggacgatccagcgaacagccccgcttctaacccgagatgctgctgccggcgcccgcgctccgccgcgccctgctgtcccgcccctggaccggggccggcctgcggtggaagcacacctcctccctgaaggtggccaacgagcccgtcttagccttcacgcagggcagccctgagcgagatgccctgcaaaaggccttgaaggacctgaagggccggatggaagccatcccatgcgtggtgggggatgaggaggtgtggacgtcggacgtgcagtaccaagtgtcgccttttaaccatggacataaggtggccaagttctgttatgcagacaagagcctgctcaacaaagccattgaggctgccctggctgcccggaaagagtgggacctgaagcctattgcagaccgggcccagatcttcctgaaggcggcagaaatgctgagtgggccgcgcagggctgagatcctcgccaagaccatggtgggacagggtaagaccgtgatccaagcggagattgacgctgcagcggaactcatcgacttcttccggttcaatgccaagtatgcggtggagctggaggggcagcagccatcagcgtgcccccgagcaccaacagcacggtgtaccggggtctggagggcttcgtggcggccatctcgccctttaacttcactgcaatcggcggcaacctggcgggggcactggccctgatgggcaacgtggtcctatggaagcccagtgacacttccatgctggccagctatgctgtctaccgntatccttcgggaggctggcctgccccccaacatcatccagtttgtgccagcngatgggcccctatttnggggacactgtcaccagctcagagcacctctgtggcatcaacttcacaggcagtgtgcccacnttcaaacacctgtggnagcaggtggcccagaactgggacggntccacancttnccacgcctggntggagattcggngnaagaactccacttcgtncacnctcgccgagtggagacgtggtnncggacctccnnnanctttnagtatgnggncaaagtttccgctncnccgttttacgtccc

SEQ ID NO: 319300 - DNA, 995 bp, Homo Sapiens
ccggccgggctgcgagcgcctgccccatgcgccgccgcctctccgcacgatgttcccctcgcggaggaaagcggcgcagctgccctgggaggacggcaggtccgggttgctctccggcggcctccctcggaagtgttccgtcttccacctgttcgtggcctgcctctcgctgggcttcttctccctactctggctgcagctcagctgctctggggacgtggcccgggcagtcaggggacaagggcaggagacctcgggccctccccgtgcctgccccccagagccgccccctgagcactgggaagaagacgcatcctggggcccccaccgcctggcagtgctggtgcccttccgcgaacgcttcgaggagctcctggtcttcgtgccccacatgcgccgcttcctgagcaggaagaagatccggcaccacatctacgtgctcaaccaggtggaccacttcaggttcaaccgggcagcgctcatcaacgtgggcttcctggagagcagcaacagcacggactacattgccatgcacgacgttgacctgctccctctcaacgaggagctggactatggctttcctgaggctgggcccttccacgtggcctccccgggagctccaccctctctaccactacaagacctatgtcggcggcatcctgctgctctccaagcagcactaccgggtgtgcaatgggatgtccaaccgcttctggggctggggccgcgaggacgacgagttctaccggcgcattaagggagctgggctccagcttttccgcccctcgggaatcacaactgggctacaagacatttcgtcacctgcacgaacccagcctggcggaagagggaccagaagcgcatcgcagctcaaaaacaggagcagttcaaggttggacaggggagggaggccttgaacacttgtgaagtaccatggtgggcttcccgcactgcccctggtcctggtggggcgggggccccccttggcacctgtc

SEQ ID NO: 319301 - DNA, 1009 bp, Homo Sapiens
  misc_feature (37)..(37): n is a, c, g, or t
  misc_feature (53)..(53): n is a, c, g, or t
  misc_feature (214)..(214): n is a, c, g, or t
ccccaaacctcttctcttgaatcaattgtgcaatggnaaagcaaccgtccccnaggcaacccccacgtgtccctggccccagccccaaagccctccttggcggccgggtggctgcaattgcgtagcttgctgtcttggtccctggccactcccacatcctgtcagagctgggcccacgacctgaggccttgtcctgagcctgagcaatatggcntgtaggtacaggcttcctcactgtccatccagctcagctgaatgtgcaccagggtgtggcggtcttgtcacagtcccaccatgatgttgaggacagtgcaggggaccccgccccccagacagggcagtgcgggaagccacatggtacttcacagtgttcaggcctccctccactgtccaccttgaactgctcctgtttttgagctgcgatgcgcttctggtccctcttccgccaggctgggtcatgcaggtggcgaaatgtcttgtacccagttgtgattcccgaggggcggaaaagctggagcccagctcccttaatgcgccggtagaactcgtcgtcctcgcggccccagccccagaagcggttggacatcccattgcacagccggtagtgctgcttggagagcagcaggatgccgccgacataggtcttgtagtggtagagagggtggagctccggggaggccacgtggaagggcccagcctcaggaaagccatagtccagctcctcgttgagagggagcaggtcaacgtcgtgcatggcaatgtagtccgtgctgttgctgctctccaggaagcccacgttgatgagcgctgcccggttgaacctgaagtggtccacctggttgagcacgtagatgtggtgccggatcttcttcctgctcaggaagcggcgcatgtggggcacgaagaccaggagctcctcgaagcgttcgcggaagggcaccagcactgccaggcggtgggggccccaggatggtccctcgtgccgaattcgccacccaggcctcgctac

SEQ ID NO: 319302 - DNA, 935 bp, Homo Sapiens
  misc_feature (804)..(804): n is a, c, g, or t
  misc_feature (900)..(900): n is a, c, g, or t
  misc_feature (921)..(921): n is a, c, g, or t
ctccatgtggcctctccagcaggctcgctcaggcttattcacatgatggcttcaggattccaaagagagtgagagtagaagctgaaagacttcttgagttcttggcctggaactgggactaggacagtgtcacttctgctaagttcttttggtcagagcaaatcacaaggctttacccagattcaagggatgagaaacagactacatgtcttgatgaggggaaccacaaagagcttgtggccatttttcacctatcacaaataattttggatgggtatttatttggataaaggtatttccctcttccccctttctctctgtctcctggggcctcactctgccaagttggcaggcactaagacattgtcctggccctcagggtctaggggcagaggtgttggggcaggaagtgagtctctccatgggctggacccactgtcgtaggagtgcctccttgtctgcactgctggtatggggttaggccaggtaggacattccaggggggcttctgaaaaccaagagtccctggggaaagggcacagagtaaggcaggccttgttctcactgccctctaagggcacttggtcactcggcacttttaagcctcagtttctccagttcaataataaggacaagagcttttcccatgcattctctttccccgggaaagttgactgaggtgaccagttatagaattgaaaagggagagtgtcttcagtgcattgtggcatcctggattgggtcttggaacaaaaacaggacattagtgggaaaattggaattctgaaaaaagtctgaattttngtttatttaccaatttcagtctcttggttttgacagttgtaccatggtgatgtaagatgttgaccttggggtaggctgggtgaagggtatacaggnactctttgtactatctctgcnacttctctgtaaat

SEQ ID NO: 319303 - DNA, 814 bp, Homo Sapiens
gtttaaatccccctcgtgttatatagagtggcttagattgcctgttatgacgacatgaagtatctatatcctagtgctgcttcctccccaggaaacacagcagaggccacacagagtacaacagcatttaatggtcagaaacagttgtacagtattacagtcagccacagaagctgtgttgggggacaagacccaatccttccccacaccaggcaaagcagtattggacatgagttggcatgtggctgggcccacgtccttatcccccaggcctgaggggagaccaccttctgatgataaccaacccctagctaccactctgtattcatcaggggaggggtataaaccccacatgcaagaagaacccttgcccccagtgtcaaatgggatggggatgctagagttatagtaaaggggaaaccctatgtaagctgttaacagagttcacaggggtagggataacccctgttctccagctcccaaatgtgctcactttcccagcttctatcagtccgttcatcaatgctggcaaagttcccctcaactgtggccaggttttcacgcatggttgtctgcacctgggtcaagagggtggtattgtccttcaaggaattagcaatcatctgctgggtggtatccaagtgtgtcaggagctgagccaacactgcatggcttgctcgtgcaagctgcttgatggtgacaagtctctgcaatcagctcagggagggtggaggcaatggggctcagcgctgtatagtttcatatagctggtgcaccttgctttgtgtatctgcatcttctaccaggaggcttt

SEQ ID NO: 319304 - DNA, 1510 bp, Homo Sapiens
gctgctccaagggggagtggggggtccctaggcgcttttgtgtcaaaaggggaaaggcccttaggtacagcctgttaacccgaagttgcccccgggggtaggggcctaaggcccagtttctccaaggctcccccaaaggtgtcgccctttccccagcttgttgcagccggtcatccatgctgggcaaaatttccccttcaactggggccaggtttttccccgcatggttgtctgcacctgggtcaagagggtggtattgtcccttcaaggaattagcaatcatctgctgggtggtatcccaagtgtgtcaggagctgaccaaactgcatggcttgcttcgtgcagctgcttgatggtgacaagtctctgcaccagctcagggagggtggaggcaatggggctccagcgctgtatagtttcatatagctggtgcaccttgctttgtgtatctgcatcttctacagaggctttatgcttggcaatctcgttcacctttcccaggacactctgtagccgagcctccacttgatccaaaactgcaaggtctagggcgctcacctttgcttgcaacagctctacagtctccatgagacaggctccctgtagacctgcagaaaggggattctgagcatcctgatcacaacgtacagctgtctccagctctgtcaggcgcttttcaagttctgcgactttggcagcttgagagaacttgtcctgctcaggccgagaatgtagttcataagtgacaaggctgctatctgggggggtcccagtggtttttccccctgatccccctttgctgttctttgttgcttccagctgcagtagtaggcgcttagccagggcgccatcggggtcggtaaggttgattgcagcatctggtcccagcagcttctccaggtgggaagcaaccagctgctgcttcagggctgccagctgtttagccagcaacacaggggtcagcttctcctctgtggctgactccttcactgtcgtcttgattttttcaacttcagttgtcagctcttggacctcatgcagtaggcgctggtacttttgctggggtgtctccttcactcccagaccctctccaagcatctcatattctccagattcatatcctgtcctcttggtttttccaatacgatctgagaaatcaagtccctttgtccccactctcttgtccttgaacttgtcataggcagcattaggattgacaatgatgtgttccacacttgtgcttgtcagctcctccgcatcgaactccgcttgatcatcctcaggtaggtcgctagtttcataaacatctggctcattcctggcaatgccgggaaggtcggcgtatttagggtccgccatggcggcggcgagacgggctgggggacccgggcctcggtggagccggggccggtgttcgggtaggggagaggctgggttcgggtcccgggctaaggcggcggcaaagggagcggcagatgagcaggaagtctcgcgacagcagtagcacagc

SEQ ID NO: 319305 - DNA, 971 bp, Homo Sapiens
  misc_feature (129)..(129): n is a, c, g, or t
ggtaaaggagttccaaacaggcattttaatggtccaggaaaccaggttgtaccagtattaccagtcagccaccaggagcctgtgttggggggacaaagaccccaaatcctttcccccaacacccaggcnaaaagcaagtattggaacatgaagttggccatgtggctgggccccacgtccttatccccccaggcctgaggggagaccaccttctgatgataaccaacccctagctaccactctgtattcatcaggggaggggtataaaccccacatgcaagaagaacccttgcccccagtgtcaaatgggatggggatgctagagttatagtaaaggggaaaccctatgtaagctgttaacagagttcacaggggtagggataacccctgttctccagctcccaaatgtgctcactttcccagcttcttcatccgttcatcaatgctggcaaagttcccctcaactgtggccaggttttcacgcatggttgtctgcacctgggtcaagagggtggtattgtccttcaaggaattagcaatcatctgctgggtggtatccaagtgtgtcaggagctgaccaaactgcatggcttgctcgtgcagctgcttgatggtgacaagtctctgcaccagctcagggagggtggaggcaatggggctccagcgctgtatagtttcatatagctggtgcaccttgctttgtgtatctgcatcttctacagaggctttatgcttggcaatctcgttcacctttcccaggacactctgtagccgagcctccacttgatccaaaactgcaaggtctagggcgctcacctttgcttgcaacagctctacagtctccatgagacaggctcccctgtagacctgcagaaaggggattctgagcatcctgatcacaaccgacgcgtggtcgacgatatcccggaattccggaccgtaccagctgcttttaagcaggtttatatcac

SEQ ID NO: 319306 - DNA, 1494 bp, Homo Sapiens
  misc_feature (297)..(297): n is a, c, g, or t
ttcagcattgagacagtttattggtttgctgttcgcatatcacccattttatgtaaatagattatacagagactcggtgtttccttcttccacacaggaggtaatcagtctttctctttcatgcacacaaacacactcacattccacgcggcgaacaactttacacctcgctgagacattcacgtcttaaaataggggaggacaatataattgcttttaaaatgcccttaatacaatatataacgtacaaaaatatctctatatttgaagttacaaaaaaaatcttgacagcaacanaacttaaatattgatagttacctctgtatgtacaacacgcattgcacttttcctctttaggttttggaaagttcaagtaatagtgaggcttgcgccctggtggggtgacacgccgtgagaaatcagtttgtgggcgagcacggctgtggctcagacccctgctccgggggtctcagcattcatttctcagtttctcctctccttaagcctggcaaacactcggattcttctgcaccccgccccctggggcacttgcacctgagcaaggctatggaagcgaagcccccagaaggaggggcccttgcaaagccagagctcgccgccggacggtgcctcccggactcagggtctccgcagggctgtcagagcccggtccccacaccgctcgggaagtccttcgtcccgggaggcaccagcgggatgcttgcgcgactattccttgtaccatgggcgcctaaatcctaaagaaagtggggagcacttccactcgggggggctggagccccgtgtgcttgtggcttagaagacaccagagtccgacccgggccggcctcgggcagggagcgccggcgccggcggccgtagccctgggggctgatcttgctcctgggggcgacgttgtccttgtccttatctgtgaactggtagatctggtgtgccagcttctgcaccgtgcacgtcccgaagcggcagccaaagctccggaggccctggaagttgttcatgctctggcggtagcgcttgactcggatgcgggcggcatccggactgctgtcttcggggcttcgagaggcacccttcatgtcctggggccgaataagggtctgggcaggcccggccttcacgtcagcgagcccggtggggtagctgctggacatccgcagttccctcttcccacgactcagagcccacttattccacttctttcgaaactccgacgcgacatccaaccgagcggtgtcagcgcctaggaaggcgagcgaacccaggtacatcagggcgacggaaaccagcttcatcccggctgcgaagcgcagaccctgctaagagagtgatctgccaagtacttgaaggagaaagtctcagacgtcccactggcaatggcaaaactccgaagtccaagcccagctgcagtgagaagcccgaagtggcaaggcttgagctgttctatccagtgtcaccaagaaaccactgagt

SEQ ID NO: 319307 - DNA, 1378 bp, Homo Sapiens
ccccacccagccatgcctctccccaccacaacagcaccccgcctgaccctagtgtccaggtctgtcccggtggcctccaaggaaatgggacaaaacatcctttctgccaactgcaggggcagcagaacgccacagtggttgagcatgggctctggtgaaggatggcgggggttcaaatcccagttctccacctctctgcttcgctccgattcctgggcctctgagctggtctcctccgctgtggagtaacagtgtgactgctcatctgcacagattccttctgtgctggacacggttccaactttccaactactcccgcaggagctcatttagtggagacaagatcttgctcagtgtcatagtgaggaagaaatggaaatatctgtgcagggcccaagcccggcctggtgcgggagaggcattaataaacgcagcttgagttcagaagcaggtggtctgtggctcactcagcctggcttcctgctgtgtcttcacagtgctgggctaccttcctggagagaaccaaagtccaggctgtgtagatgcctgtggtccaccagcgcaaagcagcggcccatcaggacgcttcggaggtagatgcgtctgagttccatgacatcggggacatggccccactcctgttctggaggtcacgggcctgctgaacctcttgtaccaggtcagccaccaggttcatctggcaggacctgagagcccccaccaggtgggccactgttgcgttctccttctctgtgttcttccagattctcagtgactcccgcacacgctctgtcaggttgcgggggtatctgtcctcgatgctgtcgatcttggtgtctgagactttgagctgacgagccagccttctccaatctttccccacattatcacatatgacgttaaatgctgcacacaggtcttcttccccaggcgcggccccggccgccgcccccgcctcgaagtcgtcgacgcgccgcagcaggtcgtggcgccgcagggaggcgagcagctcgcgcaggagctcggtgtgcccgggctccaggtcgttctgctccagcagcatggagaagaggtctaggccgctctgcacgcgctccagcttgcgcttgcccacgcgcccgaggcataggaacttgagctcggtcagctcgctgctcgacaggctggacgacaccgagtgcagcagcaccaggaacgggtccatggcggggtctgcaagcggccggggctgcggcccggccctccgtgcgccctctgtcctcggctcgctggccctggccaggtctcgccgcttgcccagcggcccaaggattccacccccgaacctgcactccgcgacgcgtgggtcgacgatatcccgtaattccggaccggtacc

SEQ ID NO: 319308 - DNA, 1577 bp, Homo Sapiens
gaagtagaatatatttcattttattataaagcagtgctcccaaacttttcacagcgtacacctcgagggtggagaactaacatccaagcacacctggatggtggatgggacccacttctgggtaacctgatgaggaagctctagtgaagaaattcaggacgcggtcttcagagcagagggcttggttcaagtcccttgttctgccacttactaactgcatgaccttgagcaagccactttaatttctctgctccttctctgtgaaatgggtacaatgtggtcagcagtaaaggaactaatacatgtacagcactcagcacaaagcctggcacacagcaggctctcaccaggtgccattctcagcacaactgcttggttgagctactgtggcagtggcaggttgtgccccaagggggtgggctcaggagcccgtgcagcaagaggcagtgaccaaggaggcaggggacaatagccctatcttttcaggatctctgccttggacctggagaatggagagactttgctcctatcacgtcccaagttgggaaaactaaggacgaagccggtgactgacatctgaaatggaatcctctgcatctccaagtggccctatacctgacaatatcattactagtgaaaaccaagtgacaaacacactcctcgaccccaagttcttccacatgtcccattgaggagagcacagccaataacgcagagtgtatttatgcgcagggctggctaaacaggctggctacgagtccggaacagtgtcaggatctggcttcccattggccgacatgacagaatccttctcgcgttgctctctgatgtactggtccaacagggtggtcagctggaggggctggtgctggagcagggagtgggtctgggctgtgaggcaggtgaggcctcctacaagctccccctgcaccaggggcaggctggggagcttggagtagttgataaagccctgcctgctgaggatggtgtcatcaatgcagccacctagcagcggcaggaatggcacagtccttaagatccgtaccatctccttgaccttgggctcttcactgaccagcagcatgttgtgccccacaaaaaggggcagcaggttttggtacttggaatcctccaggaagggcttcaggacctggttggggaagaccttcatcaggatcttgtgtttccgcagctggtgtcgcataagaagcttgtcctctgcactcagagccacattctggcagacggctatcattcggttgtcctggaaaactgctgctatctcccggcggagaagcctgatgaggcctatctcctcctgtggggggctgggaggagatggcaggcatgatgggtggatggctggtttcggggggatatattcagtcacagccatcagcttctgccgctgaaagtgcatcacacgacggtggcgggtaacagccttggagccatagcggacagtctggagggtaggcagccggcccgcctggggcaggagaccccctcgcagcatccccgccacggccgcagccatcgacgcgtggtcgacgatatcccaagattccagaccgtac

SEQ ID NO: 319309 - DNA, 1302 bp, Homo Sapiens
  misc_feature (6)..(6): n is a, c, g, or t
  misc_feature (14)..(14): n is a, c, g, or t
  misc_feature (26)..(26): n is a, c, g, or t
  misc_feature (793)..(793): n is a, c, g, or t
gaatgngccactgngcccagccacgngcggctttttatccaccttccgggcttgcgggggggtttgtacttctctgcgaatgggttgcagtgctcagcattgcgggtctctgtagaagtcccaaagcttcaggatgagaagatggaggggctggtttccttccactctccacggccgcacgctcagaggctggtctccgcatgagagaaaagccacctccgggtggggctcggctgggccttgcagaatcgaggtggccccgactggccctgccgtgcgggctcagcctgggcttgttgcagatggtggtggcctggggcaccggccaggtgggcctcggtggcgaggtggtcgttctggcaaaggcgcacactgactttgacgtccaggccttccgggtcaccttttttgatgaaaccaggtgatgcagccgcccatccacgatgttgggagagggtctgggcccggagtgggggccgaggcccgagcacctccccctggcttggctgtgcgtctctgcgtctcccggtgggtcagggcgctgcgagctgcggcagtgctcagtcctcatttcttgcaggatggcgtcgtgcgggcagggcagtgtgcggctctggcggctgcgtggcggggcgctgcgttcctgccccgtggacttccctgccgcctcctcgggcagcttcgtgtgcagccgcagtggccacatcttggagattgactgtcagcgcatggtcgtgcggcatgcccgccgcctgctccccacacggactccaggcggtccccacccacagangcagaccttcagctcaggtaagagggcgcccaccacgtggccagggtggcagggacaccgaggcactgacgcctccctgcccccaggccccggcattgccatcagcagtctcagcgtctccccggccatgtgtgctgtgggctctgaggacggcttcctgcggctctggcccctggacttctcctcggtgctcctggaggcaggtgatgctgtgggcacgctctcccaactccgggagagcctcgcctggatgctggggcggggaaggcccagtccccggggctctgctgtcagccgccctggctcctggctgcacagggtgccaacggggccaagtggcatatccagagccctggggcggctgatgccagggcggcccgcagggcagcctcacggaagggcccggtgggacgtgggtagtgtgtgaagcccctcagcctgggtcccgcctagcctaagagtggtggcctcgagggagctgcatcttgcagccgtgtggagcctgggac

SEQ ID NO: 319310 - DNA, 1498 bp, Homo Sapiens
  misc_feature (864)..(882): n is a, c, g, or t
  misc_feature (972)..(982): n is a, c, g, or t
ttttagtgtggaattgttttttttaaaactgtgtgtaatacaaatccagccaaaacaatagtgcaaaaagttacaaagcaacaatctcttgggctaatgcagtataggctatacagaaacagccacgatgaaatgtgcagatcaggcacggtcgaataccaaggaaccaaggagacggttaatatttcaacccacagtttgtgttttggattttttcccccaaaatttccatacaacaaacagacatctagatcaacccagcaagctatggtggaagtgtgcagtccagaagagcccatggagaaacaagtctcctgaggccatgaagatccgcaacaggctgagtgagagtagcacttggaacatagccacgttctgtggtggaggaggtgggcctcgttagactgctcagattactggaacctcgttatcacatcccattctaacaagtttttcactgaatgttttcctgacatttataaatgaggggtgcctgcccatgttaatgctgattaaaaaacacaagtacacaaatctatctccttcattgctggtgtatggacccagaacaccatcacaaaatatttccttggcctaaaagatcactggattaacaaggagttttaacagaggaacaggagtgctgtactgagaggctttcgaagggaaacacaggtaccgccatttccgatgagtttctgaaaatgctagaaaaatgacagactgccaaagacagctgtcatgctgttctccatgataacggcactaatattaaaaaaaataagaacttttaatgattgtaatgtatacagtttgggctgtttggcaaacccctgcagatgtgcattaatgatgctttatttnnnnnnnnnnnnnnnnnnncagtccatgttgaaattgatcagtgtaagttaaatggtggtttttaggctggacccatgatttaagctgtacccatccagctcaaaccgnnnnnnnnnnntcatttgactgttaaagcaattgttcagagtcttgaagaagaaaccaggcaggaaaatgccaataatgatgattggcgaaatcaaaatcgaaaacaaagaaactgtttatcaagccgccgacaaagaaatcttgcatggagactacaagtctggagtttctgggatgaaattgtacaggaatctcagtccacagtttcctcaatcgctgcggagacggagctgtcactgaatctgacagagccctgcactccccggtccgccgaccctttctgtaatccagtcttcactgtagcctgaggaactgtttcaacctgtttggacagaaaaatacagcattaacaaagaatttttttcccttttaattattaacagagggaaaagatactttcatcaatctaagcaatgatgagtgattaatgtatctgaaatctgaactcagtcccatcttttgggtaaagttctctgtctcaagatcagggagggtttaaatcctagctgcctgtgctgaatatcaa

SEQ ID NO: 319311 - DNA, 1387 bp, Homo Sapiens
  misc_feature (63)..(103): n is a, c, g, or t
  misc_feature (288)..(288): n is a, c, g, or t
  misc_feature (317)..(317): n is a, c, g, or t
  misc_feature (332)..(332): n is a, c, g, or t
  misc_feature (359)..(359): n is a, c, g, or t
  misc_feature (785)..(785): n is a, c, g, or t
gtgggccttccccaaatggaaagcacaggccacccggggaaccccgggcttttgggaaagggnnnnnnnnnnnnnnnnnnnnnnnnnnnnnnnnnnnnnnnnnaaaaaggccccgttttcttcacttgggggatttcaaaaaggcggggccttcccgggcattgtgttggcaggaaaaagtttaagctcaattgtcccccaaagatcaaaagttttggttggaactttgccccagggttacaacagggtaatgaagccttggaacgttgtcaaaagggggtaacccangaagtcacggttgttatcggtgtatgctnctgggcatgaacagncgggagtcccgagccccaacgtatgcnccatctgcgcccttgatccaaaaaccagcagggttctcgggtgatggtggagctgtgctcccttgagtgcacttgagcactccccagaccagatcactttttggacacacccaggaaggcttttgaagtcaagccagtttccagaagggctggggtgagatcctgacctgtgcagagagtggggaggcgtcagcgcctggccagggctgcccccagtcctttggtgcccggtgagcgcagccagcaggagctgagcagcgggggagatgaatcacctcctgccttggcgaggcggcagctcattgtttacaggcaagccctgctcctgggagggctcctgccaccccacccttcctctgtgtgttatctctgccccacagcagcccctgggcagcaccagtggccactgggctccccccggggttnaaacgggtttcccagaccaggggttcagaggagactatttacccttcatgatctttggcgattctccactggagcggaagggctgtgtgtcaaaagaaggaagccaggctgtgaagggccgtgttgctttcagtgggtgggcagaggtttagaaaggtggttctgaaatggcacctggtactcttgtgggacctggggaatataaggaaactctgtgccatgaggttttcaaaaataaaaattgagtcccactctcccccgtacacacacactcgggcacttcaggaggtcagttctcaccccttcctcgatggggctttaaagctctggggagaagagctgctccccactcatgccccagagggactgtgaaaaggcttcctgtgacctccgatggcggcccctcattggccaagggcactgtggatgttttgtgggaggcagcatggcaccgtggaaagggcagtagacgtggagccggcacctctggtctggattccacttaaaaccagttgagtggtctcaagcccttaacctctgtaagcctgtttcttctctgaaatcacagtaataaagcgtcgtaagatggttgggaagaacca

SEQ ID NO: 319312 - DNA, 436 bp, Homo Sapiens
  misc_feature (395)..(395): n is a, c, g, or t
aaccttttctaaaacttctgcccaaccccactgaaaacaaacaaggcccctttaacaccctggcttccttcttttgacacacagcccttccgctcccagtggaagaatcgcccaaagatcatgaagggtaaatagtctcctctgaacccctggtctgggaaacccgtttcaaaccccggggggaagcccagtggccactggtgctcccaggggctgctgtggggcagagataacacacagaggaagggtggggtggcaggagccctcccaggagcagggcttgcctgtaaacaatgagtgccgcctcgccaaggcaggaggtgattcatctcccccgctgctcagctcctgctggtgcgctcaccgggcaccaaaggactggggcagccctggcncaggctgacgcctccccactctctgcacaggtcaggatctc

SEQ ID NO: 319313 - DNA, 1156 bp, Homo Sapiens
  misc_feature (584)..(584): n is a, c, g, or t
  misc_feature (679)..(679): n is a, c, g, or t
  misc_feature (1066)..(1066): n is a, c, g, or t
caatatttatttggaaacatttcaaactacagaaaagttatgcaaattacatcaggaacacacacatcccctgtgcggagatctgtgctttatgtctttgaaagtaagttgtcgagatcacagcactccacccctccacaccgaagcccgcagcttctcaggaaagggcagtcttgtgtaatcagtgcatatcatcacacacaggatgtctgacactggcaccacgctgccatctcagagtccatttcaatgctgggggtcatcggttttcagcaggttcttccctgggttcaacgcgtcttcccgccagagggatggaatcttgggtgagtgttgaaatgcgtcagaaacaaaaacgcaaagtggaactggagcacgtcacagaccttggaccagaagtggcctgtgaggcactggaagagacgccaccgtgcgagctgatggtcacacagcttgaggaccacaaagcccaggcaagagagcacccccaaagctaagtaggtagccgaggtggtgctgccatagtgcctgtgggtgcgcagcgcctgccccacagcggccaccacgtgagcacccagtgcgancctcgaagccctggggatgtagcagagcgaggccataactggccagggagacgcacctcaagagagaggaacagccacgggccgccagccgcggntctaggtagaggcaccaggccacgggccatgcaaagatgggcagtgtgagccactggtccagcaccgcggcacggcgccactgcgtccacaggcgcagccactgcacggggccatagagcagggccatggctgcgaacacgtccttcaggtagcggggacccagccccatcgcgccgcccctgtgcagccacgacagccccagcagcgtgtaggccatgttcacgagtgagttgaacggcatggccaggaaggcagggaggccggccacgggcgcctcggcgtagtgctcatagcccacttgcacggaaacactgtcgaaaatgcccgtgaacacagccacggcacagaggccaccggccacggccacgtgcacgaaggcctgcccncactctggattcatctggaaccggcggcgtgacctggggcagggagcttcagagagcagccctcaatacgcagcctctgcagaacactct

SEQ ID NO: 319314 - DNA, 914 bp, Homo Sapiens; identical to SEQ ID NO: 126125

SEQ ID NO: 319315 - DNA, 878 bp, Homo Sapiens
tttttgcactccaggatgcagtgaagacggtggaaggttcatcttcacaccgaggagccctcagtgtcgaggtgactcccggcctgaggagggctgaggcatcctgaattttgagagttcgaggttgaggtctaagaaggtgtacgtgctgtagtcatgatgctgcaggttcttgtaggtagtgttgttcaaacggttcaataggcactggggctggctcctgtgtgccgactcggtcgttccctggcgcggttgcatcttgcatggcctcgtcctgggtctaaagcttcagcgctgctgtgttttcatggaaaccgtggtttattctcaacaggaactgtcttcaaattggttggtggtatgtgatgttgcacgattggctgtgcacccttgaggtggccttttattccctgcgtccctgaggttttctttctgggcaggggaggggtcgccttgcgctggggctctggcacgggttttttcatatgcccttctggcgtcccaggaggactggctttgaattgcccctatgtactggactgttgtgatcaacaacagcaggcgctgggctgcccttcggtggtgccagacacccgttggttttgtgtggtcaggtaagggttcttttaccttgaaaggatttgtggctatctttatgtattacttttattctaaaggtgtagtggaagtgtttttactttgaacttgggcttcaaaaactctgatctacttgggaatctgggcctttgggcgtttgtggggttgcaattttttttggctttgtttagggtttaatcagggtgacctttatttttatggattgggaggtgtctctttttgatataggaaaggtgcccatgctgtttttttcagaaagg

SEQ ID NO: 319316 - DNA, 442 bp, Homo Sapiens
  misc_feature (14)..(14): n is a, c, g, or t
  misc_feature (22)..(22): n is a, c, g, or t
  misc_feature (52)..(52): n is a, c, g, or t
  misc_feature (62)..(62): n is a, c, g, or t
  misc_feature (91)..(91): n is a, c, g, or t
cccttctgaaaaangttcaagncctcaatccattcagaattccagaattcanaggaacctgnacgaaggatgaaagacgaaaggcgacgtncactttccgaccccaacctgacgagcttctgaatcagagccctgttttctgaaatggagacagaactttctgtggaaactctaccaaagtctttcttgacaaaaatttcggaaccccttcatctgtgaatagcacgctgccactgggactgggactagctaccttcctgcccttattcacagctggcgggtaagaactgggtgaagataagtttttagacaattcagctgctgtctgggtggctaggagcttgcccctctcctttggttccactacatcttcagcgccccggctcgtccttgccgcagcaaacacggggcagccatggcggtgacagcgggcgcaccaagc

SEQ ID NO: 319317 - DNA, 716 bp, Homo Sapiens
  misc_feature (91)..(91): n is a, c, g, or t
  misc_feature (164)..(222): n is a, c, g, or t
  misc_feature (226)..(229): n is a, c, g, or t
  misc_feature (232)..(232): n is a, c, g, or t
  misc_feature (235)..(244): n is a, c, g, or t
gggggggaaattcacaagcacttttgttctttggcccgggtatttcccttggggaaaccaagtttaggccccaggtttccctttcccttantgggcccccgggcgcccaaacgaaaaggtcttggaaaagttttttgaggggcccaagggcggcccacaagggnnnnnnnnnnnnnnnnnnnnnnnnnnnnnnnnnnnnnnnnnnnnnnnnnnnnnnnnnnntttnnnnttnttnnnnnnnnnntgactcttgagtggattttatttttgcactccaggatgcagtgaagacggtggaaggttcatcttcacaccgagggccctcagtgtcgaggtgactcccggcctgaggagggctgaggcatcctgaattttgagagttcgaggttgaggtctaagaaggtgtacgtgctgtagtcatgatgctgcaggttcttgtaggtagtgttgtcaaacggctcagcaggcactggggctggcttttttggtggactttgcttcttggaattctgtggctgacccttttcactcttccctgattccgcagacaaagaaaccgtagaagcaagtcctcgaaacacctgggcttcctggagcatagtcttcagcgccccggctcgtccttgccgcagcaaacacggggcagccatggcggtgacagcgggcgcaccaagcagggccacagcagctgcgcgcgcacccgcgcctgaacaccc

SEQ ID NO: 319318 - DNA, 1037 bp, Homo Sapiens
ggatgtgagactttcatttcctcctttccaagagagggctgagggagcagggttgagcaactggtgcagacagcctagctggactttgggtgaggcggttcagccatgaggctggctgtgcttttctcgggggccctgctggggctactggcagcccaggggacagggaatgactgtcctcacaaaaaatcagctactttgctgccatccttcacggtgacacccacggttacagagagcactggaacaaccagccacaggactaccaagagccacaaaaccaccactcacaggacaaccaccacaggcaccaccagccacggacccacgactgccactcacaaccccaccaccaccagccatggaaacgtcacagttcatccaacaagcaatagcactgccaccagccagggaccctcaactgccactcacagtcctgccaccactagtcatggaaatgccacggttcatccaacaagcaacagcactgccaccagcccaggattcaccagttctgcccacccagaaccacctccaccctctccgagtcctagcccaacctccaaggagaccattggagactacacgtggaccaatggttcccagccctgtgtccacctccaagcccagattcagattcgagtcatgtacacaacccagggtggaggagaggcctggggcatctctgtactgaaccccaacaaaaccaaggtccagggaagctgtgagggtgcccatccccacctgcttctctcattcccctatggacacctcagctttggattcatgcaggacctccagcagaaggttgtctacctgagctacatggcggtggagtacaatgtgtccttcccccacgcagcacagtggacattctcggctcagaatgcatcccttcgagatctccaagcacccctggggcagagcttcagttgcagcaactcgagcatcattctttcaccagctgtccacctcgacctgctctccctgaggctccaggctgctcagctgccccacacaggggtctttgggcaaag

SEQ ID NO: 319319 - DNA, 950 bp, Homo Sapiens
  misc_feature (43)..(43): n is a, c, g, or t
  misc_feature (225)..(225): n is a, c, g, or t
  misc_feature (234)..(234): n is a, c, g, or t
  misc_feature (256)..(256): n is a, c, g, or t
  misc_feature (315)..(315): n is a, c, g, or t
  misc_feature (332)..(332): n is a, c, g, or t
  misc_feature (344)..(344): n is a, c, g, or t
  misc_feature (583)..(583): n is a, c, g, or t
  misc_feature (656)..(656): n is a, c, g, or t
gcaaattatgagcttaaaatctgcagttatttctgttagaaantacgcttactctcgaaactaactccaggtagagaattcatcttccaaagtattttatagtaaccttggctcactccaaaaattcagtggaaatgtttagtaacttaagatacttaactgtttctccataaccccaaaagttaattttcatgaaacttcctaatctacattgtttccggcctnccataggtngcactgacaaagttatttaatnactgaagaattttcataggtatgacaaatggcccactaagatttggtgcagctggattnagagttgtcattattgnactggtacaggnacaaactttgtaaatacctgcctgccaggaaatcctttttgtatagaaaagtaccatcacctacttggggcacaggcatgaggctttagtccaggctcagggaagtgtacgtaaatcatttccaacttgattttagtaactcttgaaaacttacaccaacttcggttagaatctccagagtaaaattacaaagttatcaaccttttgatttgtgtcacagcatgaaaggttgctctatnttatataaacctgtaactttttagtcaacctgcctaatgaaaatggagtctaaacactttgtgaacagtcctnttataggaattatgatctttaaaatactgtgcttgctgcttttcctatttttggggtaactgaggtaacaaaactgcgtatggctttatttttccatcccttgactaaaggtacctagaacttcaaccaagtacaagtagcaaggttcacagcaaactgcaatcagcttcacagatggagggttttatatcccagagtgtggtcaacgactcaaaagagaatttcaagtaccagtttcaaaatgctaattaatatcgtccagagaacagattcctctcttgcgaggcgtcttcc

SEQ ID NO: 319320 - DNA, 1714 bp, Homo Sapiens
tactggttcaaacatttgcttttattgcgttatatacattctgcagctgtagaatcagaatctgggggaagccaactgagaccccgaagcccagcaggagtccatctgaggtacagaacctgtgcttctgccatgttcctggggcaggggcattccatttccccctgatgctttttcttcctgaagagaagtccaacagactgccagcccaggtctgaaatgcaaggtgggactcctgaacacagtcggggggatggggcagaggcaaacagccctcctgtttcacctgcagacagggtgggccagagtgctatggagcagactgggttgtggaagcctcgtgtgctgaggaatcagtccctgcacacaggagcctgtgcgggggccagcacgcatcgcagcctggcagtacagcctgtgcttttccatgcctccggtgccaacaccccgcacgtgccacaccaactgctccacctaacatgctcagtggcacaggctcaggcagcaaacgtgttccaacccacctgggcagaagaggccaggccagcagaccaagtcctgtgtgtacgcgtatgtgtgtgcattcacacccatgtgcaggaagggggacgcgagatggcatgaaacacgggagaagcagaataaacatttcagcctccctctttccccggtccccgccccccacatagacaaggctttgtcttaagtggaaagcaaactgggagaacaggaggaatgaggccatctcctgagcagccagctgcaggcctggctcctctgggaacagaaatggctgtgagggacttgatgattgagtgactctgcagggaatggctgaaaaaccaagaattccagcctggatgagcccacggggacttcatcagcagtgctttgtcccacagagagcaaaactggtattttcgcaaacaggagaggactcgaggccacagaacacccattcctcttggaccctgaccccaccaacagccccatcccttccagcttgaagggatctggggctcaaggagaatatacattaggttcaggtgacaaataattacacctcaccctccacaggccagcaagaagtcaggaacgctggggcaggtctatcaggcacagttggggtggcacagggcgaggggctggatttgagctggcacagacgcaagagggaaaaggggtcctgagttacatgttcacagagaatgaaggagaaggccctggggcccaccaagctgccagccacagccccgggcggttgttaagaagcatccgcagaactgtaggggaagaacttggcggccttgcttggggtggaggggtttgggcactccgcctcctcgctcagcttgaagaacatctcctgctcccgcttcttctggttcagatcctcttccagagccttcttgcgcggccgaagcttgtcccgccattccttcaggttctggttatggctctcatccagggccttcagtttctgggtttcgtgctctaccaggaggtggcacttttcattctgcagctgctgcagctcgctcatgttgctctcacactgcgccagcatgtcccgcatctggttctcgtgtttctgctgttgctgcagccgctccgacttctgcctcttctcctcctgctgggagaactgcttgatcttctcacgctgctcagctgcgctgcccccgccgttatgtggaggctcttcttgtacatg

SEQ ID NO: 319321 - DNA, 467 bp, Homo Sapiens
  misc_feature (14)..(14): n is a, c, g, or t
  misc_feature (166)..(166): n is a, c, g, or t
ttcctcgaaggttnggccgaaaggacgcctctgtctcccagcagttcttcatgagatgatagacctagaaggaaaaaccagggctggtgggggctgcccctctcccacagcaggatagtggggtccagggaaaagacaaaggaagtcttcacctcaccagggacantttgtcgggccgtggcagcctctcccctcgttcccagcaactcagtgaagtctcagaactgtcatctgaccctgagcaatgcctatgagctcaaggaatttctacagtataaacaagacaagctcttttcaagaggcaatgaaaggcaggcacggtggctcatgcctgtaatcccagcactttggattcattgtgcaactcttttatgtattttgtgcatatgtaatacttttagttagtttctagaatgcacactctatacagaaataaatctcagtgaattttaattatcagcaatctc

SEQ ID NO: 319322 - DNA, 588 bp, Homo Sapiens
tcagagaaaacatgagtttattaccagatggtggagatggtgggcctcaagtttggaagctgggggatttaagggctggattagtgcccctacaaatgttgggtccctcaagatcatggttaggctcacggccaagaaagaaaaataagttcacagaggtggggtctctagacaggagtaaggcacacggtgtgggtgaggctgacatccccctcttggtttcatcctgggagcagggagcaggaggctccctctgcagccactgcctggtccagtcctcccaaggcagggctgcccattgtgcctcagcacacgctgaacactgaaggggcctggccttggtacttctcatggactgtcttcagaatgggtatgaggttctcgaaggttgggcgaaaggacgcctctgtctcccagcagttcttcatgagatgatagacctcacagggacatttgtcgggccgtggcagcctctcccctcgttccagcaactcagtgagtctcagaactgtcatctgaccctgagcaatgcgtatgagctcaagggaatatcgtgggggggctctggctggagtcacagtgcgtcag

SEQ ID NO: 319323 - DNA, 1589 bp, Homo Sapiens
  misc_feature (995)..(995): n is a, c, g, or t
  misc_feature (1284)..(1284): n is a, c, g, or t
  misc_feature (1310)..(1310): n is a, c, g, or t
  misc_feature (1330)..(1330): n is a, c, g, or t
  misc_feature (1352)..(1352): n is a, c, g, or t
  misc_feature (1355)..(1355): n is a, c, g, or t
  misc_feature (1368)..(1368): n is a, c, g, or t
  misc_feature (1374)..(1374): n is a, c, g, or t
  misc_feature (1497)..(1497): n is a, c, g, or t
  misc_feature (1504)..(1504): n is a, c, g, or t
  misc_feature (1547)..(1547): n is a, c, g, or t
gctgtggtgaagggaaacccccggggaattccggccccccccttgccaagttggggaccagggggcgccaaacagagggggccaggctagtgtccccgttgccccaggaccagacctcaggggccccccgagggtctgcaggcagctaggagcctgccaagtgcttgtggaagtagaggccggaaaaggctggcgagcagctggcaggcagccgtccccccagatgaggtaggccaggaccgccacggaggaagaggggagtaagcaggccacccagggcccccggcaatccgcgctgcagtctgctggacttcgtcctccccagagcccgatgggggcagcgctggctgaggatgggtcgggggatagtagaggagctgggcccaggccccaggaatagcctcccagcgtcttgagcagaagtgtgcagttgagggtgaggatgagcggcgtcaggtactgcaagctcaccacggtcacatagcagtagactcggaccaccctctgctggatttcacgggcttcgatgcggccagcctcccttcgcagctgctccacccgggccttggccaggcacaggtaggcctgcaggtggggccgggtcaccgccagccgcagcaggcacagcaccaccagcaaccagaggcgcccagagtcgaaggcagaatcggacagcagggagaaacgcgtctccccaaacggcggctggtgcaggaagtcccgtgcaatgggctttgtccagagccacaggatgaacaggggagacaggaagctggtgtgcaggaggaactgcagcatgggtctgtcctccgacatggtcagtgcgtcccggtgggtctgggccagccgcaggcctgggaaggtgaggaaggcacccagcacagagcccaccactgccagtcccacgcggatagccagcttggccacaggaagcgcccagtcccagccctgcttcttcagaagtggctctaagttctgggtcatgctggccaganccaggctccaggcccagctcgagggtctcctcccgcaccacttgcaccagcatggccagcagcaggaagaggaaggcaaaggtgaggcagacagagcgctcacccccctcctcggcgctgaagtacagccgtgtcactgtcaggaacatcttgatggagaaggtcaccgtgagcaggcaccagaacacagcaatgttagtctccttggctggtcccagcatgtagtagtaggcctctgtgaagaggtacacgccgcccgagtacacagcaaagtccacaaaccactggnactccaggaagaagcgcaggaccagngcatccacggtcgtgagggngcagctctccagctggaacggngcntctcggggcacanacagtngcttctcctcactaaggccattggcccaccgctctttcctgcctctgggcctcggcttccccgccagggcccgaagctcctcctcagacgggtgcttgtatcggaacacactgccgttacagngcagccngcgcgcgaaggagcagtgtggcgccagcctgtgcatgagggtngcagtgagcagggtcaccaccagctgtactccgaggaccgcc

SEQ ID NO: 319324 - DNA, 1062 bp, Homo Sapiens
cacccggcaaggccggcaagccagggcccagcacccaccaggcaaaccagagggcgccccagagtcgaaggcagaaatcggacagcagggagaaaacgcggtctcccccaaacggcggctggtgcaggaagtcccgtgcaatgggctttgtccagagccacaggatgaacaggggagacaggaagctggtgtgcaggagggaactgcagcatgggtctgtcctccgaacatggtcagtgcgtccccggtgggtctgggccagccgcaggcctgggaagttgaggaaggcacccagcacagagcccaccactgcccagtcccacgcggatagccagcttggccacaggaagcgcccagtcccagccctgcttcttcagaagtggctctaagttctgggtcatgctggccagaccaggctccaggcccagctcgagggtctcctcccgcaccacttgcaccagcatggccagcagcaggaagaggaaggcaaaggtgaggcagacagagcgctcacccccctcctcggcgctgaagtacagccgtgtcactgtcaggaacatcttgatggagaaggtcaccgtgagcaggcaccagaacacagcaatgttagtctccttggctggtcccagcatgtagtagtaggcctctgtgaagaggtacacgccgcccgagtacacagcaaagtccacaaaccactggtactccaggaagaagcgcaggaccagggcatccacggtcgtgagggggcaggtctccagctggaacggggcatctcggggcacagacagtggcttctcctcactaaggccattggcccaccgctctttcctgcctctgggcctcggcttccccgccagggcccgaagctcctcctcagacgggtgcttgtatcggaacaaactgccgttacagagcagccagcgcgcgaaggagcagtgtggcgccagcctgtgcatgagggtggcagtgagcagggtcaccaccagctgtactccgaggaccgccatgacgcgtgcgagaacgcggtgcactcacccaccggcctagggctccgggcactct

SEQ ID NO: 319325 - DNA, 956 bp, Homo Sapiens
  misc_feature (321)..(321): n is a, c, g, or t
taccgcccagccccggcaggcagggcaacaagcacccacccaggcaaacccagagggcgccccaggagtcgaaggggcagaaatcgggacagcaggggaggaaacgcgttctcccccaaaacggcgggctggtgcaggaagtcccgtgcaatgggctttgtccagagccacaggatgaacaggggagacaggaagctggtgtgcaggaggaactgcagcatgggtctgtcctccgacatggtccgtgcgtcccggtgggtgtgggccagccgcaggcttgggaaggtgaggaaggcacccagcacagagcccaccgctgcncagtcccacgcggatagccagcttggccacaggaagcgcccagtcccagccctgcttcttcagaagtggctctaagttctgggtcatgctggccagaccaggctccaggcccagctcgagggtctcctcccgcaccacttgcaccagcatggccagcagcaggaagaggaaggcaaaggtgaggcagacagagcgctcacccccctcctcggcgctgaagtacagccgtgtcactgtcaggaacatcttgatggagaaggtcaccgtgagcaggcaccagaacacagcaatgttagtctccttggctggtcccagcatgtagtagtaggcctccagggcatccacggtcgtgagggggcaggtctccagctggaacggggcatctcggggcacagacagtggcttctcctcactaaggccattggcccaccgctctttcctgcctctgggcctcggcttccccgccagggcccgaagctcctcctcagacgggtgcttgtatcggaacaaactgccgttacagagcagccagcgcgcgaaggagcagtgtggcgccagcctgtgcatgagggtggcagtgagcagggtcaccaccagctgtactccgaggaccgccatgacgcgtgcgagaacgc

SEQ ID NO: 319326 - DNA, 1087 bp, Homo Sapiens
  misc_feature (6)..(6): n is a, c, g, or t
  misc_feature (17)..(17): n is a, c, g, or t
  misc_feature (40)..(40): n is a, c, g, or t
  misc_feature (70)..(70): n is a, c, g, or t
  misc_feature (547)..(547): n is a, c, g, or t
  misc_feature (598)..(598): n is a, c, g, or t
  misc_feature (820)..(820): n is a, c, g, or t
  misc_feature (851)..(851): n is a, c, g, or t
  misc_feature (994)..(994): n is a, c, g, or t
atacantttgatatttnttttctctgcaacatactacttntacctgttacacccgatccaaactccagangcatcttctccttagtaattctatagtgtctcactgaccaccattctctagttgttttattgatagattcatccaggctgggccaatgggacagcgggataagaaagagagagggagggtttagcatactggcaggagagggtctgaaggaatgaatcatggaatcccaggtaataggaagcctaaggaggagaataagacagcacagatcaggagaaagagagatagtggggatatgctggaacaggtacagtgaagataactcagtgagagagctgggaggaaggaggcagcagtcagagtgtggagggactaaagttcaaacttcaaaggtggagcagtttcaggaggtggccaagcaagaggatgcatgggttatcgatgttttccatggtccacttccagctctgtatacctgctctcagctctgctctcagccagagcaaacacactcaccctaatctcaggtggggaggnaagggccagagtccatctgggatccagcatagaaggacagccaggattgcnacctgctggctgcgctgctatacatgcagaatgtgtaccatgttcagtctagacaatacaccctccttccttcctcaccagccacagactccaggcccttcccacccttctgcctgtggctgagcctcccaccctagcccatacggtgctggttcagcttctgacggtgctggctgagatccgtgatgctggctttcctcacaggaagaagcctgcagggtnacgctgaggcttgtccatctgggctcctgtnggggcctgtcaggctcacctgcgccaacctgtccctgaacagcattgagcaggaagctgggggtgggggatccggaggagcagaggccgcaaagtagtgcagatcttccttcttgcaaaaccttgccctgatcctagggctgnaggcaggaacagatgcagcaggtggctgggagggtaactgggggtgggtgggtggaaaggcctagtctggagatgccacagctctactcttct

SEQ ID NO: 319327 - DNA, 1295 bp, Homo Sapiens
gcctcagattcctgtggcccaaggatcccaccaatcctcgttccccctaaacatgctaacaaaaatcccttatcgtgggtattaaaataataacagttacactgtatgcatatttatgtgctccttttgtctggtttttcttttcatcatgtataagctgaattcagcattagtttctcacatcttcccccaggtatccccaacagaatttttatgtcccagcttgtattaaatagaagtgaaatattaaggaaaataaggaacttgtgcaactttttttatgcattgttctcaaccatttaatttattgaaaggagatgctgcaacagttcttgatttagcagcagttattctcttgtttacatagttatgtttttttgttgttgttttgctctgtactggaaacaaaaataaagttttctacattattttcagccttgggttatggtatagtttctttgtgtttgtcgtaatatgcacattgtccttctaggacctgtcaccccaccatggagaaaagagtcttttggttctttttaacataagtgattagtttaagagtatgctgaggagccactgggcttaaagaaggatgtaaataagacccaaatacatagggaccaggcgctgctttctcatgttcacaaaagcagtcctccaccactgaactccattctctcagggggctcaatgaaggctaaccaatccgatgcatgtgtaggtaacagtcccatggactggcacttgtaaacagccaatgccaaacccatcaggttcccaatgagatagaccaaaccctgaagaaacttctggcttgaactttctaacatcttgaaagtggctgaaatggccataagtgcctgaatgggtcgccaggccatcatacacaccatcatagtagggaagatggagatagtattgcctgccatgtacatgatgaagagattcatgggaatctgtttgaggggacccaaggcgatgtcccagcagcgcttctccaccaggatccggtctgtctcttgcacgctggtatcaggcacttgcttgtccaagtaaccgactgggtagagcgagtctccctggccactgccccggtcacttcgacccctgctgcctcctccaggcccgcttagctcaatggcccacttgaagcgccggcctcggttagccaccaggcccccctgggccgtcatggcaacagctgcgtcctatagcctcgatgcttctcagtccaaagcgtactccacaacaggcccaccagcgttctccgctttgtctcactctgcaaatgcccc

SEQ ID NO: 319328 - DNA, 1315 bp, Homo Sapiens
  misc_feature (269)..(269): n is a, c, g, or t
  misc_feature (283)..(292): n is a, c, g, or t
tgggaactcccgggttgaagagttccccggtgaaggggccttcaagacttccccttctggaatttgtttcaagaacccttcgggtttcccgcccgggcggtttttttattgggggaggaattccaagccacttagttcatggcccggaatcttccttgggaaacaggttaagaacccatgttccacttaacctagtggggcccgggcggccaaaccgaaatggtttaggaaagttttttcgagggccggagggcggccgaacagggttntttttaggtgggtnnnnnnnnnngtgaaacaagtaaatcattggctttattctgggtcctggaagctccactgtgagtctgaaaaaaagacacaacaggggcggcagccctgggggctggtgcagaaaatagtccctggctcctctggccctgggagcctaaagggcagtgaggagaaggcttagcaagaggcctggagcaggggaagtcaggtccctcaggaacccctcctcccccagaggaaggaggaagagggctggagagtctgctggagagtctgctcagttcctcagcaactgcactgcaggagggtgcaggccatgggttactccttgcccttctcaggggcagtgggctcccagagccacttggtagtccccaggggctcagtcccagggtccagccgtgactcccctaagggcccctcgccctccaagtccagctcctcaaaagaggagccgctggcacctgactcgctgtagctgtgctcgctgcgggtgtcaccgtcatcccagccacggctgctcgccccaggtgacagtgtggcagctgaagtctcccggctgccagggctcacttccaagcttacagaactcgtgtcactcattgtgtcagctcctgtgccatccacctgggtgtcaatggcctccacaagcccccgccatttccactctgtctccttcatctcaggcacatagaagtctccctgccgtgccagtgggcacatgaaatggatctggtcttcctggtagatctccagccgaggataggcacacagcttccgctccttgatgtaggtgtccaaggcaggatggacacggcgggtagccagccagatggacagaatggtggtgtaggggaaggtggctgtcaccacatggctgggtgccgggaaggagaacaccttgaagccaaatttctggtagaggtcgatgagctcaggggagggcgattcctcaccttcactcaggatgctgcccacggcacatcggcacttatcagggggcacctcagcagccgcccgctgcggacgccgatccgcgcag

SEQ ID NO: 319329 - DNA, 990 bp, Homo Sapiens
cgtaaccgaaccctgagccgcctgcgcggatcggcgtccgcagcgggcggctgctgagctgccttgaggtgcagtgttggggatccagagccatgtcggacctgctactactgggcctgattgggggcctgactctcttactgctgctgacgctgctggcctttgccgggtactcagggctactggctggggtggaagtgagtgctgggtcaccccccatccgcaacgtcactgtggcctacaagttccacatggggctctatggtgagactgggcggcttttcactgagagctgcagcatctctcccaagctccgctccatcgctgtctactatgacaacccccacatggtgccccctgataagtgccgatgtgccgtgggcagcatcctgagtgaaggtgaggaatcgccctcccctgagctcatcgacctctaccagaaatttggcttcaaggtgttctccttcccggcacccagccatgtggtgacagccaccttcccctacaccaccattctgtccatctggctggctacccgccgtgtccatcctgccttggacacctacatcaaggagcggaagctgtgtgcctatcctcggctggagatctaccaggaagaccagatccatttcatgtgcccactggcacggcagggagacttctatgtgcctgagatgaaggagacagagtggaaatggcgggggcttgtggaggccattgacacccaggtggatggcacaggagctgacacaatgagtgacacgagttctgtaaggcttggaagtgagccctgggcagccgggagacttcagctgccacactgtcacctggggcgagcagccgtggctgggatgaacggtgacacccgcagcgagcacagctaccgcgagtcaggtgccagcgggctcctcttttgaggaactgggacttggagggccgagggggccccttaggggaagtcacgggctgggacccctggggactgaaacc

SEQ ID NO: 319330 - DNA, 865 bp, Homo Sapiens
  misc_feature (679)..(679): n is a, c, g, or t
  misc_feature (682)..(685): n is a, c, g, or t
  misc_feature (690)..(690): n is a, c, g, or t
  misc_feature (700)..(700): n is a, c, g, or t
  misc_feature (708)..(709): n is a, c, g, or t
  misc_feature (711)..(711): n is a, c, g, or t
  misc_feature (752)..(753): n is a, c, g, or t
  misc_feature (774)..(774): n is a, c, g, or t
  misc_feature (776)..(776): n is a, c, g, or t
gcccttgggacgccactccgcttccgcatctcggtgaagcccttcctcgcactggtctgtttctctgtatttggctcgtgccgtgtgctggaagggggggcacagctcggtcttggagcgcggggagttaatctgagactccgccgcccccgttgtgctgcttctgcaggtgcaggaggtgttggttgcgatcgccgttctcgctaaacgagcggtcccggaatttgttctccttgttgagcagggctgtgccgccgccccccgacggctccttaagggtgccgtaggaggtcggaccgccggccgccgcgctgccgcagctgctgccgttagcggcgcccgggaacttgggcgagcagctgccggggctgggcgcggggtgggcgagtgcatgcagtttgctggccgagtgccgtcggaggaatcccggcgcgaagcccgagctgggtgcggcggccacaggcgtccccaccgccttcttgtccagcatgttgttcaggttgaggttggccagggatttctctgtcttgcacaagaagtcgacatcgtagaaggcggacagaagtgtggtcgacatgtttctggatcccgcagtggccggagcggcaggccgggaggtcgggaggagcccttggggcggcgtggccgggcttgagccacgacgaataacgggcgaggngcnnnnacgcncccaaacttnaccgggcnntnagaggagagggcgagtgcagcggcgcgggccggcgggaggnnccggcggagtgcggcaggggngnaggagagaagcgaggagcgctcctccgcgccccggggtgcccggcccgccccccccgcggagccgacggcagatcccgggaattccgga

SEQ ID NO: 319331 - DNA, 1197 bp, Homo Sapiens
  misc_feature (1062)..(1062): n is a, c, g, or t
  misc_feature (1085)..(1085): n is a, c, g, or t
  misc_feature (1119)..(1119): n is a, c, g, or t
  misc_feature (1133)..(1133): n is a, c, g, or t
  misc_feature (1137)..(1137): n is a, c, g, or t
  misc_feature (1165)..(1165): n is a, c, g, or t
  misc_feature (1187)..(1187): n is a, c, g, or t
aggccgggccttcggaagcatgttgtgtgagggatgtcacagaaccaggcgccctgaggatggagactggtgaccccatcacagtcatcgagggcagccccgactccacaatctggaagggccagaatggtcgcaccttcaaagtgggcagcttcccagcctcggcagtgacgctggcagatgcggggggcttgccagccacccgtccagtccacagaggcacccctggccggggagatcaacacccaggaagcatagatggagacagaaagaaggcaaatctttgggatgcgcccccagcacggggccaagaggaggaacatgcccctggagaggatgaaagatggagctgagtgtgcatggggtcacccaccaggagtgccagacagcactaggagccactgggggagatgtggtttctgccatccggaacctcaaggtagatcagctcttccacctgagtagccggtccagagctgactgctggcgcatcctggagcattaccagtgggacctctcagctgccagccgctatgtcctggccaggccctgagctcagcttctgcgggcacaggcaccagcatgaaaagcctaggcccctgagggcctggccacatgggaccaagcggaaccagaacaaggtcccgacaggggtagacgttccacctggggagatcccacctgccgtaggcacatgggaggaggagcccagagttgggcactggcaaatgtctcctccctcccatgctccttggcttctgaaggctgaagctcctttggctgggccaagaaggatctagtctgcccactacattctcaaacaagaggacttggaggaaaagagctgctatacatcatatgcagaggaagcttctatgcgctagagaggatcaaggggccacactggaccatgtgaacagccatcctgaactgccatcagctaccacactggactctgcagggcagccatcctggatgatggaagccaccatattgacttggggtataggcccaaactgccttcgtttggtccagggccatcgtgggtgatgacgattgctntcttgcactcaaggacatttgangctggtagtatggattatgagatggactagcccntgccccagcccagntctnacattcccctttgttttttcccataccnactgcttctaccctcccccatnacatacatct

SEQ ID NO: 319332 - DNA, 1243 bp, Homo Sapiens
  misc_feature (31)..(31): n is a, c, g, or t
  misc_feature (633)..(633): n is a, c, g, or t
  misc_feature (676)..(676): n is a, c, g, or t
  misc_feature (805)..(805): n is a, c, g, or t
  misc_feature (1155)..(1155): n is a, c, g, or t
  misc_feature (1157)..(1157): n is a, c, g, or t
cgggtttccagacacacagaagcataaatcnggcccatacaaaaaacctcaaaggtttcctcctgtcttcccactcaatcaaagtctccttcaaaactttaagtaagtttctctttcccaacttcaggacacacctgcactgaactagacactgacctagacacttggtttgatttggcaaattttctcttaaaatgctctgcacttttcttacttatgcctactagagttatttctgacctactgtattcactttcagaattttctgacgcttttaatcttccaggcaaagtgctatttgaagaactctgagtatttactttctgtaaaggaagttcacatgtagcatctttctcctgactatctaatttgcaatcgcctaactgctcagtgacatctactactgtctgttctttgtctttgtgtttggagttagctttgtgaccagctttctttttcattatgcttttttggtgcagctgtggtctaatatttgttgaatttggtctgtttcctggtagaatggaggaaacaaagtcttgctcattgtcactgctactatcactgtgagtgctagaagaactagattcatattgcttttcaaagtggctaggattgtcgatatctgatgtnttaatggctttactgcataactgtacttcttctccagaatggncactttgttcttcctttagcagttgaaaatcaggatgcctctcttcttctcgaacccatactggagttttgggaatttgtgcttcaaaaacttagatgcttgataacaaaaattgctgcaaaaagactntctttcagtaatatcatagactttattggttttggtagaaattttatatttctgttttggtacaattcccagcttcttctgacataaaggataaccacagagtttgacaatagaacgttcatccacgacatcactgtagtgagcaggtgtaatgaacctcccacactccattaggaactcttctgtaatattctcctctaaaagctgttcaacaatatgtagagcttttttctcaaattcaatcttctttctcacagctgcttctagttcagctttccttttagaagcatcttcttgtttcaaagtacttgtctgtttagtactgcggcttttcgagagcagcggggagncncgcttgcggccggcagaagacggcccagcgaagtccgccatgggggagagtagtctgccggacggggacacgctccggcgtctcgc

SEQ ID NO: 319333 - DNA, 1782 bp, Homo Sapiens
  misc_feature (27)..(27): n is a, c, g, or t
  misc_feature (36)..(36): n is a, c, g, or t
  misc_feature (672)..(672): n is a, c, g, or t
ttggatcctcctcctttctctggagcngtgcttggngctactctgacactctgtctcttcatcaccagccaaggaaaggggctttcgggtagggcgtactgcagggcctccttgaagtacttgggaaggaggaagccatcagtattccctggagtcagaatcaccccattggcagagcgggagaagggtattccatctgccagagccaggggtccatcgatgaacacagctatttcacaatgggaccgcatgcctgcagagacagctggagctgaggcctgggcacctggagtgcagtcagcaacctaggcagactggggtcctgggctgggggatgcaggggtgctgctccatgccggacatggggtggccccagacaagtgttgtaacctttgaaggggacctgggaggacagagtgggtgggagtagctaggtggaggggagggcactgaccactgatgataccggggtctccaggcagtcctggggccaggtgaatgtgcgtccttccctggcaggacaggcctttgagtaggatggatggccagtgcttccagaatgtaccatggactagcatcgggggcagggcctgcggtgtctccaggggcatcagctccaacttaggtacctgcagggaatggccctggttggcccggatgagaaggccagtnctgggatcccccagctgcagggcgaaccgctgcttcctattggtgtccaccacgcgctgcacatcttcagcagagaagccgcggaactggggcaactgcaggagggtgcccaggggcacgaagccatctgtgggcaggcagggtgctcaggagctaaccttgctctggactgggccagggttaacagggagccacaggcaaccgaaacaaagtctgtgcttggagatcgcttgggcatcctctgtgggacctttagaaagtctcccctttctgggccgcagttttttcaacttacataaaaagaggatctgcctcacggaggggcagggaggtgagtgcccagcatagcgctggcccggagtgcacactcacaccaccagctgcaccgtaccctccagggctcgccctcggggtaagtgctgatctggctgcttggctggagggggcggtcaccaggcctggcccagacaagaactctcctcagtctgctgtggacatgacaggggctctaggccttgctctcctctgtgcatggggaggaagtgcactctgtgccttcctcagggagcggtggaggcagccatcagggaggagtcgcagacaggctcacgtttctctctgggctcaagccccagcctccaaggcccctacttaccagctcccatgggaagccccagcttcaaggccccatggcgcagggcataggacagagccttggacagctgcacgtctcggtcctgttctcggggtctgggagcccttctacccctggaccctgctgcttcctgcctccctcctccagagaagttcatggttaagacctgtggggggcagtgacgaggggggactgctttaaggccccttccacgtccccatccctcccagaaagtcacaaagcctcaggaagtgagcgctgggtgggagtatacggctcattaagttcaccacccccaagtccctgctgcagagagggaaactaaggcccagcaggccagacttgcccaaggtcacaccgtcagccaggagcgcagggaggccgagccccgcaccccagatcgctggtgcgccccgcagggtggtccgggaggcagggccgacgtgccgacggac

SEQ ID NO: 319334 - DNA, 958 bp, Homo Sapiens
  misc_feature (8)..(9): n is a, c, g, or t
  misc_feature (13)..(13): n is a, c, g, or t
  misc_feature (744)..(744): n is a, c, g, or t
  misc_feature (791)..(791): n is a, c, g, or t
  misc_feature (819)..(819): n is a, c, g, or t
  misc_feature (824)..(824): n is a, c, g, or t
  misc_feature (855)..(855): n is a, c, g, or t
  misc_feature (884)..(884): n is a, c, g, or t
  misc_feature (896)..(896): n is a, c, g, or t
  misc_feature (902)..(902): n is a, c, g, or t
  misc_feature (908)..(908): n is a, c, g, or t
  misc_feature (910)..(910): n is a, c, g, or t
  misc_feature (914)..(915): n is a, c, g, or t
  misc_feature (926)..(926): n is a, c, g, or t
  misc_feature (929)..(929): n is a, c, g, or t
  misc_feature (937)..(937): n is a, c, g, or t
  misc_feature (950)..(950): n is a, c, g, or t
gactttanngggnggatttcacaatattttgctttacagcagtgacaaaatatttgccagaaatttttcttttcctggcacggatattcccagcagttgttattctatgaattgaatttcactctgctttgcacagttagaggtatacccattcctaccctctgtaattgagggacacagcgtggctttagaaagctaggctatcgtttccttttagtcactctaaagtgaattggttctgtaagtgatggggcaggaatctgagaattaattaaggccattaaggatttaaagtaaacactgttccaagtgttgcttaaaaaaatgtttttaatgaattatgtggcaattccagggaatgttctcaaaatgaaatattcatactttattaaaagtaaattgtatgttggaaaagttgctttttttgctgtcttcttctgacttggacggctcacagtttaaaacaaaattagtggtaaaatagaaaaaggaaatgtttagtacagaaagtaccagccacagtaccctcataactccatctccttccccaggcatcactctttccagccacttcaatcctaaagcagtgagaccctcattttaacacacagagcctccctgcctaccctccttccctgtaacgtgagctactgtagtccatttattagttcttcggttaagcttcagtagacatttggagcacaattccaaagggtaaatcaatctatagggcctaagccttangataccaacatcaggaaagccccattcagatctttggaatttacagncttgtaagaaattagcaaaagcaggcgnctganttaatattgccatcagttatcctataaaggntgcaacttcgaaatccctggcagccttcnataactctactngaaaanacaggnanaaanntcagattcctntgncaaatcanagtgatatggaanaacagtct

SEQ ID NO: 319335 - DNA, 1134 bp, Homo Sapiens
tagtttaatcatttttatttcaagtgtatttaaaaaatcataaatggggtttcataatccaaagttgaaacatttattcttcatagcttcagaatttaacaaccaattgtagaccatgctttccaaatccagtcttctttgctatttttcaaaacttctgagatctagtattaaactgctccattctaaatgtatagttttagataagtattgtacacttgttgataagggttttctgaaagcagtctatcaaatataaagaatggtttctatctaagaatcagcagtgagggaagaaatattaaacacctatcaagaaatcaattattcattttaaaaataacagaaccagtgctgctctctgtcataaaagagaacatgtaaaatttatttttatagactttggtaatattttattcccccacagaggccttcaatcctacttaaagatattttacacacagtaaccatcaggatttactgagtaaaaatctcaggtattaaccatgcccctaaaatgtgctattccaaagaggaacaggttacttttgaggaaaaaagctgccttggtaacttccctcaaatgtttattttaaataaaaatggttgatggaaatattttttaaaagaactttgggtataatatggcatactgcccatcaaacaaaaaaggaaataaaactttctttccatttataataagttttccacctttactatcaagattacaacttattgaccttttatgcttgcttggtttttttgactgcctaatccaatgtttaaatttttaagtctgcatttcaatgtagtaggagttatttttcaaataatcttcagaacccagaatacagagcaactctcagaataccagagcaacactctcaagtcatacttttgaacccagaataccagaataccagacttcagaacccagaataccagagcaacactctcaagtcatacttttgactacaattaagagatgaaaatggacggatatctgaagataggtattccctctgctctgaaggtgagcaagattttaacatgtgagcaacacagaactccactcctctggagctcctttcaaccgacgcgtgggtcgacgatatcccgagattccggccgtaa

SEQ ID NO: 319336 - DNA, 1587 bp, Homo Sapiens
  misc_feature (20)..(20): n is a, c, g, or t
  misc_feature (24)..(24): n is a, c, g, or t
  misc_feature (32)..(32): n is a, c, g, or t
  misc_feature (39)..(39): n is a, c, g, or t
  misc_feature (46)..(46): n is a, c, g, or t
  misc_feature (67)..(67): n is a, c, g, or t
  misc_feature (70)..(70): n is a, c, g, or t
  misc_feature (73)..(73): n is a, c, g, or t
  misc_feature (98)..(98): n is a, c, g, or t
  misc_feature (115)..(115): n is a, c, g, or t
  misc_feature (129)..(129): n is a, c, g, or t
  misc_feature (144)..(144): n is a, c, g, or t
  misc_feature (147)..(147): n is a, c, g, or t
  misc_feature (163)..(163): n is a, c, g, or t
  misc_feature (191)..(191): n is a, c, g, or t
  misc_feature (196)..(196): n is a, c, g, or t
  misc_feature (201)..(201): n is a, c, g, or t
  misc_feature (203)..(204): n is a, c, g, or t
  misc_feature (216)..(216): n is a, c, g, or t
  misc_feature (221)..(221): n is a, c, g, or t
  misc_feature (229)..(229): n is a, c, g, or t
  misc_feature (242)..(242): n is a, c, g, or t
  misc_feature (246)..(246): n is a, c, g, or t
  misc_feature (260)..(260): n is a, c, g, or t
  misc_feature (299)..(299): n is a, c, g, or t
  misc_feature (305)..(305): n is a, c, g, or t
  misc_feature (421)..(421): n is a, c, g, or t
  misc_feature (426)..(426): n is a, c, g, or t
  misc_feature (1428)..(1485): n is a, c, g, or t
tatattgatttttaaaaggnagtnaatttggngggaatntcctccngtagcccttcttccaccagcngcngtnatttcgtgaccggaaggagcctccncaaacaaagcgccaagngcaagaaggttttnaacctctgcaacaanaancaggaaactggagganagaagggcgtggagaagccaccactctnccgcntgganannggagaaaaggancagtnaggaagangagaagccccttngccnactccctccggaanctcagttgctcgcgggcagcccacgggtggagatatggngccggnagcacaagagcctcaagggtcgccgaatcctcctgaaatccccggtggggttcgggctgggctcagctttcttctctgcctatccgcggtctcggggagccaggcgcggtgtctgngctgngccaaggagagcttccagctgaactcagaaacacctggggcttggggtttcgggcaggagacctctgctcctagacttgggggtcatttacacactctcatccccaaacccccctcccgcacggggattcagacgaaaatcgcgaagaggaataataaacacaaaatgcaaagtcctcagggagtcggcagcggagtcggtcccaggacatggctattgctttgcagctctcactgggaccttgggacggtcagcctccctctcctttccacagccaattccatgcgcagagagcgtcctaacccttacaactcgtctgtgctacacacccaccgcgcaatggctctgaaactttttgcccatactcttagattgaggtcaccccagccagcgccaaaagaatgagcgcgggagggggtcacagcagccagttcggccaaacatcgacgctgctccggcacgctccagcccagcgcctgggatgtgtcagaggtacctgcgaggaacatttgcgtgcgattccacgcacgcgttgcatccctcttcccaaacccggatcgctgaactgagaggtggcgcagagtgtctcaccaggtgcggggatttctctccgcctcaggccgtacgagcttccctcgctgtccctgctaagcggagcgcggacatgcgctggaactccggctcctgcagccacttccacatcctccggaaggtctccccgccggatttgagtttgctccagggtttggggttgcgcagcaggtccgagagggtccctctgggagcggcagagcaccctctgcgcgaagatggcctgcgcgccggtcaccgaaggggtgggctcccgggttgtgcccaggagtttgccgtggccctgggcgtttcagtgggcttggggattgtgcgaaggaagcccgttttgggcaccatgccggccgaggtggccgtgaggtgcttgtccccgtggcggccgacatggccggtgggtgggctttaaacccnnnnnnnnnnnnnnnnnnnnnnnnnnnnnnnnnnnnnnnnnnnnnnnnnnnnnnnnnnagccctttttgggaattgtgggatctgtcccaaacccgatcttgaaaaggggcaaaaggctttttgccatttccggccattttttgtggggggattttaagg

SEQ ID NO: 319337 - DNA, 960 bp, Homo Sapiens
  misc_feature (3)..(3): n is a, c, g, or t
  misc_feature (449)..(449): n is a, c, g, or t
  misc_feature (453)..(453): n is a, c, g, or t
  misc_feature (499)..(499): n is a, c, g, or t
ctncttcttttatgtgggcttctactcctatcccttctatgtcgtgaacactcagcatccaaatagcttccaccagactgccgtgaatctactgaagctgatcgcctttcttcattcttttcggcatcatcctctgccttctcttgctcttcttgccaatgattgctgagttcttccatgtgcacatttatcacatctcgaatcacctcagtatatgatttcttggttatgtgaacattcttggctctataggactggcgtcttcttttataatctcgtacttctgccaggatttcaaggtaggattttggactttttcgactattgtcttgattgattttggcagtcaagtctacaaagagattgctgtcattttcaataatttgagaatcagagcgctttttctttgtctcctcaactacgaaatcatagagggcaagacgatcagncttngagttagatcaccaaacaaaaccgatttgtgattcaaaggaacttncaacaggtaatgaagaataaattctttgattataacaatcactgtctttcccaactgcagttctagcttgtttaattatctggaattgtgagtccttattcaaagtaatcgaaggtatcttcacattttcatagaaaaactcaggattatacatttcatcctcttcttctttggtatagcccattttcctcaatctacaagatgccatgtgctttgccaaagatgatttaggcatgtgatgattggaatcgtatggacatatcacaacttcatcctccgccgcctcctcttccccgggatccagactatctaggtcccagcccagggacgcggtcacctcctccaacgtccggcagccgctctccacgaactcgttcagctcctcctgcagccgccgccgctcctccacaggtggaggctcgccctccatagctgcagcccacccgccaagaggaagcccc

SEQ ID NO: 319338 - DNA, 1169 bp, Homo Sapiens
cctgtggcaccgttgacgggaggacttgtggcggttccgggaagggtgggcgccagtctcccgggaagaagctctgcggtctaaaacggtcaatttttgtcgccgcaggtccctgggcccaggttctccaggagggggattaagggaaaggtgccgcccccccaggcctgccagcagccgggacgccacggtgccccggcacggccctgggcgctctcaaatgcccaggcccaggccgatgcccagggggatcatggcgctcacggtgaccgccagcttggccgcgtcccgcaggggcatggcactccgggccatgctgatgcccagggccacggccaccagtgtctcgtggacggccacccccacgaacaggctcaccactttctccccctcctcctgcaggcccagggccaggccctcaaagaccgagtgggccgacagcgcgaaggccaggctgagcaggcgcacggggctggcgcgcgagaggccctgcacgctcaggctggggccgtggccggtggggttccacgtacagggggtggccccgcgcgccccccatgaaggggctctcatactccgagtcgctgcccacgtccgatccggcgttgaaggtctccaggtcgatgaaggacggcttctccttgcggaaggtcaggatcagctgctccaggaagacggtcatgaagaagcccagcaggaggatggtttcggccagcgggtagtcggtgctgatgtggccgaggctcaggaccttctggagcttttccctcacagcgggcagcagagcgttgaagcacgtggccagaaacacccctcctccaaaggtgttgcagagagagaggatctttttcgagcgatgggccttctcaaaatctgtctcgatgatcttcacggggagcagggagccgagcagcatgaagaagaacacgcccaccatgcacaggattttggccactagcaatttcaccatggtggcggcttgggctgctctggtcactgcagggccaaaccatctgtgggcgcacacccaagtcccacgatgtgctaccgagcccaaccacacagttggaggctcatgtctcagtccagcaactcccgggggcccctcgtccgccgactggcgccgctgcacgcccaacggccgcgcagtctcgaccccacagacgcgg

SEQ ID NO: 319339 - DNA, 1043 bp, Homo Sapiens
gtgtgagccactgtgcctggccgatacttcttaaactcttacgccttacgtttggggactgccaactgaactgtccagcagcagagctactcagagccaaggctctccacggcatcttgtccagtctctcaggagttagcaggcttacacacgaggagacgaaggctcagaggataaggtgcacagggttacgtgggattaggggcagagttgtgatttaaactctagtttgaacttcaaaacccaggctcgcccctttccaggaaatgggtcagatcccaggaataatttggacaggggaatcctgggagatattggccaaaccagtttagtcttcccaactgggagggacatctggtcacagcgggccctaagtttctttcctggcttgcccctccaggggtcggacagctgcccactgggtgctatttggatctcccagcctgaccaggtgcccaatcatgggcggaggccacatcccacttgccgtgcacgactgcaaaggttgtgcagcccgtgtgtggccgccctggtaattcaacttctgcacagggatctgcttccaccgacttcctgccactgccactcagcgggcccaagaccgctcagatgcagagtgaaggctcaaggaccattcagcctgtgcaggccccaggcccaggaaagttagtgtgtaggcagcacaggtcagtttgcggtggaggctccctggtggtctgtccttttctaccttccagggaagagcatgaaccctgggccctcttgctttactccagcggaagccacctctgcagcccaggcccagctgaggtcacagctcacagccatcctttcgtttctcactttctgacaattgcaaagacaggatgtgggggagtgagccacaagggcccctgggtccttcctccaaacccagatgggaactgtttgacctgggaaggcccgactggctgccgggtaaacagccacccaatcaccctgggccccctcacccaagggaagggaggaagcgcctcttcctcatgcccctgaagaacaatcaa

SEQ ID NO: 319340 - DNA, 1491 bp, Homo Sapiens
  misc_feature (947)..(947): n is a, c, g, or t
  misc_feature (1265)..(1265): n is a, c, g, or t
cacgcgtgggtaacggggggggacggcccaccgaaaatggcacgagatgccaatcaactggggctctaaatatgaaccccctccgcaaaacaagaaagagaaagggggagcaacttaggcatctaacggaactgcctgccatgtcagggccgcgggtgacccggatgccggagtggctggccaagactagaaggtgagtgataaaggcaagttcaagagggcccacctgagtccaaatagcccaaggccaagctgggtcaagcccacactggagaagagggtgagattagggctgggggcttcaagaaggctatcagagtcgaagatggggtactggcttggtcacatcctggaagaaagggtgaagccagggctgccttggccgaaatccgcttgttagggtcgtagtgcagcatttgcgataacaagctccgtccatcttcatccaggggaggtacaactttactaaaatcttgccgggcccacttggggaaacttggcttgtaatcaggcatagaagtaactcctggccacaccacctcatctggggtccccagagtccgaaagatccggaagagctggtcaatctcagaatctccagggaatagggcccggcgagtcaccatctcagcaaagatgcagcccaggctccaggatgtccacagctgtggaataatatttgcagcccaggaggatttcaggagctcggtaccacagggtcaccacctcatgggtgtaagtacgaacagggactccaaaagctctggctagtccaaagtctgctagcttgatggccccctctgtgttaataagcagattctgaggtttaaggtctcggtggaggacccgatgagaatggcagaaagctaggccctggagcagctggaacagatagctcttgatgaggggaagaggaatgccagtgagagcagaggcatccatgaatntcttgagatcttggtgcagaaattcaaaaaccaggtagagtttattttctgtgtgaatgacatccagcagcttgacaatattaggatggttaagctccttaagcagagagatctctcggatggcagtactgggcacaccctcagtctcacttggagaggttgggaaagcagagatgggaatatggttacaaatattcctttcccccccacctagtcatttctttcccccaaggagacaccacccagcaccccctaggaaagtgagagaagagaaagggtgatggtaagagctaattcttgggtagtcagggtgtggtntttggatatattaaggccattatctcctcttttcccaggggtaggtaagtaaagccgcctggtgaaggtgaagcagggagactgtaatggaggggaaaaaatgcaggagtagcccccagcctccccagaggggccagtgaggttcaactgccattctttggaaagaggagagaattctaaggtgagggtggggcagtgaagagggctcttcattcagaaaggcgat

SEQ ID NO: 319341 - DNA, 534 bp, Homo Sapiens
gaagcaggggcggggcctctggtggcggtcgggaactcggtgggaggcggcaacattgtttcaagttggccaaattgacaagagcgagaggtatactgcgttccatcccgacccggggccacggtactgggccctgtttccccctcctcggcccccgagagccagggtccgccttctgcagggttcccaggcccccgctccagggccgggctgacccgactcgctggcgcttcatggagaacttccaaaaggtggaaaagatcggagagggcacgtacggagttgtgtacaaagccagaaacaagttgacgggagaggtggtggcgcttaagaaaatccgcctggacactgagactgagggtgtgcccagtactgccatccgagagatctctctgcttaaggagcttaaccatcctaatattgtcaagctgctggatgtcattcacacagaaaataaactctacctggtttttgaatttctgcaccaagatctcaagaaattcatggatgcctctgctctcactggcattcctc

SEQ ID NO: 319342 - DNA, 1666 bp, Homo Sapiens
  misc_feature (846)..(846): n is a, c, g, or t
  misc_feature (876)..(876): n is a, c, g, or t
  misc_feature (1142)..(1142): n is a, c, g, or t
  misc_feature (1173)..(1173): n is a, c, g, or t
  misc_feature (1227)..(1227): n is a, c, g, or t
  misc_feature (1302)..(1302): n is a, c, g, or t
  misc_feature (1545)..(1545): n is a, c, g, or t
  misc_feature (1592)..(1592): n is a, c, g, or t
gcaagtcagcgtttattgctcaagcgtattaaacaaaaatgtagactgaaagagacagttcttttaaaccccatttttccggattttttaagcgctctaaaataagaaaataagaaagtgcaagccagcaaaaacgctccaagtgcctaattctgactctgaaacttgagctctctggtctgcccccaagaagacatcagcccgccccgggtcgtccctgtggctcccaccccattcccaaggagcagaccccgccagcctcaaagctgcagggaggtgggggtggcctgcaagacaggggtggggtctgcatccggtaccagtgacagcagcctctcctctcccacggtggcgcttgtttggggctgtggccaaagtgtttgcccggcccctgactgtgtccttccggagctgccgaggactgcagagagggccctggcttgtcccctctaggagcagctgggaaggtgtcttgcctgcatcccccttcaatggttgaaaataatgattccacttgtcatgaacaccatgaaggtatcttggcagccagagtcactcctgttccgcagtgggaaacctgggagggtcctcaaaccccctggcagggtctgcaggccgccccatccagctgcatctcccaggcctcctggttctttgatcttggatggccccaggccacagatgcatctccgggcctttccagcagcccatgggggaccagtcaatacaccccacggcggtgaagagaaaacgttcatgtcttctcagatcagaaggaaagaaacaaaaccattgtgaaggaaaacacctgctggaaagtaattatgaaagtaacagcattccaanttcacagtcgccccaactcactgtggattnactgccgtcagctgggaggacccaggcgccctcgggacgaggagacgcagggaaacccactcctggccatggcactacccaaagccagtgttattctcacacccaactgtccctgcagcctggcaggtgggcagtgaccgcctgggctgtaccctaagaccccaaaacagcggagatggagaagaccgctgccctggggccttctcagtgaggatcaagacaaagtacttgctaggaggtagagggcgctgggtgaacctgtgagnattcctgggctctgacctgttttgtcctgcnttttgagtaatgggagcaaacacaggagggaggggttcagtttcccccggttantggggccagggagacgtggtccagccggtttacaaagccttggatgcagccccacccccaagaaaactgcctgtnacagcagcggccacgtggcactccaagctgggcatgacagtgcccgggacgtgggcagcggccatgtggcactccaagctgggcatgacagtgcccgggacgtgggcagcggccacgtggcactccaagctgggcatgacagcacccaggacgtgggccggccagtgtggcggtggatccctctagaatgactgggtctaagtagggagacagggcaggcgacccggcgtggactggtgtggntttcacctgggagagcagcggcagcctgtgtcgttgcgcccaggctntggaggaggggccctgcggctcccgggccaggacagaggcgcccagccctgttctcactgtccaggaagagccg

SEQ ID NO: 319343 - DNA, 362 bp, Homo Sapiens
aacacaggaataataaatttattataatcacagatggtggggtagtgcacataaaaaggggggacctcttctcaccagagggtgctggccggtgcccagagtggcaggcaacatagggaggcgctccctgcatggcccggcccgctgccaggcccgctgtctctgggtgctcagtgtgtggtgctctgaggacacgggtcctgagggccttgctcttcatccttcacagtggggacacggccctcatgccagcgacacaggggtgcggcagcaggatccctgacagcccctgctccctgggtgccccacggtgctcagcaggaatgccgtgaggcttgaaggccaagctggttggcggggag

SEQ ID NO: 319344 - DNA, 1246 bp, Homo Sapiens
  misc_feature (432)..(432): n is a, c, g, or t
  misc_feature (438)..(438): n is a, c, g, or t
  misc_feature (440)..(441): n is a, c, g, or t
  misc_feature (444)..(445): n is a, c, g, or t
  misc_feature (447)..(447): n is a, c, g, or t
  misc_feature (455)..(455): n is a, c, g, or t
  misc_feature (473)..(473): n is a, c, g, or t
  misc_feature (479)..(480): n is a, c, g, or t
  misc_feature (493)..(493): n is a, c, g, or t
  misc_feature (531)..(532): n is a, c, g, or t
  misc_feature (540)..(540): n is a, c, g, or t
  misc_feature (579)..(579): n is a, c, g, or t
  misc_feature (608)..(608): n is a, c, g, or t
  misc_feature (620)..(620): n is a, c, g, or t
  misc_feature (643)..(643): n is a, c, g, or t
  misc_feature (799)..(836): n is a, c, g, or t
cgtgttcagcatcaggctcacctggacagtttggcggttgtacaccttcaccacatggaaccggaagctgtagacaccccggacaggggctacgcatgagccagaggcccggtcaaagccaccgccctcgttcaccaggacctggtcgaagtagatggccccactggtgccattgccggtttcccctgctggctcatggtggtggcttcggaccgcagcaaatgccactcgcccagggggtgcctctcccagggctgctcccccgggcccccctgcagcagctcggccaggctcacagaccaccaggcactccccctccagcaggacgggctctggcccctcctgggcccacccggcccccagggccagaagcaccagaaccaagggcggcccgggactgtgtaggggacctggtagccagtgtggcttggntcccangnnggnngngggggtcngcaacccacaagtgcccnggtcgnnggcccctcttctntttccgctcctctccctggattctcaccgccggcaccnngatagtcngccctctctaggctcgctgaaccccctctccatacctgngtcccagctctgtcctgcctcccactctnactcctgctgtnactgcagttccctcctccttggnagagcatgcagtgacagcagttgggctttgggagagaaaggagggatgaagccgcctgcccactggacgggagggctgcagccacagcttcagggtagccctgctggatgggacagcactgagggctggacctggggggatggagaacatggtatnnnnnnnnnnnnnnnnnnnnnnnnnnnnnnnnnnnnnncatatgccagaggcagcccctcaaccccttcctcctattcctcctctcttcaaaatcccccacaaatcaacagcccttcttcgtggcatctttccatttgttggaagaaaggggtactccaccaggggtaccctccgcctcccgcctcccgcctaccccctccgccacgattgctttggtggaaagtgcttgggcctacagcaccagtgggccagtcacgctgcctctttggtcggccacatctttattcgcgggaaacaactttcaacgcatggttcccctttccgagaagtaactgcgcagaatgcgcgaggaccctgagggccgggagacagacgggagggctggtgagaagcgcaaggggcgagccctggagccgccgaggggactaggccgagcgggcccgtcgg

SEQ ID NO: 319345 - DNA, 379 bp, Homo Sapiens
gggaagagggggcgattgtcacggcacattccacggtagtttcttccagttccgcgactcgcgggcccctcctaatgtcagggacttaagattggggctcgctgggacctggtggtccggttatgggaaaagaagcctcgtgggagagcagagcctgaaaaaggactgcgcggactgacttcttggctactgaaagcaaagctccactgttccaggcacgattctgccttctctcaaatggcataactcaggactctgcaaattcccagaaacaggaggaaaaatgaccacattcaaggagggactgaccttcaaggatgtggctgtgatcttcactgaggaggagcttgggctgctggaccctgtccagaggaatctg

SEQ ID NO: 319346 - DNA, 693 bp, Homo Sapiens
gctgttctgcgtctcgagggcccttctgaatttcctggacctactctctgaaccctcaacgagctagcgatagatttagaggaaaggaagcaccgtcggaaagcaaaggcatgatttcaccttcacttgaactgcttcattcaggactctgcaaattccctgaagtagaaggaaaaatgaccacattcaaagaggcagtgacattcaaggatgtggctgtggtcttcactgaggaggagctggggctgctggaccctgcccagaggaagctgtaccgagatgtgatgctggagaactttaggaacctggtttcagtgggacatcagtccttcaaaccagatatgatatcccagttggagagggaagaaaagctttggatgaaggagcttcaaacccaaagaggagacaggaatcaaaatgagatggcaactcttcacaaagcaggattaaggtgcttttcactgggagagctttcatgctggcaaatcaagagacacattgcgagcaaattagccagaagtcaagactccatgataaatattgaaggaaagagctctcagttccccaagcaccatgattccccctgtcaagtgggagcaggagaatctattcaagcttctgtggatgacaactgtctagtgaatcacataggggatcattccagtatcattgaaaatcaagaatttccaactg

SEQ ID NO: 319347 - DNA, 525 bp, Homo Sapiens
cccaggagtactcgtgaaggctgtagtggcccccaattcccaatggaagcccgtctttcagccactggactgaaggcagggagcagtggggcccagagactacccaagccgtgcagttcagagccactgagctgcccaaggcaggcctcagcacctggtcttcagacggggagaggaagtcaggggccctatcacagacacctggcatggctctgagccggggcctcctcggggcaggctgggctccagggtcacccctggctccaccgggctcctcggccagcagactgatccaagagctgggcaggactcctctctgtccttgcagtcagctggacagggcacctggacaggtcagaggctggttccagttctttcctccggggggcaaatgttggtcattggtgcgcctttgggagcaaactctccccttcgctgggccccagggagtgtccacagcaccaaggctgctatggatgcatcgccaagcgcggtggggacctggcttgtgtctttgtgtatttt

SEQ ID NO: 319348 - DNA, 451 bp, Homo Sapiens
gacaggttggccttgacccaggagtactcgtggaggctgtagtggcccccaattcccgatggaagcccgtctttcagccactggactgaaggcagggagcagtggggcccagagactacccaagccgtgcagttcagagccactgagctgcccaaggcaggcctcagcacctggtcttcagacggggagaggaagtcaggggccactatcacagacacctggcatggctctgagccggggcctcctcggggcaggctgggctccagggtcacccctggctccaccgggctcctcggccagcagactgatccaagagctgggcaggactcctctctgtccttgcagtcagctggacagggcacctggacaggtcagaggctgctgccaggacctggggctcgcgccgggcgggggcggggcagctcacctgagccaggtgcgcagcggcaac

SEQ ID NO: 319349 - DNA, 1664 bp, Homo Sapiens
  misc_feature (15)..(15): n is a, c, g, or t
tttttttcccaatgnctcccaagtcctactcgcaaacaaatacattgtagaaaaaagtttaattgctggttattgtttgaatcttgaaatacaattcttcactgatgatactggtataaaatggtggttattaattcatgctagcacaaccaaaactaatttaacattattggtaaaaatgagtcatttttgaatctctattaaaatctgaacacataaacaaatctgtgctaaaactggaactgccttctcactctacatataattaaacttccagcttcaaccatctgatgttgaaatctaaagcacctccatgagttaaatgtccccgacaaaccatgtagatggacaaacaagattggtggtctttaattgctggcgacagaaaaggctgcagtttagtacttaaacctgcagttagtggtcaactttctatccaggcagagtaaactaaggagagctatgaaatatcaaaagaaaactagaggccaggacaaagaggcaatgtcagccaagccactgcaagctggtatgcacccctgtatttcagccaagggcaggcaatccaaaattacacactgctttccttaacttgaccaaacagtgtatttttcctctgaaaatcttgtcaaaggttgtattccattgtacctagtgaaatacaaagtccactctcataaaaatattatatttttcaaaagaaatataatacattgaaaatcactgattgctgcttcttcgtctttttttccgtgaatgtgtaggtgtttgagtctcttgtatttcttcttttacacaggatatgggctgtttgaaaactatttcatcatctttatcatcatcattcagttcagccacttgagattttcgcctctccaaaaatgttggtgtacaaactggtgtggggccctggctatccacagtcttctcaggagtgtcaagagtacctgaaacttttttcttcttcttacgtaaaacctggccttttgtagacgtctgacgattagtttttgaaatactttccgttttctgtaaaatcaaagaaggaaaatcatagtcaattccttttttagctaatttcttcctgagtaatctttctttctttttaaatcgctcctccatccgtagcttttgtgttagtgtccgattccgattataccgtttcactgatggatatgatggctgcttaaatggaatattccagtctttaaagagttctttatgtactttttcaggtggcataaaatgacactccaagagtctttcaccaaacaggtagttgttcattgtttcagcaactattttggcaacatcctcagactcaaactccacaaatgcatagcctttgctatttccagtccttttacttctggacagcctgaaccgtgtcacagtgccaaactgggagaaatatgaaaagatctgggtttcgtcaagtaggttaggtaggtggcgcacatagactactccaggagtaagttgttcttgtttttttcgctgggttatgcgcttgcgaacctgcgccacctccttttgaaactcgacatcttcctgcggattaagcgacaggattggcccagccgggccagaaaaagtcgccatgccaaaagccgccgacgctaaccacgcggcgctcccggaaacgtcgggctcccagctctccc

SEQ ID NO: 319350 - DNA, 931 bp, Homo Sapiens
  misc_feature (494)..(494): n is a, c, g, or t
  misc_feature (505)..(518): n is a, c, g, or t
  misc_feature (526)..(526): n is a, c, g, or t
  misc_feature (539)..(539): n is a, c, g, or t
  misc_feature (549)..(597): n is a, c, g, or t
  misc_feature (703)..(703): n is a, c, g, or t
  misc_feature (733)..(733): n is a, c, g, or t
  misc_feature (796)..(796): n is a, c, g, or t
  misc_feature (828)..(828): n is a, c, g, or t
  misc_feature (839)..(839): n is a, c, g, or t
  misc_feature (875)..(875): n is a, c, g, or t
  misc_feature (915)..(915): n is a, c, g, or t
  misc_feature (923)..(923): n is a, c, g, or t
gtgttttgtaacttaacatgaaaaattcactcttttattttggaaaaaaaagttaacttttcatactaacaaacagaacaagatttaaggtaaatttcttaaacattatccagaaaaataacaagatttatagtatctacttctggtactaatatacacaaaaggccaaaaccatgcctattctgcaggtgtagcttcggtgctctcctgttcaggggcaggctcactgccggcttcttttccttctttgcttcttttagattttttgtgtttgtgtctcctgtgactatctccttcttcactttcatgggcgacgtctactattacttcgaggaagacttatgtctggtttcctctttctccctgtgtcgtctttctctatgtcgttcttctttttctcgacttgctctgtgacgctcataacctctttctgcatattccctgtatctgtatcgttcttcatcgctgttgaaaacacttggtgtaggactgtnatcacgctccnnnnnnnnnnnnnnggtgcgtnctctttctctttnccgatcacgnnnnnnnnnnnnnnnnnnnnnnnnnnnnnnnnnnnnnnnnnnnnnnnnnctggcataatagtcccactgcttgctggtgtccacaagactaggccacgaaggagcagaaccaggaagatggggaaaggcaacattgccatatggaaatgcacgtncagaacgactattataaccagaggaatgtncactttctattgttggtataagagatggaggtggagcgcctggtggaggaggaaaacccggtngtggaatcagaggtggagcagttctgacagtnggaggaggtgnaagaaatggaggagtggaaggtgagttggaggagcncctggagggaaaacggaggtggttgtctaaattgttgttncctcagtncagatctt

SEQ ID NO: 319351 - DNA, 1506 bp, Homo Sapiens
  misc_feature (423)..(423): n is a, c, g, or t
  misc_feature (471)..(471): n is a, c, g, or t
  misc_feature (915)..(915): n is a, c, g, or t
  misc_feature (928)..(928): n is a, c, g, or t
  misc_feature (1210)..(1251): n is a, c, g, or t
  misc_feature (1352)..(1352): n is a, c, g, or t
cggacctgcgctggaggcttcatctttgccgccgctgccgtcgccttcctgggattggagtctcgagctttcttcgttcgttcgtcggcgggttcgcgcccttctcgcgcctcggggctgcgaggctggggaaggggttggagggggctgttgatcgccgcgtttaagttgcgctcggggcggccatgtcggccggcgaggtcgagcgcctagtgtcggagctgagcggcgggaccggaggggatgaggaggaagagtggctctatggcggcccatgggacgtgcatgtccacagtgatttggcaaaggacctagatgaaaatgaagttgaaaggccagaagaagaaaatgccagtgctaatcctccatctggaattgaagatgaaactgctgaaaatggtgtaccaaaaccgaaagttactnagaccgaagatgatagtgatagttacagctatgatgatgaagatgatnttcatgtcactataggagacattaaaacgggagcaccacagtatgggagttatggtacagcacctgtaaatcttaacatcaagacagggggaagagtttatggaactacagggacaaaagtcaaaggagtagaccttgatgcacctggaagcattaatggagttccactcttagaggtagatttggattcttttgaagataaaccatggcgtaaacctggtgctgatctttctgattattttaattatgggtttaatgaagatacctggaaagcttactgtgaaaaacaaaagaggatacgaatgggacttgaagttataccagtaacctctactacaaataaaattacggtacagcaggggagaactggaaactcagagaaagagactgcccttccatctacaaaagctgagtttacttctcctccttctttgttcaagactngggcttccaccgnagcagtaacagcacttcttctcagtctcagacaagtactgcctccagaaaagccaattcaagcgttgggaagtggcaggatcgatatgggagggccgaatcacctgatctaaggagattacctggggcaattgatgttatcggtcagactataactatcagccgagtagaaggcaggcgacgggcaaatgagaacagcaacatacaggtcctttctgaaagatctgctactgaagtagacaacaattttagcaaaccacctccgtttttcccctcccagagnnnnnnnnnnnnnnnnnnnnnnnnnnnnnnnnnnnnnnnnnnctccgactgtcagcactgctccccctctgattccaccaccggggttttccttcctcccaccaggcgcctcaacctcccatctccttataccaaccaataangaaagtgggaccttccttcctggttattgatagtccccttctggcacgtggcttttcccttatgggcaaatggttggccttttccccccatcctttccggggttccctgcctcctttcccgtgggcccttaggccctttgttggggacaacccc

SEQ ID NO: 319352 - DNA, 1160 bp, Homo Sapiens
  misc_feature (894)..(894): n is a, c, g, or t
  misc_feature (1070)..(1070): n is a, c, g, or t
tgaaacaaggaaatctactaagacttattttgacactggagtgtcatgcccccatcctcaatctaacatgctactgcgttgttagagggtaaaaaggccgtcttcgtcttcccttccatgctgcacgtcattgaggacatttttactatctccaatagtagtctagccttgtgtgtttctgcgaacaataggtttccatgagtttccctctcaggagaaacgccacaaacaatgcgaagagcacaaatcccaaggagggggcgatgatcatcagtagttgggagatgggcatttcattcttcattgacatgggtattccatccatctgtcctgtttttgttgttttgttctgctcagggactgctgtatcagatgctttggatgtcagcaggacagtgtcagcagaagtagactcagcactactccaggaatcactggggaggacagtttctgattctggcagtgaggatgggcccttccttagaaggctcgggagtgagaagacctgtggctcctccggaagggtgcttggggttagtgaaaggcacgtgtttgctgttgtgaagacggcaatggttgtcatctggagtggtgttccggttgtgagatcgggtgtggtcacgactgttgttggaagtgcagctggggttgttgtcatttgtcgggtggtggtggggcttgttgttgttgttctgcgtgtggtggtggttgctgttctgtgcgtggttgttgaggctctctgtagattcaggcgcacgtttatctttacatcgttgaaccagccaggcacttctatgcggcagcagtacacaccgctgtcactttcactggggtttaagatggtcaaggagacatcacctctcgggatagtcccctgaagtctatattttgctnactttcttgaggtcaccctcattccatcagtgcggatgagcgcctctttgcaaccggagtaggggcactggtctttcccccagcacatgctgttgctgttgtgagaccaggatgagtacagacagggcaaagtcacccggtgacccaaaacctccgtcacaacagtctctgaagtnactggtgtcaggtaaagccaccaaaactcaatcatcagccagagaatgagaggttctttggacattttgacggttgaccggatcccggga

SEQ ID NO: 319353 - DNA, 490 bp, Homo Sapiens
  misc_feature (67)..(67): n is a, c, g, or t
  misc_feature (117)..(117): n is a, c, g, or t
aaggccgtcttcgtctccccctccaagcctgccacgtcattgaggaacaattttaactatctcccangtaatcctaacccttgtgtgtttctgcgaaacaaataggtttcccatgantttcccctcctcaggagaaacgcccacaaaccaatgcgaaagagcacaaaatcccaaggagggggcgatgatcatcagtaagttgggagatgggcatttcattcttcattgacatgggtattccatccatctgtcctgtttttgttgttttgttctgatcaggaactgctgtatcagatgctcccaggctgaggagaagacacagaatcactcgttttccacattgacacgtgggatgttgatgggagatcccaaactttggactctttggatgtcagcaggacagtgtcagcagaagtagactcagcactactccaggaatcactggggaggacagtttctgattctgcagtgaggatgggcccttccttag

SEQ ID NO: 319354 - DNA, 857 bp, Homo Sapiens
  misc_feature (634)..(634): n is a, c, g, or t
actattacacctgttttagcccatgtggatatggctaaagagtgatggacccagaaaaagaaaaaacgattgggaatttaatgattagaccatggaaaatgaagtggttagatccttcgtgtgtggtgagtctttaattcctggaagttagagtcccgggcagttgtttccccagctgcagacactcggtgtacatgctgcagggcggcatcctcacccagccacctgccctgtgctccccgcagctgggctggtggacgatgggtccacagatgggagttacaaaggcgaaagccggagggaaatattccgggatataaaagtgcgtctcgtgcttctacaaatcacattgggtgagactaagacgcctctggaaacagcagcatctcccagcctctgcacatggtttctgcctctccactctgaggttatgacaacatcaccgtggctctcagttgcctgagatccagttcctccagttaaatgctgcgttcgccccgtgggtcagggtcttcaccggtgggttcaccaactcccattttccttcctctttattttcttcacagaagcacatgcccagggaagggatctttctcacgagttgggcaaaatccccacattcccggggcggcancgaagcagtggccgcgtgcaggagtccagagtggagccgtgactcacaattaggatgacacccgtgtcctgcggacaggtgttgacgatttgcaccatgctcgccgtgcacctgtccatgtactcctggtagctctcggccggcatgagggcggacaggggaaacgcgggcctgtaatcagtgtcaatgttgaaatttgcctctttcagctcttccaggctca

SEQ ID NO: 319355 - DNA, 1040 bp, Homo Sapiens
  misc_feature (918)..(918): n is a, c, g, or t
  misc_feature (943)..(943): n is a, c, g, or t
  misc_feature (976)..(976): n is a, c, g, or t
  misc_feature (979)..(979): n is a, c, g, or t
  misc_feature (990)..(990): n is a, c, g, or t
  misc_feature (996)..(996): n is a, c, g, or t
  misc_feature (1015)..(1015): n is a, c, g, or t
  misc_feature (1021)..(1021): n is a, c, g, or t
  misc_feature (1027)..(1027): n is a, c, g, or t
  misc_feature (1030)..(1030): n is a, c, g, or t
tgattcttaacatatttaatgaaactcgagcttcataaaccagtgaaatgcctacccctatggagacggggagctggtcatgggacccaggtgcctggaggacatcccagtggctttgaaggctccagccagtcaagacggtcaatattagcccttctgccaacatctggcaatgtgaggctggggtggacgttggcctgatgttgccaggagtaggatgctgatgctgccagagagtaggtgggctccaaaccccaggcttctcacttgcttactaagcacagcagtctgaagcttgggacctggcagtgcgtctttggagaaggcaaaaaagccacagcagcaacacttaggagcaagacccttcccgctctccaccctatttcctcccctgaagaagagcaacagctcaagctctagcatggcacagaacgctaggttgggccaggcaagcagccatggtggggccaggtgaagcaatgtgggtctcagcaaggaacccctctgaaggtggcagtggctcccagggctgctgcacactggacaccacaactttggcatcagctgcatggtgagctgcagagtggtcagaggggctggggccctgccaagagagcaaggccagacctgcccagcgggaggcaggaaggccctgatccagcaaggagaagtagaggaagtccacagccacctctgttactcatcgctactgggacatctggggacaggctctgttcttgggagagcaggtcaccaggatttgtagggctgcctgccggtgacagacacgtaagtcacagggaaaggccgggatccaggcctcagctgtagcagcagctggaagaggtggagccgcacggtcacaatacatgcagacacagagcagcaatacgaaacagaacagctcagagcggtcantcctcagcagaagctgcgtgggcgncactccccctttctgcaatcacccaatgatgtntcnacccacctcanatccanatggggctggatggcaaancagatnaagctnctntgtggcgggg

SEQ ID NO: 319356 - DNA, 1225 bp, Homo Sapiens
  misc_feature (1147)..(1147): n is a, c, g, or t
ccaggcagccaaccggccggaagaggggcaggccccagccacccagggcaaagccccccagggaaagcagacaggcagcaagcggcccggagagggcaggccagcacccaggcaagaagtctgggcccagcattggaagaaagtcgcctgctgaaaccagccgggagccctgggaagagcagagcttctgaggggagcacaggctgcaccaccaggagctcttgggagccccttcctgctgcttcactccccatcatgcagcaggggctgtctgtcggtcaggatccccggctctgggcgcttccaagatgaagccagaaggatgtagagcaccagcagcccaaaggccaccaccagcatcccggtgctgttggcaaagaccgcctcactgggcaggctgtggtatggcctggtggtgttttccaaactgaagaaaagcttctcattaatgcccgaaatgacggatgcgatggacagagagaggatggcggctccaaaaaagacgtggataggttttaggaggctgcgcagccacatggacgcccagggcaggaggaagacagcaaagcccaggaaccactggcaggcgaagaggaagacagtggtgatgcccagccagctgtgaagggagtagaggttggcagtccttccatggttgtgaaacgtaaagacagcaaccagccccacaacagtgaggacgaaggccatcaggtgcagcgctgcatggaggagtttccagggcagtttgggccccacccacgactggggcaggcggtacaccagtgacgcacctccatagaataccaccatgccagcaaccataagcactgggtgccagttgaacatgtagatgctgccattccaggcaaagccaccacgccagtactgcatccagtagatagtgaagaggatgcacatagagcccagggaccccagcagcaggcaggacaagtagaaccgtccagacaccattctgatcacgcactcctttagccctaatgataggctcagagaactggcctgggctccaattcctgcgaaatgggcaccttgagcaaatcacttaacatttgcaggactcacccctaaccacagtgggacgaagtgaggccgggatctccggaacccgcctctcgctaccaggcgnccggagctgccgctcccgaggttcctaggagatgcagaagacactgccctgaatgcctacagccggctggcaatcccg

SEQ ID NO: 319357 - DNA, 603 bp, Homo Sapiens
  misc_feature (268)..(268): n is a, c, g, or t
  misc_feature (482)..(482): n is a, c, g, or t
  misc_feature (506)..(506): n is a, c, g, or t
ctaatatctcgctggatttccactgatataaagaaagcttaagatagacagaccctgaaatttactgtgctcctgaaattccattttgtatctaggaaaaccttcattcctctaaggtttcaatttaagaaagttctcctcaggggactgtaaagggacatatatagagctatgacagcaagtaccagggcactgctccgctggcaacacgaaaatgaaagtaatagccccataaacctattagccagaaacccagcactatgtcaanggagaccaaggactacagggctctcgactgaagcaggagagggcaattaagacttccttactcctcgtcctgaagggtctcctcctcctcttggatctgtaactggttcttcacgggagctaggttctcggtcttggcgttgtagttccgaaagcagacattgagcttctcatcaaattcatttacgaggtcctccatggacttgaagctgatnatttcggaagaaaaattctcaagntcggagagggaggggtcctcgagatggtggggagatgaaccatagaaacactggggcttcgtctccgggtcctccgagcaggagggtcgaaggtcct

SEQ ID NO: 319358 - DNA, 716 bp, Homo Sapiens
  misc_feature (21)..(21): n is a, c, g, or t
  misc_feature (39)..(39): n is a, c, g, or t
  misc_feature (43)..(43): n is a, c, g, or t
  misc_feature (199)..(241): n is a, c, g, or t
  misc_feature (292)..(300): n is a, c, g, or t
  misc_feature (569)..(581): n is a, c, g, or t
  misc_feature (589)..(589): n is a, c, g, or t
gccccagttttcggcacgagncttgatccaaattaagtncagnattgccagatacaaactgaccacaagcacgtacttcctataccatatgtacgtctaagtccctttctaagaatacattccaatttagtatgaatagaaattacatttatagtctttagaaatataatcagttaataacttgattatattttctgcnnnnnnnnnnnnnnnnnnnnnnnnnnnnnnnnnnnnnnnnnnnttacacaataattattttactgtattctgtgtttattttggggaaaagccnnnnnnnnncagttggaatcatttttaatatttaaatacaaaaagtgagcactgacttctctttttttaaacacacacacaggtctaacagccaaaatgtgcagaggaaatgagctcctgctctgtcttccctagtccccattctgtggctgaagctgcagcctgcctctttcctcttatacatagggattcatagtggccacattacaccacagttgtaatgcattttgtctgttttacattgtgtgcatgtccctccccaacagctccattctttnnnnnnnnnnnnncagtcgtnaatggtcaggggcacatccctcccactggcatcggttcctaccccacaaggggaaagtgagatcttccagttaggagcaatttggtgaaaggagttgggtgaccagagctggaataaccatctgcat

SEQ ID NO: 319359 - DNA, 828 bp, Homo Sapiens
  misc_feature (36)..(36): n is a, c, g, or t
  misc_feature (281)..(295): n is a, c, g, or t
taatgggttcaggggggccacattcccttcccacanggacatcggtttccttccccccacaagggggaaaagtgagatttttccagttagggagcaatttggtgaaaggagttcgggtgaccagagctggaataaccatctgcatggctgcactctggtatcagagtggagacagaagtaaggatagtgtggagggcacagttgcaagttgagtctttccatgagacaatgtggggataattctccccaccaggtttagatagatcaatgtgccaaagttnnnnnnnnnnnnnnntccaaattatcagcagttcaaacacttgaatttcaaacttatcccactgagacagctcaaacagcaataacaatctagatctttccaggaagtgagggtagagcccctggcattcctcctgagagccctgtgttaggtcctagaagtatctgccgctgctgcagttgctgctgttgctccatttgcaacttctccgtctcaaagacaacgggaagaaccaggatcataaaggaagtggtcccaatccacaaggctgccctggaaaacctgtacattttctgagccacaaagagggaaagatcaaaagtggctccggccgcggaccggaccctctccggaaacatctccgtcaggccccatagtctctccgacagggtctcatctagctcctcatcgtcgtcctcctccagctcctcctcaggcttctccgcgtcgcctttcgggagcaattcgtccggggactggggttcccctgcaccggcagcagcgacggcggcagccatgactgtaggggacaccggaagcggaaagga

SEQ ID NO: 319360 - DNA, 835 bp, Homo Sapiens
ttttttcccctttgtaaaacttttatttagaaatcttcccgatacatcctcacatatatatacacatcatcaccacatgggttttttttgctaaagagtcacacacccacagtgttggcctctgggctgtacaaaggtcaaggtacctggagcggttactcctcttctgcagaaaaatgcagagaccaacgcaattcatcacatacagtacaacgttgacggaaagtgctgggcccgcccacagaaacaatgcactatgtacacgggcagggggcaagtcttcagcagagggtcacgtaccatcgaaatcacaagtacggccagacccacccccaaaaggccgaaatagttgtcggctgactacagatgctgtgccctttgttttattttggaaaagaataaaggttgtaccatcttgtcatctgccataacaaataaaagaatatgaatttgtcttaaaagatgtgattcccttcagtggttatggtcatctttgttctcaaaatgttgttttgttttgttttacctttatgttctttcccctttgtacagatgctattcttggaatgttgccagtttttcatgggtaacaaggaaggagaggaaggataaggtcatggggtacagagggtgaaaataaaaattacagatcttctttagttcttacaaagacctaaagacttgccctttcctaccaggcttgttttgggtagttgcattacattttacacagtctgccagtgttcccatatctcttttccattcttattactgtccctggccttggaacaagatagaaattaagacaatctgggctgggtgcaatggctgacac

SEQ ID NO: 319361 - DNA, 1821 bp, Homo Sapiens
  misc_feature (1311)..(1311): n is a, c, g, or t
  misc_feature (1792)..(1792): n is a, c, g, or t
  misc_feature (1815)..(1815): n is a, c, g, or t
cacctttcttttgtttatttatattctttagttttgtgcacactttgaggaattgatttaggacaggttcatactgaaaaaaacctcagctgatgttatctgtgggggctggggagggtgtcagggacatttggtggctgaggagagcgcgtcactgctattgaatagctccatttaacaccagccatgtctccgcgtctcaggcacttctgtgaaatgttctcagaaccctgtggtgactgcggcacacccggcaggccttgctagcacacgccgcccactggcagggcccggccaccctggctgttgccattctttcgtagggttttgttcattttactatttgtcatttttctaggaaacatctgtttttgtaaaacaaacaagggggaatcaagtattttaaccacaaagtataaatactggctctaagctttcatcacttcattgacaaactgaatgctgaggaggctgaaggcgaggcggcttttgtggatgtggaccttgagctgcgtgtttgggagacgcacaggcctcggggagactcaagccagatgccagccacggggaccacagccttggcccaagagtggcatttgtgggaaaaaggaaacttcaagaaaaacacccctcctgcttctcttccagcagctcgtctccttctggaaggatgtggggagcgtccagggtaactaagttctctgcgtccaccagagtcacgtctccccaggagggctgggccgcctacgccagcacctgctgcacccccatgtggtccggggagcagttccggtccccgcagcaagctttttcatcagccgttggagcttgctggggaagctctggttcatgtagcggtagagaaagtggtgtcacaaagctgctggagaagccaggagtttggagaaatccttcacaaagtgcagtagccccaggtagtgtgcgtccacgggcttccctcgcgagatgatgaccgtgtgccccagcaggatcagatagtgtggcgtccagagcccaaactgcgtgcacacggtggccaccagcagcctgtgtgccgagggctccagccggcccgtgtcccggtccaggggcgtgtccttcctgcggacgcgggagagtagcaccagcgcgtagagggtggccagtgctggcaccacgtagccgatgaacaccagcgtggcgtcggcagcttctgcgttctgcatcttggcgcactctagcgcgcgggtggacacatggctgcagatgtagaagagcagcgaggagaagctggtcagcagcgcgccaccccacacgaagccgcacacgtgnccgcgtgttgtacacgctggccatgtaggtccgcggcagtgcacgctcgatgtagtggtcgaggctcagcagggcggtggagtacatggccaccagtgaggacacattgaaggggatctgcagtgccacgtggacttcgccgcccacactccacagcgcccaccgggagctcggggggccgagcaggtgcacaggggccagggcgctgagcaccaggcctgccactgccatgttgacaaagtacacgtccggcatggtcatgctggccttgctgtgtaggttggccagcaccagcagggcgttgtagcacaggcccactggcacgcccaccaccaggcccagcagcgacaacagtgacagccccagctgcaggtcctggcaggcaggcagctcctccaccagccctgtgccgttgaaccagctgcagctccacatggcggccggcgaggtccgcgacccggcttgctgggcggcggccggngcagtcgccgccgggcgggcagntcgggc

SEQ ID NO: 319362 - DNA, 1517 bp, Homo Sapiens
  misc_feature (340)..(340): n is a, c, g, or t
  misc_feature (361)..(361): n is a, c, g, or t
  misc_feature (657)..(657): n is a, c, g, or t
  misc_feature (1012)..(1012): n is a, c, g, or t
  misc_feature (1033)..(1033): n is a, c, g, or t
  misc_feature (1073)..(1073): n is a, c, g, or t
  misc_feature (1200)..(1200): n is a, c, g, or t
  misc_feature (1278)..(1278): n is a, c, g, or t
  misc_feature (1294)..(1294): n is a, c, g, or t
  misc_feature (1306)..(1306): n is a, c, g, or t
  misc_feature (1308)..(1308): n is a, c, g, or t
  misc_feature (1357)..(1357): n is a, c, g, or t
  misc_feature (1405)..(1444): n is a, c, g, or t
  misc_feature (1480)..(1480): n is a, c, g, or t
tgctcaatgcaccattgctggtttgaaggtggagggaccacaggaccagggacaaggacttgggaacctcagtcctacagccatgaggagttgacttgtcaacagcctgaatggtcctggaggcagatgcttccccggagcctccaggtgagagtgcagcccaccaaggcctgacgtcagtctgagagaccccgctcagggcacccactgagcccaccgcgacttctgccctggagagctctgtgggcagccaggtggcaggagaggggcagaggcgcacattcgctctcctgcagccaccgaagactacccgagcatcctcttggaccaatagcaactncttcggagtggagacaatgtntgggtccaccctgggagcatctcaagaggctggggctggcggccacatgctcgttgggtcagggtgtatttgcccttgcggtccaagctgcagccacagcggatggcaaaccacaggaaggagctgaagagcaaggcggacacctgggagggagacacccgcggctgccccactgccccagggtgcgggcgcccctccccaggaagcatcaggactctgcagtgtaagggggcggcccagctgtaggaggcaggccctgtcacaccagaacagctccctgaggttggcagccagtnaggctcaagaccagagatcctgtcccgggtcacccttccatcttagtcgggggctgggcaggctgaggggcaggaggtgggaaggggcagttagggaggcgagagggtaccgtgagggccaggccgatgctggtcaggctggaggcgacctgctggtgtgtcctccaggaagctcccggatgccctgaaggcagttctctctcgccgcctcctctccctgacacaggtcagcctctgtgctccccagacggctgaaaggagacttcttcccacagcacagaaacacgtcctggatggccgccagctcctgccgccggacgtgggacgtacctttcatcgcctgtttatataccangttgtaggtgtccagcatggngtcctccacctgggtggggttgtggagtctccagaacacnacctgcacctgtgcgcagaacgccagggagaagaaaaggaagccccttgccatgaggccctgggcctccctcacggtggctgcagcgctctagaaagagtcaggaggcccaccaggctcaaccccgnagagaaggcccattggtgcacagcctggtacgggttcttctccagggacgctcggcggatgacagcaaagtgggcccngaagtaggtaatagtnaccatggtggcnanagagaggcccagcagctgttatcaagataatagaagcaggtgaccagcntttggcatttggtaaccctgatttgactccaaggccccatgacggttnnnnnnnnnnnnnnnnnnnnnnnnnnnnnnnnnnnnnnnngtggtttccagctgggcaggggcctcagaccgtagntaactgcccaggaggtaggctgaatccgcccctttgt

SEQ ID NO: 319363 - DNA, 472 bp, Homo Sapiens
atgtgatgtatatttgaccacaatttgctcaatgcaccattgctggtttgaaggtggagggaccacaggaccagggacaaggacttgggaacctcagtcctacagccatgaggagttgacttgtcaacagcctgaatggtcctggaggcagatgcttccccggagcctccaggtgagagtgcagcccaccaaggcctgacgtcagtctgagagaccccgctcagggcacccactgagcccaccgcgacttctgccctggagagctgcgagatcataaatgggcactgcttgcagtccttacatccatgctgcttcttacgcagcatagaaaaccagtgcagcttgtgtctgggtggagccctccaggccgtgggcatccagtgtcttgcagtctgccctgggctgctgcctccagtgtggtttcctttgtgcttgctcccagcccgttcccatggagggatttggtgagcta

SEQ ID NO: 319364 - DNA, 496 bp, Homo Sapiens
  misc_feature (36)..(36): n is a, c, g, or t
cctttgtgcttcttcccagcccgttcccatggaggnaatttggtgagctaccccttacccttgcaatctgttccccaaatggagcctggctctctggctgggcctttcactcccttccctcctcacagctcggaccctcccctcagggatcccatgagggctgacagcaggggcgtcttcacctctgtgggcagccaggtggcaggagaggggcagaggcgcagcatcgctctcctgcagccaccgaagactacccgagcatcctcttggaccaatagcaactgcttcggagtggagacaatgtgtgggtccaccctgggagcatctcaagaggctgggctcctggggctggcggccacatctctgaggagcaaggggatcatggggctgtggtggaatgttctacaggggacctgtgaggctattgtggaatgttctagaggggatcatggggctgttgcagaatgttctggaggggattatggagctgctgtgc

SEQ ID NO: 319365 - DNA, 1447 bp, Homo Sapiens
  misc_feature (64)..(347): n is a, c, g, or t
aaaatactaattaagctaccacttcaaaagagcttcaaggaaaagctctgctttcttataaaannnnnnnnnnnnnnnnnnnnnnnnnnnnnnnnnnnnnnnnnnnnnnnnnnnnnnnnnnnnnnnnnnnnnnnnnnnnnnnnnnnnnnnnnnnnnnnnnnnnnnnnnnnnnnnnnnnnnnnnnnnnnnnnnnnnnnnnnnnnnnnnnnnnnnnnnnnnnnnnnnnnnnnnnnnnnnnnnnnnnnnnnnnnnnnnnnnnnnnnnnnnnnnnnnnnnnnnnnnnnnnnnnnnnnnnnnnnnnnnnnnnnnnnnnnnnnnnnnnnnnnnnnnnnnnnnnnnnnnnnnnntcataaaacttttaaattccatcacattacattcacaccttttgctaaccaggatgaagagccttaaacaggtttaaagagtgcagactgcagttttgttaatacttttttcctctccaagttcttttatgctaacatttccagtggtgggaagtacaagtactattagtcatcttcattctttgcattgccaaagagttcctctttctccgtcttgttctgaaggatgaacaaaagcttgaggtgtacgtatcagaacgtaaactgcagcacgaagaccaccaacgttcacccagactgtatccacctttcgccatacgtgtcgcattccagataacgccttggtaaagcattttgtgtcttgagtaagtagtacagctcggcctgtggtaggtgtgcagacacggctcatctcccgtaggcaagctgggataaaggtttccagtttctttttcttggatcccatcctttttccaaatggcaaatctgttacaataatatccaccagagccagttctcaatggcagattgcagatatcccactgaacagcatctatgggcaagccccaggaggggtttgccttctttaatttggctcttggtcaataaagatgcaatgttatttgctgctctattcacagccagtggattattatcaccagcaatatggaagcagtcagaccattcagtggccccctctattggtattgccccagttccacacattggatcgactattatatcataaggtagaggatcacagagcctgagcatcccataggcaagagttgatctaagagttgtaggtccaaaatgtgttatatttcttcggtggagactctcttcagtcaatgcaatgcccacaatgacttcattatcatggatgttcaaaagaacctccacatcaaagttggtcatgtcggccttccacttaaaataatcttgaacagcacccccaaaatctcttgcagcctcatttgaggtaaagcaatgtttctctcctgccctgttgcatgtgactctaaacttcagcacttgaggctcagtttcttcttttgagctttcatcagtctcatctttgcaagatgccaaatcatccc

SEQ ID NO: 319366 - DNA, 1141 bp, Homo Sapiens
ccgactggggcaggcgggctttattccgggtgctggagagctgtgggccccactcctcccccagaatgccaccgggttgaggggctgagcctcagcaggggtgagcgctcagagcaggaaggggatgatgggcatgcgcaggggcgggtagttcccggaactcctttcaggtagctgcggtgcttgcccttggcccagatggtcatctgggtgaagcccaccagggagaacagggccactgggagacactgcgtcatgatggcgaaaccgatccaggaccccacctcgtaggtgtagttggggcaggacaccagcaggaagagccacgtgaaggggttcttggtggggtatgggatcttccgcgtcttggacccagcgggccgcaggtcccgcagggccatgtggatggagaagttgccgagctggcagatcacaaagatggcgagcgccagtttcacctgctgagctccgtaggtagggggagtgtagagagggtgattgatgtaataggccatccacgcggcgaagccccagtagtaggtgcagttcttgaagatgttgcgcaaaggcatagtgccatgggagaagcggtgcacgaagagcgtctccagcaggcgcttgatgtagtggaatgagtgacagatgcaggcgaggtgcaccactgtatgccgactggacgtaaagtcatatttgtggccatagatgaagggcactcggaagtagaagagcaggtagatgaaaaggggccccgcgtactctgttaggaagaccgtcacccagctgatctgggcccccaggtcccggaagtacagtgtggccgtggtgcccacgggcagcttctgcagaacatcctcatccttcagggacttgcccttggggtccaggcggagggactggcgggcggggtaccactgcggatgggtcttagtgaagaggttcttgatctccgcaatggtggcgtggggctccaccttgtccaagaaacacagcttctcccttgtctttgcgtccagaatctccacctcgtaatgcttcatggctccctcccacggcggctactgctccgcggctgctgctgcctaactgcgcggcacagcacaggctccctacagcgctcgcaaccgcagcgatagactaaact

SEQ ID NO: 319367 - DNA, 1759 bp, Homo Sapiens
cgttttttcggaactcagcagctctatttacgtaacagcgtcgcccacaccccgtggggcctctcacggcttcttggctttcttcacggaagatgagctggaggccgactcccgtcgctttctcgaattgggcgtgaggggtgcgcccaccacatcaatgatggtgtccttggggtcaggaccaagtccgggttcagtcactgccggctcagcagaggccgggcctgggccttatgctggtgtggcagggccccctagcacaccagcccgggccagttcctcatgacggtgccgcagcatctgcagctcatactcgcagttggcacaggcctgcttgagctcgtagagcagcaccaggtcgcttcgcagctcattgaacatgtgcaccagctcctccgtaggtgtcgggctcagctccacaccaagctccagcagcatctgttccagggccttgatcttcttctgtcccacagagcttggcagcttcatccgttggctccgcagcgtgacacctgcagacttgaagtctggaaacttgatgcctgcagtctcaggaacagccggcttctcagcctcctttttctggggtagcttctttttgggggccttgcgttccgtgcgccgctgctctgcagtggtgtctgccgctgtgatcagcttctgcaggtcctggctgcgtttctcccgctccttcttccgggcctcaatcttgcgcagctcactgtagcaggtactcctcctctgccacctgctttggggtccggttgtagagacgctcaagctgttccttccgccgtcgttcgtgcccagcatcaaatactggtatcttaaggtctgtgcctggcacagccccgcacgttggcaagcttagcacagatgtggtagtaccgctccttcaggtcttccacagaacgcttcttgaactgctggtggtcataccggtcatggataacaacaaaacgcaggtcaaagcggcggctgaggtcaaagaggtggtcagtttctgccttagtccaagcatcatcgtggagataaagctggtactcctgctccgagtacacaggcacctgcacagtcttattgaacctggcaaaggggtagtccttgccctcctccgctgcacgtcgccagtggaagaacattgctccgtccttgcgggccgggttggtgaatggcatccacttccaaggccgcaccttcttggagcccaacttggccttcactgtacggtatccctggccagtgtcactgggtagcagtgggggtgcatccttcttgtcagagtagagcaaggcatagacttcccggtgcatgccctcgggcctcttgaaagtcagtgtctcagaggacttcttggattttttcttgtccgggttgataatgtccttcttgctgatggtcccagaggctgcatccccttctggacccccgagttctagaatgtcccgtacatccgcgcccgtagccatcgcgcctgagagatgggggagccaccggaggtcaagggtcagtgcctgaagaaggaccaggctcaggtcagggggcggggccaatccagacctaagcggaggcgagttgaaggggcgggccaagaggagaagggtggtccaggtcaggtcggggatctgcctgtgccccaccgcttggatgttcctaacggccccttcagccacctgggccctcgcacttccgcacctgggtccggcagctgcagcccccactaccactcccccgtccccgcaaagccgcggcagaaact

SEQ ID NO: 319368 - DNA, 1120 bp, Homo Sapiens
  misc_feature (153)..(161): n is a, c, g, or t
  misc_feature (978)..(978): n is a, c, g, or t
  misc_feature (984)..(984): n is a, c, g, or t
  misc_feature (990)..(990): n is a, c, g, or t
  misc_feature (1007)..(1007): n is a, c, g, or t
  misc_feature (1028)..(1028): n is a, c, g, or t
  misc_feature (1033)..(1033): n is a, c, g, or t
  misc_feature (1036)..(1036): n is a, c, g, or t
  misc_feature (1040)..(1041): n is a, c, g, or t
  misc_feature (1067)..(1067): n is a, c, g, or t
  misc_feature (1069)..(1069): n is a, c, g, or t
  misc_feature (1072)..(1072): n is a, c, g, or t
  misc_feature (1075)..(1075): n is a, c, g, or t
  misc_feature (1080)..(1080): n is a, c, g, or t
  misc_feature (1084)..(1085): n is a, c, g, or t
  misc_feature (1090)..(1090): n is a, c, g, or t
  misc_feature (1099)..(1099): n is a, c, g, or t
  misc_feature (1105)..(1105): n is a, c, g, or t
  misc_feature (1107)..(1107): n is a, c, g, or t
caggggaccaagacccgggtgcccatgggacaggggggatgggcgccttaaacccgcggtttggcaggaatggaccttacaaccccccccatgggggtttcccaggggcacacaggggttattggggcaggcgcaaggggcaaggcagagggnnnnnnnnntttggtcccagccagacaaagtgccacggaggttctttggttcgggcccacaaaaccgcccacagggtagaggctgcaagaaaagggggcaagttccactttgcaccttgctggccaagcccgaaggcgcccaaaggtggggcaagcccgcacacacttccagcagggttttccaggctggttcttgatgatgccggtcaggcaccgacaccttgttgaactccacagggctgaaacacaatcaatacgttcagagaatagcttctggatattgctcaagaggttggtgtccatcggggcactggggggtatagctgggggcgtagcgggccctgctgccgagagctgctgtacacggagaaagtcctcttgctggagtcgctgcttctgggccttgcgaacaccctcttcgtacaggagccccacctgcacgtcgatggcggtggtatcctccaccacccgcttcatgacggcccgcacattccggggctccagagtgctgagccagtcgcgagtctccacgctcttgcgcagcatctgtgatatgaccaggccctgcaccttcacgtagtgggtcagcagccgccgcgccgtttccctggcctctgcacacagcgtgctcacgggcgtcactgggaactgatcctgcaccagaaactgttcatcagtgagagtgaggatgtaggagatggtggccgtctcgtagtccaggcagaggcgggagagcagcaggagcagggcaggtggtgtggcacccccttctccccagggctgtcgcagaagctctgagccgtctggacatagagtggacgagccnacgatnaggccntacggacaccttgactncagactcacccgggagtaggnttttnggnaagnnactctttgcggtaaaaggtgactctncnaanagncttanttgnntaggntgggcgggnaattgncncaactcggcaggc

SEQ ID NO: 319369 - DNA, 1092 bp, Homo Sapiens
  misc_feature (693)..(693): n is a, c, g, or t
gcaacattcacagcacatcaagcccaaaatagtttacactttctacactgaagcattgtttaaaatgtacctggctagatcacccttacaggagaggctaaataaggcatgctttagacagtcattgtggtgttgctcacttgaaaggggagagaaccaaagaggtccaagcagaaaattttagcaggtcatgttgccaccagtttcaggaacctaaagatattgtaagcagtacttaatttgtgtttctctggcgcaagtttttatctttgtgattgttggtagagttggttttcattggtccagctggttcatcatcgtcaggaacctcatctggcctcttcctcttctcatacacaacaatgatcaccacaaggatgataatttcagccagaattcccaagaaaggccagagtggggccaggtggctccgcaccctgaggacagtgacaacagaggcggagccaatggcgttggtggcattacattcatactcgccagggtcttccgtgatctgcaggttcacaatgttcaactcagtgtaattttccttgttgatgatgaagaagcggccagaggtattgacaatgtccatgggcatcccgttctccttcttgcgccatatccagtctgggtgggggtagccaactgacttgcaatacatagtggcatcctgcccttcattcttgttcntactccgtttatggccagtgatgtcaggagcggctttcacttcaatggtggcgtttgctttaggagcgctgacaaagtgatatacgcagtggtattcgcctgaatcctcagctctcggcttattgatcctgtactccatgttgctggcattcttacgagtggcactcagttccaccccattctttgtccagtagctgtatgtaagggtgtgagagctggaggtgaggttacactgcagggtgacagggagaacagggctgtctcgaataatgacctcttcactggtgacaatccttggctcgttctgagcggcgcctggccctgggaggagggagccagagaccagcaacagcgagagggccagggcgctgggcagcgacgaacccgacatcctcccta

SEQ ID NO: 319370 - DNA, 920 bp, Homo Sapiens
  misc_feature (577)..(602): n is a, c, g, or t
tccccttcaccggggcccccaccggggcccaggagggggtgaaattccacagaccccggggcgggctgggcaggtccacagggggccaagcggcccccaaaagaggccacttgcagcccaaaggcacaggggatgagcccacaggccccaccatggggatgaagacaaggagggagtagccgtagatgcacacagtctccaggaaggtgtagggccccatgcgctcctggacacccttgcgccaccgcaggaagccccacagggccaggggcaccagccacgcatagcagtagatgctgatgcctgccacggtcaccttgtggaactgggggctgtagtggatggaggggtccctcctctgggccagcaccagcgtcaggttgccagtgacggccaggacaaaggccaacgtggcacagatccagaaggggccatacagatccggccgattccgcagatggtgccgcacaaagttgtggccaggccggggcagcagtgagcctttgatccggtccaggacctgtgaggtgtccacgtcaaagaagctctgatagtagctgaaggtccagaatcccgnnnnnnnnnnnnnnnnnnnnnnnnnnaggagcgcggccttgtcactctcctcctccacctcatcctcggctccatagctgccacctgagcccacggccacagccacgtgcccttgtggggtcagctgatcgcttctgctggtggtggctgcatctggggtgtcagccagaagattagtggcctcctcgaattcatggaaggtcagctcgtcggccgatgccatggtcgttcaggggcgtctccgcatccctcgctgaggccacctgggccggcgtggctggggctctctgcgcgtgcgcgtctcgcctacccgtcacatcccggaattccggaccggtccagcc

SEQ ID NO: 319371 - DNA, 999 bp, Homo Sapiens
  misc_feature (283)..(283): n is a, c, g, or t
  misc_feature (730)..(730): n is a, c, g, or t
  misc_feature (821)..(822): n is a, c, g, or t
  misc_feature (841)..(841): n is a, c, g, or t
  misc_feature (900)..(911): n is a, c, g, or t
  misc_feature (921)..(921): n is a, c, g, or t
  misc_feature (924)..(924): n is a, c, g, or t
  misc_feature (937)..(937): n is a, c, g, or t
  misc_feature (979)..(979): n is a, c, g, or t
  misc_feature (984)..(984): n is a, c, g, or t
  misc_feature (987)..(987): n is a, c, g, or t
  misc_feature (989)..(989): n is a, c, g, or t
  misc_feature (995)..(995): n is a, c, g, or t
tcactttattatacaaaaaagggaaaacaaaacttccacagttggctttaagcataggcagacacctctaagccactccctcccacctcccatgatacaaattcaagttgtggtggttgttgaatcctacaaaacactccttaaatattagaaaagaagttgggggtggggatgggggtcttcccaccccagccatcccatcccagtgccaaaatgcactcaagagtgacctcttacagcaccaacacccccaccctgacagtcctgtttgtactgtaaggantttttcaatttttaaaacagggaaagaaaaagtgccccattcaaaggttgttttttaaatgataatacattccactgaaacacaacagtgtaggggcatccaaataggaaactggggttctttgcagggctcttgggaagaaatagaacctataaacccctgtacttaattccaggattaggacaaaggaaggggaatgggagtggggagtgtcccccccaggcctccccacccccagcaccaaggtccaaggcaaagcagagactgtctgccttcctttgggagagggacccaccagcctctctgggaccagggcccttcaccgttcttgctccacctccgcggcagagttcccgctcttcccccattccttggctttcattcagagggggaaggtggaaaagcaccaagccccaatttaataggtcagtgacatgaccataaaanagaaccccccaaatttagtcaacaaaaaaataagaactacagagataaggtggcttggcttattaagagtcaaggaatcaaggtaccaaannatacgggagatggctgggnagagttagagacagctgcagatgcgcttttgcagacttcttgcccagctggtggggttnnnnnnnnnnnnagcagactgnganattaaggaaatanggggtggtgggaggttcaaggaggctggagggattttagttngggcnccngncatttnttga

SEQ ID NO: 319372 - DNA, 273 bp, Homo Sapiens
  misc_feature (39)..(39): n is a, c, g, or t
  misc_feature (56)..(57): n is a, c, g, or t
  misc_feature (59)..(59): n is a, c, g, or t
  misc_feature (62)..(62): n is a, c, g, or t
  misc_feature (237)..(237): n is a, c, g, or t
agagtcaaggaatcaaggtaccaataaatacgggagatngctgggaagagttagannancangcagatgcagcttttgcagacttcttgcccgagctgtggggttgggggaggagggagcagacctgagaaattaaaggaaatagggggtggtgggaggattcaaggaaggctggagggatgtgtaagttaggagctcccagcacatttcttgaagcccaggttctgagcctagggntgcccagcttggcctctcagatgaacaggggagacc

SEQ ID NO: 319373 - DNA, 979 bp, Homo Sapiens
  misc_feature (19)..(19): n is a, c, g, or t
  misc_feature (757)..(757): n is a, c, g, or t
  misc_feature (923)..(923): n is a, c, g, or t
acatctccctacatgaggngctcacggtgaagatcggtgactttggcttggccacagtgaagactcgatggagcgggccccagcccttggagcagccttcaggatctgtgctgtggatggcagctgaggtgatccgtatgcaggacccgaacccctccagctcccagtcagacgtctatcgcttacggggttgttctctacgagcttatgactggctccctgccttacagcacacattggctgccgtgaccagattatctttatggtgggccgtggttatttgtccccggacctcagcaaaatctccagcaactgccccaaggccatgcggcgcctgttgtttgactgcctcaagttccagcgggaggagcggcccctcttcccccagatcctggccacaattgagctgctgcaacggtcactccccaagattgagcggagtgcctcggaaccctccttgcaccgcacccaggccgatgagttgcctgcctgcctactcagcgcagcccgccttgtgccttaggccccgcccaagccaccagggagccaatctcagccctccacgccaaggagccttgcccaccagccaatcaatgttcgtctctgccctgatgctgcctcaggatcccccattccccaccctgggagatgagggggtccccatgtgcttttccagttcttctgggaattgggggacccccgccaaagattgaggccccctgttttcctccatcatttggttttcctcttgggtttnggggatacttctaaattttgggagctcctccatctccaatggctgggatttgtggcagggattccactcagaacctctctggaatttgtgcctgatgtgccttccactggattttggggttcccagcaccccatgtggattttggggggtcccttttgtgtctccncccgcccattcaaggacgtgcctctctttcttcaccaagaagcgcagaattctgct

SEQ ID NO: 319374 - DNA, 437 bp, Homo Sapiens
  misc_feature (374)..(374): n is a, c, g, or t
  misc_feature (383)..(383): n is a, c, g, or t
  misc_feature (417)..(417): n is a, c, g, or t
gaatgtacaagcaaaggcccagcagaattctgtgcttcttggtgaagaaagagaggagtccttgaatggcgggggagacacaaaagggaccccccaaaatccacatggggtgctgggaaccccaaaatccagtggaaggcacatcaggcacaaattccagagaggttctgagtggaatccctgccacaaatcccagccattggagatggaggagctcccaaaatttagaagtatccccaaagccaagaggaaaccaaatgatggaggagacagggggctcagtctttggcgggggtcccccaattccagaagaactggaaaagcacatggggaccccctcatcttcccggggtgggggaattgggggattcctnagggcagcntcaggggcagagacgaactttgtttgggttggtngggcaaggttccttgggctt

SEQ ID NO: 319375 - DNA, 1856 bp, Homo Sapiens
  misc_feature (82)..(82): n is a, c, g, or t
catccccgccccttagcacataggtgtgccacagacccttctccagatgcttcctgcccaatcccagcccctcaccagctanttgactgttgctggttctggaagctgcctcggccccagggcagtgctaagcagctcagtcagggcatccagcttccccgccagcgtgtcaatctgtttctccagggcccggtgtgagctgctcagattctgctgcaggtcatacaggatcatgtgcatcttggagatgtccaccatggagttcacttgttcccggagcttccggtgtttcagccgcacctggcggaacctgtgggaagaagtggggagtcagttttacaagcctggtccctgaatgtagctgtagctcaggggaggaatgaagggaggagaggcacatgaagaaacaaaacaaagaaacaaagttgtcgaagagctgaaagagtgggaggggatgcaccctgcctccccacgagcccccatccccagtagaaacccaggtacccaggtccgcagacacaccgagatatgcggagacaaaccagcacagacacatagagtcatgcacggtcagatccaggtgagacctggatgttgagtgagaccacacctgggtgtcctgacctggacaggcatggacatgcacacacacagccgtgcagagaggtgacttggacatgggtgcacatggacacgtgtgcatacaaagcggccctcacgcgttgatggcggccagcgttgcgctgatgcctgcgggcagcatgagactccttcctggggagtatgtttgtagaacatcccgggtttcttgtagcactcgggcagcggattccttcatctctttggtatactggatatccatcatgaagttgtgcacgtgcttctctgccttgttaaactccagcttccgggccaccacggccaccagcagggctgtgcagcagacacccatgactccagtgcacaggcagacgatcttgccccacatggtgcccggcaccacgtcaccatagccgatggtcaggaatgtgatggggatcagccaaagtgtgtctgaaaggtgcccagtggcattaacagcctgcctctcgggccacggacagcacccaggcggtggtcagccagaggtcaagcgtgaggccgagcagcaggcggccagggtgcgtgttcatgtcaagcttggccacgaaccagtggcggaagcggacttgattgagagcgccgatgctgcggtaggaagcgttgagcaggacgccgctgcgcaggagcacggcgcggggcaccaggtagagacgcagcagcatggccagggacagcagcgcttccccttggcccaggaatcccggccagggctgcggggaggtcagcggcgcccctaaatcctgcacgcacggcgggccccgcacgggcgccgggtgcagcccacacaccaccagctccagcacgatctgcgccgcctgccgcccggtcagcgccacgcgccagtcccgcagcccgttgtcggtcatgaacagctggacctctttggcatgaaaggccacgatgaggcagaggagtaagaaggtggaaatgctgatcgtgcatttaaccaggaacaggtagagcgcccacgagcaccccccgaaccacagcatctctgcatgcagcaccatgagtccaatgccagttcctgccagcaccagtgcccagccggccagagacttctcctgctccagcaagcgctttcggcgtctcaaggcccccaggccaagcaccagatccccgcccatggcccccggggtcttggggctcagccagcttcctgcccagggtcccccacctcgcagcacgcacagggcagccactgtggcttgcag

SEQ ID NO: 319376 - DNA, 1097 bp, Homo Sapiens
  misc_feature (424)..(424): n is a, c, g, or t
  misc_feature (462)..(462): n is a, c, g, or t
  misc_feature (480)..(481): n is a, c, g, or t
  misc_feature (563)..(563): n is a, c, g, or t
  misc_feature (653)..(653): n is a, c, g, or t
  misc_feature (706)..(706): n is a, c, g, or t
  misc_feature (731)..(731): n is a, c, g, or t
  misc_feature (763)..(763): n is a, c, g, or t
  misc_feature (896)..(896): n is a, c, g, or t
  misc_feature (903)..(903): n is a, c, g, or t
  misc_feature (919)..(919): n is a, c, g, or t
  misc_feature (930)..(930): n is a, c, g, or t
  misc_feature (934)..(934): n is a, c, g, or t
  misc_feature (945)..(945): n is a, c, g, or t
  misc_feature (953)..(953): n is a, c, g, or t
  misc_feature (961)..(961): n is a, c, g, or t
  misc_feature (982)..(982): n is a, c, g, or t
  misc_feature (986)..(986): n is a, c, g, or t
  misc_feature (989)..(989): n is a, c, g, or t
  misc_feature (1019)..(1019): n is a, c, g, or t
  misc_feature (1022)..(1022): n is a, c, g, or t
  misc_feature (1027)..(1027): n is a, c, g, or t
  misc_feature (1036)..(1036): n is a, c, g, or t
  misc_feature (1039)..(1039): n is a, c, g, or t
  misc_feature (1044)..(1044): n is a, c, g, or t
  misc_feature (1051)..(1051): n is a, c, g, or t
  misc_feature (1054)..(1055): n is a, c, g, or t
  misc_feature (1063)..(1063): n is a, c, g, or t
  misc_feature (1065)..(1065): n is a, c, g, or t
  misc_feature (1067)..(1067): n is a, c, g, or t
  misc_feature (1072)..(1072): n is a, c, g, or t
  misc_feature (1094)..(1094): n is a, c, g, or t
ctcaaaactcagttttattgacttccagcatttccccctggatctgagctcagcccagctggttttggttcgtctctgaggctcagtgttacagcgactggctccaccactcccctccctggccactgggctccccaggcagggaggaggagaggcagttcatctgtgatgttggaaagaatgggcagcagggtcagaggccaaagaaagccatacaagcagcggcatgcctggagctgccatcacatgccaagccccaccacacacacgcccccgcgggtggccttgccctcgaagctctctgccagcccacactcctcagctttctggggccacaccctgctcaggcagacatgccactcgccctggcttgttcctgggaccccaggctgcccaagggaaaggtaccgctcccaggtgctgngcggctctgccctgcccactctaaccctgggggtagcnagatgtgttagggtgaannaaggctcagataattcccccttcatctacaaacctgccagcgctacagggataaatcaaaagacaaaatctccccatctcanagcgagttacaagccgacctgggctactacatgtcccaagaagcacagctccgtaaccatacaccacctcccccaagcgggatctatcanaaatgaggccgggcacaccgcactctgggatttgtagtccccaggagccagcnccaaacacccaaggaagagagtgcncaggctaagactactgccacctcccacccggnccccacccgccacccaggccccggctctacactcagcatgggtgagggggagaaatggagggtcccctcccagcgcatggggggaaggcgctgtcctgtcgggaactgtgcagcgattctggacccggcatcnagctcanaacaaatctgcgggtntcttcccagcngacntcatctatganaggctgtnggcatggncagctgcaggtcctcatctcnaganagncgctgttcaagggcataaggaggggtctgnggnactgngtcccccanacnggaantaataanggnncgctcgcnangntaagntcagccagtcaaggaattgggnaca

SEQ ID NO: 319377 - DNA, 672 bp, Homo Sapiens
  misc_feature (382)..(382): n is a, c, g, or t
  misc_feature (398)..(398): n is a, c, g, or t
  misc_feature (417)..(417): n is a, c, g, or t
  misc_feature (433)..(433): n is a, c, g, or t
  misc_feature (457)..(457): n is a, c, g, or t
  misc_feature (465)..(465): n is a, c, g, or t
  misc_feature (467)..(467): n is a, c, g, or t
  misc_feature (499)..(499): n is a, c, g, or t
  misc_feature (505)..(505): n is a, c, g, or t
  misc_feature (508)..(509): n is a, c, g, or t
  misc_feature (542)..(542): n is a, c, g, or t
  misc_feature (559)..(559): n is a, c, g, or t
  misc_feature (561)..(561): n is a, c, g, or t
  misc_feature (563)..(563): n is a, c, g, or t
  misc_feature (568)..(568): n is a, c, g, or t
  misc_feature (574)..(574): n is a, c, g, or t
  misc_feature (578)..(578): n is a, c, g, or t
  misc_feature (583)..(583): n is a, c, g, or t
  misc_feature (590)..(590): n is a, c, g, or t
  misc_feature (598)..(599): n is a, c, g, or t
  misc_feature (605)..(605): n is a, c, g, or t
  misc_feature (615)..(615): n is a, c, g, or t
  misc_feature (629)..(629): n is a, c, g, or t
  misc_feature (642)..(642): n is a, c, g, or t
  misc_feature (649)..(649): n is a, c, g, or t
  misc_feature (655)..(655): n is a, c, g, or t
  misc_feature (665)..(665): n is a, c, g, or t
  misc_feature (670)..(670): n is a, c, g, or t
ggtaacattaagcccatttattaacaagtatctggcccaataattatagttaggtaaataaaatacttcagaactattttataggctgccttacaaataagataactgtcaaagatgcattctctttatgtgaaaagttacacatgttctaagtttaacactccacaatgaactgtgaaatttccctaagctattggaaaacttcaacagaatattggaaaacttcaacatcatctcttttctcaagcaccttcatattgctcccatagttcttataaattgtccaataacccagacaaatttccttgtggacaagaatttttaaaatttaaagtattatatattaatacaatgactttagttaaaagtaaaaatttattgntccaaaactgccaaanaccttatgctaagcaaaanacttcatttaagcttnatgctctttttaactcctgctcgnatgccagntnattcacccctattacgttgctcttctttacgnacttcncgnncctggcctcttcttctaattttggctcttctgnacttctctctgtgtttntntntgggnttgcgntcantcttntttatantaggggtnngtaaantatttttagnaatttgataggtanttgatatatttgnattttgntattanagagaatgtnattangt

SEQ ID NO: 319378 - DNA, 1064 bp, Homo Sapiens
  misc_feature (240)..(241): n is a, c, g, or t
  misc_feature (260)..(261): n is a, c, g, or t
  misc_feature (266)..(266): n is a, c, g, or t
  misc_feature (271)..(281): n is a, c, g, or t
  misc_feature (283)..(285): n is a, c, g, or t
  misc_feature (287)..(289): n is a, c, g, or t
  misc_feature (295)..(295): n is a, c, g, or t
  misc_feature (297)..(297): n is a, c, g, or t
  misc_feature (300)..(301): n is a, c, g, or t
  misc_feature (303)..(327): n is a, c, g, or t
  misc_feature (335)..(335): n is a, c, g, or t
  misc_feature (339)..(339): n is a, c, g, or t
  misc_feature (341)..(341): n is a, c, g, or t
agttgccgccagtaaaaaggacctctccgcggaacccttcccttcctgggggtgtgtttgtccacgaaacccgctccgggttgttcccccccgggggcggtttttttattcgggggaggaatcccaggcccccttggtcctgtaccccgggttcttctttggggaaaccaggcttttgccccatggtccccttttcctttttggggggccggggggccaaaaaggaatggtttaggaaanntttttgtggggtgggaggnnttttnccaannnnnnnnnnntnnntnnntttttntnttnntnnnnnnnnnnnnnnnnnnnnnnnnnttttcgtncggngngtgtttttttaaagttttcatctttaatgaaatgactttggaaataacgtacattcccatgacaccaatactacagttttcggagtcacagtaagatacacagaattacatccgtaattaatatgaatgccaacatgtcaagcagtaatttgttacatggcaaacaaaatcaagaaagcaaccatcaaacaaaagagacccatagcttcagacaaggcaaatcccaggatagcatatgagaacagctgctgcttcagcgaagggtttctggcataaccaatgataaggctgccaaagactgttccaataccagcaccagaaccagccactcctactgttgcagcacctgcaccaataaatttggcagcagtatcaatgtctctgctgattgcactggtctgaaactccctttggattagctgagacacaccattctgggccccattaaataccgtagagccctctccagtcctactagcctctggtcgagataacactgatgcagaaattggtctgtatgcaactctggatccagctcggatcagagagggggtgcaggcgagcttggcgcaggcgaacatcttacactcttcgggactgcgcggctggagatattgggtgacaggcgacgtgggctcctctcccgcttcctctcttcccaggaggcggcggcggcacgggctgcagcagaggtcgacctcgtgccgaattcgccacccaggc

SEQ ID NO: 319379 - DNA, 587 bp, Homo Sapiens
  misc_feature (33)..(33): n is a, c, g, or t
  misc_feature (46)..(46): n is a, c, g, or t
  misc_feature (120)..(120): n is a, c, g, or t
agtaatttgttacatggcaaaacaaattcaagnaaagcaacccatnaaaacaaaaagagacccatagctttcaaaacaaggcaaaatcccccggaataccagtaatgaagaaacagctgnctgccttcagcgaaagggtttctgggcataaccaatgataaaggctgcccaaagactgttcccaataccagccaccagaaccagccactccctactgttgcagcacctgcaccaataaatttggcagcagtatccaatgtctctgctgattgcactggtctgaaactccctttggattagctgagacacaccattctgggccccattaaataccgtagagccctctccagtcctactagcctctggtcgagataacactgatgcagaaattggtctgtatgcaactctggatccagctcggatcagagagggggtgcaggcgagcttggcgcaggcgaacatcttacactcttcgggactgcgcggctggagatattgggtgacaggcgacgtgggctcctctcccgcttcctctcttcccaggaggcggcggcggcacgggctgcagcagaggtcgaaggagtccc

SEQ ID NO: 319380 - DNA, 545 bp, Homo Sapiens
  misc_feature (440)..(440): n is a, c, g, or t
  misc_feature (464)..(464): n is a, c, g, or t
  misc_feature (506)..(506): n is a, c, g, or t
  misc_feature (514)..(514): n is a, c, g, or t
  misc_feature (524)..(524): n is a, c, g, or t
accagattattgttggggggggttgtgatgttgatgggtttggtggtagtttttggtggaaagttttcatctttaatgaaatgactttggaaataacgtacattcccatgacaccaatactacagttttcggagtcacagtaagatacacagaattacatccgtaattaatatgaatgccaacatgtcaagcagtaatttgttacatggcaaacaaaatcaagaaagcaaccatcaaacaaaagagacccatagcttcagacaagggcaaatcccagggggtaggcgtatgaggaacagctgctgctttcagcggaggggtttctgggcatacccattgatagggctgcccaaggcttgttcccaattcccagcacccaggaccagccacttctacttgtttgcaggcaccttgcacccattattttgggcaggcaggtntccattgtctcctgcttggttgcnttgggtcttggaactccctttgggggtttggctttggggcancccttttnggggggcccntttattccctggggggccctt

SEQ ID NO: 319381 - DNA, 1045 bp, Homo Sapiens
  misc_feature (660)..(660): n is a, c, g, or t
  misc_feature (663)..(664): n is a, c, g, or t
  misc_feature (678)..(678): n is a, c, g, or t
  misc_feature (697)..(697): n is a, c, g, or t
  misc_feature (705)..(705): n is a, c, g, or t
  misc_feature (739)..(739): n is a, c, g, or t
  misc_feature (796)..(797): n is a, c, g, or t
  misc_feature (808)..(808): n is a, c, g, or t
  misc_feature (814)..(814): n is a, c, g, or t
  misc_feature (828)..(828): n is a, c, g, or t
  misc_feature (831)..(832): n is a, c, g, or t
  misc_feature (847)..(847): n is a, c, g, or t
  misc_feature (853)..(853): n is a, c, g, or t
  misc_feature (864)..(864): n is a, c, g, or t
  misc_feature (870)..(870): n is a, c, g, or t
  misc_feature (882)..(882): n is a, c, g, or t
  misc_feature (913)..(913): n is a, c, g, or t
  misc_feature (917)..(918): n is a, c, g, or t
  misc_feature (935)..(935): n is a, c, g, or t
  misc_feature (938)..(938): n is a, c, g, or t
  misc_feature (955)..(955): n is a, c, g, or t
  misc_feature (967)..(967): n is a, c, g, or t
  misc_feature (979)..(979): n is a, c, g, or t
  misc_feature (986)..(986): n is a, c, g, or t
  misc_feature (990)..(990): n is a, c, g, or t
  misc_feature (994)..(994): n is a, c, g, or t
  misc_feature (998)..(998): n is a, c, g, or t
  misc_feature (1020)..(1020): n is a, c, g, or t
  misc_feature (1028)..(1028): n is a, c, g, or t
  misc_feature (1034)..(1034): n is a, c, g, or t
gggagtccgggccgggctccaccgcgcatcctgctccactctggcgaccgcccccggggcccccgccgcgggcgcggcgcccgccatgggcgaggaggactactatctggagctgtgcgagcggccggtgcagttcgagaaggcgaaccctttcaactgcgtcttcttcgatgaggccaacaagcaggtttttgctgttcgatctggtggagctactggcgtggtagttaaaggcccagatgataggaatcccatctcatttagaatggatgacaaaggagaagtgaagtgcattaagttttccttagaaaataagatattggctgttcagaggacctcaaagactgtggatttttgtaattttatccctgataattcccagctggaatacacacaggagtgcaagactaagaatgccaacattctaggattctgctggactagttcaactgaaattgtcttcataacagatcaagggatcgaattttaccaggtattaccagagaaacggagtctgaaactcttgaagagccacaatcctcaatgtgaattggtacatgtacctgccccgagagcgccgtgatcttgctttctacccacggtcctggagaatgtcctggagccttttccactttagggctggcactatgtcgaagctgnccnnatttgagattgaantaccagctgcgcctaagtnaactaaanccagcctttccgaaagagacatcgcaatggctancatatacgggcagctgtatgttctcttcttgaggcatcattctcggacctcccacannacaggagcggnggtggncctctatcatctancannagaaaggtgcctgtnaaaagntgcccatattngagttnaataggacgggnaagtttgccctgaacgtggtggacaacctgntagnnatgccttctcagggtanganacatcggttatattcgntttaagtttacngggagagtttgncggctcngttncttncccnccccgtgctttctgctcgatgnatcagccnatatanttccctcacag

SEQ ID NO: 319382 - DNA, 1625 bp, Homo Sapiens
  misc_feature (606)..(606): n is a, c, g, or t
  misc_feature (1344)..(1344): n is a, c, g, or t
  misc_feature (1355)..(1355): n is a, c, g, or t
  misc_feature (1398)..(1398): n is a, c, g, or t
  misc_feature (1416)..(1416): n is a, c, g, or t
  misc_feature (1520)..(1520): n is a, c, g, or t
  misc_feature (1522)..(1522): n is a, c, g, or t
  misc_feature (1532)..(1532): n is a, c, g, or t
  misc_feature (1577)..(1577): n is a, c, g, or t
  misc_feature (1601)..(1601): n is a, c, g, or t
ccgcgcgaacccgaagtcgatgatttcaccgggccccgggcgtgtcgtcggcgacaggatgttctccggcttgagtcgcggtgcaccacgcccgcctcctcgtgcatgaagctcacggccgacacggaggctgcgcaggatctggcttgcttccgactcgctgaagtgccgcttcttgcggatgtgctccagcagctccccgccccgcagcagctccaggaccaggtacgtgtgcagctggtcgtgatgcacctcgtgcagattcaccacgttggggtgtgactggcacaggcgcagggcagccacttcgcgctgcgtgttcgcctccagcctgcgactgaggatcttgactgcgaactcctggccgctctggcgctggcggcagcggcgacacacagaaaagctgccctggcccagcgcaggctcccgcaggtccagctcgtactgctggaagaagggcgagtcctgcatcatagcgctcctggccaccgctgcccgacctggccggtctccagcaccaggcgcttccagcccatcggtcatcaccgcgttgttgtggtcaaagagaatggagggtgccacaaaaggagtatccctgaaagattncgggggtccccaggtgggggggctgccagggggtgagtagacaggctccagccgagtgaattcctccgcaaagttgcccacatccagctctgagcggatttggggccggaatggggctggaatcttcctggccagccagagccacccaatcgaggccctggaagaagggatggttccggacttcttgtgccccctggggccccgcgcccaatcgcttcttaggatccttacaaagcagccgctgcagcaggtcctgcgccacgggcccgatccgaggggggaagggaggggagcacttcaaggatccgtcgagacacctcagcctgcgtgttcttttcgccttccagggtgaagggcgaggcccccgtcagcagctcgaagagcaagatgcccaggctccaccagtccacagccttgccatgccccgtcttgctacggatgatttcgggggccatgtactcgatggtgccacagaaggagaaggtccgctctttctcctccgtcaggaactccttgctcagcccgaagtccgtgaggacaatgtggccttcggagtccagcagcacattctccagtttcaggtctcggtaaatgatgccgagtttgtgcaggtgttccagggccagcacgatctcacccccatacacgcgcacctcagcctccttgaagtactggcgctggtagaggtgggtgaacatttccccgccgttcacatagtccaggatgaggtgcagcttngaatccgtatngaaagcgtagtgcagtgtgaccaggaagggcgcctggcgaacnagttccagcaccgagcgntcggtgcgcgtgtgtttttgcgttttggcggctgaaccagcgccgctttgcgcagcaccttcatggcgtacagattccccgcgtcgtgcccgcccgcattccgnanaaggaacacnttgccgtaggatcccgtgcccagcactttgagcagctcgaagttntcaaagataaccttctcatcgtgnccggtcaggttggtttctgtgatc

SEQ ID NO: 319383 - DNA, 2289 bp, Homo Sapiens
  misc_feature (258)..(328): n is a, c, g, or t
  misc_feature (2008)..(2096): n is a, c, g, or t
ctgtacaggaagtcagattatacatttcagtaacgggcggggtgacggggacggggcaacagcgcaggggccacagggagaagaagagatcgagagctggggtttggcgtaaatcttacaaagtgtataaagaatctgtgtttctctacattaacaaaaaccaaaggctacaagagcggttgtatatacaaaacacggagatattgcttcacttgcaaacaggttccagaccagatggggagacgagacagaggaggnnnnnnnnnnnnnnnnnnnnnnnnnnnnnnnnnnnnnnnnnnnnnnnnnnnnnnnnnnnnnnnnnnnnnnncttctccctgcatcaatcaacaggcagaggtgggaggcctgtgcgagctgctgtgtgcggaggagcgggtgggcgctgagagcccggggggtccgcctgccccggcccccgctgcctggttcttcgggctttggcccagagcacggttctgggtggggacgacgggctggctgggccacccggtcacagagggagggaggcaatcgctccctagagtcggccaaggaaaaggggagaaggcggcgccgtccgcccgtcctcctcgcctctggccagccccgtccatcctgccgccctccccaccccgccaagacgctgtggggacccgagtttcatgggtgcagcaaaccggggcttctagcttttccccgggcaggacggggtagcactggctcctgtccttcctgggccccggcccggccgtgcagagctcactgggagggctggaacgagccggccacagagggacagcagggaggggccagaggataccgtggcgggggcgggcggaggacgtgcacgcacgctgggtggaggcgcaggggtcacaggttctggcagcactgcagcttgttgggcttctgtccgtccgtggtgggcggcacgctgatgtccaccacgttgttccccggggactcgtcgtgggcagcgcggtctgcgatctgtttctgtgacacgatgcggtagatctctgtgaggatgttcttgaatgcttcctctacgttagtggaatccaaggctgaggtctcgatgaaggacaagttgttcttttctgcgaaggcgcgggcctcgtcagtgggcacagcccgcaggtggcgcaggtcactcttgttgcccaccagcatgatgacgatgttgctgtctgcgtggtcccgcagctccttcagccagcgctccacgttctcataggtcaggtgcttggcgatgtcgtacaccagcagggcgcccactgcaccacggtagtacgcggaggtgatggcgcggtagcgctcctggccagcggtgtcccagatctgcgccttgatggtcttgccgtccacctggatgctgcgggtggcgaactccacgccgatggtgctcttgctctccaggttgaactcgttgcgggtgaagcgcgacagcaggttgctcttgcccacgcctgagtccccgatgagcaccactttgaataggtagtcgtactcgtcgtcccgggtccccattgtcctggcgcttccggcgggatcggcgactccgcagccccaccacaaacacccgacgggggcggagccggcgccgcgcagagcggcggttgaatggcctatcagcggcgagtggagtagcgacgggcacccagcgaagccaatcagagatggaagtagtgctctgagggcgggcgccgcttggtaccaccctcctcgccctcggtgtcctggagaaaggcggaaggaatgcggacctttttgaagtgacggacgcgccccccctatcaggggcgagcttaccagggtgggggcgcgaataccgccaggaatgcacagggatcgacccaaccaaaataccccccggagaaggctttgaatcgacaaccccccccttactatcacaagcaccctgctccggcgaaagacaaaacggggcctcaccacctaaacaagaaatccctcccccgccttaccctgtggttgcacaccccacccnnnnnnnnnnnnnnnnnnnnnnnnnnnnnnnnnnnnnnnnnnnnnnnnnnnnnnnnnnnnnnnnnnnnnnnnnnnnnnnnnnnnnnnnntaaaagagtagtatcgcgattacattaagatcgccgcccacacaccccacccccatatttgtcgttcctaccagcgctttcctccgccaagacgaggcggcgaacgctggtgaaggtcgacagcaccgcgcttgctcttttctaccccctcggtcgcctgcggccaccccccaccgcgagcgccactcatctt

SEQ ID NO: 319384 - DNA, 213 bp, Homo Sapiens
ggcgtaaatcttacaaagtgtataaagaatctgtgtttctctacattaacaaaaaccaaaggctacaagagcggttgtatatacaaaacacggagatattgcttcacttgcaaacaggttccagaccagatggggagacgagacagaggggggggacagggagggccgagagggcgcgttgcgtgcaggagaggggaggggagaggggagagg

SEQ ID NO: 319385 - DNA, 944 bp, Homo Sapiens
  misc_feature (788)..(788): n is a, c, g, or t
  misc_feature (869)..(869): n is a, c, g, or t
  misc_feature (891)..(891): n is a, c, g, or t
  misc_feature (915)..(915): n is a, c, g, or t
  misc_feature (921)..(921): n is a, c, g, or t
  misc_feature (929)..(929): n is a, c, g, or t
  misc_feature (937)..(937): n is a, c, g, or t
ttttttgcatttcttaactgaaaatatattttcacagaaacaacaaagcaaaggggataaaaacaatagcgaccagaaaagctaacttaggtgaatggtgccactcaaaggtctttccgagggaagctcagtcctggcttgcgagagtcagccttggctcacctcataacggggctccaagctaaggcgtcaaggaagcagtcccactgcttctcgctgtcagcaagaccacaaggcagatgcccactgctgtcctctttccttgtctactttctcatctaagtgtcgtaagacagccctgcactggtccctgagtaacagagcagctgtcatgagcacaggctcattttatccgagagcattcttatctttgagagaaatgagaatatgacaaggagaactaaacagcagcaggcctagcctcagcagcctttctgagtgatgtctagtcctgacgactttgtgatttccaaagtcgtgaacaccttcccacatgtggggtgaattccaatggtgtcatcaagtagctgttttgtgagcccacatttcattgcagctgcaaatccttgggtaacctcaccggcgtttggtccaagaatatgaaatcctatcacccgatcatggtcgaatttattgcagattatctttgcgtaacaagtgttggtctctctgccagctactggtccattcaagagggcagaaccaagtatgatatatcttttctaaagaggccccaaaaagtctctgagctagcagcttgcctgactgtatggcgacaggagtaagcnctggcttatcctccaaaatatcaccaacagcatagacatatggcacattggtctggtccacatcatttacaggtatttttncactcttctcattaattttganacaatcttctccaagcgtattttntgtgtnaggagtangacaatantaagaaa

SEQ ID NO: 319386 - DNA, 1105 bp, Homo Sapiens
  misc_feature (13)..(13): n is a, c, g, or t
  misc_feature (17)..(17): n is a, c, g, or t
  misc_feature (32)..(32): n is a, c, g, or t
  misc_feature (65)..(65): n is a, c, g, or t
  misc_feature (79)..(79): n is a, c, g, or t
  misc_feature (90)..(90): n is a, c, g, or t
  misc_feature (102)..(139): n is a, c, g, or t
  misc_feature (152)..(169): n is a, c, g, or t
aaaatcaaaaaanttancaggcatggtgctgncccgtaatccagccactgggagctgaggcaganaatcgcttaacccnagaagtggtgntgcagtaaggtnnnnnnnnnnnnnnnnnnnnnnnnnnnnnnnnnnnnnnatattacatctcnnnnnnnnnnnnnnnnnnccctaggaattgaattcctttatgactccagaaaacatatctcttttctattgagattactgatggcagtcagcttttcacaaggaattggcttctgctcagcttcccctctctccctgaggtaagcaagcaggtgctgtcgtctcctccatgtgacctttattccatacttgtcctcgggggtgtctttaaccagaacaggtccaggctctgggctattaggagtgccagtgtgaagagtgcagcttagaaggctgttttccttctgatcttggggaatgagttcttccttcacagacgatgactctggggtctggatatcaggtggaatgaacacataaggtaagctctgaagtgcctgcactgacatgttcccacagctttggggactgagcactggaactaagggtcttctggaaacatccttttctgattcactggggcactctcggattaaggggatccccaatgtctctgaactggaagattgcggactctcaaaagttagatgtggaaacttggaggtggtaggttttcgacttgagtgtctcgcccggttttggtgtttctggtaggctgggaacaagcttcctgctgctgtatcaaaatcaggtgatacccaggaagtgatggtgctgtggtcaatgggcttgctgggcacctgtcgagtgtgagtgatgggaagctgtgtagatgcacagctgtgtttggggccctccagtggttgttggtggaacagcagcggggctttctgggaaggctggcggcgtttttttctgggaggcatcaaccggtgaatgaggaacagttagtaaccacatgatgctgttagccttcgggttgggggataggctccaattccaacccatgccagcccgggccggacggggccgcagctcctggcagaccgcacagccttcgagcccggaatgccga

SEQ ID NO: 319387 - DNA, 1787 bp, Homo Sapiens
  misc_feature (623)..(893): n is a, c, g, or t
ttcattgaaaactttccttatttacacacagttgaacagttattctaagaaaccattttcccaccctatttaatattgacagatttcttcagttagaaacaaaaactcaaaacacacgcaatcctaaagaactcatctatgtcccccttatctcccctcatcttatgtagtccctaaaacagggcttgctgccctttcttcttcttgccttttcagcagatgagtcaaggttgcagaggtggcagtcaaccatagagtcacagagtttgatttttttccatccatcaggtcgtagaagctgccactgagcctgacaagagttggtactcaaaaatgcagaatgaattagtttggaatgaggtgattaaggattaaatgagtagtggttaaggaaacaaagaccattagtggatggggtaatattgctgtattactgatggaagcaggattctctaaaaaaactttctgcagccatttacttacatacattttaaagagttactacaagatattttaaaaatttaaacagttaatacaagaaaaatatgaagtgaatagttcatgacactaaactgaactgttcatgacacaaagtatcttagaaaacaaatcctcggctgggnnnnnnnnnnnnnnnnnnnnnnnnnnnnnnnnnnnnnnnnnnnnnnnnnnnnnnnnnnnnnnnnnnnnnnnnnnnnnnnnnnnnnnnnnnnnnnnnnnnnnnnnnnnnnnnnnnnnnnnnnnnnnnnnnnnnnnnnnnnnnnnnnnnnnnnnnnnnnnnnnnnnnnnnnnnnnnnnnnnnnnnnnnnnnnnnnnnnnnnnnnnnnnnnnnnnnnnnnnnnnnnnnnnnnnnnnnnnnnnnnnnnnnnnnnnnnnnnnnnnnnnnnnnnnnnccctaggaattgaattcctttatgactccagaaaaacatatctcttttctattgagaattactgatggcagtcagcttttcaccaagggaattgggttctgctcagcttcccctctctccctgaggtaagccaagcaggtgctgtcgtctcctccatgtgacctttattccatacttgtcctcgggggtgtctttaaccagaacaggtccaggctctgggctattaggagtgccagtgtgaagagtgcagcttagaaggctgttttccttctgatcttggggaatgagttcttccttcacagacgatgactctggggtctggatatcaggtggaatgaccacataaggtaagctctgaagtgcctgcactgacatgttcccacagctttggggactgagcactggaactaagggtcttctggaaacatccttttctgattcactggggcactctcggattaaggggatccccaatgtctctgaactggaagattgcggactctcaaaagttagatgtggaaacttgggggtggtaggttttcgacttgagtgtctcgcccggttttggtgtttctggtaggctgggaacaagcttcctgctgctgtatcaaaatcaggtgatacctgtcgagtgtgagtgatgggaagctgtgtagatgcacagctgtgtttggggccctccagtggttgttggtggaacagcagcggggctttctgggaaggctggcggcgtttttttctgggaggcatcaaccggtgaatgaggaacagttagtaaccacatgatgctgttagccttcgggttgggggataggctccaattccaacccatgccagcccgggccggacggggccgcagctcctggcagaccgcacagccttcgagcccggaat

SEQ ID NO: 319388 - DNA, 1795 bp, Homo Sapiens
taaaagtcttcggtcgttagaagttgaatgggcacagcaactctaagactacagcacacgtcatttcttagctaagcggaccagcctccctgtcggcctggtgttctgtgggatccctctgggcacatggtaatcccaagatctgtgcagccccgcctccagtccacatggggctgggcagctaccatttcccttttgctgatgggaggggtaacttgcacctctgacctatcacttccactgcaccccgtctcattcctccacctgccgtggacttggggtcagagactgctgtgtttgagctctgcagcccagggaccgaaaagttggtgtcaatgaattttgcttggtggatgaaatgtcagtggaagaagcagatgagaaactcttgagatcttggtcctgtgttttttctgccaaccaaaggccagggtcactgaaggcctggcccacagcaggtgctgagcaaagggaacagtgaggtgcccagctagctgcagagccaccctgtgttgacacctcgcccctgctccctcccatcccttccccctttactcatagcacttcccccattggacacgtggtgcattttgcttgtttattatgttttctctccatcagaatgaaagctcctcgagggcagggactttggtctattgtctgtatttgccggtgcctaggattgtgcctgtatgcaacaggcactcaataaatatttttgctgtagactggacaggcatgagttagattctctggggcttctgcagagactggtttgggaaagtgggtgctagggaaaagctctgctccctgcaacctccccattttaatctttcagtattgaaaagtggagaggaaccggattcagtttgctggggacagaggcagtggggtgtggaggtgctcagagcagcctttgggaaggtgtgggggaagctggattccccaactgtcagcctccaggcctgggatggacctaggatgctgagaaagggcatacactgctgagggagtcacctgccagtcaccagctcactgaggaaccagaagaatgtacagttcttggtttgaaggcacttggagaaggagaggaaggagggatgggagctgaatctcttcccgcccccatctctgccaggtcccaggccccctctgggcttctgtcccacacagacctgcctggaagccttcaaaggctgaggagccccggtcggggtgggggtccctgttctggagccatgggtttggagtgccagctccagcagaggcatctgagcagcggcctgaggtgctgtgtctgacatgtttgttggccatggaaggcctcgggccgtcctgagctcagatcttggctgccggctgctggggcggctgcttctgcagcagggccagggtgtcccgcttctcaatggagcgcagctgcttcttctttgcccgcttgagcttggcggggtttcggatcacttggacgacctctgccttccgctcattctccaggcggcgtttcaggttctcagcccggcgctgtttcttctcctggcggcgcctctccttctcctcctccaggtgacgggcaaagtccttggccagcttcctctcctgtcgttccttcatcttccgctgccacgatgtgcgcaggggcttgtcctgaagcatctgggagaatcttttcttggagcggtccttccacactcgccccgatttgggcttccccttcgggattacaggaagctcctctttattcaacttcttggacgctggcctcgtgccgaattcgccacccaggcctcgctcc

SEQ ID NO: 319389 - DNA, 897 bp, Homo Sapiens
  misc_feature (125)..(125): n is a, c, g, or t
tccccctccctcccgccatcccttcatcttccgctgccacgatgtgcgcaggggcttgtcctgaagcatctgggagaatcttttcttggagcggtccttccacactcgccccgatttgggctgtngcttcgggattacaggaagctcctctttattcaacttcttggacgctggggcctgggatgaagaaccttttcgcttctttgccccgaagccgcctgtcaccgtctccccagctggaggtggcttgctcggctcatgctgaccccggggggagccaggtgccctgggtgtcagctccagtagtggctgagagggctccggaccgggagcttgctgaccggggtaaggctctggtgatcctgggaccggcggtagctgatgctggggggcccccggggtcagctcctccttattctgggccaactccgaggccagtactccctggtcctgagaacacttcggtgcctcctcacttggcttcggctgacatcgtggggattcaggactgtactctggctgtctttgaggcgactccaggtgtaggtcttgctgacgctggggggacgctgcgcctggctctggctgcccttggggtgactccaagcctgcaccctgctgcagacggggtgatcctgggcttgtcttcggcggcctttcgggggaccccaggccagcccgctgcacactcggaggagacccgggctccctcgtttcttctgggttcgactcgaactccacaagggcccgtctcgtccgcgaaactgaggtgaggctctcgggggattcgggccttaggcctcccagccgtcggctgcgccttaacggtgtatccatggctcagccggtaagtttccacacccccctcgtgccgaattcgccacccaggcctcgcta

SEQ ID NO: 319390 - DNA, 1936 bp, Homo Sapiens
  misc_feature (44)..(44): n is a, c, g, or t
ggaagatgaggaaactttatgtcagagggagatagattcctagngcagccctccaagtaatttgaaaaccaaaactaggagtctcctcaagaaactgaagacattattcaggaagaattagtataaggtaaagaaaatgactgggtaggacgcgccttgaaccagttcattccttacacatggaacgatagcagcctctactggcagttcatgggtatcactcgggaaggaaggaactaggatcttctgaaagtagggagagaaggcagcttaggtctgggaagagctaactttctcataattcagactgaacacaaatgaagcacccaaccttgctcagtaggcagaagcctcagtctttccactatactggggaaaagattcagctcaactggcataaggacacacaacagggtggctaggtgtccatggaggtgggtgtccaagcgtgcacacatatgagcatgagtacatccctagccaccagagcattgcaccagggtctgcggctttagaaagaggtcaaagtacctgtatttttaataatttcttgacatggtaaaagaattttacattacgatccatgggtgatagggtgaggaggaggggcagtggaacagtccaacaaacgaaacgggaaactgagaaacacatggagggaagggggaagggttttagctggaagggatctggagggtgggtgggagcactgcccaactaaaatgcaattggtttgttactgagtactattcgtgggaagacagcatcctgactccctctctacagaatattgggagtaaaaatgatgcatccccggtggaaatattattgggggttggaagacagagacaggaaaaataagtcagaaacagacactaagagtcactggcaggctgactgcaggtatcaactctccagccgtggtagaataaaagagctaggggctgaaggggattaacacaaaagctgttaacaattaagtgatatctctggaagattcgagagacaggaggcaactcttctatagttttgacttgcccagcacatttccacatacacaaatgtgtatatgcacgtgtgtgcatgcacatacacatacacaccaatgattgctttccccggaagcccgacactataaataaagagaaatagttcccaaaaggaaagcccaacatgagcagcagcatctggacctcacacttgcagaaaccttcaccccaactgaaaactggctgggaaaaggcaaccaggagtcaagctcttgcaataatgccaaaaagggctgagtcagagaggaacaggctttccccaagccctctgcttctcatctctctgttctccaccaactcaccctgggtaccaagaggctacagtatcaggagggaggacgggcccaggacgtttgtctgggtagatgacaactaagacaactgtcacctcctgaaaggtatgtgacaggggttgtggagagggagggtatgttagctaatggagtaggagtctgtgtgtgcatgtctgtatgggcgtatacatgcatacacatatgtgcatgtgaaaacgcccattataaaaacaactgaaggagcttcggaattgactgaaggcctaaggtatttcttgtcacgatcaagattcaaagtgggatgtacacagatgggaagccctaagtcatcaccagggcaactgtgggaggatccaatgccccacagaggaaagaaacagtaacctcatgtgaggaagagaagttcgtccccccgccaccctagttcctaaaaaacacctagcactttccttccggttccctcagcttttaaccaactaattatcaaacggaagaaaacataaagcgcaagacacaggagggagagagggggagaatgaaaacacaggtatttttgtgccaacatcctgcctcgtgccgaattcgccacccagc

SEQ ID NO: 319391 - DNA, 1711 bp, Homo Sapiens
  misc_feature (43)..(53): n is a, c, g, or t
  misc_feature (91)..(102): n is a, c, g, or t
  misc_feature (147)..(218): n is a, c, g, or t
  misc_feature (265)..(303): n is a, c, g, or t
  misc_feature (312)..(330): n is a, c, g, or t
  misc_feature (377)..(377): n is a, c, g, or t
  misc_feature (1128)..(1165): n is a, c, g, or t
ggtttttgccaaaggcaaggccaggattttactttcgcccagnnnnnnnnnnnggggtttctccaaggaaggattcccttttgggatcccnnnnnnnnnnnnggcccgcttcattaggggggggttaaattccccgggtactgcacnnnnnnnnnnnnnnnnnnnnnnnnnnnnnnnnnnnnnnnnnnnnnnnnnnnnnnnnnnnnnnnnnnnnnnnnaccactttgtacaagaaagctgggtcaggaaacagctatgaccatgnnnnnnnnnnnnnnnnnnnnnnnnnnnnnnnnnnnnnnngcctcgagnnnnnnnnnnnnnnnnnnngcaatcctcaaaccgtttattgacagcacaaggctcaacagcaggtngagccacgtgagggtggcgagcgcttgcgaggcagtgtgggcaccaggcaggggatcccggagggaagccctctgccagggacatggtgagggcgtggccatcacccacgaagggagcataaataacactggcaggtgggtgggcagcaggagagggagagcggacagcgccacggggacacgcagggtcggcgggaaaatgctgggacagggtcacacggggattcggacacgcagacacagaagggatcatgggacgcccagaggatgccagagggggcagacacaccagagactcggggatgggcatggtgctctgcccgtggctgcccctcctccaatactcgccctgggcttgcaggcaggactgggcggctgagcactctcccagcagagccaagcaggggggcccctgcagggtctggggcgcaggtgagcccacatcatgagagccgctgtagcctagggctggacctttgcttcggggtcccggtcatagatgtagctgcccaccgcaccggtgttcactcccttgggtccgaagaggattccatagcagggcttgtggcagtagggctggccgtcgtgctggggcagaaggtgggtgctgagggaggagtccacagactcccccgacccatcacctggaggcttccagaacgtgcaggccggctcgccgtgggggagagggcagcgcagctcccagaagcaccaccccccatcccctctaggcgcgcctctcaccctcatnnnnnnnnnnnnnnnnnnnnnnnnnnnnnnnnnnnnnngttgcactcccctcacctccgcgtgcccgccgggggtcagtgtcttcccgcagcgctcgcagcgcaggcagggccggctgccaatccttgcccagagacgtcaccttctcagcgaagtacaccttcttgctgcagcgcgggcacgtgttgggctccccggtgaaagtggtgacactggaggctctgctgggcttcggggggccgctcgccttccgctcctctgctcgggccgcggggacctcgatggggccggtgacctgcggcccctccgccaggggcttctcgtagatgtaggagcccgcgcccccgatgttcacgcctttgggtccgaacagggtggcgtagcacggcttgtggcagaacggcttcccgtcatgctcggcgtggcccccgggcgtcagcgtcttgctgcagcgctcgcacttgaggcagaacttgtgccagtccttccccagggagctcaccttctcggcgaagtacacggtcttgtcgcacttggggcatttggaggccatggtcggtgcgcccggtcggcccgcgccatcc

SEQ ID NO: 319392 - DNA, 1061 bp, Homo Sapiens
tttttctcgagcccagggtccttatgaagggcctgggacttccccccagggagggggcaagatataacaccttgcgggggggtgggcctccaggagaggaagacggggcagccaccccggggtactagcacggttcggggggaaaatggggggccaggtccacacggggatttggtcccgcagacacagaagggatcatggcacgcctagaggatgccagagggggcagacacaccagagactcggggatgggcatggtgttttccccgagggtgcccctcctccaatactcgccctgggcttgcaggcaggactgggcggctgagcactctcccagcagagccaagcaggggggcccctgcagggtctggggcgcaggtgagcccacatcatgagagccgctgtagcctagggctggaccttgccttcggggtcccggtcatagatgtagctgcccaccgcaccggtgttcactcccttgggtccgaagaggattccatagcagggcttgtggcagtagggctggccgtcgtgctccgcgtgcccgccgggggtcagtgtcttcccgcagcgctcgcagcgcaggcagggccggtgccaatccttgcccagagacgtcaccttctcagcgaagtacaccttcttgctgcagcgcgggcacgtgttgggctccccggtgaaagtggtgacactggaggctctgctgggccccttcggggggccgctcgccttccgctcctctgctcgggccgcggggacctcgatggggccggtgacctgcggcccctccgcccaggggcttctcgtagatgtaggagcccgcgcccccgatgttcacgcctttgggtccgaacagggtggcgtagcacggcttgtggcagaacggcttcccgtcatgctcggcgtggcccccgggcgtcagcgtcttgctgcagcgctcgcacttgaggcagaacttgtgccagtccttccccagggagctcaccttctcggcgaagtacacggtcttgtcgcacttggggcatttggaggcccatggtcggtgcgcccggtcggcccgc

SEQ ID NO: 319393 - DNA, 1027 bp, Homo Sapiens
  misc_feature (891)..(891): n is a, c, g, or t
  misc_feature (960)..(960): n is a, c, g, or t
  misc_feature (979)..(979): n is a, c, g, or t
  misc_feature (986)..(987): n is a, c, g, or t
  misc_feature (997)..(998): n is a, c, g, or t
  misc_feature (1015)..(1015): n is a, c, g, or t
acattcgtacaaatacataaatacagaaagccccgagctccacggagaagagctgaagggacgcacctttgtcccagggatggcccaggccctgccaaactcagccaggccaggggctgagggacggaggacactggggacagctccgtctgtgttccccaggccacgacttgagtggacaatggggaagatcactgtgcaaaactgtaaacggcgctcggagtagctgctaccgccaactgctggtgggggcctcgggctgggggctagaggcgggtggggagctcttcctcgctgtcgctgcagtttccacagcaatcttggcgactgaagagtctctgcagcagtccctttttaggaggtgcaggtggctggcccttccagtccaggtctgggggaactgagccatccagcccaaagacattcagctcttggaagcactcggtctccaccatctcgttctgccaggggatgggcacacttgctgtggcaaacttctggtagaagtcctggtcggtaggctccagctccacgcccttgaccgtagagaactgttcaatgtccagaacatccttgcagtaaatggcctgggggtcaggcttgaacggcggctccagcatgccagctcccagccgcttgaagttcagcttcttaaagagggggtgctccttcacctcgcgggcactgcccccacgacaccccaggcgttcggcagggtccttgcagaggagctgtgagcaaagtgagcgggcctgcggggaaaagcgctcggaatactcctcggggacctccttcaccagccgctccacctcctcccgcttgatcttcttcttcctctgctggaagggcgactggcctgcgatcatctcgtacaggaggcagccgagcgcncaccagtcagggctggaacgtgtaccgttcattcttcaccacctccggagccatgtaacccacggtgcncacacgccctttgatggtntggcctnnggcacatgcnnagtagtccaggtcaganatgcgatgtggc

SEQ ID NO: 319394 - DNA, 503 bp, Homo Sapiens
  misc_feature (337)..(337): n is a, c, g, or t
  misc_feature (375)..(375): n is a, c, g, or t
  misc_feature (464)..(464): n is a, c, g, or t
  misc_feature (481)..(481): n is a, c, g, or t
ttttgttttcctctttttatttgtctgctaagaaggctagaagcaaattgagttgcctgttcgttccttcatatatgtctcctcctctgccaacaggaatggaatttgaaggtgctatcatcgcacttttccatctgctggccacacgcacagacaaggtccgagcccttcgggaggcgttctaccgccagaatcttcccaacctcatgaatctcatcgccaccatctttgtctttgcagtgggtcatctatttccagggcttccgagtggacctgccaatcaagtcggcccgctaccgtggccagtacaacacctatcccatcaagctcttctatnacgtccaacatccccattcattcctggcagttttgccngggtgttccaacctttatggttcatcttcccaaatggttttcaggttcggtttcagtgggcaatttgttgggtcaggcacgtggtttantccagttgggttgggcntttgttatttaaccgttccctt

SEQ ID NO: 319395 - DNA, 391 bp, Homo Sapiens
  misc_feature (52)..(52): n is a, c, g, or t
  misc_feature (54)..(54): n is a, c, g, or t
  misc_feature (104)..(105): n is a, c, g, or t
  misc_feature (107)..(107): n is a, c, g, or t
tatattttaaacagaagccacctgaaaggcttcgtaactacaccaataaacnangaaacaaaaaaatggaggcctcttctttagtgtgaaagtctgtctggttnntnctggctggtttctcttgtgccatggccaaggcatctcagtgcatagtgcttgcattggccactgcgatggcctcctgaatttctcttatcaccaggatccgcgtcagcatttgtcccatctgctctctgctgataggctggactgagtaccagattgggctgttgggggccaccactggctcaggtgtcaggtaaaaggtgtcattccggcctttcacactctgggggcatttgaagaggtagaaatcatagagcttgatgggacatctcaatggattctactg

SEQ ID NO: 319396 - DNA, 906 bp, Homo Sapiens
  misc_feature (164)..(175): n is a, c, g, or t
  misc_feature (657)..(676): n is a, c, g, or t
ttttttttgttgaaaagacgtgcttgtcattcttaataaacaactagagtaagaatacataagagaaacagagtggtatctttatatgatacacaagtgtatgttacaagaattccatcaggcacaggagcctcaggttttaaggcctcaatgttaggccaacnnnnnnnnnnnnggcatggtaaagtttttacttttacatctaaaatgtcacttgtcataaaggagggtgtaatagaaattgtctttaataaatcataattgaagttcccctcatttttcttccattaagatgctaagtttatgtctgatcatgaagaaagaaaagaacatcgttcccctgtggtcagcaaagtctgtcagcccagtggaagtcggctggggagattccctccagggtccatccatcattaattccatctctcttgaagatggaaaggggccacatttcttttcacagtccaagccctttccccaggccccagacaaaaaagagtcagccagcaactttctaggacatatgacactcaaggaaacccagagccaccatcggctgaggagtctgccgcagcaggtttatgaagatgcaaagggggcaaagttttcttttatattttaaacagaagcagcctgaaaggcttcgtaactacaccaatnnnnnnnnnnnnnnnnnnnntggaggcctcttctttagtgtgaaagtctgtctggtttttcctggctggtttctcttgtccatgccaaggcatctcagtgcatagtgcttgcagttgccactgcgatggcctcctgaatttctcttatcaccaggatccgcgtcagcatttgtcccatctgctctctgctgataggctggactgagtaccagattgggctgttgggggccaccactggctcaggtgtcaa

SEQ ID NO: 319397 - DNA, 953 bp, Homo Sapiens
  misc_feature (12)..(12): n is a, c, g, or t
  misc_feature (21)..(21): n is a, c, g, or t
  misc_feature (28)..(28): n is a, c, g, or t
  misc_feature (31)..(31): n is a, c, g, or t
  misc_feature (54)..(54): n is a, c, g, or t
  misc_feature (56)..(56): n is a, c, g, or t
  misc_feature (58)..(58): n is a, c, g, or t
  misc_feature (65)..(65): n is a, c, g, or t
  misc_feature (71)..(72): n is a, c, g, or t
  misc_feature (74)..(75): n is a, c, g, or t
  misc_feature (85)..(85): n is a, c, g, or t
  misc_feature (115)..(116): n is a, c, g, or t
  misc_feature (118)..(118): n is a, c, g, or t
  misc_feature (123)..(123): n is a, c, g, or t
  misc_feature (126)..(126): n is a, c, g, or t
  misc_feature (141)..(141): n is a, c, g, or t
  misc_feature (150)..(150): n is a, c, g, or t
  misc_feature (152)..(152): n is a, c, g, or t
  misc_feature (159)..(159): n is a, c, g, or t
  misc_feature (161)..(161): n is a, c, g, or t
  misc_feature (168)..(168): n is a, c, g, or t
  misc_feature (174)..(174): n is a, c, g, or t
  misc_feature (177)..(177): n is a, c, g, or t
  misc_feature (180)..(180): n is a, c, g, or t
  misc_feature (183)..(183): n is a, c, g, or t
  misc_feature (570)..(570): n is a, c, g, or t
  misc_feature (580)..(580): n is a, c, g, or t
  misc_feature (631)..(631): n is a, c, g, or t
  misc_feature (769)..(798): n is a, c, g, or t
  misc_feature (887)..(887): n is a, c, g, or t
ccaaaaaaacgngagaagatngagaganttnaaaaccacacaaaacacactttncnancttcttnccccanntnngggatagagngaggagagagcagacctgagaatatatagnnanataanggnaggagaggagaatanaaagaaagntngagggangngagagtnagagcnccncanaanatttcttgaagcccaggttctgagcctggggtggccaggcttggcctctcagatgaacaggggagaccttttccatcaaatacaagctttaagcttcacaccatcttgcctgcctttccgccttcctgctggacaatggagaccagcagctcggatgcatgtgactctggcagagggagcctggtctgggaagcatccgagaatggcttcagcacactccccctaatggaatcagagactgggcaaaacagaggatgtggagaacggggcagcctcagcctgctcccaccagggtcaacatctcccggccctcaccgaccctttttccagattcacaacaaactgatgtgggctctaggacagacccctttacacacacaaacacanactcacactnttttgcacacatccacagctgcacccatgctatgtacaggaacacacatanacatactctcttccacatacatcaagaccatttttaaaaggttccaaatctacccctaaaccctccctctcccagaaatgacaacagagacggcagccgagatcggtaggaaacgtctcgttgacagctcagagcttnnnnnnnnnnnnnnnnnnnnnnnnnnnnnncacttctgccccctcccccatgaacgggtccaggcagctccttcctgcagggggcaggggagagggccaccagggcagtgcctgttttnttgaaggcaccgaccctcctcctccccatgttccctgcctccagttccaatgcaggggtccaggtg

SEQ ID NO: 319398 - DNA, 917 bp, Homo Sapiens
  misc_feature (504)..(506): n is a, c, g, or t
  misc_feature (508)..(508): n is a, c, g, or t
  misc_feature (514)..(514): n is a, c, g, or t
  misc_feature (519)..(519): n is a, c, g, or t
  misc_feature (524)..(524): n is a, c, g, or t
  misc_feature (536)..(536): n is a, c, g, or t
  misc_feature (538)..(538): n is a, c, g, or t
  misc_feature (561)..(561): n is a, c, g, or t
  misc_feature (587)..(587): n is a, c, g, or t
  misc_feature (611)..(611): n is a, c, g, or t
  misc_feature (615)..(615): n is a, c, g, or t
  misc_feature (619)..(619): n is a, c, g, or t
  misc_feature (621)..(621): n is a, c, g, or t
  misc_feature (625)..(628): n is a, c, g, or t
  misc_feature (639)..(653): n is a, c, g, or t
  misc_feature (665)..(665): n is a, c, g, or t
  misc_feature (667)..(668): n is a, c, g, or t
  misc_feature (677)..(677): n is a, c, g, or t
  misc_feature (681)..(681): n is a, c, g, or t
  misc_feature (729)..(730): n is a, c, g, or t
  misc_feature (733)..(733): n is a, c, g, or t
  misc_feature (739)..(739): n is a, c, g, or t
  misc_feature (746)..(746): n is a, c, g, or t
  misc_feature (748)..(748): n is a, c, g, or t
  misc_feature (750)..(750): n is a, c, g, or t
  misc_feature (756)..(758): n is a, c, g, or t
  misc_feature (773)..(773): n is a, c, g, or t
  misc_feature (777)..(777): n is a, c, g, or t
  misc_feature (779)..(779): n is a, c, g, or t
  misc_feature (781)..(781): n is a, c, g, or t
  misc_feature (791)..(791): n is a, c, g, or t
  misc_feature (794)..(794): n is a, c, g, or t
  misc_feature (798)..(798): n is a, c, g, or t
  misc_feature (801)..(801): n is a, c, g, or t
  misc_feature (810)..(811): n is a, c, g, or t
  misc_feature (815)..(815): n is a, c, g, or t
  misc_feature (825)..(825): n is a, c, g, or t
  misc_feature (830)..(830): n is a, c, g, or t
  misc_feature (838)..(838): n is a, c, g, or t
  misc_feature (843)..(843): n is a, c, g, or t
  misc_feature (849)..(849): n is a, c, g, or t
  misc_feature (855)..(855): n is a, c, g, or t
  misc_feature (867)..(867): n is a, c, g, or t
  misc_feature (871)..(871): n is a, c, g, or t
  misc_feature (884)..(884): n is a, c, g, or t
  misc_feature (888)..(888): n is a, c, g, or t
  misc_feature (892)..(892): n is a, c, g, or t
  misc_feature (895)..(895): n is a, c, g, or t
  misc_feature (898)..(898): n is a, c, g, or t
  misc_feature (900)..(900): n is a, c, g, or t
  misc_feature (906)..(907): n is a, c, g, or t
  misc_feature (909)..(909): n is a, c, g, or t
  misc_feature (912)..(912): n is a, c, g, or t
catttatttatttatttttaaatgcagagtccactaatgggtcatggcccaccatgtaaaaaacactagttattaaagtgacactggggatgtgaggtgtgacctcacgaagaagcaaatttaatattataatgggaagcatccaccaggccgactttgcacttagaactgcaaaataagtagcatcaggttcagggttgaaagtgaccagcacagagctccacagtccacattacctaggatagaaaaaagccagccgattcaacattcttatttgtcattacaagatcaaagttaaaaatggcgcctttcaaaactggagaaagctttctctctttcaagatccgatttacatagatttgttttcagctgtaataattcttttgatatttcaagtaacataaaagaggacgatgggtgttgtgtgttcagagaaacgagggatgggttaaaggtgtggagagggggtgaggaggtgcagtgtgcccactttttagtgacaannntnaggganagaanagtgntcgagggatgangnaagttagattgggcttgaatgtntaattcgggttttttgatttagttanttgtggtgtttgggattattgganattntttngngggnnnnaggtgtggtgnnnnnnnnnnnnnnngttggtggatgnannttgattttnatgnttgggagattattgtggtgatgttggtgaggttggcaatcagtggcannctnaaaacnaaacctncnancttcannntggaagggccctaanggtnantnataatcccanaanctanaanacttcactnnttanctaacccacnccttnttttacanacttntctagnaaaacnaaacaggctcantctnccattcacacatnttanactntcncangntgaaanntncantggaa

SEQ ID NO: 319399 - DNA, 1393 bp, Homo Sapiens
  misc_feature (134)..(134): n is a, c, g, or t
  misc_feature (166)..(166): n is a, c, g, or t
  misc_feature (265)..(265): n is a, c, g, or t
  misc_feature (283)..(283): n is a, c, g, or t
  misc_feature (293)..(293): n is a, c, g, or t
  misc_feature (357)..(357): n is a, c, g, or t
  misc_feature (369)..(369): n is a, c, g, or t
  misc_feature (376)..(376): n is a, c, g, or t
  misc_feature (378)..(378): n is a, c, g, or t
  misc_feature (380)..(380): n is a, c, g, or t
  misc_feature (389)..(389): n is a, c, g, or t
  misc_feature (392)..(392): n is a, c, g, or t
  misc_feature (399)..(399): n is a, c, g, or t
  misc_feature (404)..(404): n is a, c, g, or t
  misc_feature (409)..(409): n is a, c, g, or t
  misc_feature (437)..(437): n is a, c, g, or t
  misc_feature (482)..(482): n is a, c, g, or t
  misc_feature (550)..(550): n is a, c, g, or t
  misc_feature (552)..(552): n is a, c, g, or t
  misc_feature (631)..(631): n is a, c, g, or t
  misc_feature (655)..(655): n is a, c, g, or t
  misc_feature (690)..(690): n is a, c, g, or t
  misc_feature (700)..(700): n is a, c, g, or t
  misc_feature (718)..(718): n is a, c, g, or t
  misc_feature (730)..(730): n is a, c, g, or t
  misc_feature (735)..(735): n is a, c, g, or t
tgctgtggattgtgtgagaggcactcagtttcctttaaaccctgtctgtcacttgccccggtagttttaactgcatttctgtaaagaggcagcgttactaggtgcgttttgcctggtagactgagacctgcccnctgtcagcctgcccagaacaccccagggccangatagagtagtgcaggaagtaatgccagtattgactgttacacgttgcacttttataggcataactcgcctaattcatgcaacagccctgggggttaanagatgaagaaactgaggngcagagaggngaaccgattaccttgcccaggctcctacaccacctcctatcctctggctgcagctgcagtgtgntttggagggttnggggggntntntaggtgggnatnattttgngaggnaggtnccacagagggacccccagcagctttatnttgttgctgatgctggtcctgcatgagcaggtatgaaggccaganagtataactcagagggttttcccggctccggggagctcgcttggagccagcagtcagtgtctggacangnagaagtccagtgaggaaagacatgggcttccaaggtgctgctggacctaagcctgagccatcacccatatgtccctccngtgtcccagtggggagttagaggnatggttctcatctccaggaaagacactggactganaccaggtggnatttgtatgggaaagaanccctcaaatgtnataanattctccatgattgaagctgttgtctcaactgccctgggcagagtctggggaaagttaggagcagggaggtgttatctgagcaggccctagtcctactggtgtcttgagatgaatgttctattcgggaaccccacagtgagttcactttagagcatcattttagcttatttttaggattagaaataattagttgtgccttctgagcaccctttgacactctcaagaggcgtttctcacacgtttaaattgtgtgatctgtgtttagtttctccctgccccatacatgttgatatgttttggttcagatgtcacctgtatacttagtattactttccatagcagttttcacctgtggacaggttaacatggtgtgaatggtagaaggagccggtctggttttcctagacaagtctgtaaaacaaggcgtgggttagctaatcagtgaagtcttctaggttctgggattataactgacccttaggggcccttccatgctgaagtgtgcagggttggttttgaggctgccactgagtgccaaggtctgccaacatcagcacagtttgtctgccaagcatgagggagtcaggggtgcatcctccatcatgggaaaggcttggggggagaccacacctgtgtttcctcttaagtattttggga

SEQ ID NO: 319400 - DNA, 1958 bp, Homo Sapiens
  misc_feature (164)..(172): n is a, c, g, or t
  misc_feature (174)..(185): n is a, c, g, or t
atttggtgaggaattcccaagcacttagtccatggcccagggatctccctagggaaaccagcttatgacccatggttcacttaccctgactggggcccggcgcgccaaaaccgaatggttctagaaaagcttctccgagggccgaggccgggccgacatgtttnnnnnnnnntnnnnnnnnnnnnttttgcaatgaaatgaatcatttaatgagaatcttcaaactgtggcactggctgagtactaagcaaatccaggggaagacgtgaagcccaccaaggcgcacagcctcaactccggtgcctgcccctgatctgaaatacaacatccaagagctcgaggcctttttaccacccgtttgtggagcacctgcacctttctgacaacaactctcaagccaactttcagagagaaaacatgaagggaaaaaatagatttcctttggccagacagctctttcttcctcaataaataggaaccacacttggaacaaagagacagcgtgagctcggtgggggaagcacaagctttattggctgaaagttcttctcaggagcctggtctgctgggactgcatgttcctggatgggctcccccaggcctaagctccaggtttcctctggccttccgaaggattttgtgggttacgaccaattgatcaaagatgactttttcctggcgcttgctcagctgcaaaagcttcatggtgttttgcaacttcttttcttgttcaaacaattttttatgtagtttggtgacctctgccttcatttctccaatctgctcacagtgaagggggcactggccatcctcggggagtgagactctccagagaagcttcagccgcctgtaggcctcttccagggtcagcttggccgtgctcacactgctcacaaacttgctcagtggtgctgggtgtggaccctttgttcccagctcttgacttgtggagctgggagcctcttgggtttgaatgtccatttcagcaaggagcctctgtccctggctgatctgtttgagcagggcctcatagtcctcaatcaggcccaggacatggcggccattcttgctggcccacaggtggtggccagtgaccaggcgggacacacacggagtgctagttgccgaactgccactgtcgcaggagagggagtccgtgtcattcccagagagtggaggagtctctgaaactgattttggtgtcactgcctgggaggaatcaaacagatcaaatgaattatcactttccatgggatatttgtcaccatcgtgtttgtcaggctgaaggggcacctcagggatggacacggcttggacagccagagtgagggctccttcctgtgccttctctgccccccttgccagctgttccttgagcctgctctgcagagtgctgctggtttcgatgctcctttctagttgcaagcgcagagcctggatctccatcaggaggctgtgcaggtccctgaaaggatcctgccccttccagccttctcccgacgcctctctcagtctcctgtgctcttcatccagcttctcatacgccttcagctccactcggagagactgcaatagcttgtcattctgtgagagcagctgctgcctcaacttcacctcctcctgcaccctgctcagctcctggccgctgcagcggacctcctggatcagctgctggttgtgtctctccttctcgctgccttctttctgcagcctttcattttcttccttcacgctggcatactcccgctgaaggtgctccaggctcacggtcttcctggagagggactctcgtaatttgtcattctccttctgtttatctctggatcctttaatgagcattgcattgagggcctggttctgcttcctcaagaaatgaatttctgatattagagaactatgaagctctgaaccagaagcaaaaatgcttgtagcctcgtgccgaattcgccacccaggcc

SEQ ID NO: 319401 - DNA, 2412 bp, Homo Sapiens
  misc_feature (80)..(89): n is a, c, g, or t
  misc_feature (390)..(405): n is a, c, g, or t
  misc_feature (1447)..(1447): n is a, c, g, or t
cgcgcgttttttccccccgggggctctgttggatcccccccggggggcacccgttttcacattccgtgcgcttctatctnnnnnnnnnngggggtccccctcaggtgtttggggtggccccccctttagcaaacggcggggccctctgggcgcccccggtacccccctgggtcccggccggcctccttggttgtttttggacccgccctggggacctggtgaacccctttctgcgcagaaacccattttaccgggctggtggtgtgccccgactcccactactcgggaagctgaggccaggaacccgcccgaacccaggaggcaaaggttcaatgggccgagatcacccccttgtacccagcctgggtggacagagtgagactgcctccnnnnnnnnnnnnnnnngagagctgctaatttagaagcaaataacaggaatgctgggttctgaggccagccctaagacagccagaaacgctgagaaacttccacaagcaacaattccttacattcagtgcagtgtagcacttcaagagaaatccagaaagtttcagttccagatgagaacaatgaggtggtgaggggctgatctgcatactattgctgaatttgtctgcacccgctaaccccaatgatgagaaaagggagcgcaaaacatccctcagagccaaggaggcaattgcacaccggtgatcactgggtgttgtgaagtgggcaacagaagcccctgttcggacctcaggagtcctaacttttccttgtcgctcttttctctgaaccacatgctgtttcctgggctgagaaagggcatgccatgttagagcagaactgaaaatagacacagccacagaaggaacatcagcaggcagattatcgagtccgctgagattttggcattttggtccttgtctgtccaagatatttttggaaataatatggggtgctcctgaaggtcatgggggagggggcaggacccacttaggtgaaaagccatggggcccaggtgagcccctgtggccagtcagcagctcccttccagggtccagtttcgggcattgataaagagctggagccagggggaggtggtcagagtatcaaatggagggggtcgccatgcccactgcccaggcctaacggcccgctcagggtgaggcatgacagccaggtggcggccatcacaggagcagatgccagccacgccccctggggacccattgggattcagagggtactgctctgtggggttcccgtcatcatcagcccagtgcagtggagccaagcccctggcctcaatctgagcttggagttccggagaagaaaatgctacgtaaccttccccgtgcgcactccacacgggcagcacggcgccctccatccctcgcagcatcagggctggcccaggccccacacgcacgctggcccagcgagactcgtagcgcccagacangttgtggcgtagcagaaggcctggccgggctggctgggagtcagggcccatctctgcagcatcctcattggggtcgcctcccacccagccgagcagagccagcagttgacagccattacacacgcccaggctgaaggtgtctggccgcttccggaagcgcctcagctcagccccagccctgggatgaaaggtcacagcagctgcccaccctttggcagagcccaggacatctgcatagctgaagccgcccacgaaggccacgccacggaaagtgtccagcccaattgccccagagcagaggtcctgcatggtcacgtcccatacctcaaacccagctaagtggaaggcatcggccatctcccggtctccattactgccctcctctcgcaagatggcgactcgggggctgggaccaccaggctcacggggcacggaggctttgggaaaggtggggggcaggcaatagctgggccccatccgctccctcaggccccgttcctcctctgccacacagcgaggctctgcctgtagccggtccagctggaaactcgtctcctcccagagggctcgcagctccccaacaggctcctccagaaccacagccccgttcactgacacccggaccatggcgtggggcccggcctcgcctgtgtggcccagctccaggcaatggaggccagcatcccggtaacgcttcagcacctgggccaggtctggctcctgcacctccagcacgaggcctggctcctcagcgaacagcacagacaggacatcaaccctggggacaggcacatccacctgtagcccgcaatttccagcaaggccatctccagcaggcatgtgacgaggcctccgtcactgacatcgtggcctgagcagaggaggcgttctttcagcagcccgacgcgtggtcgacgatatcccgagattccgaccgtaccacctgctttttagacagtttatac

SEQ ID NO: 319402 - DNA, 846 bp, Homo Sapiens
gctccgccatttttgtttgtcagcagtgggcaggggttctcaaagattgcaaaatgctgctgcaggtcaggaaggttattttgggtgcctgtgggggaggtgaaacaaggtcccatgactgttttgcagaaccttgtctgtggagggtagaggttgcggcaggggcctgtgggccttacttggtgagaaggtaggtctagctggctccattcagtatttgagacatttggaatttgtctgcatttaaaaccaagagatcacacacacctgtctggatttggagtttctcttgaaaactcgccagtccggccgtctgagcctgcactgacgcctggtgaagctgtgcaggggccgcccctctccctttcgccacagtcctctccactccctttcgcctctccctggcctgctgcactcactgataggaaattctgaccccagactcggagcagccttcccgtggttcggtttttgcttccgcgaaaaagccaaaggccttggccagagagccagctgttcctacctctaccccacgcttccaaggcaaccttctccacttatcttaggccgagagacagctcttcaagaacgtacatggatcctgattttctcacgaagtcccgatggaaccctgtgctgttgagacatcagtgtgtaaaactctctgtgtccctgttgggctgtccagacagtctggactcttgtaaatttgagaattaattaaagggaaaccaacccaaataggacctgcggaaccattttaaactaaaatctcccccccatcccttggggaactcacgacaccaattctactatttccccaacccccgcactaccccaataccc

SEQ ID NO: 319403 - DNA, 1361 bp, Homo Sapiens
atagagactttctttaaaaaaagaaaagtaggttcttcacaccatttctcaggaaactgttggaggatgttcttaagcatagcaaaggaataaaccaagaaagaggaagacgtgggatctaggaaataggagatctgtcacaagagagttatgatccagggaggacagctggtccagattgggacagatcagaaggttgcatgagactgctacagaaagatgaaaattgataggaaaagagatttaaatattggtcagaaaattagggatatatgcataaaaaactgagcaaattgagaaacaggaggctgtttttaacatagtctagaagcatgttatttaaggtagttataatccacgccaaaatactcagaagaggtggaagtgattggctgtggggaagggagaatggcaaggctggctgattttataacagatctttatagagccatttgactctacaaactgcatatataactgatgaaagtaaataactaaaaaagcttgtccagcttgattaaaagtgatatttataatttttgccaaaattactaaggaagttggaatattttgacagatatattttttaatctcaaatcttcctatcatctcaacacacatcaaaaccttgagagcagagaccagtggtccttcctttcagagttggagagtctgggattctgttgtcagactgtgttccctgaggcttttctttgtctccttaattaccttgcacttaagtcaggtctgtatacaggaaaatctctatctcaacagccatggccttttgtgttcttcaggttgtccgcacaaaccagtgtgcaggagagtttgtcatcaccttcccccgtgcttaccacagcggcttcaaccaaggctacaactttgccgaggctttcaacttttggactgcttactggttgcctgctgggcgccagtgcattgagcactaccgccggctccggagatactgcgtcttctcccatgaggagcttatctgcaagatggctgcctgcccagagaagctagacctgaacctggcggcagctgtgcataaggagatgttcatcatggtgcaagaagagcggcgtctacgaaaggccctgctggagaaggtggggagagtaccccagatcaagcaccctattctggtggaagttcggggaggcagaggcagcaccaagaagatgtagcctctactcttggcgtatagtgaaaagaactagatgcatctcgattgaaaaccacataccattttctgctataccctttaccagcaaccttaagtcgatttacttcattgtcagttttcccctctgaaaaatgggattatgataatgcttatctttttggatagttga

SEQ ID NO: 319404 - DNA, 938 bp, Homo Sapiens
  misc_feature (167)..(205): n is a, c, g, or t
  misc_feature (253)..(253): n is a, c, g, or t
  misc_feature (497)..(497): n is a, c, g, or t
  misc_feature (523)..(583): n is a, c, g, or t
  misc_feature (592)..(592): n is a, c, g, or t
  misc_feature (597)..(598): n is a, c, g, or t
  misc_feature (607)..(607): n is a, c, g, or t
  misc_feature (609)..(609): n is a, c, g, or t
  misc_feature (617)..(617): n is a, c, g, or t
  misc_feature (619)..(619): n is a, c, g, or t
  misc_feature (629)..(629): n is a, c, g, or t
  misc_feature (635)..(635): n is a, c, g, or t
  misc_feature (649)..(649): n is a, c, g, or t
  misc_feature (655)..(655): n is a, c, g, or t
  misc_feature (659)..(659): n is a, c, g, or t
  misc_feature (669)..(669): n is a, c, g, or t
  misc_feature (677)..(678): n is a, c, g, or t
  misc_feature (680)..(680): n is a, c, g, or t
  misc_feature (684)..(688): n is a, c, g, or t
  misc_feature (693)..(694): n is a, c, g, or t
  misc_feature (696)..(696): n is a, c, g, or t
  misc_feature (713)..(713): n is a, c, g, or t
  misc_feature (719)..(720): n is a, c, g, or t
  misc_feature (723)..(724): n is a, c, g, or t
  misc_feature (729)..(732): n is a, c, g, or t
  misc_feature (736)..(736): n is a, c, g, or t
  misc_feature (738)..(738): n is a, c, g, or t
  misc_feature (741)..(741): n is a, c, g, or t
  misc_feature (743)..(743): n is a, c, g, or t
  misc_feature (751)..(751): n is a, c, g, or t
  misc_feature (759)..(759): n is a, c, g, or t
  misc_feature (761)..(761): n is a, c, g, or t
  misc_feature (763)..(763): n is a, c, g, or t
  misc_feature (765)..(765): n is a, c, g, or t
  misc_feature (775)..(775): n is a, c, g, or t
  misc_feature (785)..(794): n is a, c, g, or t
  misc_feature (798)..(798): n is a, c, g, or t
  misc_feature (826)..(827): n is a, c, g, or t
  misc_feature (831)..(831): n is a, c, g, or t
  misc_feature (838)..(838): n is a, c, g, or t
  misc_feature (840)..(840): n is a, c, g, or t
  misc_feature (845)..(847): n is a, c, g, or t
  misc_feature (850)..(850): n is a, c, g, or t
  misc_feature (852)..(852): n is a, c, g, or t
  misc_feature (855)..(856): n is a, c, g, or t
  misc_feature (864)..(864): n is a, c, g, or t
  misc_feature (875)..(875): n is a, c, g, or t
  misc_feature (884)..(884): n is a, c, g, or t
  misc_feature (894)..(894): n is a, c, g, or t
  misc_feature (898)..(898): n is a, c, g, or t
  misc_feature (908)..(908): n is a, c, g, or t
  misc_feature (913)..(913): n is a, c, g, or t
  misc_feature (916)..(916): n is a, c, g, or t
  misc_feature (938)..(938): n is a, c, g, or t
ttcggccccaagtattcccggccaccttggcccggggatgccgggccgccagggccagaaaccccgggcggcaagcacagtgggtctgccacagtcagggtccgtggccctccagggtagtcatgatccccagtgcagttcagtgaggaagaggatgcggctgacannnnnnnnnnnnnnnnnnnnnnnnnnnnnnnnnnnnnnnggcttcggcacagtaggcaaagagatgttccaagatgagaaaatgtcncagtgcccacaggtggagcccaggagcaggccacaggcctcagatgggctcagcactgagcttctgcacacctccaccatgtcatcctcaaagaggtggacaatggattggcacacggcaggtggtgctatcttcagcagattgcacagcttgatggccacggagcccacgcgagccacattgggttccttcttcagcccgaggttgatggcggtgaatagacctttgcagattgggcaggtgntttccctccatcccaaatacatttcnnnnnnnnnnnnnnnnnnnnnnnnnnnnnnnnnnnnnnnnnnnnnnnnnnnnnnnnnnnnngcgctgctngcgcnnaggccgcananaagcgccnanattcatacanatccanctccatctccatcnccatcnccancaccattccnatccaaannantccnnnnnctccnncnttcccttcttttccgtngtcccnnccnnacgtnnnngatntnttncntatttacnctccttancntntnattttctctnttcctacacnnnnnnnnnncttntttcccttcccccccttcctttaccctnnccanccctcantnccccnnnctncnccnnttacaccntattacccttntctttattnttctttactntccncttccttccncaaancantcctccccttcctcttcctctn

SEQ ID NO: 319405 - DNA, 1069 bp, Homo Sapiens
  misc_feature (692)..(735): n is a, c, g, or t
gaggacttcagtggagggtttgatttcccactgagttgaagccaggcttgatttttttggcctggatagggtgatgagccttctgacaaaaggagaccaatctcttggagaccactgtgatcacaccctccctgtccccattggcatctccccaatgcccacctggagtcctcccctcaattgtctcattcaccaactgtcttcttctctcgactaggtatggttccgaccggcgtttagccgagctctctgattaccgccgtttatcagagtcgcagctttcgttccgccgctcgccgacaaagtcctcgctggattaccgtcgcctgcccgatgcccattccgataacgcacgctattcgggctcctataatgatttactgcgggcggctcagatgcactctggctaccagcgccgcatgtagggccatcctgggatggggcaccacagggagggagggagaaaagaggtgggtagggttacagatccaggttataactactctggcccatacctttcctggttgtggtttttcatgccctctaccatgtgggccttccccaggagatgatcctgttaagtgttcggtagtaacctactttgttccttcgcctcagcagcaaatcttgctactggctctagatctgcggtttcccctctaccctgcctcccgtctccccagaatgggaannnnnnnnnnnnnnnnnnnnnnnnnnnnnnnnnnnnnnnnnnnngtgcgcgatatttaaggtcgtctggatggggaagcaacctgcagctgaggtcgccggcgcctttttctttttagatgggaaggaggccaggaaagggtcagcttaaccatttcctatgtgccaagctgtgccagcagtccagggtaccctgactgtccctctgtagactgttgagactgagttcctgttgggacagtcagttggtatgtatccaagtccctgctgaccactaatgttctagctgatggtgagcggcacagtcccacttccccatctccccaagtaggtggtgttagaaaaccttaatttttttcccttttgtatggactacaaa

SEQ ID NO: 319406 - DNA, 857 bp, Homo Sapiens
  misc_feature (49)..(49): n is a, c, g, or t
  misc_feature (206)..(206): n is a, c, g, or t
atgaatggtggaccaagcaatttggggcacccatctccctgcaggtggnccctggaacctctggctagaccacatgttgtctggcggaagcagtgtttccgatggcatgagttctcccaggtgcttctggatggagtttgttcacaggtgcactgagttgtccaggttcttcagggagaagggctgcgtggaaaagcggatatagntgtcgcggtagaaccacacggtaagtgggttccagtcagttaccaggaaccactgtctgaggtcaaacttggtgccaaagatgaggaggggccgctcaatatacttctgcaccacccacttgcggtccttcatcaccacggggttgccgttcaccagcttcaggatctcctccaggtggtccatgcacatgatgcttcgtccgcgggacttggctcctggcttcacgatccagatgttgcgatccccttccatgtctatttggggtactacggcctgctgctgctgcaggatgtcctcacagcgctggacctgagtgtcgaggtgcctgagttctgccccttcgcatcagagcatgtgttccatctaggtcatcaaatttcagtaaatcatcgaagtcgaacagctgtgatggctggaactcctcgtcctcatcttcatcctcatcctcagtggtgtcactgtcacccatcgctgagctatccagatccttctggggtggcagcagggtggggcctgagcgatggaccatcttcttctccacccagcccctccggcgcaagagacaccggatcaccgggtagcagccttggattgtaaagatcttcttctgcttgacagctctctccacgtagattttggcgtttctgagc

SEQ ID NO: 319407 - DNA, 1085 bp, Homo Sapiens
  misc_feature (911)..(911): n is a, c, g, or t
  misc_feature (935)..(935): n is a, c, g, or t
  misc_feature (937)..(937): n is a, c, g, or t
  misc_feature (959)..(959): n is a, c, g, or t
  misc_feature (963)..(964): n is a, c, g, or t
  misc_feature (971)..(971): n is a, c, g, or t
  misc_feature (983)..(983): n is a, c, g, or t
  misc_feature (990)..(990): n is a, c, g, or t
  misc_feature (1006)..(1007): n is a, c, g, or t
  misc_feature (1019)..(1020): n is a, c, g, or t
  misc_feature (1032)..(1032): n is a, c, g, or t
  misc_feature (1039)..(1039): n is a, c, g, or t
  misc_feature (1044)..(1044): n is a, c, g, or t
  misc_feature (1051)..(1051): n is a, c, g, or t
  misc_feature (1059)..(1059): n is a, c, g, or t
  misc_feature (1064)..(1069): n is a, c, g, or t
  misc_feature (1074)..(1074): n is a, c, g, or t
ttttttgaccaatttttaaatattgctttagggagattttatttgaaaacataaatttcaaaaagaaagcacatttaaaacatcaggttttggtgatcagggtaggtaaagtatttttattataaatttcaagatctaaaaaataatttattacatttactaagataaatctaagatgacctttttaaaccaagccacgtgtgccctgcatagtgacgtcgtggccctcgggcatggaaagacacgggtctgcccttcctttagggctggaaagacacgggtctacccttcctttagggctggaaagacacgggtctacccttcctttagggctgggatcagccagaggaaagaaaattatgccgatgctcaactagcatatactgattaggactattttggtttattaccctggcattgaagaattcaggtgaagatgccaccactcttgaactctgaaagccaaactagaatctgcagagcagcctcagtcttaaaattcaagcttctttttcctactttttatttcagtgatatttaggacactctctatttcataagaattatgatctaactggctctataagcccaagaataaaaatccttaccccctagcaagagacccatagaactcatcagtagtaagactaaggtcccatattggaaaaaatatactagcccaaggttatagacagggaccatccagcaatagagatgttgctggcaagtaaccatggtggtgggtgaccactagcgaaaagggctgaagagacctcagaaggtcatccaggttatcctcctgccttgacacaagacacatgtgtctctctagccagagttacttgcagttgcactcacaagtgggggccccaggtctccttcatgtgattttctctgtgtacatatttcgnagattcccaaagggagcatttttncnaggtggagctgcaggagcttcngggnntttacanactgagtcaaancaacccnccccctgggatcttannagaactgggggnnagaagaaagtgnatccctnaaagnactaaantagggcanacccnnnnnncagantaagggggggg

SEQ ID NO: 319408 - DNA, 1008 bp, Homo Sapiens
  misc_feature (35)..(35): n is a, c, g, or t
  misc_feature (130)..(130): n is a, c, g, or t
  misc_feature (881)..(881): n is a, c, g, or t
  misc_feature (902)..(902): n is a, c, g, or t
  misc_feature (926)..(926): n is a, c, g, or t
  misc_feature (930)..(930): n is a, c, g, or t
  misc_feature (933)..(934): n is a, c, g, or t
  misc_feature (936)..(936): n is a, c, g, or t
  misc_feature (942)..(942): n is a, c, g, or t
  misc_feature (946)..(946): n is a, c, g, or t
  misc_feature (981)..(981): n is a, c, g, or t
  misc_feature (990)..(990): n is a, c, g, or t
  misc_feature (994)..(994): n is a, c, g, or t
  misc_feature (999)..(999): n is a, c, g, or t
  misc_feature (1004)..(1005): n is a, c, g, or t
atttcaaagaggaaaaaagcacgtttgttgttggnaggcgggcgtgaatgggagggttcttcaccttctccaacacctcgtatagatgggacgttgcagggcaatagaaaaggcagcagatgggggcgtnttttgccccactctgtacaatatagaagaatctcatatagatactttgtataaaagccacgtgtcctcatttgtgtcctcttattggctggctgggctgggggtactgggggacaaagaagctggggtgatagaccaggacacagggataccccattgtccccttcctctggctgtcccctgggtgggggtcactttggatccttgggtggggagcatagcacagctccagtgggccgggacaccttccagaatttcttcattcaccagctccaggggtcagcgagccatttcaacgtcgtgaacgccccgcctccaggtgcgatgtagatggtgtactgcttttcactgacgccctccaggctgggcaaagcaggctcctcaggaccgtcacctcctccggcacccccaccctccccgccacacccatcaggtcctccggtgtcagaggcgccccctccaggccctcctggctcccctgcttcctgctgttgcctccgctcgagggcaatgcgcagggccaagtacttggagaggtggtccactgtggcattcccagttgtcttcacatacctggaatgggagggaggacaggcttagagccagagcgcctcagatgaggactggaggtaggggctttccaaaatggattctgggttggggtggtattttgggtttgggcaaagccacttctgatggaaatctaggtgatctttgggttctcagtggctggggaaagacagggctctcanctcgtctgggagtattctccntctccacgagcagggggtggggcngaanacnncncatttntcanctggctctgggggctggggcccaagaggctggggngccaacgtncccncccanagccnnccc

SEQ ID NO: 319409 - DNA, 921 bp, Homo Sapiens
  misc_feature (3)..(3): n is a, c, g, or t
  misc_feature (5)..(5): n is a, c, g, or t
  misc_feature (18)..(19): n is a, c, g, or t
  misc_feature (37)..(37): n is a, c, g, or t
  misc_feature (41)..(42): n is a, c, g, or t
  misc_feature (51)..(51): n is a, c, g, or t
  misc_feature (57)..(59): n is a, c, g, or t
  misc_feature (74)..(74): n is a, c, g, or t
  misc_feature (81)..(81): n is a, c, g, or t
  misc_feature (91)..(91): n is a, c, g, or t
  misc_feature (94)..(95): n is a, c, g, or t
  misc_feature (97)..(97): n is a, c, g, or t
  misc_feature (108)..(116): n is a, c, g, or t
  misc_feature (120)..(120): n is a, c, g, or t
  misc_feature (123)..(123): n is a, c, g, or t
  misc_feature (130)..(130): n is a, c, g, or t
  misc_feature (141)..(141): n is a, c, g, or t
  misc_feature (174)..(174): n is a, c, g, or t
  misc_feature (176)..(176): n is a, c, g, or t
  misc_feature (182)..(182): n is a, c, g, or t
  misc_feature (196)..(196): n is a, c, g, or t
  misc_feature (200)..(201): n is a, c, g, or t
  misc_feature (213)..(213): n is a, c, g, or t
  misc_feature (218)..(218): n is a, c, g, or t
  misc_feature (222)..(222): n is a, c, g, or t
  misc_feature (230)..(231): n is a, c, g, or t
  misc_feature (375)..(375): n is a, c, g, or t
  misc_feature (538)..(538): n is a, c, g, or t
  misc_feature (562)..(562): n is a, c, g, or t
  misc_feature (600)..(600): n is a, c, g, or t
  misc_feature (608)..(608): n is a, c, g, or t
  misc_feature (615)..(615): n is a, c, g, or t
  misc_feature (617)..(617): n is a, c, g, or t
cancnagaataaatagtnntaatacattcagagttanatcnnagattcatnggacannnaaataatttttgagnaattttntgtgggagtntanngnttatgggactnnnnnnnnntttntcncagactnacttaaaagangagaaaaataataaaaggctatatatgttggtnancagctngacatttatgaaanatannagctagtattanatagnagtnaatttgtnnattaatggtattactctgataattattaaaatctgttccaggtatatatattgaaaatattttcttttgcattcttgctgaagataggtacagtactttggagaaattgtactaatcccttctgtatgtctgtatgtacatatntaacaagtgtgtgtatctggatctgtagctctacatgcgctttatatacagctacagacatatgcacacatacatatatacacacgtggttgagaacctgtgcatgtgtgtgtatcatcacaagcacacatctgggaaacgtcaaaactgcaagatactggtnagattcttcttcactcataactgntgcgcttgttcccctcacttgaccttgattacgtaaanagtttganattgctntntgaccctacaggggactcatctagacatcagcagccgacgtgcctcgaacggaacccctcttacgcattgtttctagttctttctgagtctcgtcttccattctcctaatgtcttccatcgtgagatcgatccacttgtcaatccaacaaaaaagctggcgatggaagtttgtaaatatccgtttttcttgcttttgaatgaagttttctactttgctttgcagtccccaccacttgaatttgatggtcaccagcttataggcacacatctggggacagtcagggctgtttgccagctccttct

SEQ ID NO: 319410 - DNA, 909 bp, Homo Sapiens
agcgaaagaggaaatggggaagcaggggtagggtttaggggggaacgtcatatcgcctggacaagagtggggcgtaacataggggcgggggctgtaaagggaatcttaagaatggttgggggggtaggaacgcgaatccctggaaaccgggtcgggttgaaggtcccaggaccagcacccaggttcaggaagggagaaacccaccagcagccttgaagtaaacacgggccctcaggtcttttccgggcaggctgcggacacggaggtacgtgatccccgtgagcctcttggccaggtggtagaagacaccgtggatgtaaaaccaggcaacatgtagccgctggaggcaggcgaggccctgtctgaggacgaagaccgcccgcagcagcgccctcctctgctgctcagtcagggtggccgtgtggtgacgcatccagcgccgcgcccctgagcagccacgcccacctggccccaggctcccctgcaagggtcgcccactgtcggggtcagcctgcagctcctgctccagggggagcagggccttgtccagcaggtagggcaggacggcatgcagtgtcaccagcacgccacggcgcagcgaggagggcacatgtatccgcgatgggtccacctggatgatgctgacgtactcctcccccagggtctggtagcctgcaagtgtggtgaggccaaagtaggccacatctgagagcagctcaacctccttcctccactccagccacttcctcgcacccgccaggctgtgcagggcgccgcccgccgcgctccgcagcccaccgcggtagtactcgtccttctgcgccgcgcggatcacctccggggggctggcggcggccggggccatggccgcgggttcgggtggtcccgagcagccacgccggccacgcc

SEQ ID NO: 319411 - DNA, 1675 bp, Homo Sapiens
  misc_feature (1244)..(1244): n is a, c, g, or t
  misc_feature (1439)..(1439): n is a, c, g, or t
  misc_feature (1533)..(1533): n is a, c, g, or t
  misc_feature (1612)..(1612): n is a, c, g, or t
ttagtaaggaaaatcatctcaatttattattttacacaccccaagtcagtgcagatggctggccggagagagcatggatggagtgaccccagaagggtcggtggtggtggtggtagtagtcatggcttctggggccctagggagagcaccacgggggtcgagaggccatccacgctgatagaagggatgtgcacctgggcgctgcgactggatggaaactggagggagagcttggccgggctacgggggtgcaatgggactcagggtgctccagaagtgaatgctaggagggcagcgagctgggtgtcagcagcaccgggggtcaatgtatgcgtaggaagcagggatggggtcagcgcccggcccccggagcctggaggccggagccactttccgaatcctggggtccgttcgggtcccggcccacctagcaggctcgggctgagtggaagctctaggtcccggggcttccggcccttctgcggctgggagatctcagggctggaagccgcatggccgcccgcctgccctgcggtgtccataacaaccgcgggcagccgggctggcacgccctcctgtggagggacttctggctcggccttggtggtttctggcacaaaccctctctcccccgcaacttccaactcttccttgggcccttctactttcacttctgggggcaaagcccggcccaaacccggctccacattaagctcttccgatttcaggtttggggcctcgggcggggtcaggatgacctgcagaggcaagccggcctcttcagcctccagacaggcctccaaggggcttggactggtgctcctgctccccgaggggggcgctgctgcccctgcaggagctgcactggggagcaccacagcaggccgaggatgagggggtggctgcggctgcagagactggatggtgaaggtggaatagaggcccgagcgcatgtactcgttccggctgctgcgtgccaaaccgcctgggcctgccattcctgcacccttgggtgtgcctggctttccagagacagtgtcccctggggcggcatgtatagcagcaggggccacatttggcatggtggaggtaacagacacttctggctggggcgggcagtcctcagtggagcaccctgcgacctcagggtaggacacaaacttgtagacgaacttctggccgctcaccttgcggatgatgttcttgtcatagtagtaccgcaaggcccggctgagcttgtcgtnattcatgttggtcttgttcttgcgtagccccaacagccgggccacctcctctgcatccaccagcttgaattcaccaccatcccgtgaagtccaggagatgatgtggccattgccttgctctctcagcagctgcagcagaaactgaccacagcgtcacagatgggtccatcgctgggggagggctcacgccatccnaggggtactgttaaagagggatgcggaggagtgcggcgccacggattgattcgctacgatgtacaggaagggtggaataaataaggccacggangggtctcctgaaagttgaggctgtgtgtagcgtggcggtggcgtatggcaatgttggcagctccggggggcgggggctncatacgcggccccaccgcccacccaggcctgggttccgaggcggcggtggaggtggtggtggc

SEQ ID NO: 319412 - DNA, 1621 bp, Homo Sapiens
  misc_feature (666)..(666): n is a, c, g, or t
  misc_feature (674)..(674): n is a, c, g, or t
  misc_feature (684)..(684): n is a, c, g, or t
  misc_feature (695)..(695): n is a, c, g, or t
  misc_feature (752)..(752): n is a, c, g, or t
  misc_feature (1538)..(1538): n is a, c, g, or t
  misc_feature (1545)..(1545): n is a, c, g, or t
gccaaactttattgtgattaaaattccagagacagtaccagctccacatacctctagccctgtctttgccctagttcccgagtgtccttcacccccatcttccaaatcatctctggtttcacggggaagaaaaaacctagggctgctgtgaatgtgccctctcaggtccctgagttgggccccaggtagagctgtaagagatcaggaagagggcctccctgcctgacggcgattgatcctggaggcaacgtgtggagcagaaagagaagtcgaggtagtgaaagggagtcaggccttggagggatgccccacaactccagcagcgtcgagtattgacgattgcagagtcagggattggagaggtaggggctcccaactgggcagcgagtcggcgctctgcagccagagctctcttctctcggtcactgagggcggcaaatcgccgctgctcttctcgttcacgctcctcctgctcctgctgcctctgctgctgttcctcccgttgccgccgggctgccttctgctcccttttccgtgtagcctgccgtgcctccatttctggtgtcaatggtcctggcacctgagccttgttgtaatcgtaggcatctggattcttctccatgaaccttcggaactcattacgtgttgatttgtcagccgcaacantataaggnggtcgggccngaaaatactgnacagtggggtcagcacctgcttccagcagcagacgaaccactgagcctcttccagcngcagctgctgcatgcaggagagtaaagccaccggagcccaagggggcactgagcagagacagaactctagggtctgcagggctgggagctagctgcagctttagcactccaacatctccagctcggcaagcagcaagcagtgcattccagagctctggctgaccaggggctttggcctcatccagcaaagggcccaagggggcagcaactgcctgggatgactgtgtggaaggctcctcttcttgagtttgctggagaagagtccgatgtgccccagcctcctggtctcggcttttctccttcttattcctttttctcctcctccgcttgggcaatacttcagactcacaaagatccagagtccccacagtcaactccactagctccaactctacctgaaagccatcttctccctccgaccctgaacctagggaaaaacctgacatgtgaaatccatctagggagtactcagagggtagaagcagatgcataagaatgaaagcctgaaatgaaattgtttttattttgtcacccagataaaagtagcacatcaagagctgagtccattatatcacatgcagaaatgaggctctcagcccagacaagaacaagtccctggactctccgtatgagtagccttagggtgccgcacaatagaggaaagcatggaagcagccctcagcctcaaaccacagcatccaatcaaagataaactatgtgagatccatgcaacacatccacgcatctgctccacacaaagattttcttagctctggggaaacatcncatacanaagagataatagatttggaaagtcactaaacatgtctcagtatttgctaagataacactgtgggttgtgtgtttaa

SEQ ID NO: 319413 - DNA, 1219 bp, Homo Sapiens
  misc_feature (74)..(152): n is a, c, g, or t
  misc_feature (204)..(320): n is a, c, g, or t
  misc_feature (323)..(323): n is a, c, g, or t
  misc_feature (335)..(335): n is a, c, g, or t
  misc_feature (337)..(337): n is a, c, g, or t
  misc_feature (355)..(355): n is a, c, g, or t
  misc_feature (362)..(363): n is a, c, g, or t
  misc_feature (392)..(392): n is a, c, g, or t
  misc_feature (396)..(396): n is a, c, g, or t
  misc_feature (402)..(403): n is a, c, g, or t
  misc_feature (405)..(406): n is a, c, g, or t
  misc_feature (412)..(412): n is a, c, g, or t
  misc_feature (414)..(414): n is a, c, g, or t
  misc_feature (423)..(423): n is a, c, g, or t
  misc_feature (425)..(425): n is a, c, g, or t
  misc_feature (436)..(436): n is a, c, g, or t
  misc_feature (448)..(448): n is a, c, g, or t
  misc_feature (456)..(456): n is a, c, g, or t
  misc_feature (458)..(458): n is a, c, g, or t
  misc_feature (462)..(463): n is a, c, g, or t
  misc_feature (466)..(466): n is a, c, g, or t
  misc_feature (469)..(469): n is a, c, g, or t
  misc_feature (471)..(472): n is a, c, g, or t
  misc_feature (679)..(679): n is a, c, g, or t
  misc_feature (744)..(744): n is a, c, g, or t
aacgcggcggtcggcagcgttcgcgcgggggcctgcgaacgctgctcggggccggcactgcccgcggggaggannnnnnnnnnnnnnnnnnnnnnnnnnnnnnnnnnnnnnnnnnnnnnnnnnnnnnnnnnnnnnnnnnnnnnnnnnnnnnngagcgcaggagtaaacaccgccggagtcttggagccgctgaagaagggaatnnnnnnnnnnnnnnnnnnnnnnnnnnnnnnnnnnnnnnnnnnnnnnnnnnnnnnnnnnnnnnnnnnnnnnnnnnnnnnnnnnnnnnnnnnnnnnnnnnnnnnnnnnnnnnnnnnnnnaanagctgagataangntgccttcccgggggctcnttttccnngctgccgagagggaatccgagaggcaagncaancacttnntnntgacantnattgggtancnggagctttttntttctcccctcnctatttcntntccnncgnctngnngcatgcaagaaaattacagtccgctgctcgcccgccctgggtgcgagatattcagccccgctctctcccgtgcattgtgcaacccaaagatgaaagaccgaaggggagaaagttaaagaaatcgcccacatgcgctggatcagtccacggcttggggaaaggcatccagagaaggtgggagcggagagtttgaacgtctttacaggncgggaacgatggcggacctggcagctgaaagtgttgattgggaaacttgggtgattcttgtgttntatttacaatcctcttgacccaggcaggacacatgcatggccaaaaaacgctatttcatcctgctctcagctggctcttgtctcgcccttttgttgatttcggaggcttgcagtttagggcatcgaggagccacagccggcagagaagaacacagcggtaggaatggcttgcaccatcccagtccggatcatttctggccccgcttcccggacgctctgcgccccttcgttccttgggatcaattggaaaacgaggattccagcgtgcacatttccccccggcagaagcgagatgccaactccagcatctacaaggcaagaagtgccgcatggagtcctgcttcgatttcaccctttgccagacaaacggttcacagtctacgtataccacagcaaaaggcggaaaaaatcgccgaaacgtaccacaaacattctagcgggcatcgagggctccagggtctacacctcggaacca

SEQ ID NO: 319414 - DNA, 844 bp, Homo Sapiens
ctgttgtaagtcttttctgcctcccggattgataccatccaaacttggagtagatgtcccaccacacgccccttttcaatccacccctggcagggctgagactcgatgctgtacaaaaatccccagagccacatagacgggggtggtagtgcgaaccatagcaatattggcataggtgccaatctgtagctcttccagagacttggacatgaactctggcttggggaactcagtgataaacaatttgaggaacttcagaatgcgcttgtgggtgaggatgtacaaagtattgcctgattctgggtcaataactggcagcctgtggatcttgttccgaattaatgaagagacagcatcaaacaagctggcattaggagaaatgcagacaagcggtttaaaggagtcctggagatacacctctctccaagtttctatcttgtgttcttctagctcatagatctgtaccaaggctgatttatagtagcggtgcaggatattgatgaaatcagtgatggtcagcatgcccacaaaactttgcttcttactatcccataaaggggcagctcgtacaccgttagtcaccaaagcaaaaaaagctttcttcacctgcagggacgtatcaaatacaaccaatttggagcttgtgggaatcaggtcatagcagcgatgagacttcatgaaggaagtatacacgctattgttggattctggggtctcttgaggatgctcattttccacagctggggagctatctgaagaaatgaccgtctccattgcaagaggcgcccggcttggtttcctcgctttaggaaactctcttggggcaggccccgccccacatcct

SEQ ID NO: 319415 - DNA, 1580 bp, Homo Sapiens
  misc_feature (1531)..(1531): n is a, c, g, or t
ctgatgtaaacacccgagccgggctccaaggcccgggaggtcagaaaaccgggccgcgggcggcaccgacagctggggcccgggtcagggacacgcggaggtcaggccggtgaaggcggcaggaagctggagcacgatcccaggaggaacaatcctgcaccatgactcaacagccacttcgaggagtgaccagcctgcgtttcaaccaagaccaaagctgcttttgctgcgccatggagacaggtgtgcgcatctacaacgtggagcccttgatggagaaggggcatctggaccacgagcaggtgggcagcatgggcttggtggagatgctgcaccgctccaaccttctggccttggtgggcggtggtagtagtcccaagttctcagagatctcagtgctgatctgggacgatgcccgggagggcaaggactccaaggagaagctggtgctggagttcaccttcaccaagccagtgctttctgtgcgcatgcgccatgacaagatcgtgatcgtgctgaagaaccgcatctatgtgtactccttccccgacaatccccgaaagctgtttgagtttgatacccgggacaacccaaggggctctgtgacctctgccccagcctggagaagcaactgctagtgttcccgggacacaagtgtgggagtctgcaacttgtggacctggcgagcacaaagcctggcacctcgtctgctccattcacgatcaatgcacatcagagtgacatagcctgtgtgtctctaaaccagccaggcactgtagtggcctcagcctcccagaagggtacccttattcgcctctttgacacacaatccaaggagaaactggtgggagctgcgccgaggcacttgaccctgccaccctctactgcatttaactttcagccacgattcctccttcctcttgcgctttccagtgataaggggtacttgtccatatctttgctctcaaggatacccgcctcaaccgcctccgcgctggctcgcgtgggcaaggtggggcctatgattgggcagtacgtggactctcagtggagcctggcgagcttcactgtgcctgctgagtcagcttgcatctgcgcttcggtcgcaatacttccaagaacgtcaactctgtcattgccatctgcgtagatgggaccttccacaaatatgtcttcactcctgatggaaactgcaacagagaggctttcgacgtgtaccttgacatctgtgatgatgatgacttttaaggaccctgggggctgtgctagggacctgcagtggcagaactgcagagctgagccttggcagtggggcgtgcttggaagccaccagccagcaagcattaatggggctggtgcccactttccactcagcagagctatgtctaaataaagagctcacttccccccagcacttcttgatgactgtgtgccccaagggccaggccagagacccaggaaggcagcgaccccttgggatccctaacctggaggaaattgccagggacccagagggagtgccctaatccancctggggattttttaaaagcttcctaggaagagatgatctccgatgtga

SEQ ID NO: 319416 - DNA, 467 bp, Homo Sapiens
  misc_feature (26)..(26): n is a, c, g, or t
  misc_feature (33)..(33): n is a, c, g, or t
  misc_feature (75)..(75): n is a, c, g, or t
  misc_feature (101)..(101): n is a, c, g, or t
  misc_feature (184)..(184): n is a, c, g, or t
  misc_feature (275)..(275): n is a, c, g, or t
  misc_feature (427)..(427): n is a, c, g, or t
ggtactgccccaaaactttgctcctnaaagaanacccgccttcaaaaccggccctccgcgctggctcgccttggnccaaggttggggccctatgattgggnccattacgtggactctccagtggagcctggcgagcttcactgtgccctgctgaagtcagcttgcattctgggcttcggtcgcnaatacttcccaagaacgtcaactctgtcattgcccatctgcgtagatgggaccttccacaaatatgtcttcactcctgatggaaactgganagagagaggctttcgacgtgtaccttgacatctgtgatgatgatgacttttaaggaccctgggggctgtgctagggacctgcagtggcagaactgcagagctgagccttggcagtggggcgtgcttggaagccaccagccagcaagcattanatgggctggtgcccactttccactcagcagagctatgtct

SEQ ID NO: 319417 - DNA, 1773 bp, Homo Sapiens
  misc_feature (1341)..(1343): n is a, c, g, or t
gggagtataaaaataggacttttttccttatcacatcaattatcaaagaaacagtacgtaacaaaaatacaaagctctggtggatttttttgtcttttgtcccccccaccaccacttctacccaacagccccttgccagggagcccttggctgaagcctggacgctgtccctgaggtgaccccagggctcaggagaaacggtggtccaggtctctctgggggctagcagagtatgagtaggccttgcccaataccaagcggtcccggagcagcttgaagaaggcatagtagttgctgaagaggatgagggccagcgagatggtctggtgccacttttcagaggacattagggagtacagctgatagacaatgacagcgccctccagcagcaggaggatgttgaggatccgcaggggtttgctgaaaaagaaatggaagcggaagtgggagacgtcagaggggatagccacgttgtagtggcctacggctttgtagacgttcttgctgtgcttcaccagcacgccctgcggccacatgcattcttcagtccacgggtgctgcagcacgttggagcacagcgctgggtccaccttctgccaacagcccagatgggcggcggccttgtgcagcaggtcacagtagctggcaggcagcaggtgctgcatgaggatcacggaggtgctgatggacaccagcaggaagagttcacaggaccagcgcttgtcatagtaatgtgtgttcttcacgaaccagacaggcacaaaggccacatagtaggcgctcagcatggagctgacgagcacttccttcatgcgccagttgaagtccatcttgaggaactccacctcactgcggatgaggctgggtgacaggcagcaggcatgggtgggcatggcgtccgggccatacagctgtcttgtgtgctgcttccacgtctcccgcagtgtcaggaggtagtcccggctctttgccaggccactgaccgcctcccggggccccatggaggccatgtggttgaagaggcttgtcttgcggaggtcgcaattcagctgcaggaacggaatgtacatcccaaacggatagcagaggaacaggaggttcaggaaggagtaggtcctgaagaggtggatgagggatcggcacagactccagcctgttgccgtgagaacggtgaagcgagtgaggaacagcaggatggagcgaaagagggagaccttccccctctgagaggcctccttcacgatggacccaatgaagcggcggcccagaacgatggtggtcaccatcagcaagttgaagtcgatcagatggaagttcagggaggtgtgggagggtgggtgnnnaggtggataccaccacactgtcttgtagatgttgatgtagtggacgaagagtgctatgagctggcagaagaagagctgcaactcaaacagaatgctggcctggactggcagctcggggatcttgcagtgctgtagaggcacaacagtttgggtggccagaggagggctggagaggcctgttccagaactgctcctggtgcgggaacgaacactggtcaccgatgcactggaagtgtggcttccactagagccccccgaggatcccggctcacagagcggatttcgacagtaagatgtcctgttgggacctcttcgtcctcccatctcctccccccggtgctctcccttcgccgccgcagctcctgcgggcaatatgtcggaggcgacggcggccgggagaggactaaccgccgcagcccatcccgggaat

SEQ ID NO: 319418 - DNA, 739 bp, Homo Sapiens
  misc_feature (310)..(310): n is a, c, g, or t
ttgctatccgcacattgctcagatggctctcagcatgatcttggactcctcatgcgagaggctgggtgacaggcagcaggcatgggtgggcatggcgtccgggccatacagctgtcttgtgtgctgcttccacgtctcccgcagtgtcaggaggtagtcccggctctttgccaggccactgaccgcctcccggggccccatggaggccatgtggttgaagaggcttgtcttgcggaggtcgcaattcagctgcaggaacggaatgtacatcccaaaccagggaggtgtgggagggtgggtgggaaggtgngataccaccacactgtcttgtagatgttgatgtagtggacgaagagtgctatgagctggcagaagaagagctgcaactcaaacagaatgctggcctggactggcagctcggggatcttgcagtgctgtagaggcacaacagtttgggtggccagaggagggctggagaggcctgttccagaactgctcctggtgcgggaacgaacactggtcaccgatgcactggaagtgtggcttccactagagccccccgaggatcccggctcacagagcggatttcgacagtaagatgtcctgttgggacctcttcgtcctcccatctcctccccccggtgctctccgcttcgccgccgcagctcctgcgggcaatatgtcggaggcgacggcggccgggagaggactaaccgccgcagcccagtcccgggtatca

SEQ ID NO: 319419 - DNA, 1543 bp, Homo Sapiens
  misc_feature (186)..(186): n is a, c, g, or t
cgagaggggagaccagcgggccatgacaagctccaggctttggttttcgctgctgctggcggcaggttcgcaggacgggcgacggccctctggccctggcctcagaacttccaaacctccgaccagcgctacgtcctttacccgaacaactttcaattccagtacgatgtcagctcggccgcgcanccggctgctcagtcctcgacgaggccttccagcgctatcgtgacctgcttttcggttccgggtcttggccccgtccttacctcacagggaaacggcatacactggagaagaatgtgttggttgtctctgtagtcacacctggatgtaaccagcttcctactttggagtcagtggagaattataccctgaccataaatgatgaccagtgtttactcctctctgagactgtctggggagctctccgaggtctggagacttttagccagcttgtttggaaatctgctgagggcacattctttatcaacaagactgagattgaggactttccccgctttcctcaccggggcttgctgttggatacatctcgccattacctgccactctctagcatcctggacactctggatgtcatggcgtacaataaattgaacgtgttccactggcatctggtagatgatccttccttcccatatgagagcttcacttttccagagctcatgagaaaggggtcctacaaccctgtcacccacatctacacagcacaggatgtgaaggaggtcattgaatacgcacggctccggggtatccgtgtgcttgcagagtttgacactcctggccacactttgtcctggggaccaggtatccctggattactgactccttgctactctgggtctgagccctctggcacctttggaccagtgaatcccagtctcaataatacctatgagttcatgagcacattcttcttagaagtcagctctgtcttcccagatttttatcttcatcttggaggagatgaggttgatttcacctgctggaagtccaacccagagatccaggactttatgaggaagacaaggcttcggtgaggacttcaagcagctggagtccttctacatccagacgctgctggacatcgtctcttcttatggcaagggctatgttggtgtggcaggaggtgtttgataataaagtaaagattcagccagacacaatcatacaggtgtggcgagaggatattccagtgaactatatgaaggagctggaactggtcaccaaggccggcttccgggcccttctctctgccccctggtacctgaaccgtatatcctatggccctgactgggaggatttctacgtagtggaacccctggcatttgaaggtaccccctgagcagaaagctctggtgattggtggagaagcttgtatgtggggagaatatgtggacaacacaaaacctggtcccccaggctctggcccaaaaccaggggcctgttgcccaaaaggctgtgggagcaaccaggttgaacatctgacctggacttttggcctatgaaacgttggtcacacttt

SEQ ID NO: 319420 - DNA, 1002 bp, Homo Sapiens
ctccatagggtaattattgagacttgggattccactggtcccaaaggtgcccagagggcttcagaccccagagtagccagggagtcagtaatcccaggggatacctggttcccccaggacaaaagtgtggccaggagtgtcaaactctgcaagcatcacggatacccccggagccgtgcgtattcaatgacctcctttcacattcctgtgctgtgtagatgtgggtgacagggttgtaggacccctttctcatgagctctggaaaagtgaagctctcatatgggaaggaaggatcatctaccagatgccagtggaacacgttcaatttattgtacgccatgacatccagagtgtccaggatgctagagagtggcaggtaatggcgagatgtatccaacagcaagccccggtgaggaaagcggggaaagtcctcaatctcagtcttgttgataaagaatgtgccctcagcagatttccaaacaagctggctaaaagtctccagacctcggagagctccccagacagtctcagagaggagtaaacactggtcatcatttatggtcagggtataattctccactgactccaaagtaggaagctggttacatccaggtgtgactacagagacaaccaacacattcttctccagtgtatgccgtttccctgtgaggtaaggacggggccaagacccggaaccgaaaagcaggtcacgatagcgctggaaggcctcgtcgaggactgagcagccgggctgcgcggccgagctgacatcgtactggaattgaaagttgttcgggtaaaggacgtagcgctggtcggaggtttggaagttctgaggccagggccagagggccgtcgcccgtcctgcgaacgctgccgccagcagcagcgaaaaccaaagcctggagcttgtcatggcccgctggtctcccctctcggagggggctggccacgtgagaccctggtcaggtgagcggcgcccccgtgacttatcggcgaatc

SEQ ID NO: 319421 - DNA, 1240 bp, Homo Sapiens
  misc_feature (381)..(381): n is a, c, g, or t
  misc_feature (623)..(646): n is a, c, g, or t
ttgacctctgggacaagttcagtgaactctcaaccaagtgcatcattaagactgtgaagttcgccaagcagctgccccgctttcaccaccctcaaccatcgcccacccagatcacccctcctcaaggctgcctgcctggacattccctgactgcggatctgcacgcggtaaacgcccgagcaggacaacatgaccttttcggacggggtggacctgaaccggacccaggtggaaaaaggttgctttggccccctcaacggacttgtctttgctttcccaaaccagctgtgccccctggggatggatgatgcggagacggggcctctcagcgccatctgcctcatctcgggagaccgccaaggacctggagcagccggaccngggtggacatgctgcaggagccgctgctggaggcgctaaaggtctacgtgcggaagcggaggcccagccgcccccacatgttccccaagatgctaatgaagattactgacctgcgaagcatcagcgccaagggggctgagcgggtgatcacgctgaagatggagatcccgggctccatgccgcctctcatccaggaaatgttggagaactcagagggcctggacactctgagcggacagccnnnnnnnnnnnnnnnnnnnnnnnntggcctggcccccccgccaggcagctgtagccccagcctcagccccagctccaacagaagcagcccggccacccactcccgcgtgaccgcccacgccacatggacacagccctcgccctccgccccggcttttctctgcctttctaccgaccatgtgaccccgcaccagccctgcccccacctgccctcccgggcagtactggggaccttccctgggggacggggagggaggaggcagcgactccttggacagaggcctgggccctcagtggactgcctgctcccacagcctgggctgacgtcagaggccgaggccaggaactgagtgaggcccctggtcctgggtctcaggatgggtcctgggggcctcgtgttcatcaagacacccctctgcccagctcaccacatcttcatcaccagctaaacgccaggacttggctcccccatcctcagaactcacaagccattgctccccagctggggaacctcaacctcccccctgcctcggttggtgacagagggggtgggacaggggcggggggttccccctgtacataccctgccataccaaccccaggtattaattctcgctgg

SEQ ID NO: 319422 - DNA, 1055 bp, Homo Sapiens
  misc_feature (164)..(164): n is a, c, g, or t
  misc_feature (166)..(166): n is a, c, g, or t
  misc_feature (195)..(195): n is a, c, g, or t
  misc_feature (902)..(902): n is a, c, g, or t
  misc_feature (994)..(994): n is a, c, g, or t
  misc_feature (1016)..(1016): n is a, c, g, or t
cgtgtagctctcagagcactcgggcttgggcacctccttcttcttcttgtttcggtcgtttctcacagactccttggacatgcccacttcaaagcacttctgcagtcggcagtattggcagcggttccggttcaccttgttgatgatgcagttcttgtcccggntnacacgtgtacaccatgttcttctggatgntgcggcggaagaagcccttgcagccctcacaggcgctgacccccatagtggtagcctgaggacttgtcctgacagacaaagcaaggcttgtagatgcggggtagagggggtggcgagggagggctggcactatctcttcagaactgctgctctgggtctcaatggagtggtttgagccattccaaagcggagtccggagcggggtggagtacggacccggggcggggagccccttctctgggagcaaacaggcccggttctggttataaaaatccaccactaggaagggattaggggtgggaccccccacttctacactctcgtacatctttcccctcgaaggcaagaggtccgagctgggaagtcctgcgcgccgcccccgtcactcagccggcggcgccatccgagcagagcagctgggggagaggagacgtcccctcgccccgactggtgacccgggcagggggcgccccctgccctgaagtccccgcgtctaagtccgccggccgctccgccagtcccggtgaaaagcagggaagttgtgtgtgctgggagggggggtccgtcggctctcccagggaagcctggcggggcccgggaactcagcggcttcacctcgaggggactcccgtctagagtctcgtggcgtccgaggcagagtacagcggctccccaagtccgcaggccgggggcgggatcagcgcggngctgggggtcaacgagcacttcctcctcccagccggggatccggggcttctccagggattctccgtggcgaggattccgggtgggggtgggnatcccgcgcggttccgcccccnccaggccaggggcagctggcgactcgctcggatcccggg

SEQ ID NO: 319423 - DNA, 1006 bp, Homo Sapiens
  misc_feature (12)..(12): n is a, c, g, or t
  misc_feature (15)..(15): n is a, c, g, or t
  misc_feature (24)..(24): n is a, c, g, or t
  misc_feature (26)..(26): n is a, c, g, or t
  misc_feature (39)..(39): n is a, c, g, or t
  misc_feature (47)..(47): n is a, c, g, or t
  misc_feature (58)..(58): n is a, c, g, or t
  misc_feature (70)..(70): n is a, c, g, or t
ttaccctttatnaancctaagttntntaagtgtattatntacagtantattccaactngttcccatgctncttaacccaatccataatctggagcaagccttggctagtgtattttgagatgtccgttgtgtttcagctgccgttcctcactccgcctgcttctccaaagcatggtacttcttgatgctcttcctccatgcaaagcgccagatgctaaacatgaaacaccaagacacagcatacatcgctactcccccagccttcacaaaccacttaggcgtgggggagaccatttcacagaaaaggtggctagctcccacaccaatcctcactcctgtgaacagagccacaaagaggaagtccactacatctccagtgaaactgtgatagtgccctgtttcccggagaaaccagcgcatctgtagcaaggggttggtaagctcacttccaaagaggactgcattgacctctgtgccagactccccaagcacaagggccatgataatgcccaagatactcaatgtgtgatgagccagcatcaaggcaccctcagactgaaagtagacgcaccagccgcaagtcgaagatgaagtagcccaaggtgagacacaggacatgaacttggagaggtgtattgggtgagcctgggtgggtaaaaggccatgggccatcaatgaagccaatataagcggagaggcctatagagaggactccatgggtgaaggtgaccaggcggcagctccactcatagcttcggtgcttattcaggtggcagaaagaaatatagagcgagagccagccacacaggctgcacagcacctgcagacacagagctaatgccatcctgtgatgaaaagaccaaaaccagaaaaacaaaggatgcaccctaagaaaacagcactgggtcattttgtgtatatatcctcatttctattatagaatagttcaaaaatattgccttatcttattttccttatctacacggccaagaatcttctatttaag

SEQ ID NO: 319424 - DNA, 1648 bp, Homo Sapiens
  misc_feature (1358)..(1358): n is a, c, g, or t
  misc_feature (1537)..(1537): n is a, c, g, or t
ttttccggggaaggcgttttccccattgttggttataaaattagaaatttctcctaaaaacgcggccttccttcgaaagatttcggaaattttcccctgtagtggggttccccattaagttaaagtctgtgaggagaaaacttgttccccccataaccggaagttatttctcagtcgtcaattatcctggcttgggggtctcgggagaagaaaggacttttcagatgtttcattaatcagggagcgcatgagaggctggagggttcagagattccagtcagaaagaggttggtaggttaaagttgtcttcctcaatcgtctccatcagttcattctggggtttcatttccactccaactgatttccgttgagaaatagcttttccaatttctccagcagctcagcacattgattcagctgttcctggaaaccctcggccacacagtaatccacatcactggcgtgcagcaactcctcaaatgccttaatcatggtgttcatgtgttgacgggagatgacacagatgccatggccatccttaatctgctgccgttgaagggagagctccctggcttgggactgaactaatgaatcgtatctgggaggtgagagatctctgaacttattctgcagattatggatctcactgaaaagttgcatgttcaaattctgctccttctgcagctagtattcctgttcctccagctgctgtgtgaggttctccagcaccctgctgtcaatcatctctggggccagcggaccgaggattttcacgtgtttcacgtatcgcacttggtgcaaacttgaaaaggtcatttcttccccatcagaaccattcttgggcttgctcaagccatcctgggccccttctgtcccacacaaaactgtaattatggcctcactgcactgggagtgcttttgaagctgaaatatgaaattctggtagccttccagctcagtttccaagtcatggattttctgttttaagtattctgtctcatttgaggtattaatgctctctgactgatcagtccccatcacactgactttagcagaaggctgactcttggaactcaggtaagtagctactgaagttgggctcagaacatcttcaggattttctttgcatgatggcaagctggcaaggtcatcaggtgggcaaatctcagagtctgaaaatcaaatacacttatgtcagtatctcttttactaaaatccaaaccctctctccttcctcacagccctagccaagccaagaccactgcagtgacctaacaagcctccctcaaaaaggccctagtatttcctaacacacttccctcaaaaagcctccagtctttcctaacaagcctccctcnaaaagccctagtctttccctctttacccctcagttgtcctcttcctcagagtgactgttctaaaaagtaattttaaccacgataaacccacacacacaccccctaaaattcatcgacattcccagtatctacatgagaccttccatgatctagttccaggcaacctttccaggaatatntctggcaccactctggagatttcctacaaaattaaccatgattccctgcacattgcgtgctgtgtcatgcctccatgcttttgcatgggccgtgccctctgcctggaacac

SEQ ID NO: 319425 - DNA, 1526 bp, Homo Sapiens
gggagtggggtttgtggggtgtgcccagcagggatcctgccagatgatgtccacatgagaaggcaggtgtccaacagcttcagcttcacccagtgccccccagacaaataatgacaagtccagggtcttctgatgtgtcaggccagcactccccttgctgatgggaaaaccggggctcggccagccccactgcatcccctcacatgatgatacgaggctctggcactgactcgccaatagacttgtggggcagcacgctggctccgttgaggtagagctcatcattaactatgacgtcctcacccagcactgtcacgttctccatgcgtacccactgacccacgcggcaggccagcccacaatgcaggactcaagccaggaatgggaacggatccgggcatcccgcagcaccgtgcaccgccggatacacacaccatcttcggcccaccacgccaggttcccaggctcacattggggccaatgctgcagttctggccgatgcgggcacttgggtccaccagcacgttgcccacaatgccagggcctgagcacagccgctcaggctgcttctgcctcagtgactgcaggaagaggcacatgccagtgaggaagtccttgggctgcccaatgtccatccagaagccctgtaactccatggcatatagctgcccctccttggccataatggggaagacctccttctcaatggacgtaggctgcagctggatgcgccgcagcactgcagggctcaggatgtacatgcctgcgttgatcttattggacacaaacacctgtggcttctccacgaaccggtgaatgcggcctgtgtcagcctcacacaccaccacaccgtacttggagggttcctccaccttggtcaccaggatggagccctcctggccatggtgccggtggaactgcaccatggcttggaaggggaaatcgcagatcacgtcactgttgaggacgaagaaagggtctgcagtctcagagagtaggtcacgggccagcgccaggggcccagctgtccccaaaggctcctcttcatgggacatggagattcggattcccagcctctgctcctgtgccttcatttccttctccagcacctgcgacatgtagctcacggccaggatcacgtggtccacgcctgccgcggctagcgcctccacttggtgcagcaagatgggcttattgcagaagtccaccagtggcttcggggtgctcagcgtcagcggccgtagccgcgtcccatagccccccactaagatcagtgccttcatcgcgcctgcggacgttgagggggtgtcccgggctctgaggtgcctgcagcccgcctggccggtccctgccgcgcactcccaacgccgtgcccggccccgcgcccttcaccaacccgcctgacagactctggctccacctcgtccgcccggtcgccctgacgccggatccagggccgccacaacacagaacgcgacaccgggtagacggctgctgatcccgggaattccggaccggtaccagcc

SEQ ID NO: 319426 - DNA, 1082 bp, Homo Sapiens
  misc_feature (947)..(948): n is a, c, g, or t
  misc_feature (955)..(955): n is a, c, g, or t
  misc_feature (992)..(993): n is a, c, g, or t
  misc_feature (1018)..(1018): n is a, c, g, or t
  misc_feature (1027)..(1027): n is a, c, g, or t
  misc_feature (1033)..(1033): n is a, c, g, or t
  misc_feature (1036)..(1036): n is a, c, g, or t
  misc_feature (1040)..(1040): n is a, c, g, or t
  misc_feature (1044)..(1044): n is a, c, g, or t
  misc_feature (1046)..(1047): n is a, c, g, or t
  misc_feature (1050)..(1050): n is a, c, g, or t
  misc_feature (1058)..(1058): n is a, c, g, or t
  misc_feature (1060)..(1060): n is a, c, g, or t
  misc_feature (1076)..(1076): n is a, c, g, or t
ggccgcgcccctcctggccccggcttcttggctgtcaaacagatgcagcaacgtcggctcctgccgaggagcccaaggggtcccgggatccgccgcacaggctggcactgcttgaagaggaggctactcggagactgcgccgcgcgggtagatccgaaacggggctggggcggagtgggaaaaggccgggtatgccttgcatgatcgcggggagctccttcctgtttttatcccacctagagaagccgggaagtaggggtttaggtccaatttgttggagtacttaaggactcgtttgcactttcttttgggggatgacagtggattcattgccctcggaggttcaaccagttatgagtgagggattggccagaagatcggggcgcaggcaagcaggagtgctctattaggataagcaagtttgacaggaagaagctactcttctccgaattacacagaggtgatgtgttcgtattgcacgtagacgtgtgtataacaggacctccttccccgcgccccgccaccccgacacacacaggagctgcctaaagtatccttgccttgcagattggaggctccccaaatattttgcgatctgaggatccagctcaagtgaggtgccataggacgtgttcctgagtttgcattgcacggagaccttcctggaatttttcatttgcaagtcggcttaaccaattttgcattgagtcctaggctgcttgcactctgaatttgggctattcaggtagtgtgctcaaagttgaaaccgcatacagcacaactcaagtttgcatcagactgggaagcgaacttaagccagcggtgcgtggcccaggagtgggaaaggaaatggatgcctgaagtggaagaggtggtgcagagggggcacggccatggctgccctgcttccaactgctgcgcatagggggcggcaggggcggtgattnnacacctncaccccccgccggggttggtgcactatcgcttgggcnnagggcgactttgtgatttggcctcngcccacagnacctgnctntctntggntnnacncaactgantncgaccccgggtataantgaggg

SEQ ID NO: 319427 - DNA, 1609 bp, Homo Sapiens
  misc_feature (125)..(165): n is a, c, g, or t
  misc_feature (211)..(211): n is a, c, g, or t
aaataagtttttacttctccctcaataagatatttgaaactgtttttatatttcatattaaaaataaacctaagagtccagagaaacttgccaccagttctggagccatgagcaattctctcctnnnnnnnnnnnnnnnnnnnnnnnnnnnnnnnnnnnnnnnnnctttgatcttgatctttagtgggtcccccctccatggcccccaggngaacagatctccgctttggcactctcttcactcttcttgacagttctccccaactcccaagcaattccagacgttcctatggggctgtgattgacaaagctattggcaggtgccacctacgtgagccacatcttttcctggagccacgcaggaagaagctttgtcctccacacacagagctgggatgaagcaggggcaaaggggaaagaggcgacaggcactggtggctgggagtgcttcctgctgctccccggagcccccagccctgctggccctcggggaagccaatcaagctgatggcaacagagggatggcctgggaaacccagctgccctgtctgttggtcactgttgtcgagggcaggctgaagaaggacgtgggcccaggtatcagggagctgtccctggacttccctggggcccatgagagctccgatggcgaggcaggacaaaagcctatgtcttccttatcacactgtaatctgaatctggttcctcctcccgaggcctctgagcagctatcctgttggtgttagaatcaaacaccaccgaggcatagtgaagttcttccctgggggaggccacagtgctgtattccacctccacctccccttggtggtgctggcttttcctgcagaggccacatcagcagctccagatttgcgtagtgcagctcactctgcgtggcagcctgcttggggttctgggacagctctgaatggtcaccagctttgatccatttctgaaacatcctccaggctagcagggaggcccccaccaacagaagcagcaacaatgccagcagggagaggagcagcgggagctgtgagttcaccacctcctcagtttcctcctggatgctggcactgtgggtggcacccactgcaaacagggtagtggatgatacaggtggaaatgcagttgtgattgttgaggtcttggccgcagtgatacttgcaggtgtcattgacgttgatgccgggaacacggacacctcaacctcgacaacgggatcatgaaagtctcggagccacggtgtatccaccccacaccagtaggtgcctgcatcctcctctgtgagattctccagggtcactgtgaagctgaggtttgcaggactgtccctgatggacactcggccgttcctttttcctgctgaccctttggtctccacaatcttgtcacataggaaaatctgtggtggtctgcaccagtatttgttgagggtcctgtgttccttctcatagggacactgcacactcagggatccccccacggggcccgccacggtcctgcatttgctcagagcaaaacatcctgggacccagagaagcaacagagcccaaggcagccacatggtcccttccccagcacaggcggcacttgcagcagctccagg

SEQ ID NO: 319428 - DNA, 687 bp, Homo Sapiens
  misc_feature (76)..(92): n is a, c, g, or t
ggctctttcaaaggtaatggcccatcgatgagcatttttaacatactccatagtcttttcctgtggtgttaggtcnnnnnnnnnnnnnnnnncctgggggctggggtgggggtttgtcatgggggaactgccctttaaattttaagtgacactacagaaaaacacaaaaaggtgatgggttgtgttatgcttgtattgaatgctgtcttgacatctcttgccttgtcctccggtatgttctaaagctgtgtctgagatctggatctgcccatcactttggctagtgacagggctaattaatttgctttatacattttcttttactttccttttttcctttctggaggcatcacatgctggtgctgtgtctttatgaatgttttaaccattttcatggtggaagaattttatatttatgcagttgtacaattttatttttttctgcaagaaaaagtgtaatgtatgaaataaaccaaagtcacttgtttgaaaataaatctttattttgaactttataaaaagcaatgcagtaccccatagactggtgttaaatgttgtctacagtgcaaaatccatgttctaacatatgtaataattgccaggagtacagtgctcttgttgatcttgtattcagtcaggttaaaacaacggacaataaaagaatgaacacattcctcgtgtgtgacc

SEQ ID NO: 319429 - DNA, 1662 bp, Homo Sapiens
  misc_feature (162)..(162): n is a, c, g, or t
  misc_feature (207)..(210): n is a, c, g, or t
  misc_feature (289)..(289): n is a, c, g, or t
  misc_feature (295)..(295): n is a, c, g, or t
  misc_feature (342)..(342): n is a, c, g, or t
  misc_feature (398)..(412): n is a, c, g, or t
ggggaagcgggcacgtcttacgtggtggtgggcgagaaagacaagtgcaagcaggggaattgccagacacttataaaaccatcagatctcatgagaactccttcaccatcacgagaacagcatggggaaaacaacccccatgatccaatcacttcccatcangtctcaccctcatcacctggggattacagttcaagatgagatttnnnnggggacacagagccaaaccatatcaccctctttaaagggcagcttgctgagactggggtatggcagccaggcgatttgngctggncccacaaggcagagcagacacctccatgaactgaggccgggcttgtncctccctcctcagttcaccagaaggttcctccactggggctgtggggactgctgtnnnnnnnnnnnnnnntactgggcagctgccgctgcttggtctcctgctcctgcttctgctgctgccacacgcacactcccacctgtgatgggttatttctgagtccccaacctcatgacccaggggtgagacagaatccagctcatctgagcagttccacatgcacaatcaggtattccatcaccccaggccccaggagcacatcagcagggacttttcagaattttttgcagaatcctctgccgcagatggcacggctttgtttctgaatcccaggggcctgcactgtgattctggcatagtggcttgccataaacacacagcattgctttcccaacgtctgatacctctcataacacagggtccgaccagctgcagggcctgagtcacagggctgccagcactgcagcctcgacctgctgcaggctcagggaaggccgacagcttctcctatcaatggtacataggctggagtagtcttcatgtgtgtggaacgtgctgcctccagaaggcgtactggcattgtctgtctctcttggtcatgggagatgcaagatgcagtaattggctctttgctgtggacgggaggcccaatatgctcctggttatgggatatgggacctccccaccaagagtgttattagtggcagttcccagaatctttgtaggatttgtctgccagctgcaggcactcaggcatcttaccaagactcccagtgtgttagctgcttcttggttagcacccggccagcgcaatgtaatcaatgtggtgggccagtgccatgctctttgggatatccagcttgtccagctctctctgggcttccttagggcatagaatacatggtttattagcacataacactgaggcaaagccaaggtccactgttattcatcctatgtgaaggcaggctctttcggatgctctttcctcgtaggaatagaaaagaatgcacttgccatctcagtggggcagagcacacacctgaggctgtgttgatccaccttgaccgagatcccgcgcctggcagggcagctgccgctgtggattctccttggtgcagcttgctgaagtccactgtcttcctccaggagtctcctatttctgcagaggccagccttggcaaactccaagaggagtccaggcgagaggaatggtcctgtgtaggcagagacgccccaggcagtgccggagctgagcttcccaggcagaccctgttgccctggatctcaccccgggtctagccctgctggcaatcccggga

SEQ ID NO: 319430 - DNA, 1237 bp, Homo Sapiens
  misc_feature (8)..(8): n is a, c, g, or t
  misc_feature (51)..(51): n is a, c, g, or t
  misc_feature (53)..(53): n is a, c, g, or t
  misc_feature (56)..(57): n is a, c, g, or t
  misc_feature (64)..(64): n is a, c, g, or t
  misc_feature (67)..(67): n is a, c, g, or t
  misc_feature (96)..(96): n is a, c, g, or t
  misc_feature (99)..(99): n is a, c, g, or t
  misc_feature (101)..(102): n is a, c, g, or t
  misc_feature (128)..(128): n is a, c, g, or t
  misc_feature (134)..(134): n is a, c, g, or t
  misc_feature (171)..(172): n is a, c, g, or t
  misc_feature (193)..(193): n is a, c, g, or t
  misc_feature (213)..(213): n is a, c, g, or t
  misc_feature (238)..(238): n is a, c, g, or t
  misc_feature (286)..(286): n is a, c, g, or t
  misc_feature (333)..(333): n is a, c, g, or t
accttgcntctctccaggacctggcttccctagaggatccaccgggctggncnggnnccctggngcnggcagtgtcccacagaaggacatggtggnggntnncttggtcctgagccccagtggcagantctggntctgctcagtagcagtcggcctcgtccccctgcaggnngcctcccgtggccagcatgtnctgcaggagggactggggantcttctccacgtggtcgctgctctnggccagcgtgctccgcaggccctccaggtctagggacctgagcatggncagcacagcctcaggctcctggtcccctgggggctgggcctgctcanccgcccgccacctcggcagggtggcctctgcggaggcagtgttggggctgcccctggcctcccgcaggctgctgtaggaagcaatcttgtccctcaggaagagaaggaggtcacaagacttctgcgccacagggcggtcgcagtcaaacaaggcacaaaaggcgaagtcaaagagccccacgtggcagagagccctcagtgcctcggtgagtggctgggctggggccacctcgggtagggccacggcataggggcagtgggtacgcggcggccccaaagtctggtccaggaacacgagggccagctccaggccctgggcgcggacctcccagtccaggtcccggctcgccgcctgcagcacagtggccacgaactgctccgtgtcctgggccgcgtcggcgtggccgtcccgcagccactcagtgaagacttgcatgaccgcccgccgtgggaagccctccgagtctacggagaagatgtgcaggagctccaggaacaggctctgccgggcctctgcatgctcagggctggtgggggcgtgcaggccctggctggacagctgccccatggcggtcactgcactcgctcggacataactctcagggtcctggaggagctgcagggccagctgaggcacctctgaagccaagagtgcgcatctgaagtcagcctgtcctccccagtgcctgctcagctgggtcaggaactcgagggcggagtccctcacctcccagcaggggtggcacaggcgtttctgcagcacagggaacagctctctgaggaactgcgggatgagggggccgagatcagagcagccgggggtcttgggtgagctcaggagccacctgagcgtggcctggaaggccttcttcagaacctggagcagatagggtgggcgtggggc

SEQ ID NO: 319431 - DNA, 1412 bp, Homo Sapiens
ttccttctgctgaccttggagggggcttcctggggggttcgctggcagagacgggcccccaggggtggggcttggtgggtagggaacgtggaggcctactcccctggtgagcggtggtcgtggtgggtgcaggtgtggacgtgagggcccctgctgctgtgggaacctcggccacgggggcggcagctgtggggtcttctccactcatgccaaactcgttgactcgggtggggtcgacgcggtagatccaccgttggtagaggtagatgaagaaaaccacatcgtcccgcaggcagccgatccggtacataacgggcatcttgatgacaaaggcgaacaggtcgtcgatgaatgtgttgagggccttgtaggtgagcatgcgccagggaaggtgggccacagacttgagcttgtagttgatgaagagctggggcgtcatggtgatgaagccgaaggtcagcaggaagccgtagagcatgctgagcacccaggagtaccagcccttgtgctccaggtacagaagactgtagacggcatagcagcccaggagcgggaagaggatccaggacaggtaccggaatgccatatcatcatacactttggtcgaggactcgatatacgtggacttgtccttgaaggataggcgggggaagattcctgccaccctgtgctctcggtccagccggacgtccatgaccttggtgatcttccagaggtcgatgaggaccccaatgaagacgctgacctggaccacgaagttggtctcgttgtccaggatgtagaggaggaccacgaatgactggaaaacgccgaagaagacggagcgcacggacaggccctccagggactgccggctgttccagaactggatatcattcttgaaggccaggaactcgaagacactgtgaacgatagacacgatgatggtgagcgccagcaggtaggggttggtctccagcagggccaccttcaccgagtcctgctcctcatctgactgctcgtacaactcatcacccaggaagttccagggcgacttggtgctctgggcagcatagagctgccagcgccaaagcgagagtgggcagaaggagacgcggagcggcaggctggccaggctctcgttgatggggtagtagtccttctgcaggttccagtagtcattgaagtagatgatgggatagtagtcaccgctcacggcgtcgaacttcacatattgatccaggggagggggcacactgcccttcacccacggcgtgtggtcgtccacgatgttgatggtgatgttggggtgccaatgggagatcacctccacaggcccatagtcctcagccctcttgatcatttctgggtccgcttctgtctctcctgtcagcaggttcttggttttctgaaatcgtctgcgcttgtatttg

SEQ ID NO: 319432 - DNA, 1040 bp, Homo Sapiens
  misc_feature (3)..(3): n is a, c, g, or t
  misc_feature (11)..(11): n is a, c, g, or t
  misc_feature (24)..(24): n is a, c, g, or t
  misc_feature (32)..(32): n is a, c, g, or t
  misc_feature (35)..(36): n is a, c, g, or t
  misc_feature (41)..(42): n is a, c, g, or t
  misc_feature (46)..(48): n is a, c, g, or t
  misc_feature (62)..(62): n is a, c, g, or t
  misc_feature (80)..(80): n is a, c, g, or t
  misc_feature (91)..(91): n is a, c, g, or t
  misc_feature (98)..(98): n is a, c, g, or t
  misc_feature (105)..(105): n is a, c, g, or t
  misc_feature (109)..(109): n is a, c, g, or t
  misc_feature (111)..(111): n is a, c, g, or t
  misc_feature (119)..(119): n is a, c, g, or t
  misc_feature (146)..(146): n is a, c, g, or t
  misc_feature (148)..(148): n is a, c, g, or t
  misc_feature (151)..(151): n is a, c, g, or t
  misc_feature (153)..(153): n is a, c, g, or t
  misc_feature (159)..(159): n is a, c, g, or t
  misc_feature (958)..(958): n is a, c, g, or t
  misc_feature (970)..(970): n is a, c, g, or t
  misc_feature (972)..(972): n is a, c, g, or t
  misc_feature (982)..(982): n is a, c, g, or t
gtngcagaatntcccccgctatcnttcaaganaannccacnntatnnntctcgaccaaaatntatgatatatcgcatccngtacttgtctngatcctntcccggntctngnctgctatnccgtctacagtcttctgtacctggagnanaangntggtantcctgggtgttcagcatgctctacggcttcctgctgaccttcggcttcatcaccatgacgccccaggtcttcatcaactacaagctcaagtctgtggcccaccttccctggcgcatgctcacctacaaggccctcaacacattcatcgacgacctgttcgcctttgtcatcaagatgcccgttatgtaccggatcggctgcctgcgggacgatgtggttttcttcatctacctctaccaacggtggatctaccgcgtcgaccccacccgagtcaacgagtttggcatgagtggagaagaccccacagctgccgcccccgtggccgaggttcccacagcagcaggggccctcacgcccacacctgcacccaccacgaccaccgccaccagggaggaggcctccacgtccctgcccaccaagcccacccagggggccagctctgccagcgagccccaggaagcccctccaaagccagcagaggacaagaaaaaggattagtcgagactggtcctcacctgctccggctcctggcgaccactacccctgcgtcccggccccctcgcctcccctccctgtcgccctttccctggacagatcaggccggggcggtgggaggcccgcctcaggtcagggcccagcgtgtgacgtaggggccggggcaggccagggtttgtttgtggaggcgctgtctgtccctctgtccctctgtgtttccagccatctcgccctgccagcccagcaccactgggaatcatggtgaagctgatgcagcgttgccgagggggtgggttgggcgggngtggggccgggngncctacggggngcccacggccgttatcatcttgtccctcgtccccctaccacactccccctcggagacc

SEQ ID NO: 319433 - DNA, 857 bp, Homo Sapiens
ggggccggggacgcaaggggtaagtggtcgcccaggagcccggagccaggtgaggacccagtctcgactaatcctttttcttgtcctctgctggctttggaggggcttcctggggctcgctggcagagctggccccctgggtgggcttggtgggcagggacgtggaggcctcctccctggtggcggtggtcgtggtgggtgcaggtgtgggcgtgagggcccctgctgctgtgggaacctcggccacgggggcggcagctgtggggtcttctccactcatcccaaactcgttgactcggggtggggtcgacgcggtagattccaccgttggtagaggtagatgaagaaaaccacatcgtcccgcaggcagccgatccggtacataacgggcatcttgatgacaaaggcgaacaggtcgtcgatgaatgtgttgagggccttgtaggtgagcatgcgccagggaaggtgggccacagacttgagcttgtagttgatgaagagctggggcgtcatggtgatgaagccgaaggtcagcaggaagccgtagagcatgctgagcacccaggagtaccagcccttgtgctccaggtacagaagactgtagacggcatagcagcccaggagcgggaagaggatccaggacaggtaccggaatgccatatcatcatacactttggtcgaggactcgatatacgtggacttgtccttgaaggataggcgggggaagattcctgccaccctgtgctctcggtccagccggacgtccatgaccttggtgatcttccagaggtcgatgaggaccccaatgaagacgctgacctggaccacgaagttggtctcgttgtccaggatgtaga

SEQ ID NO: 319434 - DNA, 413 bp, Homo Sapiens
  misc_feature (134)..(164): n is a, c, g, or t
tttgagtttaagttaaacagccatatgaatttattaaatccagactgtgttaaagggcggcggtctaggagggggagtgtggtagggggacgagggacaagatgatgaacggccgtgggcatcccgtagggggnnnnnnnnnnnnnnnnnnnnnnnnnnnnnnntcggcaacgctgcatcagcttcaccatgattcccagtggtgctgggctggcagggcgagatggctggaaacacagagggacagagggacagacagcgcctccacaaacaaaccctggcctgccccggcccctacgtcacacgctgggccctgacctgaggcgggcctcccaccgccccggcctgatctgtccagggaaagggcgacaggggggggaggcgagggggccgggacgcaggggtagtggtcg

SEQ ID NO: 319435 - DNA, 1735 bp, Homo Sapiens
ttggaggttgtataaaaatacaaatttaaaaaatgaacttttattaatcataaatacaaaataattgagtggtatttgggctcccaggggctcaaaggcctgaaaacagaaaggaaaataggagtctccacctgtgattcaatgaaaaagatgaaactcctaattttgctaatgctgcgagcataccatttgatggatacataatttaaccagatattaacaggggaaacatataagccatctcactattgtctcagtaatagactgagcttaccccaccaacccctcagaacggctttctataagcaataaaactgctccttttctcttcccatccttctaacctgggttctctctgctttatgcttaccagaagtaaatgtgccagcaagttcagtatctctgtatgttttagtattactgaatttatttgtattcactttttatgttcaagacaagaaaactcaactgaaggagtatattaaacctttcttttctccctctgaacactcatgggccattcatttatactttcaatttgcccgacttcctccattagggctcatcccaattttatttccattcctccattccccctttcacattcacaacccttgtgcaacattccttttctctcaagtcagaccagaccacatgtttcagtgcatatctatccttcatgtgctaacttgtataagaggtcagttaactgctgaacctcagtcctccttcaggacacccattttgggtgaggatgtgcaaactggggcagcaaagctacccattatgactggaagactctgattcctccttagtccacctaataaactgctacctgaatttaaataaacagcagaatctggtttttgaggaccattttctgcctcctggcatcttccattctcttgggcaccagggttcttgaccactctggctatccccagtctcttcagcctgtccactaagttcatcttcaactggccaacatcaggagggttccgggagggtctcaagccatacatctcctggaggaatgtctcagctggtcgagaggccaaaaaattttcagagagatgcactcgaggctcaaagggtaaaggagaagggcaaggtgagtgagatggtgaatttggtggtgtggaagggatagccagggatttagggagaggctggagggggttctctgaaattgggctgtggtacactttggcagagatgcctcgctcttgtagaagtttggccaagctcatggtgctactgaaggttgtagtggaatctcgtcggttggtgatggactcaccaatgctgagtctataggacaaggcaggagaattcacagccgtgttggatgagactctaccgctacttccacaggataatgaagggaacccagagctgggggtaacctgagtgatgtcagagggatgtaatattctacaggtggtgaaagtgaatgttgagtttgtgcacgacaggcactttcctgggttggcggttgcaactgtaactggtccacctgctgaagtaatgggtggcaggaagatccctgttactggcttggatgttgaaagtttctcttccacttcaagaggttgctgaacctgaaaagtaataccctcctcttcatcctcttctaaatctgagatgtgataaatagcatccccgggcaactgggtaaagcctttagtaatgacacctggtcgtggatcaaggatggttcccaagtttggttgag

SEQ ID NO: 319436 - DNA, 1403 bp, Homo Sapiens
  misc_feature (16)..(16): n is a, c, g, or t
  misc_feature (27)..(27): n is a, c, g, or t
  misc_feature (35)..(36): n is a, c, g, or t
  misc_feature (45)..(47): n is a, c, g, or t
  misc_feature (53)..(54): n is a, c, g, or t
  misc_feature (57)..(57): n is a, c, g, or t
  misc_feature (101)..(101): n is a, c, g, or t
  misc_feature (121)..(121): n is a, c, g, or t
  misc_feature (123)..(123): n is a, c, g, or t
  misc_feature (126)..(126): n is a, c, g, or t
  misc_feature (130)..(130): n is a, c, g, or t
  misc_feature (133)..(133): n is a, c, g, or t
  misc_feature (135)..(135): n is a, c, g, or t
  misc_feature (140)..(140): n is a, c, g, or t
  misc_feature (146)..(146): n is a, c, g, or t
  misc_feature (172)..(173): n is a, c, g, or t
  misc_feature (183)..(184): n is a, c, g, or t
  misc_feature (189)..(189): n is a, c, g, or t
  misc_feature (200)..(200): n is a, c, g, or t
  misc_feature (206)..(207): n is a, c, g, or t
  misc_feature (211)..(211): n is a, c, g, or t
  misc_feature (227)..(227): n is a, c, g, or t
  misc_feature (245)..(245): n is a, c, g, or t
cgccaatgtcagtccncaatgagaatngtctcggnnccagtgaannngggggnnccngccccaaagccaaaaaagccaaaaattatttagagaccaaagtnaattgatcaactcatgaatntngtnatangcnanaaatnaatatnaactattaaatacaatatagaaaagnncacagaatcnntgggncagaggggggngggggnngttncagtttgctgcattcnagtttgttatcttagggnaacaaactgaggagtcttgtggtccctctagacccctagatccacttcccagtgcatatgagtcttccccccataaggcaccttttggcaagcattaagatcggctccctgttcggccagccactccacgatgtcgtggtagcccctggcagaggctgtcaggaaggggggtctctctttctcggttccttgatgttcacgttacagccggcttcacaaagggctttggccacagagtaatagccgtgccaagcagcacagtgcagggggggtttcttcttccttgtcctggatattgggatttgagccgaagctgcacagtaactgagccacgtcagcatggccatagcgagctgccacgtggagggccatctctccagacttgtctttcacatccaaagggcatttgttctcactgagaaatttcaaggtatcgacgtggccatgccgagcagcccagtagacggcattggacccgcccttatcctggacatcgattctcgagcctcttttaatgagcaactgtagtatttgaatattcccacagccagcagcaatgagtaatggaggtgtcccgtgcttgttgggttggttaacatcatagttggataatgagcccagaaggtgctgcaggcctgggacattgtcatcgttgatggcatggatgatggctttcatcacaaaggagtcttcctcatccagagtatcatcgcttctggcaacactcatgttacttctggacaggaatgacctggataatctttggcacagtgatatcaagcgaacggattgtttccattttttccgggctgcaaacttcttgaatttctccatgtttactgctgatgcttttctactaagtgcctgttgtgtatctttaggcttgatccagggatgctgcaaactatcttgaattgtcattctcttctttggatccttgaccagaagtcttcttatgaaatctttggctagggcactggtattactgaagtattcatcctcaaattcgtagttgacagcggatacatttgctaacgtttcttgcttagtgtctccaagaaatggggaggccccacttaggaggatataggttattaccccgatactccacatatctgcctcaagaccaagaggttcatagttgactatctcaggagc

SEQ ID NO: 319437 - DNA, 1913 bp, Homo Sapiens
  misc_feature (347)..(347): n is a, c, g, or t
  misc_feature (598)..(598): n is a, c, g, or t
  misc_feature (836)..(836): n is a, c, g, or t
  misc_feature (882)..(882): n is a, c, g, or t
  misc_feature (921)..(921): n is a, c, g, or t
  misc_feature (927)..(927): n is a, c, g, or t
  misc_feature (929)..(929): n is a, c, g, or t
  misc_feature (936)..(936): n is a, c, g, or t
  misc_feature (942)..(943): n is a, c, g, or t
  misc_feature (1108)..(1108): n is a, c, g, or t
  misc_feature (1165)..(1165): n is a, c, g, or t
  misc_feature (1221)..(1221): n is a, c, g, or t
cgctggtcccctcagagggttcctgctgctgccggtgccttggaccctccccctcgcttctcgttctactgccccaggagcccggcgggtccgggactcccgtccgtgccggtgcgggcgccggcatgtggctgtgggaggaccagggcggcctcctgggccctttctccttcctgctgctagtgctgctgctggtgacgcggacccggtcaatgcctgcctcctcaccggcagcctcttcgttctactgcgcgtcttcagctttgagccggtgccctcttgcagggccctgcaggtgctcaagccccgggaccgcatttctgccatcgcccaccgtggcggcagcnaacgcgcccgagaacacgctggcggccattcggcaggcagctaagaatggagcaacaggcgtggagttggacattgagtttacttctgacgggattcctgtcttaatgcacgataacacagtagataggacgactgatgggactgggcgattgtgtgatttgacatttgaacaaattaggaagctgaatcctgcagcaaaccacagactcaggaatgatttccctgatgaaaagatccctaccctaagggnagctgttgcagagtgcctaaaccataacctcacaatcttctttgatgtcaaaggccatgcacacaaggctactgaggctctaaagaaaatgtatatggaatttcctcaactgtataataatagtgtggtctgttctttcttgccagaagttatctacaatatgagacaaacagatcgtgatttaataacagcattaactcacagaccttggagcctaagccatacagtagatgggaanccacgctatgatactttctgtgaacattttatatttgttatgatgnacattttgctcgattggagcatgcataatatcttggggnacccgngnggaattncagctnncctcatgcaaaaggattttgtatccccggcctacttgaagaagtggttcagctaaaggaatccaggttgtttggttggactgataatacctatgatgaaaagagttactacgaatcccatcttggtgccagctatatcactgacagcatggtagaagactgcgancctcacttctagactttcacggtgggacgaaacgggttcagaaactgccaggggccncatacagggatatcaaaataccctttgtgctagcccaggccctggggaatcaggtnactcacacaaatgcaatagttggtcactgcatttttacctgaaccaaagctaaacccggtgttgccaccatgcaccatggcatgccagagttcaacactgttgctcttgaaaatctggggctgaaaaaacgcacaagagcccctgccctgccctagctgaggcacacagggagacccagtgaggataagcacagattgaattgtacagtttgcagatgcagatgtaaatgcatgggacatgcatgataactcagagttgacattttaaaacttgccacacttatttcaaatatttgtactcagctatgttaacatgtactgtagacatcaaacttgtggccatactaataaaattattaaaaggagcactaaaggaaaactgtgtgccaagcatcatatcctaaggcatacggaatttggggaagccaccatgcaatccagtgaggcttcagtgtacagcaaccaaaatggtagggaggtcttgaagccaatgagggatttatagcatcttgaatagagagctgcaaaccaccagggggcagagttgcacttttccaggctttttaggaagctctgcaacagatgtgatctgatcataggcaattagaactggaagaaacttccaaaaatatctaggtttgtcctcattttacaaatgaggaaactaaactctgtggaagggaaggggttgc

SEQ ID NO: 319438 - DNA, 966 bp, Homo Sapiens
  misc_feature (184)..(184): n is a, c, g, or t
gaattttccccccagggtgcccccaagattattaagcagtgccccaatcgaggcaaaaatgtcccttcataacgaaatataaaaatgtttccaggaaagttatcatagcgtggttttcccatctccctgtatggcttaggctccaaggttctgtgagttaatgctgttattacatccccgatcngtttgtctcatcttttagatactttctggcaggaaagaacagcccccactatttatatacagttgaggaaattccatatacattttctttagagcctcagtagccttgtgtgcatggcctttgacatcaaagaagattgtgaggttatggtttaggcactctgcaacagcttcccttagggtagggatcttttcatcagggaaatcattcctgagtctgtggtttgctgcaggattcagcttcctaatttgttcaaatgtcaaatcacacaatcgcccagtcccatcagtcgtcctatctactgtgttatcgtgcattaagacaggaatcccgtcagaagtaaactcaatgtccaactccacgcctgttgctccattcttagctgcctgccgaatggccgccagcgtgttctcgggcgcgtcgtggctgccgccacggtgggcgatggcagaaatgcggtcccggggcttgagcacctgcagggccctgcaagagggcaccggctcaaagctgaagacgcgcagtagaacgaagaggctgccggtgaggaggcaggcattgaccgggctccgcgtcaccagcagcagcactagcagcaggaaggagaaagggcccaggaggccgccctggtcctcccacagccacatgccggcgcccgcaccggcacggacgggagtcccggacccgccgggctcctggggcagtagaacgagaagcgagggggagggtccaaggcaccggcagccctcgtgccgaattcgccacccaggcctcgcttcttt

SEQ ID NO: 319439 - DNA, 445 bp, Homo Sapiens
cctggtgcagtcatatatttactgtatcagatttccagagggtgtggctgttagtgtgtctctctactcccaggagccccatgtctatcaggatctaccaccgctccactggatgtgccactttgtccatcaaaatgctcaccatggatgtgattcagcatgagagaggtgggcagagtggggaaatgcagtgaaatcttcaatctgagccaaggctatagacgtgaagtgccccggagagtcgggctcccaaagaactccttccagcagcaatgacgacttgggttctttgccttgggacctcacgggtgatgaggggagctcccaaaccttgagctggcttcaggagaaatcaatacatattgggccttttcttctgggacatggagttatccatgatttgcatttgccagtcatgtcaccaagggtggtctctttgccatta

SEQ ID NO: 319440 - DNA, 1413 bp, Homo Sapiens
  misc_feature (21)..(21): n is a, c, g, or t
  misc_feature (29)..(29): n is a, c, g, or t
  misc_feature (60)..(60): n is a, c, g, or t
  misc_feature (75)..(202): n is a, c, g, or t
gtccaggagttcgaaaaccancctgggcnaacatggtgaaaccctgtctcctactaaaantacaaaaattaagcnnnnnnnnnnnnnnnnnnnnnnnnnnnnnnnnnnnnnnnnnnnnnnnnnnnnnnnnnnnnnnnnnnnnnnnnnnnnnnnnnnnnnnnnnnnnnnnnnnnnnnnnnnnnnnnnnnnnnnnnnnnnnnnnaagtgagactgtctaaaaaataataataataaaaagcattttgaaattagtcgcggtcaatgcaattctactctttggaatccgtttagctaaatgaatgtagtgctcttgttgaatggaaacaggtgataggaaatgcctaccatttgactcaatatggataatcaagagttgctcaggatgcttggatctgggggtagattctcattcatcattgccctggcacatgtcaattactacataaaaggtcaaatgcaatgtcaaatccaaagcctcaggaggaaagtgagttcagttcccaagagaacagcaatagctcaacaatgtaaaacttcatctagagtatatcggcattaaattagtgctgtcgaaacaatacgttgaggaattacagtaacacctggaagttccttctcatgtacatataaatagaatcatggaagctttttatattacctgttttatggccttatagaattaatgaaccaaatgaaaactgaatctccattccacaatcccatcctttatttctattcttattttcaaggtagtattaagtgtccatatttctcaagccacattcaaggaaatcatgtcttaactattttggatgttgcctctccttcatcttgtacatgaaactccagcagatttaatattggcatccatcatctagtcaaacctctcacatgttcttcaaatcaatcaaatttgggattctcaacattttctgtgtcaataaaaggtgtggaattagtagattcgatgaagacctgtttttccttgccacattggacttccagacgccatttggattgggtttagaagatggggaaatttagaagacgtttcttggcctgagtctcttaagagtagagatgcagaagagagagtgagaccacgaagagactggctgttgactgcagggcaccaccagccaccttggtggtggcattagttggatttggggccaacccagagttggaagtactctgggaggagttacttgaagttccagttgttgtttcactggaataaatctgcgtgggtaggagcagtgccagcagcagcagccccagcccgagcctggccaccattgctctgcccatgtcccctccgtcggtgcgcggcgcgtctagcaggatgctgggtgcttggagaaccgctggctccgggcggatcccgggaattccggaccggtaccagcctgc

SEQ ID NO: 319441 - DNA, 1597 bp, Homo Sapiens
  misc_feature (8)..(8): n is a, c, g, or t
  misc_feature (1036)..(1044): n is a, c, g, or t
cacaagtntccagcatgcctttggaagcccttctttattgggaaataaatacagagttaaacaggtgggccggccaacatctgtggctttggaggccaaaaggaaggagtctgacttgctcagaactcagatctccatgagctggtcattccccacgatcacctcattcactcgtttagctttggcttcaatcctctggccacttccaatcaagcagtccttgatgtctgcacccttctcgatcacagcattgttgcagatgacactgccttggatattgcttccttcctccacagtgactgagttcatgagaaggcaattggtaatagtcactctatcttttatgagacaggatgagccaatgactgagcgcttaatggatgacttctctccaatctgtgtctctggcccaatgaggctgtcaactccaaccaggtgtttgctgacaatctgggctgacgaatggactggtggttcttctggacagagagcagacagcaatttgggcacctgtctgtttgcttccatgtagagtcccagtgtgctcactcgagagcagagcccctctttcatgatgtggacatagcagcgcacctgtgatctggacaagtcttcccacctgtctcctcgacaggcattccagcaggcatcatagggagccaggttcagtgtattggcttcttttataaaactgtagatatctaaggacttcagctcctttttctttagatcctcctctttttcttcttgtccctgttgtgaggaagctgaggaaaactgttttctcactaaatatggaatcagttcactccggatagaagttattgacccattttccattaggaaatccacgatgtattttttcaaacagtagaggtgggcatccacaagacccgtgtggaaacgtattctaggatgcttctgtaggatggatcccttaatgaccagctcttcatccaagtctgcttcattagccatgaagagcagcctctttcctgtgctgtccactccaatgaagtcacgctgctccactgcnnnnnnnnnccccttttgaccgggaacaggttctatgctatcttggccttttctcatcaacatagcaagtgatgcatcataagctctaaacaggtccacaacctcatgtaaggcaacgtctgttatcagatcacagctcagcaccagcacatctgtcttaagttttggatatatgtagcgcaaagaatctgcagttcccatgtcagcgtcatcaggaatacacacaatatctggcttcattttcatcttgaattctgcacatagagccttttgaacatccctggttgtaaccacaatgacttcttcaaatccaacacgctcaagcaggttcaatgggtaccaaattaaaggtttgttcccaactggaagcagaggtttgggaatgctggaagttaggtctgtcatccgagatcctccacctactgccatcactactgcttgaaattccatttttacaaaccgggtcagccagcttgtgtgcggcctggcagggcagaagtcacagctataactcagctccccgcacgccgcaaccgctcccagcgatctccacgccgcctct

SEQ ID NO: 319442 - DNA, 1232 bp, Homo Sapiens
  misc_feature (72)..(72): n is a, c, g, or t
  misc_feature (78)..(78): n is a, c, g, or t
  misc_feature (665)..(665): n is a, c, g, or t
  misc_feature (669)..(669): n is a, c, g, or t
  misc_feature (672)..(672): n is a, c, g, or t
  misc_feature (674)..(674): n is a, c, g, or t
  misc_feature (680)..(681): n is a, c, g, or t
  misc_feature (684)..(685): n is a, c, g, or t
  misc_feature (688)..(732): n is a, c, g, or t
  misc_feature (753)..(753): n is a, c, g, or t
  misc_feature (792)..(792): n is a, c, g, or t
  misc_feature (804)..(804): n is a, c, g, or t
  misc_feature (811)..(811): n is a, c, g, or t
  misc_feature (818)..(818): n is a, c, g, or t
  misc_feature (822)..(822): n is a, c, g, or t
  misc_feature (847)..(847): n is a, c, g, or t
  misc_feature (891)..(892): n is a, c, g, or t
  misc_feature (895)..(895): n is a, c, g, or t
  misc_feature (916)..(916): n is a, c, g, or t
  misc_feature (935)..(935): n is a, c, g, or t
  misc_feature (994)..(994): n is a, c, g, or t
  misc_feature (999)..(999): n is a, c, g, or t
  misc_feature (1051)..(1051): n is a, c, g, or t
  misc_feature (1073)..(1073): n is a, c, g, or t
  misc_feature (1076)..(1076): n is a, c, g, or t
  misc_feature (1078)..(1078): n is a, c, g, or t
  misc_feature (1085)..(1085): n is a, c, g, or t
  misc_feature (1113)..(1113): n is a, c, g, or t
  misc_feature (1117)..(1117): n is a, c, g, or t
  misc_feature (1127)..(1127): n is a, c, g, or t
  misc_feature (1186)..(1186): n is a, c, g, or t
  misc_feature (1188)..(1189): n is a, c, g, or t
  misc_feature (1200)..(1200): n is a, c, g, or t
  misc_feature (1215)..(1215): n is a, c, g, or t
cccgggatagggcctggtgtgcggtgggcttgcagcactcagtgatggtcaggccaggcaggttatgtgttnccctcnaccaccctagcgtccccaccctccccaggcagactcttcccagcagcaagcggaagcccgggcagaggctgctgtcataggcagaggcccccgctgatgccggccctgcttgcccctcacactgccaggtcttcacgtgctctgtgtgccaggagacattccgccgaagatggagctgcgggtgcacatggtgtctcacacaggggagatgccctacaagtgttcctcctgctcccagcagttcatgcagaagaaggacttgcagagccacatgatcaaacttcatggagcccccaagccccatgcatgccccacctgtgccaagtgcttcctgtctcggacagagctgcagctgcatgaagctttcaagcaccgtggtgagaagctgtttgtgtgtgaggagtgtgggcaccgggcctcgagccggaatggcctgcagatgcacatcaaggccaagcacaggaatgagaggccacacgtatgtgagttctgcagccacgccttcacccaaaaggccaatctcaacatgcacctgcgcacacacacgggtgagaagcccttccagtgccacattatgtggaaagacnttcnganancaaagnnagnntgnnnnnnnnnnnnnnnnnnnnnnnnnnnnnnnnnnnnnnnnnnnnngagttctgtgaacagcgcttnactgagaagggacacaacaaaaggaacgtaacaaacaancatcaggagaancggcccnacttctnccanatatgcggcaagaccttcaaagccntggagcaactgcgtgtgcacttcagacggcacaagggggtgagnnagnttgagtgcaccgagtgtggcnacaagtttacccgacaggnccacctgcggaggcacatggagatccacgaccgggtagagaactacaacccgcggcagngcaantccgcaacctgatcatcgaggacgagaagatggtggtggtggcgctgcagcntcctgcagagctggaggtgggntcngnggaggtnattgtggagttcctggctcagggcgtcntgtnttccctgctncccttccagagactgtgtgcagaggagagcttcaccggaccagggtcatgagacatccntnntcatcacagcngctgtccccgaggantgtgacacatagcccac

SEQ ID NO: 319443 - DNA, 1741 bp, Homo Sapiens
  misc_feature (906)..(1018): n is a, c, g, or t
  misc_feature (1092)..(1092): n is a, c, g, or t
  misc_feature (1144)..(1144): n is a, c, g, or t
  misc_feature (1152)..(1235): n is a, c, g, or t
  misc_feature (1261)..(1261): n is a, c, g, or t
  misc_feature (1263)..(1263): n is a, c, g, or t
  misc_feature (1316)..(1316): n is a, c, g, or t
  misc_feature (1348)..(1348): n is a, c, g, or t
  misc_feature (1379)..(1439): n is a, c, g, or t
  misc_feature (1443)..(1566): n is a, c, g, or t
  misc_feature (1625)..(1625): n is a, c, g, or t
  misc_feature (1640)..(1640): n is a, c, g, or t
  misc_feature (1646)..(1646): n is a, c, g, or t
  misc_feature (1655)..(1655): n is a, c, g, or t
  misc_feature (1667)..(1667): n is a, c, g, or t
  misc_feature (1689)..(1689): n is a, c, g, or t
  misc_feature (1706)..(1706): n is a, c, g, or t
  misc_feature (1721)..(1721): n is a, c, g, or t
tgtgttcccataaaactttatttacaagagcagggtgccttggaagcagcccacggctgtagttcatagaccctgtctgctctgaagtagatgatgcctgagtgcccccgaggtgggttgctggtgcctgccttgctgctgtgagtgccaatggtgcccaccttgctgctgtgagtgccagtggtgcccaggacggccctgcagggatggcatcgagtccactctctgagccgtgcttgccggagtctgagtgggggcactgtttgtcacctccccatttctctgttcatgtgtttctcattcttcttccaccaccctggggactcagcaagagtgcagcttgccaggtcctcccactgcagccagggcctgggaacttgcatttagtgatgcgtgtgtccctgactcttgagcaggtgttcccaggggtttctgtgaaatataattgacaagggctttgggagggagagaacatccaattccacaggatcctgggagctacagcctcaacatctatcaaacagcttttgtttttaaaaaatagcttccatgtgagggttcatttcagtgatgttgaaaattgtgaaagaaaagagcatctcagaggatgagcaccgggggctccaaaaatgaatcatgggcaacccagtgggtggcaggcaccacaggtgtgcggaggagacgcagccgtttattgtgaagctgggaagcaggtggggaatagtctgtgcagcccggcacccagcgaagggagaaatacatttgggggagagtttgggggcattcgccaccatgcatggtgatgcttctgaattgtctgaagtgaagatgataatggataagaaccagaaaagtgagagctaaacaaccgccttcagaggacagcacacatggagtcagcatcgnnnnnnnnnnnnnnnnnnnnnnnnnnnnnnnnnnnnnnnnnnnnnnnnnnnnnnnnnnnnnnnnnnnnnnnnnnnnnnnnnnnnnnnnnnnnnnnnnnnnnnnnnnnnnnnnncatatctctgtgcatccgtgtgcactgatgtgtgcgtgcattggcatgtgcgtgcatccatgtgtatatctgtntgtgcatctgtgtgtgcatatctctatgtgcgtgtgcatcggtgtgtttgcntatctctnnnnnnnnnnnnnnnnnnnnnnnnnnnnnnnnnnnnnnnnnnnnnnnnnnnnnnnnnnnnnnnnnnnnnnnnnnnnnnnnnnnntcatgcctctactgtctccagccatncncgcagagcagcagcctgacgccagcagatcacgtgcaggtgggcttggctgangggaggtaaggaggctcagctgggctgtctgncctccaggacaaccttggcactctcctgccnnnnnnnnnnnnnnnnnnnnnnnnnnnnnnnnnnnnnnnnnnnnnnnnnnnnnnnnnnnnnattnnnnnnnnnnnnnnnnnnnnnnnnnnnnnnnnnnnnnnnnnnnnnnnnnnnnnnnnnnnnnnnnnnnnnnnnnnnnnnnnnnnnnnnnnnnnnnnnnnnnnnnnnnnnnnnnnnnnnnnnnnnncctcccatgcacgtcatctaccccattaactgcagagaatatatgggattttgtggcangacagttcgacgcancttggnttctctccncaggcagggctntggctagggaatgggctcgagnagattctgggcgtgctntagcgatgagttttnagcactcgattactggagac

SEQ ID NO: 319444 - DNA, 933 bp, Homo Sapiens
aggtagcgaggcctgggtggcgaattcggcacgaggggacggagcccttgatgacgagggccacagtgggattaaaaagaccactgaggagcaggtgcaggccagcactccttgcccgaggacagagatggcgagcgcccggattggggatgagtatgcggaggacagctctgatgaggaggacatccggaacacggtgggcaacgtgcccttggagtggtacgatgacttcccccacgtgggctacgacctggatggcaggcgcatctacaagcccctgcggacccgggatgagctggaccagttcctggacaagatggacgatcctgactactggcgcaccgtgcaggacccgatgacagggcgggacctgagactgacggatgagcaggtggccctggtgcggcggctgcagagtggccagtttggggatgtgggcttcaacccctatgagccggctgtcgacttcttcagcggggacgtcatgatccacccggtgaccaaccgcccggccgacaagcgcagcttcatcccctccctggtggagaaggagaaggtctctcgcatggtgcacgccatcaagatgggctggatccagcctcgccggccccgagaccccacccccagcttctatgacctgtgggcccaggaggaccccaacgccgtgctcgggcgccacaagatgcacgtacctgctcccaagctggccctgccaggccacgccgagtcgtacaacccaccccctgaatacctgctcaccgaggaggagcgcttggcgtgggaacagcaggagccaggcgagaggaagctgagctttttgccacgcaagttcccgagcctgcgggccgtgcctgcctacggacgcttcatccaggaacgcttcgagcgctgcctttgacctgtacctgtgccccaggcagcgccaggatgagg

SEQ ID NO: 319445 - DNA, 928 bp, Homo Sapiens
  misc_feature (142)..(142): n is a, c, g, or t
  misc_feature (210)..(210): n is a, c, g, or t
acaggtaccaggtccaaaggcaggcgcttgaaggcgtttcctggatgaagcgtccggtagggcaggccccggccccgcagggttgggggaacttgcgtggcaaaaaagctcagtttcctctccgcctggctcctgctgttcnccacgccaagccgttcctccctcgttgagcaaggtattcagggggtgggttgtacgactcggcgtggncctggcagggccagcttgggagccaggtacgtgcatcttgtggcgcccgagcacggcgttggggtcctcctgggcccccccaggtcatagaagctgggggtggggtctcggggccggcgaggctggatccagcccatcttgatggcgtgcaccatgggagagaccttctccttctcccccagggaggggatgaagctgcgcttgtcggccgggcggttggtcaccggggtggatcatgacgtccccgctgaagaagtcgacagccggctcataggggttgaagcccacatccccaaactggccactctgcagccgccgcaccagggccacctgctcatccgtcagtctcaggtcccgccctgtcatcgggtcctgcacggtgcgccagtagtcaggatcgtccatcttgtccaggaactggtccagctcatcccgggtccgcaggggcttgtagatgcgcctgccatccaggtcgtagcccacgtgggggaagtcatcgtaccactccaagggcacgttgcccaccgtgttccggatgtcctcctcatcagagctgtcctccgcatactcatccccaatccgggcgctcgccatctctgtcctcgggcaaggagtgctggcctgcacctgctcctcagtggtctttttaatcccactgtggccctcgtcatcaagggctccgtcccctcgtgccgaattcgccacccaggcctcgttc

SEQ ID NO: 319446 - DNA, 1856 bp, Homo Sapiens
  misc_feature (52)..(68): n is a, c, g, or t
  misc_feature (70)..(71): n is a, c, g, or t
  misc_feature (75)..(255): n is a, c, g, or t
cttggggggcggcgcgcgcgccccaaggaagagtttgttagaaatttttttnnnnnnnnnnnnnnnnncnnccannnnnnnnnnnnnnnnnnnnnnnnnnnnnnnnnnnnnnnnnnnnnnnnnnnnnnnnnnnnnnnnnnnnnnnnnnnnnnnnnnnnnnnnnnnnnnnnnnnnnnnnnnnnnnnnnnnnnnnnnnnnnnnnnnnnnnnnnnnnnnnnnnnnnnnnnnnnnnnnnnnnnnnnnnnnnnnnnnnnntttttaaaacaaaaaggtagatttaatgcagtaacaataatctgaggataaataaatccacgacagactttaaagtttgcaaatctgtttcctttctttgcagagaaaatggttttctgaaagcacacaggactgaagatgtcaaaacaaaacttaatttcttagtctccaggtgacacaggcttggtcctctctgctgccctccgaacacttgtcactggccaagatggtagtttctcttgtttagctcaggatggatgttagtttcaagaataactggatggtttgtttcctgaatcatcttcttgtgagcccatactcttttgtacaaactgagggttcactgtgatctcctggtccatggctttcagccgctcatccagctcaatgcacttcagcatctcctgatcaatgttatgaagcatggctgggttattatatttttcagggttatcatggaaactgaccataccgtccttctggttaatacttgcaaaaatctcaccatcttctatcatgtgcagaacgtatttctctgcctcctgaggtccagacaactgcacacgacttgccatatcttgtaatgatagagttaaaaaggtctttgttagcctctgaatattcttcttataaagagatgacaagcattgcttcaccagccccatgttgttatcgcgagtgaaggtttcactgtgcttattcaccaggtttcggagttctgaggggttgttggttgaatacacttgtgctaactcgtggtatgcattgctaagaggcttaatgaatctacccacaatttgagatgtatattttggtagctgttgtactttgccaagtaatatcaaagacactaaaatatactttttatatgattccaacatgatatgactgaccgccatggcaggagtagttatagcctgttcataaaagtagagagctctttcaaagttcttcagcccagtatagatcatccctccataataatagtaacataaaaagtgttttgcatcataggctccattctctttacagatatccatcatatccacgtcaagatatggaagggcaggcttaaagcattttgctagcaaacaaagctggcagagatcagcatgtattgaggtcagctggtttgtattcatctgcatcttgtctatggcttgcttaaggatgccaattcctcgcaggggctgttttctttccacaagtgcatttgttagctgatggcaaagcccagcaaaagtgtctgttgcatatcgaatgtgctccccattacaagtgctgatgaagagctgaacctgtgagaatagcgtttcgaagtcaggaacactgggcatagaaaacttcacaaacaaaacagcaaggacgcccaaggagtgttcttgtacatccagagccccgagcacagtgtccagatgggataagttcttcgcaaggagttccccactcttgttgatcagttcacaaagctgtgtcatttgcccttgagctgagagctgtcggacactgttcacgaactgctccagggcagacgccatgttttcccccgggcggcccgagcggcgaaggcagcacgcgcgggaaaaggctgccgctctccc

SEQ ID NO: 319447 - DNA, 1223 bp, Homo Sapiens
gatccggtcgcccagcagcatcgcacagctccacatactccttcttcttcacccgattaaggtccttcatgcagccggtccaggaggaatgacagcagctcctgagagtcatgctgctggtagccccagaaattgggatgcaaaatggccaaccttgttcttgaacacatgtggcacaatggagcggtggtggccagaccacgctggcttcaccaggtctgcataggcctctgcgatctcacccttcatgcccagtgggttgcggaagttgagctcctccaggtagcggttgttgaggaagtactcggtgagctgtggcacattgctgaggcactgcagggccgagttcatgaagcacgtgttgcccagattggtgaggccacagatgcctggctgacccttgaagtcctcatcctcttccgacatgttgttgttcatgacatgcagctgtgcgctgggccaagtgccatctttcttgcgggtctccatgatgatcaactgcccagtctcaagggccgcatcgagaaccgtgatgtgtgtgtcatacaacctatccaaagagccttctgagttcttggcccaaagccgagtgtcttcctggggctccaccagaaaccgctcccgagctgtgcgcaatactaggccaatagaatcggtatggctgaactgaacagtgtgagatttgcccaaatcattgtgccggacaagcagcagttctactgggtacacttcgaccttctggatgttgggcagctctatgaccttgcgttcaatgggtggctggccatgctctagaccataccagctgaccaggtaatgccaagcagctgctgggagcagcacataatcctcgccttccaccagtccctccttgaggcgccagtttatctcatcttgaaagagtgtggcattgttgatgcagccagggaaggtgctggagtcctggtcccctccctgcacgtatgcctcccactgcttataccagtgcttctccacaaggaaccagctttcgccggcccgcagtggacgttctcgcccactctcgccgttttctatctggcgccactggctgtccaggcctggcagctcctcgtgctgtggctctctatcctcagtcaccgccgctgccgccgccacagccgccgcagcagcagctggatttgctgcgaccgtcgcccggacggcgtgggtcgacgatatcccaaggaattcgggaccggtac

SEQ ID NO: 319448 - DNA, 939 bp, Homo Sapiens
  misc_feature (317)..(317): n is a, c, g, or t
ttgtctccactccattgttttattatgtacaaacgctacagaacgagggggacagacacgcgtggggtaagaagggcctggtgggaggagttcacagagcagacggtgcactgggaccaggagagcagaacacaggccataactatagggcaggtggggcaggaacgggttaaaaacgagatccaagccagccagatcgcaggaggtgcgggggcgtcgtcccccttctgttctccccccaaggtcacagtgcatgcaataaaatatatatacaggagctagatccgtcctctgcaggggctctgagggtccagagnctctcttcgggtggcgggaagccagtggcgctccctggcggccaggccgggctggagccacatgcgtcgggggagcgggggtcagtcccagccgttgtctttgatcatgtggttgagttcaatgatgttcttcccctctttgtacttctggctgctctcaaaggcctgttcatatttccagcccaaagtggtcttgcagttctcgcagtggatgtcggcgacagcatggaggccggtcagcagcacccgctcctcggctggcccgcagcccacgttcaccactgagttgaagaggtaggcacgcccctgactgccctggaaggacttggagatgaggtcgtcgtggttggccaggtgagcgcggcagttggcacagctatacctccggtgacaatcatccaagtaggcctgaaacgtcttgggctttgaaatccgcaccatggcgggggccgggggcagtggccccacgcggggagcggcccacggggagcagagggagcccagttcctcgcctgggcgcgcgggggcccggtccgccggggtgggctggcctgggagttgggggcgctcctggcgggcgccgtcccccccgggcccgggttcgcaggcgcctggacttgtt

SEQ ID NO: 319449 - DNA, 1781 bp, Homo Sapiens
  misc_feature (73)..(73): n is a, c, g, or t
  misc_feature (129)..(129): n is a, c, g, or t
  misc_feature (220)..(220): n is a, c, g, or t
  misc_feature (256)..(256): n is a, c, g, or t
  misc_feature (290)..(290): n is a, c, g, or t
  misc_feature (312)..(312): n is a, c, g, or t
cggcaagggctgcgcggcattttattttctgaaccccccacagcaggggcggccagtcctgctgccggcagangtttcagtcttcggagtttgaccttctggcccaaggtcatcacagccacaggcggnaggctctggggaaaggtccagttcctgggatgctggcccctaatgatgggcccatctctccagtgccgcccttccctcccgcctggtacangagttctggagccacggtcctgagtctacagaacancccggtcagcctcgtcccgcggtgcaagctaggnctggcctccctccctgcctgtncttggcccggccacatcactccctgcgtttcttcttcttctccggctcctggacattggccgcctttgctcgggcactggtcaggggccgaggtgtcctccttctctggcgagcccctctctggccacggcccctgggctgatctcggagcagggcccgctcagctgtgcctggctgctcaccagcctctgcccgcgcctcggggtcggcccctacacccctcctcctgctcctcttcctctccatgcccgggctcgggggctccttctcacctttccctctctcctgctgcaacctgagcagacgcttctgcttcttcgtcttcttctgccgcctcccttcaagcaggcgcctgcaggccttctctgggatctcatcttcagggaaaatgcctcctgccaggtcctgcagcttccggatcactctgtagagacgctttctgttctgagaaggggtgctctggcggctggccatttcaaacagtctgttagcaactgcctcgtagtcaaactggaggacggggccgccactgtccctgtcgtcacctgcctgctcctcaccagcctcaggttcagccctgcagatggagcctgcgggcggcttctcagacctcttctgggacagcgcgtctccacgctcaccgccctcagaggactcatcactgtccgacgccacctcctcatcctgtgtgtccagttcattcaggaggtcttcaatggcaagcggggcctgctccacaatcgtctcaaagatgcctcgagtgatgttgttcaaaaccaaggaatccttggtccgggcagcgattctgcagaaggggtcgatgaacttcaggttctggtctgccgtaagctcctcggcgcccactttggtcagctcctccaggaagatctcgatgaagtggctcttcacaccgttgggggcctggctgctggggtgcaggatctcagtcatcagcagctctagcagctcctcgatctgtctttcttcccagccttgcatcttcagaaccttcaaggactcgttcaggaccatccgcatgagcatgtagaatttatccaggcgcagcctgtcaatgcccgtccactcgcgattcatggtctgccagaaggcctgaaggaacaggtgctgcgcctccgtggtctgaaaagcatgaacgagctgggaaatagtccttcctaattcttcctggaggagtggcttgtcctgcatccacatgcaataaaacagtcctttccacaccttcagcagctcgtcgtgcgtaaaaccacctgcggcccgctgagtcctggcgacgatgtatttccggagcttcctcaccgcccggtcccgggtcacctgctcattccccgccaggcgctgagccagctggatctcaggcgggagctgcacgcgcgaaaccatgacgccgacggccgagaccccctgtcccggagtcgcctggtacccagcacactgagcacgcgccatcc

SEQ ID NO: 319450 - DNA, 2109 bp, Homo Sapiens
  misc_feature (79)..(79): n is a, c, g, or t
  misc_feature (173)..(184): n is a, c, g, or t
  misc_feature (594)..(608): n is a, c, g, or t
  misc_feature (894)..(894): n is a, c, g, or t
  misc_feature (907)..(908): n is a, c, g, or t
  misc_feature (933)..(933): n is a, c, g, or t
  misc_feature (938)..(938): n is a, c, g, or t
  misc_feature (951)..(951): n is a, c, g, or t
  misc_feature (977)..(977): n is a, c, g, or t
  misc_feature (980)..(980): n is a, c, g, or t
aataacaagcggcgcgggggagagagagatatttctccccgagagaggcccctccttaaagggtgtccccaacggcganccccccccgagggttgtattccctgcttgttggggggaaggcaccagactgtcagtggtggcccccagcgggttgtccccgtcttatcccctannnnnnnnnnnncaccgccgcggcggccccaccaaagggaaaaagggtggtgttggaaaaaaggttttcctggggggtggccgcgaagcgcggcccccccacagggagtgaggttggtgtgcaactaatatgcgggcgggggacgggatgacattgagcggggctagtcccgagggggtaggtgggtttggagggggtagcggaatggtgttgttggtgtgttttactagataagacatctttattacttaatctttaaaacagtcgcttgcgtattcaattctgaaactgtttgttttctttccctcccccgcactcccgctctgatacacaaacttgttgtaaaaataatgcagaaacatatacgtcaatctaagtctctgaaatatggccaactctacctcgccgtatatccaacattnnnnnnnnnnnnnnnggctgtttaagaatagaactcattcccggtttccaccaaattatttccctaattcttaaatcctcaaataagttcttaatctccaaagtctcggttgtgggaaaaacattaatttgtgcagtccaacacttacatactttcttgacggagggggaatcctgtccctttaaacttaatgagggcagcggccaggtccttctgggttcccgtataattgcttagaacttaacatttagttttcatagttcttggtttacagacgggtccgacagttagatacttttanttcctcctctttnntcctgggcgctgtcctccttttttnttgcnacccaagctaggnggcccagaattcatcttgcctcccangcnccctttcctcttccctccctggctgggcgggccccctttcctcttgcccccaggcccctgccggcctccctttctcttgcccttctggctcattttcctcctcttggcgggctcctcctggtcctcctccctcatctgcttattggtggccctagtcacatccagctgaggcttcttgctgttcatgacacgaagcagctccaactggttctttttctcggctgcaaagtccccgaaaaggggttgaaacttccttttcttgccggagccccggggcaccttcctccttgggggaggcgctcctgaaagcgccccacagaggcggtggagaccttggccacttgcatggcgcggcccagctcctccttactctggtgtccggtagggtgcaagccggccgcgctgggcagctgcatcttgtgcgcgcgggccaggttacgcagccggttcagctcgttcttggccaccctttccttcttggcctgaatccgcttggcgaactggtcctccaaggggtcggcattgccgggcacctcaatcagccattctttggtgtcgtcccgggcgcgctggtagccccagcgccgccgccactggccactcacctcgtcccacaccaggttggtcttcttcttgggacggatgcccttgaggcgcgcgaactgctgccagcgtgtaagtggccgcggtcggggcagaggcttctctcgcggcaggcgtgtggtgggctccggcagccgcgccactatcgcctcttccacgcgctccgtgggcagctgccacagctggttgatgagcagttgcgtgttgtcccgcgccagggcctgtagctcggcctccggcgtgggtccggcgcaccgcagcccggtcggggggttccggtccgacgccagcaggttgcccaggtcaaactgcagctccagctccttgtgcaccgtgatgcgttgcaacttctctgcctcgtcctgctctgcctttgcgagcagctcctccacgctctggccctccatggctccggctcggctcactcgctttggggctgcagctgaagttacttttcctacagtggcggcccaaactccggcagcataaccacgtgcagatgccgggatgcccaatccggaaaaag

SEQ ID NO: 319451 - DNA, 2623 bp, Homo Sapiens
  misc_feature (2331)..(2331): n is a, c, g, or t
  misc_feature (2337)..(2337): n is a, c, g, or t
  misc_feature (2339)..(2339): n is a, c, g, or t
  misc_feature (2372)..(2431): n is a, c, g, or t
  misc_feature (2492)..(2492): n is a, c, g, or t
  misc_feature (2497)..(2499): n is a, c, g, or t
  misc_feature (2523)..(2523): n is a, c, g, or t
  misc_feature (2541)..(2541): n is a, c, g, or t
tttgcgtgttataaaatttatttgtgtaagcattcagacatttttaggtgggaaagatgatatgcagaatccactacaaggtgcaacagaaaatcgtattggaaaggacggtacatctggcgcagaccagcagtggcacgattccaaacaaatgtcagacgagagcgcttcatggggagaaactgaaaattataatttaaagcttcatgaggcaagatatgttccaatttaaaacactaagaaatagtaccatcgatgaaaaaggaaatcaacctctaggtgtaccaaaaggggcgtagggcaaacggggaaaatttgcatttgttgaggtacaaataggagtgttctgtaagagaggggcattaattattaatgacaaaccctgcaaatacaaaataaaacccaaatcactggtcacagaattcaaaatgtacatgtaataaaggcaaggcaatagactcaagttatggcctgtcgaatatttattccactgacgttatctacagatgcacttggccagtttgtacacagtgattccttatgcacgccgaaagggtttccgtaaaaatgacattatatacaaatctgtacacccatccaccagagcgattctccagctcccagagggagttatcaacttaaagcaggatacctgaggtttcatgtctttagttgccttatcataatcccaaatatacatttcagggtttgtttttgtttttaaagacactttcctggaatatgtgcactatggtttaaaatttgagtacgacagtaatcaaataaggatagaatgatcgctggaaggggctgaccctccccacgccatctgagagacttcatctggctgcagcacagtgaagactgtgtgtgtccctggacgggcgcctggcgctgggggtggctcccagtgggcgcacctcttcggtggagtcagcgaaggctctcgttgacttttacaaaaggaggaggatgaagaaggaaaaaaggataacataaccccaaatgccaaaggaatttcagtgggatgaagttcctccaccacttagagagtatctctggagccgctgcacgagctgggccaccatggtgtcggagattccagggcacgcctcctccgctaggtagatggcccctcgcagctcttcaatggaccccaagttccctccgcacgcctggctcttctccttcaactctgcaaacagaggagaaataattgtagataaacactgagagaaaggcctctttgggatgtctttcatcttatttctgtccaagtccgatggctgaagagctccattctcgagattcttgggatctttttctcggattgtgaagatccagtccccagaatcactgccccccgaggcttggccatctgtttccgcgtcggaatcctcggagctcgagtcgtcatggctctgctcggccttccatctcttgtacctgtcgatgagctcggtcaagtaggaagttttctttgcattgcgtagtataaacttgtgcttcaataactccttagcagtgggtctaaagctcggctccttattcaaacaggcctccacaaactccttgaggggtttactgtagtttccttccaacgtcggtgggttgttctttggaatgaggaataaaactttcatggggtgcagctcggaatgaggtggttcccctcttgcaagttcaatagctgttatgcccagggaccagatgtctgccttcgagtcataggccgactgtttgatgacctcgggtgccatccagaatggggtgcccacgaaggtgttccttttgatctgggtgtctgtcagctggccagccacgccaaagtccgccagcttcacctcgccatgctcagacagcaggacgttggccgctttaatgtctctgtggattttcttctccgaatggagataatcgagtcctttcagtatttctcttaatatagtagcgatctgggtttcatctaatgggccaggttctaatagatctagtgcggagcctccaccaagatattcccattattatccataattttgtatccttcagataggatcccataatatttggttaccatatggactgtcacactgacctcagcactgtgatttcttgttgaatgtcctctatctcatccttcagccttcttccagatcaatgatctttatggcaaccactttctgagtccgattgtcaatgcctttgaacacctctccaaaggagcccttcccaattttctctagttttgtaaaaagctcttctgggtctgcctttaggttctgcatgccgggcaggcccgactgcaccggggagtgagccatggcgctcagnacggcnanttcctgggacgggacggccgggccgcgacgatnnnnnnnnnnnnnnnnnnnnnnnnnnnnnnnnnnnnnnnnnnnnnnnnnnnnnnnnnnnnagcccgaggccaccccagcctggcgggtcccggccgggcggcgggggctcagcggcgggtngcggnnngcgtctccatgcacggcgccaggntttgtagctgctgggggngcagggcctcgcgcgcactgccgccgccgccgctgctgccgctactgctgggctggagccgggcggcctgggcccgcgcgcg

SEQ ID NO: 319452 - DNA, 765 bp, Homo Sapiens
  misc_feature (228)..(271): n is a, c, g, or t
  misc_feature (432)..(468): n is a, c, g, or t
ggtatctacaattatttctcctctgtttgcagagttgaaggagaagagccaggcgtgcggagggaacttggggtccattgaagagctgcgaggggccatctacctagcggaggaggcgtgccctggcatctccgacaccatggtggcccagctcgtgcagcggctccagagatactctctaagtggtggaggaacttcatcccactgaaattcctttggcatttgggnnnnnnnnnnnnnnnnnnnnnnnnnnnnnnnnnnnnnnnnnnnnaaaagtcaacgagagccttcgctgactccaccgaagaggtgcgccactgggagccaccccagcgccaggcgcccgtccagtgacacacacagtcttcactgtgctgcagccagatgaagtctctcagatgggtggggagggtcagctccttccagcgatcnnnnnnnnnnnnnnnnnnnnnnnnnnnnnnnnnnnnnaccatagtgcacatattccaggaaagtgtctttaaaaacaaaaacaaaccctgaaatgtatatttgggattatgataaggcaactaaagacatgaaacctcaggtatcctggctttaagttgataactcccctctgggagctggagaatcgctctggtggatgggtgtacagatttgtatataatgtcatttttacggaaaccctttcggcgtgcataaggaatcactgtggacaaactgggccaagtgctttctgtaagataacgtccagtgggagttaaatatttcgcaccgggt

SEQ ID NO: 319453 - DNA, 1343 bp, Homo Sapiens
  misc_feature (151)..(159): n is a, c, g, or t
  misc_feature (261)..(269): n is a, c, g, or t
  misc_feature (402)..(498): n is a, c, g, or t
  misc_feature (885)..(885): n is a, c, g, or t
  misc_feature (1001)..(1001): n is a, c, g, or t
  misc_feature (1031)..(1031): n is a, c, g, or t
  misc_feature (1036)..(1037): n is a, c, g, or t
  misc_feature (1045)..(1045): n is a, c, g, or t
  misc_feature (1095)..(1095): n is a, c, g, or t
  misc_feature (1107)..(1107): n is a, c, g, or t
  misc_feature (1129)..(1129): n is a, c, g, or t
  misc_feature (1155)..(1155): n is a, c, g, or t
  misc_feature (1172)..(1174): n is a, c, g, or t
  misc_feature (1179)..(1179): n is a, c, g, or t
  misc_feature (1190)..(1190): n is a, c, g, or t
  misc_feature (1193)..(1194): n is a, c, g, or t
  misc_feature (1202)..(1203): n is a, c, g, or t
  misc_feature (1212)..(1212): n is a, c, g, or t
  misc_feature (1215)..(1215): n is a, c, g, or t
  misc_feature (1222)..(1222): n is a, c, g, or t
  misc_feature (1227)..(1228): n is a, c, g, or t
  misc_feature (1234)..(1234): n is a, c, g, or t
  misc_feature (1237)..(1238): n is a, c, g, or t
  misc_feature (1249)..(1249): n is a, c, g, or t
  misc_feature (1259)..(1259): n is a, c, g, or t
  misc_feature (1265)..(1265): n is a, c, g, or t
  misc_feature (1270)..(1270): n is a, c, g, or t
  misc_feature (1275)..(1275): n is a, c, g, or t
  misc_feature (1284)..(1285): n is a, c, g, or t
  misc_feature (1288)..(1289): n is a, c, g, or t
  misc_feature (1294)..(1294): n is a, c, g, or t
  misc_feature (1297)..(1297): n is a, c, g, or t
  misc_feature (1299)..(1299): n is a, c, g, or t
  misc_feature (1318)..(1318): n is a, c, g, or t
  misc_feature (1322)..(1322): n is a, c, g, or t
  misc_feature (1328)..(1328): n is a, c, g, or t
  misc_feature (1333)..(1333): n is a, c, g, or t
  misc_feature (1335)..(1336): n is a, c, g, or t
  misc_feature (1339)..(1339): n is a, c, g, or t
cccccccgttttcccgcgggggcaaatttttttcccccagggcaccaaggtgttaaccccccgggagaatcaggttcaacaagccggttgggaggggctccccggcggcagcattctttaataatttccccccttcttgaataggcggcannnnnnnnnataaatttatatagaacttcggtggacccctggtgaaaactcccataaagtcctcagaactccctttggatttttttaaaaccgttggtttcccccgggggnnnnnnnnnggggagaataccaacccttattatggccaggtttttttaagaaacaagtatgacccttttctctttccttggggggccccgcccccaaagaattgtttaaaaaatttttcggggggcgaggcggcccacaaannnnnnnnnnnnnnnnnnnnnnnnnnnnnnnnnnnnnnnnnnnnnnnnnnnnnnnnnnnnnnnnnnnnnnnnnnnnnnnnnnnnnnnnnnnnnnnnnctacagcaataagtcttttattttttgtacagggtgccactgcaggtaaccatcagagaacacactgctattttcaaatatacagaactgaacaaaagcattttagcatgctgccttactgtacacagaaaactggtgagcatcttcagacactaaggacaggaaataaaatgggttaatgctactggttgatatgtttatgaatcactcagcagtgttgagatagcctatctttacctgaaaggagaattacactcactcactctgggcagcactggggcaattctaaaattcaggtctcgtgaaaggtacacaaccaacaaggcaaggcaagggaacaggatgccatgtctgcttctggaaggggagtgactgatttttgaaccngggctctgcagattttaaggactggtacagccttctttaattatcttgagttttcccttactttgtatgttggcaggtcaacaaaagtgagaatttctgaaacaagctaaataggnttaaaaggcagaacactgtccatataacanaattnntgctttanaaattttgcccagttctcacctcttatcctaaaaaagcctctcatctganaagtttttatgnaaacctctagcaactgtaacanacttttctcaacccagctctagatantaagtatcagaaacaannnttgtnaagtggaagtnttnnagaaaaanncagtgtttntantggaggnaagtnncaagtntcnnttggtgttgtnaagggattgntccatnttatnggaanggaatgttnncanngttanttngnttttagaggataaaaaggntgtncatagntgggntnnccnaagg

SEQ ID NO: 319454 - DNA, 1214 bp, Homo Sapiens
  misc_feature (191)..(191): n is a, c, g, or t
  misc_feature (213)..(213): n is a, c, g, or t
  misc_feature (534)..(534): n is a, c, g, or t
agaataactttacttgttttttgggaggagattaatgggtgggaggggtgagaggggagatctgatttacatacggacttgagactcccaaggcagtaccccgggtcgtcctctgcaaggttgccccggtgggttctgacgcccagctggctccgggagccggggtggagtcctggagggaggcgaacggngatgtggagggggcctggagtngggggagggggcgggtgaggcgaggcccggcccgccacagtcctgcctctgggccccgggagcgtcctccctgtgtccgggccgggcgagggcttaatgctatggccagcggggaggcctggcggggcccggcgggggctgcgggctcagtggggcgggtggcgccgctcggccaggcccccgcggcccagcacttcgccgctgaactggtaggtgagcttcttcttcaccttcttgacctcgcccgtcttgccgtagtttcgcagcgcgcgcgccatcttctggtaggtcatcttcttgcggttgcccttctggatgccnccagcggtgcgccagcgcctccttgtgcttggacgagaactggaaggtgcccttgtccttgtccacccaccagatgctgtccttcatgtcgccgctgcggagcaggtccaacaggaactggtacaggcggatcttcttcttgctgcctgtctccccaggcaggagcccaggcccgggctccaggccatccgcctcgccgtcagacacctccagtggggggctctgccgctcgccctcctcctcatctgagctgggctgggctggggacagggatgggtactggaggcacatccggggcaggtaggagacctggtggccaagactgggatggggtggcaccatgggggtatcgaggacgtgcatctgctccagctccatgtggcggtagagctgctgcagctgcgggggctgcacgctctggagctccgtgaagttgttctcggcgaagctctcgaactcgctgtgcacgtggtgggggtggaagtcccagtaatggtcgctatggctctccccatcactgctgagataggggtaatactcgtgcgtttggcgttggtatagatccgtgtcatagggcaccaggtcttctgatggctgaggggggacgaggggaaacccttccattttgcacgcctgtaacatccagccgggctccgagtcggtcagatcccctatcccgg

SEQ ID NO: 319455 - DNA, 1201 bp, Homo Sapiens
agagagctagcacatgagcttcaatacctgcagggcctggaactcctgattctccttttcttccttgctgtccttgaagtcctgtgtcccctttgcttcctttcaggcctgtggctcctggactcccggggctccctggaagtcctgctcgcccaggggagccagcactgccaggctcacccttggcacctgggtgtcccactgcaccaggagggcccggaacaccctgcagtccaggttgtccttgatctcctttagctccaggaaaaccagccaaacctggtgggcctggcctcccgaagtcacctttactcccctgggctccaggaggccccatgacccctgcatctcctttcatgcccctgtcccctttgcttcctgggagacccaggtctcctttctctcccttagttccagtttccccttttgggccaatgagacccccatcgcctttgctgcccttctctccttggggtcctggggtgccagtggctccttgcttccctggagcaccctggggtccttggaggcccgcctctcccttgactcccggtgggccttggggtcccgaggggcctgttgctccatctcgtcccatagcccccttggctcccttctcagcaggtggtcccggcgggccaggggcaccaggcatgcccatggcccccttgtgaccttgaagacctggggcgccttgttcacctttgattctgaacatccctgggttctgagtgaagttgtctacccgctgcagcaagtgctcatggtgacgcggacccaggtgagttgggcctgcaggacttgcagcctcgatgcaccctgagccaggtgttctccagggtgtgctgactgcagcaaggagaaggacgggctgtcctcagccgccagagtgtcattgaggaaatacatctccaggacccggagccgcgcctgcagattcagaacttggaccaccagcagcccagcgccagcggtgagcaggatcaggtagatgaccaccacagctagggagaagttcaccccatttctcctcttgggctttggaacattgatttcgaaaggctccattgcaatttggtgaaaagcagcttgttgggtctcactcaagagctcgtcctccttgagaattttcttatttctcattgccaagctttatagatggccaaagtcctggagccagcagaaatgctcccctcaagag

SEQ ID NO: 319456 - DNA, 814 bp, Homo Sapiens
  misc_feature (40)..(40): n is a, c, g, or t
  misc_feature (75)..(75): n is a, c, g, or t
  misc_feature (91)..(91): n is a, c, g, or t
  misc_feature (132)..(132): n is a, c, g, or t
  misc_feature (152)..(152): n is a, c, g, or t
  misc_feature (161)..(161): n is a, c, g, or t
taggcggcaggaggaaaacttcctttcagcagctcccagnttttccacacagagcccacgcacaggatgggagtnccatctgcccctggancaagaccgggtcaatctcgggcaacactgctacgatgtgtntgcccagcatctcccagccnttcctgagnatatagcgggaaagggggtctccctgctgagcaccttctgcaatttccgggcaaaacccagcaaacctgcatttatcaaagtccctatacaggtgagtgagtatccctagccgatctggcacctggaaatagtggaacatggcctgtttgacgtagccgatatcatgaggagccgcctctaggttgtcaatggagtcaaacactattttcactgcttggtgtgcgatccagtaggctgaaccctcatcacccatcatatggccccagccgccgcagccactctcggagccatcagggttgatgagcctgcagttggagcctgttccagatatgagcacaactccaccatccggtgtagctgtggcgatggagccggcggcatcggtggtgattaagtagctttcactcaggtagggaaatcggtccctcagctcctcgatcaggatcctccccgcgtcctcctggtccccaccgctcagagataggcccaagcttcgcagcggtaccagaggatccacccctgctttccgtttggccctgttcaccatctcattgatcctctccacacacttgtctgtcccgatcagccctctacacccccatagatcgcggccatgctgctgctaccgtcgctgctggtcccgccgtttccc

SEQ ID NO: 319457 - DNA, 1500 bp, Homo Sapiens
tttgtttttgtaaaagggagaaaggaagcaaaagactccttcctttcagacccagtgtccactgagcttggagggggtggagccgggaccagccccctaggaaaaggtgtaggaatagaaggcaatggcattggcgctatagtccatggggaggaggtgcccgatgtgcctggcccctaggctcgccccacccagagcggaggagtgcctcagcttcatcagggtgaagctggagaagaagttctgagcctgggatctctctgccctgggtcagcgccaaaagaaaaccttccttcagcagctcccagctcttccacacagagcccacgcacaggatggggagtccaatcttgccctggaacaagaccgggtcaatctcgggcaacactgctacgatgtgtctgcccagcatctccccagccttcctgaagatatagcgggaaagggggtctccctgctgagcaccttctgcaattttccggcaaaacccagcaaacctgcatttatcaaagtccctatacaggtgagtgagtatccctagccgatctggcacctggaaatagtggaacatggcctgtttgacgtagccgatatcatgaggagccgcctctaggttgtcaatggagtcaaacactattttcactgcttggtgtgcgatccagtaggctgaaccctcatcacccatcatatggccccagccgccgcagccactctcggagccatcagggttgatgagcctgcagttggagcctgttccagatatgagcacaactccaccatccggtgtagctgtggcgatggagccggcggcatcggtggtgattaagtagctttcactcaggtagggaaatcggtccctcagctcctcgatcaggatcctccccgcgtcctcctggtccccaccgctcagagataggcccaagcttcgcagcggtaccagaggatccacccctgctttccgtttggccctgttcaccatctcattgatcctctccacacacttgtctgtcccgatcagccagtggtttgtgctcagtccatctgcttctgccaggatcttcccatcctctgagactaaaaggacctcggatcgtgtgcctcccccctctacacccccatagatcgcggccatgctgctgctaccgtcgctgctggtcccgccgtttgcgtctctccccgcctgacacctccttccctccagctgtctgggcaccgccccacttcccgtgacctcccgcgcagccagctgactccctgtgcgcgtgcgcatgcgcggggcggggcgccggtaggagccggggatggctgcgtccctcaggctgtcttccttctggtgtctcctccaggtggagcgactgcggtccgcagcggcccctcccgtcctcctggatcctgcttccagagatggacactaatcccaagaggaggaatcaaagaggggtatctaggtcggtcggacccttaggacacatcactgacctgcctgcctgtaaacgcccc

SEQ ID NO: 319458 - DNA, 407 bp, Homo Sapiens
gccctgggccagcgccaaaagaaaaccttccttcagcagctcccagctcttccacacagagcccacgcacaggatggggagtccaatcttgccctggaacaagaccgggtcaatctcgggcaacactgctacgatgtgtctgcccagcatctccccagccttcctgaagatatagcgggaaagggggtctccctgctgagcaccttctgcaattttccggcaaaacccagcaaacctgcatttatcaaagtccctatacaggtgagtgagtatccctagccgatctggcacctgagaggagaaagggcacaagagagtcatcagaagcaaaggaaaatccccaatctggccaccaaagttggccttcctaatgtctctactgttggaaaagctagaataattttttt

SEQ ID NO: 319459 - DNA, 1340 bp, Homo Sapiens
aaatgatgcaattattcataccagtttattgtaggtattgtgtttcaaaaaatttatagcataaataacttttcatgtcataaaataacttagtagaatttataataaaactttgagaatttaatatctcatcaaaatacaataaaatatggttttcaaatatgattaaccctttcggcttttcttttacttgagggcatataaaccaaaaatacccaaactatggctgcacacttaaactttaacatatttggtttattttaatgtaactcaaccattctaaattaatacatagttttccttcctgcatggttctttgtaatttttgttccttttgacttatttttctgtttcaacacagcttccttcttcattttcacctctttccatctgcaaagtcatctatctccgggcccccagaacatgtagttgaactcactcagccccttggcatcagtttctgtaatccttgcatcagtgtagggagtaactgcttgagtaactacaaaggtatttcaaaaacttcagtgcaatttggttcagttattttcattcagatgccatcaccgttcagggagattaatcactggaacccattgatccatgtagcgactttcccggcaaaaacaaataagttgacttaaggcaggatccttccattgagatgaatgtggattcgtcaccagcacgcagtgcaggtccgggggctgctcggcgccctcgctcgccgcggggccagcgtcggtctccaagagcaggagctccgccagccggcccgggttgctgacgcgcaggatgttgatgtcgttctcgcagcaaaacgcctggatcagggtgaagtggatctgcagagccacatctctgtcgtcgtcctcgtccgccgccagcaggcacaacaccacgttatcggggtcgacgttgagcagcttggccgcttcgtacaccccgacagtgatcgtgcgctgactcagggctttgctgagcacttcctccagggcatcccccaccttatccatcctttcggtcttctgctctccagccgagaattcctccaaagtcatattgcaaactgcaggtcgcccagggagagagcgcggcgtgcgggctgctcctgccacggctagcgcgcgggcgcctgctttctgcactcactcacaggcgccgctccggcagctcaggccctggcgctctccggccgcccctcgcccgcccgggctcctcctcctgtgccagccgccgcagctccggccacccctcccgccttgcttgctcgctcgctccccggacctcgcctcgccacgggccgcacgacactaattgggccgctgcctcccagccac

SEQ ID NO: 319460 - DNA, 640 bp, Homo Sapiens
  misc_feature (225)..(225): n is a, c, g, or t
tgtgtgtaaagggtttttattggagagcctgtggcgctgaagtgccaccaaggatttggaaggtcactttcagcagccgccatttctgccaggaccagtggcaagcgacctggcagatggagcccgggtgtttctgcgtaaggcagaggaatccagcgttttccatgagattcagctgcagttgtcgaaaaccctgtgtgagccagcagttccagttcaaaggtngggggggcgaacagctgcgaggtggccaggctcccgtgagttaccactcaggcctgagtacaccgtggtgaggagagataaagcagccacggctgttctgttgccggtcccacccctcatggcaaacagatgggggaaaacagagaaggaaagtcaacaaagaaggtgaaatgcagggagcagagactacacgcaggccccccgtggctggcaataccatgcgtgctgggccggctgcgccaccctcacccagggcttcccacgggctctgctctttcctgcagaggcgaaactgccttcctggcaggcggaggctgccgagctcccatgccccttcccacatatcccaactcttctcagaaaactgaagaaccgaagatggaggtgagttcaggaaaggctggagttttcatcc

SEQ ID NO: 319461 - DNA, 1329 bp, Homo Sapiens
  misc_feature (40)..(40): n is a, c, g, or t
  misc_feature (135)..(135): n is a, c, g, or t
  misc_feature (1068)..(1068): n is a, c, g, or t
aatccccttctaatgaatgaaactaggggaatttcagggnacagagatgggatttgttgtatgataaactgtatgtagtttttagtctttctgttttgagaagcagtggttggggcatttttaagatggctggcnactcttgttttccctcatgataataaatttgtcataactcagtaacatgaacttgcccctagaggtagttgttaataattttgaaatattaaggtcttgccaagcttctgatgattcacacctgtactactgattattaagcaggacagactgagctttctgttgcaaataccttggaggagaaagtaatttctaaatatacagagaggtaacttgactatatatgttgcatcctgtgcctcccttcatattaatatttgataaagattttaatttatgtaaaacttctaaagcagaatcaaagctcctcttggggaaatggcaagtctttaggataggcaagaccctgtatgaatagtaccaaagcattaccgcatggtagagaacacactcgattaaaaatgttaagctatctgaaaaataaaatgtgcaagtcttcaggatggcacaaaacaaaggttaatgcttcttggggcacatttcttagagggcttgctgagtgtgtaaatataatcgacttttgtttgtgttacatgacttctgtgacttcattgaaaatctgcacaattcagtttcagctctggattacttcagttgacctttgtgaaggtttttatctgtgtagaatgggtgtttgacttgttttagcctattaaatttttattttctttcactctgtattaaaagtaaaacttactaaaagaaaagaggtttgtgttcacattaaatggttttggtttggcttcttttagtcaggctttctgaacattcatgaaaagcctctcacttgaacccaaaccagagtactcttactgcctcttttctaaatgttcaggaaaagcattgccagttcagtcttttcaaaatgagggagaaacatttgcctgccttgtaataacaagactcagtgcttattttttaaactgcattttnaaaattggatagtataataacaataaggagtaagccaccttttataagcaccctgtagttttatagttcttaatctaacattttatatttccttcttttggaaaaacctacatgctacaagcccacatatgcacagactatacagtgagttgagtttggctctcccacagtcttttgagtgaatttaccaaagtcagccattatcatccctcctgagttatttgaaatgaattttttttgtacattttggctggcgaatgg

SEQ ID NO: 319462 - DNA, 996 bp, Homo Sapiens
  misc_feature (6)..(6): n is a, c, g, or t
  misc_feature (17)..(17): n is a, c, g, or t
  misc_feature (29)..(29): n is a, c, g, or t
  misc_feature (37)..(37): n is a, c, g, or t
cacgtnttaaactactntgtatcattggntgcgacgntacaagtccacaacactgtttaactggacatatgtgaggtggtaaatccctccatttttacaggtctttgggaagttctggggccaggaaatccaaatttgataataggattttctcaactgaactcagggcagagcacagatggtctgagtgaacgccctgtgtgacaggtgccttcctgcaggtaggaacacttcctctgcagtcagagggagaagaaaacatcaggagctggatgtgatttcagatctgcaccgagaaacatgctgatttcactggggatgtggcagtcccaggtgaaggctggctaggtcataattgacatctcctccctgtctctgctctcagacatggagttgattatgctttttaaatacttcatgaattccatccggatctcctcagggtcatcttccaggtttgagtgcaccagcttcagcttgttcaagggtggcgacaaagacaggcttcctttatcatctccagagcctggtttgtggtgtgcaattagcatacactgtgtgtcctgtaaggacggctgttggacaaagcaggaataccacacctccatttccttccggtggcttgggatgtcagcattgaagacgatcaccactccatgagcatccttcatcagggccggccagcaggactcaaacttagcatcgccaccacagtcccatagctcgaattcacagcccgtgcctttgttgttgctggtaacatgcgggttctcaaattctaggatcctcactccttgggttgggctgtattcagtgatgtcagaagattctgtcagaaagttggccaaaacagtttttccactctcgcaaggccccacgaagaggatcttggctttcagcatagttgtccgccgcggcttagccggccggagcccacgggaggcggcgcgtcaggacggagctctacttggccgctttcgtttccatggcgacgga

SEQ ID NO: 319463 - DNA, 1228 bp, Homo Sapiens
  misc_feature (38)..(38): n is a, c, g, or t
  misc_feature (874)..(874): n is a, c, g, or t
  misc_feature (977)..(977): n is a, c, g, or t
aggaatgtggcggcatagaagctgttcaccacggggantgaccttctgctgccgattacactctctggagagacactcctctctcaaggcctgggatggcaatgtgggtgatgttcacggacatcaaacagaaagggaattgctggatgtggtgacgagacaggcggaaaatctcctgcgccatcggcaaggtctttgagtccatcaccaggtagagcagatgcaggagggcaaggaagcctgcgcctctcaggtctgtggctggattcgctccctgaaagcccaggtcctcccagtggtttccatgaagggcacagtcaaacttgggagccggtcagcttcttatagatggtctgggaggactcggccatgcactgggtcttggctatccaggccacactgagcaatggtcaggaccaagtccctttcttcccgaaggcgctggtggagctttggaggcccgaagaggtagtgtcggagggcggcgagcccagtccttcgaatagttggctggattcttttcttgaagggggaaaggtccacagtctggaagtgctgcagggcctcactgaaggagattagctgcccaggctgctctgagctagcttggctccctgtctctggctggatggtgtccacagcttcccattcttcttgggctctgaccacctctgtactcacaacacgtggctcccattcataagcttctgtggtcagagcctggagaatgccatggttcttcaactctgagatagggattcctctgaaagccagaacactcttgtccttgtcatatgatggagaatatccagcagacaatctttcaccctgtccatctcttaattcttctttactatggaaagagcaagatttntcattcatgactcaaaatcatttgttcatgtgagctttgtccttgggcccagaaagcattttagtaaggtctgagatcagaagctatgtggagagccagaganccagttgctctacctttgccttccttggcagtcactcagactaagagtaagaaaacagtccctttgtgccatccgagggtgtaggaggtttctgtgagtgctgagagaagtcctctgaggtcttcgaagcctcagctctggctggagcactcctggggccttcagtagggacagttactatcgttaaaagagctttccaaacttgggggtcccgccgcctcggctaggcctcatctgctcatgcgcacagc

SEQ ID NO: 319464 - DNA, 974 bp, Homo Sapiens
  misc_feature (397)..(397): n is a, c, g, or t
  misc_feature (405)..(405): n is a, c, g, or t
  misc_feature (409)..(409): n is a, c, g, or t
  misc_feature (416)..(416): n is a, c, g, or t
  misc_feature (585)..(594): n is a, c, g, or t
  misc_feature (598)..(598): n is a, c, g, or t
  misc_feature (641)..(641): n is a, c, g, or t
  misc_feature (708)..(708): n is a, c, g, or t
  misc_feature (746)..(746): n is a, c, g, or t
  misc_feature (856)..(856): n is a, c, g, or t
  misc_feature (889)..(889): n is a, c, g, or t
  misc_feature (898)..(898): n is a, c, g, or t
  misc_feature (927)..(928): n is a, c, g, or t
  misc_feature (937)..(937): n is a, c, g, or t
  misc_feature (966)..(966): n is a, c, g, or t
tagaacaattcttttatttgaaaactgctggtatgaatttcctccttccctcaattaggccagagactcatcatggggcatgcacagcatctacaggggggggccccagcttgtgggggctagggtggggcggccgtgagagggacctagccaaatgtccgtttttccatcataaacaatggagcgggggtctgggggagaagagagtgggtaagtgaatggccagaaactccggagggggcctcacacccacctgtgaggtacctccttgccctacccccactgaggcctcaggccccttgcttgggtcatgctgccccctgtcggctgctgcccctgcctcttcctctgagttctaacaacacagacactggtgcctgagagccctgctgctgcnagggggtnaganttctggntgcctctacttgggaatctcctcccatgtggggatctgcagaacatccagatggggccatcccacctcatgatccattcactcccagtgggatacactggaattcaacccggagactggagcccaacagattaaggcagaattctccttgctctggaggcaggtctgcnnnnnnnnnntgangtctagctgcccctcatgtcccatgccggtgagggtacttggnttcccacagctaagcccaggagcttcctatatcccatctgctgagacagcaaggggtgcggcctggncagggtcctgagatggctccactgaccccctgaaagcncctgcagctcagcctttaagcctccattcatctcggaggtcagatcagccatacgccttcggatgagtgagactgcaggtcactctcacctgtgaaggtgagatccttgnttggaggggcttctggcccatagcacttctgtnccccaaaangaggctgtcctttgacacctggccagtannctcagggtntgagcagcgcgtgggtctcttggcaatantccaatct

SEQ ID NO: 319465 - DNA, 1004 bp, Homo Sapiens
ctggcgccgccccggtctccacacgcacgtattacacgccccggacccggggccgccctccaagcccctccgtggtgccccaggggattcggatcttgctccggctgcctctaactggggaatcgctcctcgccgcgggggggctttctccaggaccattcccgtgtctggcgcatcccccctccaggggtcccgttccctgcccagtcggaatgcccctggaattccaacccgggaagtcgggagcccaaccaggattaagggcggaaattctcctgcttctggagggcagttctgcgggaaggggggtgaagtctagctgcccctcctgtccccatgccggtgaagggtacttggcttcccacagctaagcccaggagcttcctatatcccatctgctgagacagcaaggggtgcggcctggccaggctcctgacatggctccactgaccccctgaaagcccctgcagctcagcctttaagcctccattcatctcggaggtcagatcagccatacgccttcggatgagtgagactgcaggtcactctcacctgtgaaggtgagatccttgaagggaggggcttctggcccatagcacttctgtgctcccaacaaggaggcctgtccctttgacaccctggccaagtacagctccagggtcttgagcagccgccgtgggctcttcttggccaatacttccaactctttgaggacaaagcccgagtctgagatggtcttccgctgtgtcctccagacatgtgcgaggtggaggaatgtggcggcatagaagctgttcaccacggggatgaccttctgctgccgattacactctctggagagacactcctctctcaaggcctggatggcaatgtgggtgatgttcacggacatcaaacagaaagggaattgctggatgtggtgacgagacaggcggaaaatctcctgcgccatcggcaaggtctttgagcctcgtgccgaattcgccacccaggcctcgctcctt

SEQ ID NO: 319466 - DNA, 1497 bp, Homo Sapiens
  misc_feature (30)..(30): n is a, c, g, or t
  misc_feature (66)..(128): n is a, c, g, or t
  misc_feature (1232)..(1232): n is a, c, g, or t
  misc_feature (1436)..(1436): n is a, c, g, or t
  misc_feature (1472)..(1473): n is a, c, g, or t
  misc_feature (1478)..(1478): n is a, c, g, or t
  misc_feature (1482)..(1482): n is a, c, g, or t
cggagctgaggaccggccggagctttgcgnagggcccggcttggcgggtccgggggggagccgaannnnnnnnnnnnnnnnnnnnnnnnnnnnnnnnnnnnnnnnnnnnnnnnnnnnnnnnnnnnnnngcggggccgaggccgaggcaggcggtcggcagtgctgggggttcaggtgttgcggcggctccacgtagccaggcggcccgtgggctggagcgggcggagctcggcccgcggcttgcgtgagtcaggccggtcccagcgtccagagcgccggcccttcggcttcttctaggccatggcagggccgggcccaggcccgggggacccggacgagcagtacgatttcctgttcaagctggtgctggtgggcgacgcaagcgtgggcaagacgtgcgtggtgcagcgcttcaagaccggcgccttctcggagcgccagggaagcaccatcggcgtcgacttcaccatgaagacgctggagatccagggcaagcgggtcaagctgcagatctgggacacggccggccaggagcggttccgcaccatcacccagagctactaccgcagtgccaatggggccatccttgcctacgacatcaccaagaggagctccttcctgtcggtgcctcactggattgaggatgtgaggaagtatgcgggctccaacattgtgcagctgctgatcgggaacaagtcagacctcagcgagcttcgggaggtctccttggctgaggcacagagcctggctgagcactatgacatcctgtgtgccattgagacgtctgccaaggactcgagcaacgtggaggaggccttcctgagggtgggcacggagctcatcatgcggcacgggggccccttgttcagcgagaagagccccgaccacatccagctgaacagcaaggacatcggagaaggctggggctgcgggtgctgaccaggggccgggccggcagactgggggttccccacctccttgctctccccagcctgccaagcccagccctccagagccagccctcctgggtaccggcaactacagcagccgggtgaagctctggagctctgcatcctgtggcctggctgcgggatggaggctctccttgaggaaggggaagcaggatacctggcgggccaccctgccagccagcagctggccctccaccatcttcacattccaagactggcctgaacccgccggtgtgggccacagtgggaggggccagcagncctccctgtcccatgcctgctggctctgaccgtttcctctcatgggtttgctttacctgtggcagcaggttgctgctttccagggatgtgtccagtgccctgggttcttcccggtcatcctggggctctgcacagagcagcagatctagagccatgagacccacagacttggtgcctgagcgcagctccagggaagccccagcnccttccaggcggggaacctgcttcctgccttcactnnccccncagnactcacagacactcc

SEQ ID NO: 319467 - DNA, 1567 bp, Homo Sapiens
  misc_feature (27)..(27): n is a, c, g, or t
  misc_feature (30)..(30): n is a, c, g, or t
  misc_feature (47)..(47): n is a, c, g, or t
  misc_feature (49)..(49): n is a, c, g, or t
  misc_feature (51)..(51): n is a, c, g, or t
  misc_feature (61)..(61): n is a, c, g, or t
  misc_feature (63)..(63): n is a, c, g, or t
  misc_feature (65)..(65): n is a, c, g, or t
  misc_feature (69)..(69): n is a, c, g, or t
  misc_feature (71)..(72): n is a, c, g, or t
  misc_feature (82)..(82): n is a, c, g, or t
  misc_feature (107)..(107): n is a, c, g, or t
  misc_feature (123)..(123): n is a, c, g, or t
  misc_feature (140)..(161): n is a, c, g, or t
  misc_feature (177)..(177): n is a, c, g, or t
  misc_feature (240)..(240): n is a, c, g, or t
  misc_feature (344)..(344): n is a, c, g, or t
  misc_feature (384)..(384): n is a, c, g, or t
  misc_feature (517)..(517): n is a, c, g, or t
  misc_feature (522)..(522): n is a, c, g, or t
  misc_feature (525)..(525): n is a, c, g, or t
  misc_feature (925)..(925): n is a, c, g, or t
  misc_feature (929)..(929): n is a, c, g, or t
  misc_feature (1219)..(1219): n is a, c, g, or t
  misc_feature (1342)..(1342): n is a, c, g, or t
ggggcggaaattggcggctcggggtgnggngggtgctgtgtgctgtntnangcgtgtttgngngncatnannctatgtgtgntgatatgtgtatgttgtgagtgcgngttattaattgggttntggttggtcttggcctnnnnnnnnnnnnnnnnnnnnnncggagcccgcgatggnttagtgggatgcagttggagagcgaacctccagggtgcggccctccccctggcagtgtgcggncagcacgcccaccagctccccaacgcggttgttcaatggcggccgggagcggtgcaggcacaccacgaggtcgttctggccgcgggcgtgcagcaccaccagcnggtctcctccgctggtcaagctcagccccgtaaccgcttnaaggggcacggcccgcatcaaccggtactgccggtcagggtccagcttgtagaggtgctggtctgtgagcaggagggcccggttccggatcttgtggaaggggtttaacttgcggaaatggtttgaaaagagnaaagntcngaagccatctttgttccgaagtgtctttagtcgctgagcaaacaggtttgatgttgtgggattgttagtggcagaggacaggtagtcttgggcccaggcccgttggcagctccagttttgacgaagcccttgcagggcccccatggcggccaccttggccttgatctggggcatgtctgaaggggggatgttcttcaccagctgccgggcccgccacctgcagaagagtgcgtggcaggtgtcctggaagggctgcagcacagcagggggcagcggccacacaaggtcacgcccgtagagtgggggctgctttgcagcctgggaatcgccgctgcagctcagccaggtgagcccgcaccttgtgttttcggaaccagcgcatgatggtgtagatagcccntcanctccggcagcgccacctcgccaaggtgccccgccatgccttctgcaatagcagcacaatgatggggatgaggcgggctcggctctgctccagtgtgaccagtgtccggggtgagcggatgaacagcttgctggccaaaggccacgtccccctgcagcccatgctgctccaggagagcgctcacggctgccttgtcggagcccagcaggtggttgggccatgtgtattcacaggtcatcttgtacctgagcaggaatcgagagtagggctggcgggaagcgaagccagccngcggaccctcacattctccagcagccccaggtatgcgacctggtggcgacagtggttctcatccagcttcccagctaccttgtcctcattgggcttgatgcagcggacgtagaagggctcctnggaggcaaggttctccaccagggccaccatggagttcttgaagagtgtgccagccgtcagggggcgcttggtcacctctgtgatgtcctgctgcccgtccggccacatggcccgtagagtggggtccgtgctgttgtacagcagccgcttgaagtcctggaagaggaaatctctgttcttgtcgatgaagccttccacggagtatcccgggaattccggaccggt

SEQ ID NO: 319468 - DNA, 1726 bp, Homo Sapiens
  misc_feature (1186)..(1186): n is a, c, g, or t
gcagaaccttgaaataaaacatgttttacagtaagttcacacacaggcttaatgcaaaccagagtaatgcacagatgattgccaagaccatattgacaaattgtgattagattataacgcatagtagcctgccttacattcagcaagttcaaacaggacacaaaaccagtcaactgaacacagagcagctctcttcagaagcacttccaatgagtgatgcagagatttcaaaaatacaaagcaggcaacttatatacagcaaatcctcacactgcctggacatgtgccacttttttgttgtttttaatatatttttccttcctggttgctaatttagactgaattcttaaggatttatcttgatgacttagaaaaatacacctgtcctttctcactttgtttcaggtagtacagtcatgaaattgagtaagtctcttaaaaaaatgaaagtccacagatcccattgtggaaggtttcaggaacccctccccaggtaatgatcacgggatcttcaacagctcaaggagtgctccaacagctccaaaataaccctcgtgttccgaaaaaagtgctttcaactgccccttggaccaataatccaaagcatatgccaaaagccgcatggcgatcgtattaattctcaagaaatttccaacaaataccacctggttaatgttttcattaagggcacacattcttgctattgagccaatgttgttggtgatggtgatcaaagtcgctctggccaggtcctctttactgacagcctctcgcttctccttgctcatcatgtttccaaagcttgaagccacagcccagcctggcagtccaaacctctcatagtcccctccataaatatctcgtactagtttatccactttggtgctatctccacgagatgccatttcaagagcttcttcaaaagtggtacagccagtaagaagacagcagagaccaaaaaaaagttcctcctccaagactagtacctgtgacccgtttgtaattatctttggaatatactgctaagatgctaacccctgagccaatgttcaccagaagcagaggatacggatttttcaaatcaaatggtgacttctgacacttttcagaatcagcagggttttcaaagtaatagcactgtgaccgtccattgaatccgactgagtcaatgtataaaattcctttnatcaagcaatctagttcatccagtttgcaaagctgaagatcactctattgtgagaaaatcctgctcaaatttgtacgctccacctccagtggcacaaaagacagtgtggagactcgagaagtttttatctttgcccatttgaataaaagcaggcatgtcatgagtgggaaagcgtataaagtgcagattgcctttgcgtccacacagagtcaggtccttcagctcgaggtgcacgtcccgaatgcctgtagacccataagccacattggaggtcaggtacttccgaatgcttttaagactttccacttcttcctcttcttcttcagcagtgatgtctttgggttcaaaatataccagcttgaccagagttccaccgatatccagtccaaaccatggaaaaacaatgggtgcgggggggcccccgaaggtaccgctttcggagtcacccgaggcctccagccggatgtcaggccacgcaccaacgagggaccaccgtgcggggacagtgtccgcgcgcgggaaaaacggcggcgatcccgg

SEQ ID NO: 319469 - DNA, 946 bp, Homo Sapiens
ggcctgggtggcggctcgggcggcagcgactgctgctgcggatgggagcgggccggctcggcgcgcccatggagcgccacggcagggcttccgccacctccgtctcgtcggctggggagcaggcggccggggaccccgaagggcggcggcaggagccactgcggcgccgggcgagcagcgcgtcggtgcccgcggtcggggcctcggctgagggcacgaggcgggatcgactgggctcttacagcggccccacctcggtctcccgccagcgcgtcgaaagcctgaggaaaaagcggccgctttttccatggtttggactggatatcggtggaactctggtcaagctggtatattttgaacccaaagacatcactgctgaagaagaagaggaagaagtggaaagtcttaaaagcattcggaagtacctgacctccaatgtggcttatgggtctacaggcattcgggacgtgcacctcgagctgaaggacctgactctgtgtggacgcaaagataggtgatcttcagctttgcaaactggatgaactagattgcttgatcaaaggaattttatacattgactcagtcggattcaatggacggtcacagtgctattactttgaaaaccctgctgattctgaaaagtgtcagaagttaccatttgatttgaaaaatccgtatcctctgcttctggtgaacattggcttcggggttagcatcttagccgtatattcccaagataattaccaacgggtccacaggtactactccttgggaggaggaacttctttttggcctctgctggccctctttacgggctggtacccctttttggaagaagctccttggataaggccatcctcctgggagaatagccccccacaagtgggcaaaaccctcagcacccgcagatattgtttgtgtgaagggcggacctaggcggccgggt

SEQ ID NO: 319470 - DNA, 2128 bp, Homo Sapiens
  misc_feature (1635)..(1635): n is a, c, g, or t
  misc_feature (1690)..(1690): n is a, c, g, or t
ttcttaagtagctatatttattattactttttccagcaattttgcaagaggcagaagtgtgacattgaattgagtgagacgagcgtgtgggtgggttggcgaggagcccttctcctgacgcaggctgctggcttgtcaaggaatggctggttccaccgctgggccgtgtttactcttttgcttcaaggaaaagggtttcttgagggaacaactttacctccaataatgatttatttgggtccagttgagttacgtctctcctaggaaaggtgctcagtaacttgtactcatcccatggaaatcctttggaagctacaaaatcaaagacaatctggagcttgttgctggccaggaaacgccgctccaagaactcgccactgggggtccggatccgcagtttgctcacaggctcagcattttcttcctttggctcaggaggcagggcttgctctaaggacagccggatggcctcacgttcctcttcttgttctttgcgaatctgctccaaacgaaactgttctgccatctctctctcgtgagcttccctctttgctctgtcagcctcaagtgaaaggcgataggcctcatcttgctctctcttcacattttctctggcttcacgttcatcctcgtcctttatatcttcctgttgttgggctgtgaagatctccattgcagccatgagtctcatcattaactcatctactgttgtgttcccttgtatcacattcaacacttcattagatgatcgctttcccataataatcaggaaaagcggaaactgatccgttttttgagtccgaatggtttgtgccacaacactgccaaagtgtctattgcacatagtgagaaatcttgctctgttggagtcctttgtcagatcccaagcccaggttataaaattttgactcagataagaaacaatggattcagcacaaagcatttgtgagcagaacacgttggttaacacactttcatcatggtggaggtagatagcaagaagctttctatctcgggctttcacatagaaggcctcttgaaaagcagcttctaatgagccaataaaaaatacaggatggcaatcaccatatcttgaagaaaactctgctgtaaattgtaataaggcatctccttcattttctgcgttttctggcatcattggagattttctcaaggcagatgacgccatgccaaatacttctccatcatccaccccaaattctgtagcatcttcaaagtcatctccatcgctatcactaaccatatgaacatcggtgatttgttcttccgactgttcccgggtctgtgcaggtgaagatcttcttcccactgtaagtcgatggcagggataagagagccctgattcagcaagacacattgagtcgtctgtagcagaagttggccagccctcccataattggtggcgaacggggatacttgtaaggtcatacacatttctctttacctcttgaatagtactgcttcctgagaagttcaggttgtactcccgctggacttctcggtgggtgatgatcagcatgaagttttgatttaatgactcctgcagggcaccagcatgactagatgatgaaggtggtggcaaatctggtgtaaggacataaagactgttgtttntttggcaagtgtagagattttaggaccgtactgtcttccacatctcccgtcttcncagccttttaacagcaattttggacacaggtatctgaagttcattttctagaatctgtttaatctctccaacagtacaggtgtcttcaagtaccacatcaacatttctgtctctgtattcaaccctgaagtccagcatccgaggttgcctttctacaatctgcctggatggcattacaggtcgaaacgctgaagaagaagaggaagtaggagctgaagctggatgacttgctggattaaatgcaggtcctggtatggtctcacctccatattcactttgtagaatgccattttcctgtggtattacaccattgatagctgccactaagtcccattattttgttcaagcatgcgacgcgtgggtcgacgatatcccggaattccggagccgtaccagcccgtgcgtgttttataaacccaagcggggttcatattacta

SEQ ID NO: 319471 - DNA, 1390 bp, Homo Sapiens
  misc_feature (31)..(31): n is a, c, g, or t
  misc_feature (46)..(46): n is a, c, g, or t
  misc_feature (48)..(48): n is a, c, g, or t
  misc_feature (53)..(53): n is a, c, g, or t
  misc_feature (55)..(55): n is a, c, g, or t
  misc_feature (146)..(146): n is a, c, g, or t
  misc_feature (212)..(212): n is a, c, g, or t
  misc_feature (239)..(239): n is a, c, g, or t
  misc_feature (246)..(246): n is a, c, g, or t
  misc_feature (248)..(248): n is a, c, g, or t
  misc_feature (252)..(253): n is a, c, g, or t
  misc_feature (280)..(280): n is a, c, g, or t
  misc_feature (317)..(318): n is a, c, g, or t
  misc_feature (320)..(332): n is a, c, g, or t
  misc_feature (334)..(334): n is a, c, g, or t
  misc_feature (369)..(369): n is a, c, g, or t
  misc_feature (378)..(378): n is a, c, g, or t
  misc_feature (429)..(429): n is a, c, g, or t
  misc_feature (431)..(431): n is a, c, g, or t
cttcctagaactctcctttaaatcggaaganatttgtaaaatgtgntntgttntncaactctacaaacatccaaaatacatttctggtcataattaatcgtatttgacattttcctctaagtttaatgcaactttaaataatttangctttttcctaacatgatagatttttttcagtatcagaaatggacaagaggtaactccagttaagngaaaagccatgtattttaaagggtgcngcctctnanatcnnactaaccacaatgtacatttaattgtncttaattgtatatttcatttaaattgtccttctcttnngnnnnnnnnnnnnnantcaatagttcccttcttaacataatataatatttnctctttatnaaatattaaccgattaacaatacagccgtgttgtttataagagtgtaactnangtcctgccaatcatgctgttgacacacgcctgtgaggttagcgaagtgatccttagcaaaatgtaaatgaagatcttcagacagtggtgtttataaaatagctcattaatgacttaggattgattcgctccaaccattcgcatcatcagatataataatagtgacgaatcagacagggaagatcctggctaaaccatttgcctttttttccagaagtactgaactcctaatatcacccattcttctaagttcctggacattgatccggaggaggattcgcagttcaacatcaaggtaaggaaggatacagcattgttatcgttgttgagatattagtaagaaatacgcctttccccatgttgtaaacgggctaagtttgacagtggtagttggcttttgcaacacccccttcccatttcgacatattacagattgaagaaaaagtttgttgctcaaaacttacagtttgtttctttgcagccccaaacgcttttagctaccaccacgggttgatttactagacccatttttgctctcaccgacttcgaactgtgcattttctcccactcttttgactgggggtggtatgcgggggggaggatggggcttggtgaagaaaaccagggaaaggcaaacgctgcctaaaactcccagggtggctcccctaagaattgctatcctgcttgtttcttttctcggctgggatccgaccgactcccaggtcgcctcggacttctttggaacttggtgggcggcgcctaggtgcggggttcgtggtgatctgggcgccgacacttaggccgggggcaggtttccttcctgggaccctttctcttccagaggctctcaagcctctaagcccgtgcgcatgccgcctaccaggtagatgcggcgagtggaaggcagccttgtcccgggcacgatcggcggactcagcttttcgcagtctctgctcccag

SEQ ID NO: 319472 - DNA, 1728 bp, Homo Sapiens
  misc_feature (7)..(7): n is a, c, g, or t
  misc_feature (18)..(18): n is a, c, g, or t
  misc_feature (20)..(20): n is a, c, g, or t
  misc_feature (26)..(26): n is a, c, g, or t
  misc_feature (60)..(60): n is a, c, g, or t
  misc_feature (113)..(113): n is a, c, g, or t
  misc_feature (116)..(116): n is a, c, g, or t
  misc_feature (153)..(153): n is a, c, g, or t
  misc_feature (158)..(158): n is a, c, g, or t
  misc_feature (162)..(162): n is a, c, g, or t
  misc_feature (182)..(182): n is a, c, g, or t
  misc_feature (184)..(185): n is a, c, g, or t
  misc_feature (210)..(210): n is a, c, g, or t
  misc_feature (214)..(214): n is a, c, g, or t
  misc_feature (237)..(237): n is a, c, g, or t
  misc_feature (240)..(240): n is a, c, g, or t
  misc_feature (250)..(250): n is a, c, g, or t
  misc_feature (256)..(256): n is a, c, g, or t
  misc_feature (260)..(260): n is a, c, g, or t
  misc_feature (269)..(269): n is a, c, g, or t
  misc_feature (271)..(271): n is a, c, g, or t
  misc_feature (273)..(273): n is a, c, g, or t
  misc_feature (275)..(275): n is a, c, g, or t
  misc_feature (283)..(283): n is a, c, g, or t
  misc_feature (287)..(287): n is a, c, g, or t
  misc_feature (289)..(289): n is a, c, g, or t
  misc_feature (294)..(294): n is a, c, g, or t
  misc_feature (298)..(299): n is a, c, g, or t
  misc_feature (304)..(304): n is a, c, g, or t
  misc_feature (306)..(306): n is a, c, g, or t
  misc_feature (314)..(314): n is a, c, g, or t
  misc_feature (321)..(321): n is a, c, g, or t
  misc_feature (326)..(326): n is a, c, g, or t
  misc_feature (341)..(341): n is a, c, g, or t
  misc_feature (358)..(358): n is a, c, g, or t
  misc_feature (368)..(368): n is a, c, g, or t
  misc_feature (375)..(375): n is a, c, g, or t
  misc_feature (390)..(390): n is a, c, g, or t
  misc_feature (415)..(415): n is a, c, g, or t
  misc_feature (432)..(432): n is a, c, g, or t
  misc_feature (445)..(445): n is a, c, g, or t
  misc_feature (454)..(454): n is a, c, g, or t
  misc_feature (469)..(469): n is a, c, g, or t
  misc_feature (497)..(500): n is a, c, g, or t
  misc_feature (502)..(502): n is a, c, g, or t
  misc_feature (504)..(506): n is a, c, g, or t
  misc_feature (514)..(514): n is a, c, g, or t
  misc_feature (516)..(516): n is a, c, g, or t
  misc_feature (523)..(523): n is a, c, g, or t
  misc_feature (548)..(565): n is a, c, g, or t
  misc_feature (571)..(571): n is a, c, g, or t
  misc_feature (574)..(574): n is a, c, g, or t
  misc_feature (727)..(727): n is a, c, g, or t
  misc_feature (980)..(980): n is a, c, g, or t
  misc_feature (1238)..(1238): n is a, c, g, or t
  misc_feature (1264)..(1264): n is a, c, g, or t
  misc_feature (1388)..(1388): n is a, c, g, or t
  misc_feature (1413)..(1416): n is a, c, g, or t
  misc_feature (1421)..(1421): n is a, c, g, or t
  misc_feature (1434)..(1434): n is a, c, g, or t
  misc_feature (1437)..(1437): n is a, c, g, or t
  misc_feature (1443)..(1443): n is a, c, g, or t
  misc_feature (1462)..(1462): n is a, c, g, or t
  misc_feature (1480)..(1480): n is a, c, g, or t
  misc_feature (1562)..(1562): n is a, c, g, or t
  misc_feature (1630)..(1630): n is a, c, g, or t
  misc_feature (1687)..(1687): n is a, c, g, or t
ccacggnttgcctaacangncccatngctttcaaataatgcacacatagtatcgcatggntcaaattccgtacatttcaatatggtcatgagataggctgtattccaaaattnggnatataaatccatacataatatatactatatacattgnctttnaatnatctaactatgtcatttttnanngtcaaagccacttatttctaatggnagtnaccatatgcatgccatattgccnccnattccatagncacccncccngcccccccncntngngggtgctntttntnctggngggnnggtgngngtgggggngcttccnttggngcgtgtgctgtttcncgccggcggttgggtgngggcggcttngggggtngcgggcgttattttnggtcgggccggttcggttttgagtntttaggtcattctcatncaacttcctctantttagctanaaccctcggcagggntttattgttacctttggccttacccttnnnngncnnntttgtttncntttcctnttcgcctggggccctcgcccccccnnnnnnnnnnnnnnnnnntggcgnggncggcggggacaattctaccctattttcttgcagtgcttttattagataaaaactattgttaacgttttgactttttagaatatactgtttagaaggttaatgctttttcatgactttaaaagtttctaaatgtattttattagtatctaagtnaaaattctagatttctatatggatattataaaaacacctcttctttagactgtttatttcaccttgatcataaaaaatcattgaatactacattcaagataatttttctttcttggctttgggctattgtcttttccacctttaaagttaaaattattgttttcctatatgtaatgatactttttaggcatagatttttaagatacaaaaataaaatgtagttttgtattttatcattaccacctgctgcaantgagtctgccagatcagaggctttcctccctaggaaacctagctttaaatcaaatactggttttcttcttgtaattcacacttgtctattgaatcagttacccaactttcttttaggattttaaactttctcttaaaagttcttctaaaagctttaaaatctgcaacacgactatgatcttccccaattattacatgagacactccctcagctaaacaagaaactacttttgctccatgaaaccgaagctccaaggcnttaatagctaaccttgtcccctcatntttggtactcaggtcattaataacagcatacgagtccaaataaacggtgtggcgtcgaaacatactgagaggagagcaatcccaggaataccgatattctaaatcagcaatcagagaagccatntcttcaggagtctgctcgttagaannnntaatncctgagaatactnccntcagtnggttcaagtctgtatcaangaaataactatcaccatngcaatcatattcacgggcaaaatgttctttggttgatgggcacatatgaatcataaagcgaggctgccatggtacaaagctnttggtcttaaaacattctaaaagccatgcaggcttgacaacatcatgtttatttgacaaaattatgtntttcactctgatgttctcagaccctgcaattacacagtacgtgtctgggcctggatnttgtactatataaccaccaaattctgcaattctgttctcca

SEQ ID NO: 319473 - DNA, 1728 bp, Homo Sapiens
  misc_feature (29)..(29): n is a, c, g, or t
  misc_feature (47)..(47): n is a, c, g, or t
  misc_feature (52)..(53): n is a, c, g, or t
  misc_feature (116)..(116): n is a, c, g, or t
  misc_feature (612)..(612): n is a, c, g, or t
  misc_feature (634)..(634): n is a, c, g, or t
  misc_feature (645)..(645): n is a, c, g, or t
  misc_feature (968)..(968): n is a, c, g, or t
tctcccagcccttgacccatcagcccctnttatttataacccaaganccacnnccccttccacagccctctaatgcactactccctcggccccaccttcttgtacgcccccaagcnggttgtgttgcagaaccgcttttgttggccctcgtggaagaggagctcagggccagggctcccggtcttggtgtagatgtaagccccacactggtcacaacagttggttttcagtcccttgttggcccggaatttggagaagcaagaatcgctgcagagccggtgtaccacgctgccattgctgacctcgtgcaggacctctccagtcttctggcatatgctgcagcgagtagcgtcggcgggatccccagactgggggatcgggcgctgctgctgggcctcatacagggagagacagacggatgtgcagaactcatggaaggagcctccagaaccagtctgcgccacaaccgagtccttggtgttccagatctccttcttgcagaaggtacaggtctttttgcccgagggcttcttggagaaagtggtgaggcaggatgacgagcagaagagctgaggcagccccttgcgctgataggcagtctgccccttctgnagtggtgtccggcaatgtgcancagtcatcttngtgcccactgcagagcgcccggccctttgtgacacacttgagcgtagggacatgcgaggagagcgccggggccggaatggcacaaagtcctcatcattggggtcatctaccatggcatcagaatcctcatctgacactggaatgctctcagtggaatctacaacctcaggttttggaggttctgctctcctaacgcgctcgcttctcttccgttcaggcggcttctcactcgccttcgcagtcagggcatctcctggcaaggaaggatgtgcaggggggctagagccccccgggtttggtctgagaactgttgattccatccncccagagtctctcccactgaagggctaggcggggcatttgggctctgtggctgcccttggggaagctcctcctcctgcccaggggagccccttcttgcagtagctatggaggtggtctcctcctcttcaatatgtggggactgcagtgttattggagaatctggagccaaaggctctagtagcccctcaggtgaacaggaatttgccccagcccctggatcaggtggtaccacctcaggggtctggccccctggtccaggctctagggtctgatctcctgcatcccatgccagggttccctcaggaccgtggtccacctccgggggagagggggctttatagagcagcccccccagccccagcaactcagtggctccatccaggactccagggtctttttccaggccagcaggggtatcaagcaggtccagggctcccgaggatggagaagggccagggggggcccatcctcgagttggggcagtctgggattccagtagatcctctccaaattccatgtctactggtaggtctccagccaggggcttctctggcagggtcaatgggtcaaatggactggggaaatcactggggtccatgagtatggctggatatgtactggctcaagagtctggcccccgtcacaccctgctcgccctacctcctggagcccactctacccgtgatcccctcctctcattcaaatggttcccggtcccctccccctccccgtgtctctcttagcttcccactcgtgttc

SEQ ID NO: 319474 - DNA, 883 bp, Homo Sapiens
  misc_feature (16)..(16): n is a, c, g, or t
ccaccaaattcatatnaatctagtccaagtaattgtgctagagctaagatactcaaacctgaaatcagaagagggccatgcattggtatacacgcccgcaatacagagactcagtccaaccccagcgagggatataggctatcacctgaataaccaatatggcaatgacgaaggagggttaatccaatcgctgtactaaacacatagtagtgaagtaatattaatatccctgtagaagtcacaattaaaccaaggccagtagcattctttaatgaatattcacctgggacgaaaagaatggctccaacaatgacaatgacagtgatcactagtccagcaacaagtaaagcaattgttttctcatccataccaccggatctatatttaagtgttttaataccaaactgtccccagaacaggagtatagcaaaaattgggaaaataacaataagaatattttcatttggagaaaaccatgaaacaacacgatattttagctcgatgatcgtttcaccttctctggttaattctgttacttcacaagtgtagtttcctgtgtgtgagacagcatcactcttatccatcttcaaagaggcatctccttttagtaattgtgagacttcaatttttgcactactaaagtcagtggggacagtggacttgtttagagctccatcaaaggtgtaaatatctcttcctttaaatttccactttacgtatacttcagtagtgttttgtgcctccatattagtaacaaagcatggaatgacgacagtgtcattacaaaacgtgaattctacagattttgttttattaaatagtagctgagctgatccgcagcacgccgagcccagcaacagcgccgctaccaggggccacatct

SEQ ID NO: 319475 - DNA, 1135 bp, Homo Sapiens
  misc_feature (93)..(93): n is a, c, g, or t
  misc_feature (186)..(186): n is a, c, g, or t
  misc_feature (293)..(307): n is a, c, g, or t
  misc_feature (454)..(465): n is a, c, g, or t
  misc_feature (633)..(635): n is a, c, g, or t
  misc_feature (638)..(639): n is a, c, g, or t
  misc_feature (642)..(645): n is a, c, g, or t
  misc_feature (647)..(649): n is a, c, g, or t
  misc_feature (652)..(652): n is a, c, g, or t
  misc_feature (654)..(658): n is a, c, g, or t
cgagagattggtattttgttaaggacacgggttgtggtttgttggcccaccaggggggcggaaaggaattattattgtatttgtaccggcganaggggagtaggaaacaaagagaggttggtgatttaatacctcgcccttggcgggaagctttcacatgtgttttatcaaagaggcggcggtgtntttaggggagagggttgggtgctcccataggggggggcgaaggaggaaagtgcatttggagaagattccgacccccccctttttctcatgaaataaaatggtcaccnnnnnnnnnnnnnnnaaatatttttgaattgtgggggggtcgcgggttaggggaaatccccgtgtgtggtaaagattccccgtaaaaatgccccctgagaggaacttccctttggggggattttttttcaaaaaaccttctcgtggtttcccccccgggggnnnnnnnnnnnnggggggggaattcccaagccctttgtgtccagggccccgggtttttccttgggaaacccaggttatggggcccaggttccctctttcccttatgtggggcccggcgcggcccaaaaggaatgggtttagaaaagctttctcgagggcccgagggcggccggacaaggnnnttnnttnnnngnnnttntnnnnngttttactcaaatggtttttattttcctatctgacatttctaacaaaacgccaggtagacggagttaaaaagaatccaccgcacgaaaggtaaacaaagcagaccctcagaaactccctggcaaggatgttcccctccccagattggcccagtttcaccagcaactggtctcagctcagccttatgcctttccactgacaccccccacccctccacattctcgtgattcagaccaggaacttctcggctgattgtgtccgtgtgtctgagggaggggcacgctggaacctgggaacctactgggcacctctaatgcagatgagaaaaacttgagaatgtgaaagtagatcagtccccgctcccacccgaaggtgcagagacgcgggacattaaccagcagcacgcgggggtgaagtaactcaggccactctcctccccactgcccagggcgggtgcacgccctcaggacctcctccc

SEQ ID NO: 319476 - DNA, 837 bp, Homo Sapiens
  misc_feature (7)..(7): n is a, c, g, or t
agatttnttcttcgccacttcatccactccatccacttcatcgccttttttctttctttcattcttgactcctgggagctgctcttcaagggcttctttatcctctgtagcaaggaggctgaagcccttgagctgactcgcactgtactcgggccggaaacccagctcctccctgttcttgacaaagcagcctggatggtaccagcggtcaatcatgcctagctgtggcttctccgggtccaccatcttcttggacaggcgcacctggcccttttctatcttctccatacaccccttgcacgtacttctgttggacttggcatactctgctgcaaagtcacccagagtcttctctgccttgctaccaattccatcctggcctttgcctgtcactcctccagcttccgctgtcttcttgactttctgctggtcatcccaccgaagctcagagaacccatccacctcaacgtcagggtgccggatggagtggcccaccttccagaagcaggagaagtggtaccagtgtgggacttttccatcaaacatgggcgactgcaccatgatggccatccggagcgagtccttggggatgctctcgctgcatttcttgcaagaggcgcgcccgctcttggcgtactcgactcgatagagcttatccgaagactccgccatcctcccctagctgccgccaaagctccggaagcccgacgccacgacctagaaacacgctgccgcctcgccgcctcgcgtgcgctcacccagccgcaggcgcctgagcggccagagccgccaccgaacacgccgcggccggccaccgccgttccctgatagattccc

SEQ ID NO: 319477 - DNA, 1065 bp, Homo Sapiens
  misc_feature (372)..(471): n is a, c, g, or t
tcgtctggtggtgcgtctcgttatctcccctgctatgtggcgtcagtgcacgctcgtggctgttcttgctgccatgttctctctgccactctcctgatgtagctcggcgatattcttcgcccgtttagatacgcgcgagttttgagcacatggtgcgtgtgccctcacgcggtgttttttgtcccgcgggttattcgtggtggggtctcgcattgtcccccgccgtgggtttctctcgagagtcgtcggctcgctgtgttcgctcgccgccttttgtgtctcgcctgccgctggttatgtgggcgccgtcttggtggggccgctgtgtgacagctgtggttgcgtgtggttggtccccctggggagttgttnnnnnnnnnnnnnnnnnnnnnnnnnnnnnnnnnnnnnnnnnnnnnnnnnnnnnnnnnnnnnnnnnnnnnnnnnnnnnnnnnnnnnnnnnnnnnnnnnnnncagactttcagcccctttaattaggtgctctgagaagaggtcagaatggcaggcagggggtggggaaggcggtgcttcttgagccccacttagcaactggtcactcatcctctggcagctggatcttgctggggtcgaagcagttggattccatgatgggaaggccattggcctctcggtatttcacaagcctctcagcttcgcggcgggaccactctttcatcctgtagtcaggcagataggccacaaaggtgctgccaaggaccaggatgatggagacgccaaagaagaagacaagtcgcatgttccagacgtccaaaacggggtccttgtcataaccatgggagtctgggttcttctcatacaagttttcgtcctcgggttctgggtcctcttgccacggtgtggtcggttctgggggccgctttcccgccacagcggacggggcgaccacagtcctggagaagctagattcccagcggacgcgggcggccgggagccctcgcgtcgccgctgccgccaaaagacggcgagcgctcaaaccaaacagcccagccgccatgacagatggtgctgcagggtctcaggggcccc

SEQ ID NO: 319478 - DNA, 620 bp, Homo Sapiens
ggtttccactttcagcccctttaattaggtgctctgagaagaggtcagaatggcaggcagggggtggggaaggcggtgcttcttgagccccacttagcaactggtcactcatcctctggcagctggatcttgctggggtcgaagcagttggattccatgatgggaaggccattggcctctcggtatttcacaagcctctcagcttcgcggcgggaccactctttcatcccatcccacgctcttggacaccctgtgcacctgtagtcaggcagataggccacaaaggtgctgccaaggaccaggatgatggagacgccaaagaagaagacaagtcgcatgttccagacgtccaaaacggggtccttgtcataaccatgggagtctgggttcttctcatacaagttttcgtcctcgggttctgggtcctcttgccacggtgtggtcggttctgggggccgctttcccgccacagcggacggggcgaccacagtcctggagaagctagattcccagcggacgcgggcggccgggagccctcgcgtcgccgctgccgccaaaagacggcgagcgctcaaaccaaacagcccagccgccatgacagatggtgctgcagggtcccc

SEQ ID NO: 319479 - DNA, 1438 bp, Homo Sapiens
  misc_feature (251)..(251): n is a, c, g, or t
  misc_feature (344)..(344): n is a, c, g, or t
  misc_feature (346)..(346): n is a, c, g, or t
  misc_feature (367)..(367): n is a, c, g, or t
  misc_feature (409)..(409): n is a, c, g, or t
  misc_feature (422)..(423): n is a, c, g, or t
  misc_feature (436)..(436): n is a, c, g, or t
  misc_feature (450)..(450): n is a, c, g, or t
  misc_feature (490)..(490): n is a, c, g, or t
  misc_feature (505)..(505): n is a, c, g, or t
  misc_feature (516)..(516): n is a, c, g, or t
  misc_feature (579)..(579): n is a, c, g, or t
  misc_feature (594)..(594): n is a, c, g, or t
  misc_feature (684)..(684): n is a, c, g, or t
  misc_feature (710)..(710): n is a, c, g, or t
  misc_feature (747)..(747): n is a, c, g, or t
  misc_feature (938)..(972): n is a, c, g, or t
acaaaacaaaacgcttttatttggtccattggagcctgagtcggaagccactgtggagaatcctatggtaaaggaacgggactgacaattgataaaatagtctctgtgtcacaagagctggccgtatttacagggttaaaaatattcacagctcagagtacagggaggccaaaggggagtgggaatgtttctccaggtgaaaaggccccggacgcccctgccggtgtaaggagggggagtgggggcgcggncggcccgctgcctggagtgaggggccaggaaggcacgccgagagctgggctcagacgtccactcactcctgggcttctgtggggaggtgggtncngctgggccctgcccgtgcccncggtgtgctggggtccctctctggctgggccgggccgtgggnctgggttggctgnngtgcctgctggtncctgtgtgcccggntgctgtgtgcggtgctgtgggctggtgccctccctcggcnggcctggtgcccgcntgctccctgtngtggcttcgttcctggcgggctctcctggttttgcgttgtgtcgctggggggctggtcttggncgccttcttctgtgnccggcgccgccccgggtctcgccgctccacaccagggctccagggaccccgcctgccctgtgggggacagggacccgggctctggggganacctgcccttatgccccgtgagggtnggtccctgatccccccccagggtcttggcctctgccncccagatttggttttgcggacagagctcctggctgcttagcccgcaggagaccctgagcccccaggggggggcagcctggcctcggcccccgtcgggtgttggggctggcaggtgagcggggctggttcacagcccgcctggttcgaggtattctgcgtggcggccaggaggcctggccaggcggactgtnnnnnnnnnnnnnnnnnnnnnnnnnnnnnnnnnnnccatgggaagctgagccctgggctggcagctccctgggcggggtcctgagattctggctcaagcgtcctctgtcggggtctccctcataaagtgcgtgtgggggtggggggtccgtctgtgcacagcccctgccccaggcatggtggtcacagcggtcggggcccatgcagaccggcgacctctggcgtgagtggggggctgtgggtccccttggaggctgtccagtcactgaggaaggcctgggctgccttgcgatgtgccaggcggtgggtgatagagaagccggcgttgccctctagctgggacaagatcaccaggacctgcctgtgcaggggtggcacgctatcctgggtacgcaggctgccgcgtgtggacaccacgttgaagctgtcggtgcagtcacactgcacgtgcaggtaggccttggggtgtcggttctccaccaccacgatgagccccgcccaa

SEQ ID NO: 319480 - DNA, 1663 bp, Homo Sapiens
  misc_feature (20)..(20): n is a, c, g, or t
  misc_feature (30)..(30): n is a, c, g, or t
  misc_feature (32)..(32): n is a, c, g, or t
  misc_feature (1446)..(1446): n is a, c, g, or t
  misc_feature (1448)..(1448): n is a, c, g, or t
  misc_feature (1612)..(1612): n is a, c, g, or t
tcttgtcctacccccaaccncgcacacccntntcagcctcgaggcctgggtggcgaattcggcacgagggtcgcgcggtgcgctctccctccctgcccgcagcctggagaggcgcttcgtgctgcacacccccgcgttcctgccggcaccgcgcctgccctctgccgcgctccgccctgccgccgaccgcacgcccgccgcgggacatggcacacgcaccggcacgctgccccagcgcccggggctccggggacggcgagatgggcaagcccaggaacgtggcgctcatcaccggtatcacaggccaggatggttcctacctggctgagttcctgctggagaaaggctatgaggtccatggaattgtacggcggtccagttcatttaatacgggtcgaattgagcatctgtataagaatccccaggctcacattgaaggaaacatgaagttgcactatggcgatctcactgacagtacctgccttgtgaagatcattaatgaagtaaagcccacagagatctacaaccttggagcccagagccacgtcaaaatttcctttgacctcgctgagtacactgcggacgttgacggagttggcactctacgacttctagatgcagttaagacttgtggccttatcaactctgtgaagttctaccaagcctcaacaagtgaactttatgggaaagtgcaggaaataccccagaaggagaccacccctttctatccccggtcaccctatggggcagcaaaactctatgcctattggattgtggtgaacttccgtgaggcgtataatctctttgcagtgaacggcattctcttcaatcatgagagtcccagaagaggagctaatttcgttactcgaaaaattagccggtcagtagctaagatttaccttggacaactggaatgtttcagtttgggaaatctggatgccaaacgagattggggccatgccaaggactatgtggaggctatgtggttgatgttgcagaatgatgagccggaggacttcgttatagctactggggaggtccatagtgtccgggaatttgtcgagaaatcattcttgcacattggaaaaaccattgtgtgggaaggaaagaatgaaaatgaagtgggcagatgtaaagagaccggcaaagttcacgtgactgtggatctcaagtactaccggccaactgaagtggactttctgcagggcgactgcaccaaagcgaaacagaagcctgaactggaagcccggggtcgctttcgatgagctggttgagggagatggtgcacgccgacgtggagctcatgaggacaaaccccaatgcctgagcagcgcctcggagcccgggccgccctccggctaccatccccgcagagtctccggtgcagacgcgctgcggggatggggagcggcgtgccaatctgcgggtcccctgcggcccctgctngncctgcgctgtcccggccgcaagagcggggccgccccgccgaggtttgtagcagccgggatgtgaccctccagggtttgggtcgctttgcgtttgtcgaagcctcctctgaatggctttgtgaaatcaagatgttttaatcacattcactttacttgaaattatntttacacaactaattgtggggccttcaaattgttttctcttttcatattaa

SEQ ID NO: 319481 - DNA, 1523 bp, Homo Sapiens
  misc_feature (46)..(66): n is a, c, g, or t
  misc_feature (68)..(68): n is a, c, g, or t
  misc_feature (181)..(181): n is a, c, g, or t
  misc_feature (184)..(184): n is a, c, g, or t
  misc_feature (248)..(248): n is a, c, g, or t
  misc_feature (285)..(285): n is a, c, g, or t
  misc_feature (333)..(333): n is a, c, g, or t
  misc_feature (453)..(453): n is a, c, g, or t
  misc_feature (470)..(470): n is a, c, g, or t
attaaatcctcaattctcaaaattatatgtatatatttttaattannnnnnnnnnnnnnnnnnnnncncgtccattcccctccctccaaactaggtattgtccaagtagtatcaaatgccacaaagtctaccatgcacccagaagcagagaagacaggaggaccagaggacaaggtatgcnggngtcactactcgcactgcagagtccacgcgagtaaactcatgcagggagcaaagaatggaaaganccaatacacagacaaagcaaaagaacgaaatgcgcanctgaccagagacgtttacaatttataccaacttacaaatatttagggngcccaccaactccgagagaacagaccaaactaaccacatgaaggaagacctctgccggggcctcccctccctacaacctcctctcaagaatcattaggaagcccaaacagcttcacagtnccggcttcccggctgcngtcatatttgccgtctttgtcatcacaggcaaatgccagcagaggccttttggggtgccacgccactgtgaaggtcggagactcacactgtacctcccatagtttgtcccccgtctccacttcagcaatgtcaataaaatgatcttccgatgctgacgccagcattttcccatcatggctgaaactgagggttcttacaggccaatccagcctggaaaagcaccgaacacacactaactcatcccacatcccagaggctgaccaaagcatctgcacttcctgtggcaaagtacttccccatggggtcaaacttgatacagatgcagttggaaggatgggcgttgatggactgcacaggcttcagttctgggtagctgaggatgttgatacaaccattgccatttgtcaggaagaacatattattgtcattgttccaggagatttcgttgacctcgaacttgaactgctcttctgctttggaacggtgtgtcttggcatcaataaaggtcaccacatcatccttgttgcctacagcaatggtctgcccatcaggactccagcagatattaatgttctcccctttagtgttcacagtggcaatgcattttgtagtcctcacatcccagatgcgaatggttttatctccggacgccgtaacaaataggtcaggattacttggatgccaacaaagctggtccacactatccccatgtccccgataattgttttctttgaccaaccggtccttctccagcaagaagacgctggccgtcttgtcgaaggaccccgaggctaggcgacgcccgtcgcaactccaggccaccgagtgcaccttggcgctgtgcgccaggaactcgcgcgtcttgctgtggccccggaacagctcctgcatcccaagcacgtagcgcgacgggccgctgctcactgagcaccacggggccatcgagccggggccgctctggcccaacgccgagggccccatggctgcagcggggaccgccatgccgagctccccagcttccaactcacaacactgcagcagcctccacggcg

SEQ ID NO: 319482 - DNA, 431 bp, Homo Sapiens
ttttccataataacaaaagtcagtttattaaatgctcaattctcaaaattatatatatatttttttaattatttaaaaaaacttccatgcccttccattcccctccctccaaactaggtattgtccaagttgtatcaaatgccacaaagtctaccatgcacccagaagcagagaagacaggaggtccagaggacaaggtatgctggggtcactactcgcactgcagagtccacgcgagttaactcatgctgggggcaaagaatggaaagagctaatacacagacaaagcaaaagaacgaaatgcgcagcctgaccagagacgtttacaatttataccaacttacaaatatttagggtgcccaccaactccgagagaacagaccaaactaaccacatgaaggaagacctctgccggggcctcctctccctcc

SEQ ID NO: 319483 - DNA, 1538 bp, Homo Sapiens
  misc_feature (128)..(128): n is a, c, g, or t
gctttctaaagtggctttaatatcacacaagcggctctttggtctacagtgagagaaaacagagggagccaggaaaggctccccgctggcctctggagtccaggagccttaggaaggctgaaagcagnccctgaccagcaggcttagttgtcctgagaagagccagtgaggccacctggtccagttcaccaggtttcccagggaagcacaggcatctctgggtccccgagcacagtgccagggaagacacccccaatccccatctgaacaggccgagggcagcatgggaaaggctcagactgcaggttcatcccgcaggatggtaaggacacgtgctcctccctcgcagagcaggctgtgcacagcccggccacagggccagccagggcggcccctgcggctgtgcagcgcttaccagggggaggagttcagccatcaggaccttttccaagtggatctgctggtccagcacagccactcgcagcttgagggccgccagggtctgcagctcctgggtgctggagtagacaagcagctgggggctccatgcaggctccgctctacccccacaggacggcgaggctccggggggcctccccacaggacatggtcttggtggctgttccgccaccgctgcacgcagctcctgcagcctgtgcagacactggcccaccatggcctgcagcccctccagcgtgagccaggcagcggtactcctgcatccagtccatgggggctgccgagagctcctccctcatgcgcagtctcagcagcgagcaggccttccgcaggcgccccgcctccgcctccacctccacagcactgagcctgggctggggcccgcctgaagctgtctgcatgttctggaggaactgggttttggcagcggcggcatccgtggaatcactggtctgtgtggaactgagctgggcccacaggctcgagttctgggaagctgctttcctgaatgccgcaggcagccgcagcaggtgccccttctccttgagtgtgaaggcttctggggcctgaggagcagcggatggggccatttgctggtccctgaggcccgccccaggcctgggggttcgggctcccatcccaacacgggtcccatcccccactgacagcagccggcgctcagggtggcccttggcaggcaccgtggtctggcggaggcccttggtgggtctcgtgtctgaagcatggccaccagcttggcctggggaatgcggtggggcggaggctgtcgtgccagaagaggtgacaatggacctagatttcaggctgggggccttgtctctctctccggccttagtgatgcctcttcgaactcgtacagccttctccagtgcctgggtcagaaactccaactctttgaggtcttgtggactgggtgtgcatgctggaagggggtcctctccattagtttctggccctggaggtggcttcaaagcccgggtcccagttggttcccggcgcgagcagcccgccggcagcatgaaggcggcggcgtctccttgcaatttgccgcctctgaa

SEQ ID NO: 319484 - DNA, 1638 bp, Homo Sapiens
  misc_feature (4)..(5): n is a, c, g, or t
  misc_feature (12)..(12): n is a, c, g, or t
  misc_feature (41)..(41): n is a, c, g, or t
  misc_feature (66)..(66): n is a, c, g, or t
  misc_feature (92)..(92): n is a, c, g, or t
  misc_feature (268)..(268): n is a, c, g, or t
  misc_feature (504)..(515): n is a, c, g, or t
atanncataccngtctttatacctcattctatgcgtctggngccaagtcactgtgtggcacatgtncagcttccccgaatgcctcacatgtngtagcacctgcttccaggaacaccaaatgaacacagggtcttggaggggaagtgggggaagaacccataatgccccaaggctgcatggaaccacaatccagaaatgtgcatcctgacctggaaggcgtctaaccaagtgtccaaggggaaatatgatcgagggagaggtgagaggngggacccagagggcagacaggagagggttgatttccaccctttcttctgcgttcagcatatccaaaaggcccaatacagttgatgggccaggaactgcatgacctggattttctccctgtagtgacccacgatgttaattgatgtagaggacagtttgcaaaagtaatagatttgcccttaatcccagacagtatgagatacaattctgggactttgtcttcgtaacctgtctttnnnnnnnnnnnntgcttgctttgtataacataatccagattccctagagcagatgtggtacagcaatgagcaaatccaccctcagatctgaagtgtcttccagtctggccctgacccagccattctctgcccttccttctccctttagggtagcccaaatcccattgccacacaacatctcaacttaccatccctttcctctatccccatcccctctgtctgcgtcacagaaagtctgtgtgttctgaagagttcagccttcctctaaccaaacccacactttctttaccaccgtgattctcagagccagcaagaaagaaatgttccaaaaggaaacctccatctcagccatttgcccggagccgaaggttgtgggctccaggcttctcagtgaggtttgttgcttgtgtgtttcccgaggagcgggcagtcaggcagtggtggttctctctcccctctctctgtcgcacgtggggtctcagctacatttacaagacttcaccaccatgttggagagctgctccactttgggggtcctcccaacatagtacaggatggtcaggggctccaggtcctggggcacgcagcaaggcgaggcagatgcttcagggttcagagtgttgtacagtcccagcaccgtgctgtgggttgtgtctgcactgcggaggtatgggcaagggcctgagcagaagttggcatagtagcccttaggttcatggacccacttccagcccagatcctgtcggaagtcaatgtagagggggcgcacacagcagttctcctccaagttgcggaagcagtaattggtgtccaaagcccgcttcttcctctgacccccctggcccgggttgtcgagccggtgtgggggaatcatcatgaggattagatgagggttgtggtgatccttctgcttcttgaggcgccccagatctccacggccatggtcatcctcattgtccacgcctttgaatttgatttccatcacctcgtgaatgttttccaggatatctccattgggctgaaaggtgtgacatggacagtgaatgctgatttctagacctaagttggactctcttctcaacagccactcacgcacagtgtcagtgacatcaaaggacagccactcggcagtgcc

SEQ ID NO: 319485 - DNA, 466 bp, Homo Sapiens
agtttcttttattggtggttttaagttgattttctataaatgttttttgttgtagcaacttggaggagaactgctgtgtgcgccccctctacattgacttccgacaggatctgggctgggaagtgggtcccatgaaccctaagggcttactatgcccaacttcctgcctcaggccccttgccccataccctccgcagtgcagacacaaccccacagcacggtatggagcgaggctcatgcccatctgaggcactggggctgaccgaccagaccacttgttaaaaagaatgagtgaaggattgaatgttgagtgagcaaatgatggtctggggtgagtaaaattcctctggtgaaggttcttatcttggcaccctgactcagttctactcagtcacattctgcccttttaaattcctaccatagtttcaaccagctttttaatttgctttgtccaaagctctctgta

SEQ ID NO: 319486 - DNA, 971 bp, Homo Sapiens
  misc_feature (795)..(795): n is a, c, g, or t
  misc_feature (954)..(954): n is a, c, g, or t
tttttaacttacaaaaaacgtattattaatccagtttcctcttcttgccataatacataagcatgacacagatggcctgatacatcagcatggaactgtcagaaagccccaccagtcactgcttctagagttacatgactggcttttgtttggcaacaggacaataattacagcgtggtttcaagtaccatacacaaagcagaccaaccccaggatctccagcatctgcgaaggctcactggggtaggcctgggaggaagaatccaaagcactgtacagatgatcaaaacacttccggtagaacactgctgcagctgcacctctccttacagagccagagcctgctccatcagaggcctgcttcccttggctgatggtcagaaggctgcacaactggatcgccctaggatacagtcccacatgacatcccaaggctgggccaccatcatgatctttccagctggtccgtctagccaagtggtgctactgctgcttgtgtggaaggggcttccaggtgggtgggagcttcctgtggattagggtgagtccgcagagaataaggaacactcctccccaccacaagacctcctggcactctccatacagcacatagcccaggaaggccgagctgaggatatttgaaaaagtcactgtgacagatgcaatggctgaagacatggagaaactgaggccccggctaaagaaggtccacatcagagaattggtgctcgccatcacaataatgcctaagacgcataaacccatgctcaccacctcgctgccgaaggccagctntggcggaggcggcggccagggccccgaacgcgccggcgcacagacagttgaatacgccccaaaagcggcgccgcatcgcacccgcctggaggtgcggagggaattccgcgggggtgtcagggtacgcggtcgcggacacggcgccgcccggaggccccnctctcggccatgttgcc

SEQ ID NO: 319487 - DNA, 1447 bp, Homo Sapiens
  misc_feature (26)..(26): n is a, c, g, or t
  misc_feature (145)..(145): n is a, c, g, or t
  misc_feature (152)..(152): n is a, c, g, or t
  misc_feature (231)..(231): n is a, c, g, or t
  misc_feature (233)..(233): n is a, c, g, or t
  misc_feature (247)..(247): n is a, c, g, or t
  misc_feature (262)..(262): n is a, c, g, or t
  misc_feature (269)..(269): n is a, c, g, or t
  misc_feature (281)..(281): n is a, c, g, or t
  misc_feature (1329)..(1329): n is a, c, g, or t
tgatacaaattcattattttaatatntaaagattgtggtagtatagtcaaaacacataaatattataatatacatttagaaattaaatataaagtcaacacaacactccttaaaaactcatatgtacacttccaataagtctcangtttgancattcaagctcatcagatttccccatggaaatgggtgaatcttgcagggagattgtccacaggatacacggtgggactngntttcattgtaggangtccatttagaagcngccagtnacaatgcctggncagctccactgtaaatattttgagaagaatttttgcaaattctttgcctacacagctcctaaggcctcctccaaatggaatgaggctgaacctggatgcatcctctgggtgaggcagcatgaatcggtcaggattaaattcttccttgttggtgaagatctctgccacatcatgagtatcacagatactgtagataacattccagcccttgggaatctggtatccatttaattcaaaagtcttcagagcaacccgaaaccctcctggaactgggggattcagtcgaagggtctccttaataacacacccgatgtatttaagttgttccaaaatttccatgtccaacttgttgtcttgattgctcttgcaaagtaaacccttactcttcagctcttctcgcactttctggagaacatgtgggtagagccccaggtaagtgatcagagatgtggctgcactggccgtggtttcgtgtcctccaaaagaggagttcggttgaagattgctttagtgcctgcatgtccagccgctctcccctctcccacgagtgctcgatcaacagctgcagcgcgtcttttgcagccctggcccgcctcggatgcccgcagcccgcagatcttggcgcgtatgttctgctcgatgcgcgcgttaattgaggttccgcgccttcatgccccggtacagcccgctgaagggcacgtcgatgggcagcgagaagagattgcgggtcatttcctcgaaggcctccacaagctgctgctcggagtccccgtcgcccgccagttggggttcgcagcccagtaggatgcgcatggcgattcggaacatgaggcgcttcacctcggggtagaccaggaggccgcgctcgccgcagctcagccactgctccaggctgctgcccacttcctcggtgatcaccggcacgtagcattcgagtgcctcgcggcttcttgcgctgcttgtgcgaggagtcgtgcaggttagagaggcagccagatcccagaatggtgcgcaccgacgctggccagtggaccgacaccagccggtntctccgagcaagatgcgccgcacattgtccgcgcccatcacccgtacggtgggccgcccgaacagatgcgtcttgtagatgaagccgtatttcctgcgcttcatatcccgggaattcc

SEQ ID NO: 319488 - DNA, 1529 bp, Homo Sapiens
ttttttgacagagaacaaatcggtataatatgaagctgcctgcttcaagaaatccaaatccatttccattaaggaagaaatgtctgtttttgccgccctcatcgtcacggaaagagtagggtgcgctctctgcctagcagaaggagtcacaggctcagagcaaactcattcaaaggatgttatttcatcaatccacaggggaaggagtgactggctgagcaacgtgtcgagagagcccagcctccagtgtccctcacttgaccctccgcaggtggcgaaagctctgcacggtcctctccatagcatcatccatggtcactagtggctggtagcccatggcctttttggctctctcgcagctgtagtagtggaatgtgccagccagtgcgacccgcatgggtgtgaaggtgggctgcagctggatgacaggactgatcaccatcaccagcagggatagcaggagggccaggtagtaggccacccagtaggggatgtggtacttgggggcctcataattgaggcctgtcaggatgcgagacaggaatgtccagaaagggatgggctcatcattggtgatgtgaaatgccttcccacccagtgtcgagtctcgggagagctgctctgccgccaggatgtgtccatggaccacgttctccacaaaggtgaagtccaccaagttcttcccatttccaatcacgaacttcatcttgccgttcctggctgcctcgatgaggatgggtaccaactgcgggtcccttgggccgaaaatgccatgagggcggatggctgtggttaagaaattcttctcaggatcgttggcgcccagaactgccctctcctgtaagatcttagtctctgtgtagtagtcaatgggtttcatggcatagggaaggtcttcagttccattcttgatatcgacgccctcaaagatgacactggcactgctggttaaaatgagtttctgaaccccagcctctttgcaagtttcaatgacattcttggtgccaatgtaattcactctataaaagagctccttgttgttactggatggtgggggtgacgcacagtggaaaactgtgtttacacctttcagagctgggtacagatcctgtcggctgcagaggtcacccagaaagaaccgcacctggggattatcaaacccttgctggatatcaaatacattgacagcatatcctcttgccagcaactgctccaccatgtgctgccccaggaatccagagcccccgatcactgtgcatctcttggcctgattctggttaaccttttctatgtcagcattcactttgggagtgtcctctgtcaaatgagtccgtgcgacttggtctctcattggctcgctaactgctggttccatttcgaagcaaaatatggtcccgtttgtaatcaacttttcttttccgtccgtaggcgcccccctgtctggcctcagctcgcaagcaggctgcacccactgaactccaggcccggaccgccaccctttactcccctcccgcgtgagccgagaatca

SEQ ID NO: 319489 - DNA, 1161 bp, Homo Sapiens
  misc_feature (9)..(9): n is a, c, g, or t
  misc_feature (12)..(12): n is a, c, g, or t
  misc_feature (15)..(15): n is a, c, g, or t
  misc_feature (17)..(17): n is a, c, g, or t
  misc_feature (19)..(21): n is a, c, g, or t
  misc_feature (25)..(25): n is a, c, g, or t
  misc_feature (44)..(44): n is a, c, g, or t
  misc_feature (47)..(47): n is a, c, g, or t
  misc_feature (61)..(61): n is a, c, g, or t
  misc_feature (65)..(65): n is a, c, g, or t
  misc_feature (68)..(68): n is a, c, g, or t
  misc_feature (75)..(75): n is a, c, g, or t
  misc_feature (93)..(93): n is a, c, g, or t
  misc_feature (97)..(98): n is a, c, g, or t
  misc_feature (109)..(109): n is a, c, g, or t
  misc_feature (114)..(114): n is a, c, g, or t
  misc_feature (206)..(280): n is a, c, g, or t
  misc_feature (306)..(320): n is a, c, g, or t
tgccaaggnctntcncnannncccncctttaagatttcggccanttntgtggtcatgcctntatntcnccagttnggaggccaaggcaggggnatcnntgggcccaggngtttnagaccagtctggacagcatagtaaaaccccacctctataaaaattttaaaaattagctgagagttgtggtgcacacctgtgccccaagttannnnnnnnnnnnnnnnnnnnnnnnnnnnnnnnnnnnnnnnnnnnnnnnnnnnnnnnnnnnnnnnnnnnnnnnnnnagagttaagaccctatctccattttnnnnnnnnnnnnnnnaaagcatttcaaactaacagcggtttaattcttcctttagtatctaggtaaaactggtctttctctataaagtctactatcttctggtctagtttcaaaaagtataaacaccctgaaattaaaacatgaaatattaagaaaaaagatgatgtggaggccaaaaaccaggaatgaggtagtcaacagtgtggttatgtgacccctcatctcacacttcgcagaggcacgttcaggaagccactggctgccactgcacaaggctgctccaagattccatgtcacctgggcctgtgagttatttgaaacagcaacctaaccccacgccaagctgggctgttttctccaaaggaattctcaactgtcttcaacagaatttctgtgcaagtcagccccagacagtgggaaggtggtgttatgcctggggatgtggtttctccgagcagcagtgatgtttggagattaatactgaaagctgcgctttgtctggatatcatcaagaatctgctgcagctcctcatcttcaaaccgtccctccaagcttgggattagagccttggattcctcagcagtctctgggcaaacggttggccaaacaggccaactcaaacttatgaagctttttctggagtagcaagctacgaacactggcaatggtctctctgtttttgaaacgactgaaacgggctgtgtagtttaatgttttcatgaagacttctgagagctcctgttcgtcctctgcactctcattctgctgctttcgatgttccagaagcatatgaacttctgaatttagaagtgtctcagctgtttcaaactctttaggaaagatgagctgtgaggc

SEQ ID NO: 319490 - DNA, 1328 bp, Homo Sapiens
  misc_feature (63)..(73): n is a, c, g, or t
  misc_feature (126)..(126): n is a, c, g, or t
ttcaagtccccgggtctcctttgggaacacgggtatgccccaggttccataaacctccggggnnnnnnnnnnnaaacaaaaagttttggaaaagcttttcaagggccgaggccgccccacaagganaatagtggctacgcgcttgtggaaaagctttccacatatggggtgatatgaaagccgggtgtgtttttgggcgtggaggggatttattcatgagaagactgagggtccatcagggagactgttccaatggtgacaagctccagaagcccgcgtcgcaacagccaggagggccaggccaccccaggcaggaggcagtgggctggcagccaccctgggcacagaagagcagacgcagacagtgctgggcaacgaggggctttcttcatgggcccgcctgccctgtccctccccccaggtccccaccttctagggttaaagtgcagctgggagggaggaggcaggcagaattggggagctagagagagcccaagtgaaccctgactgtccacgcaagtcccatgtcctcctcgtcctggagttcctcgaggttcagcgagcccatcccgcctagggcctctggaaccttggggcgagggaggtaacccctcactcccacacccatccgatatttacaaagagcatccctgggagaggggagaaggcggccggctctggcagctttctggggggcctagaacttggggcacagtgcggggcactaacatttctaacagggagaggagggggatgctcgtcttcagggatggtcttggggggttgtccccctccttctggccttggaagactcttccctttccttcttcccctcctccccttcccccaccaggcaagccaaggaagccagagaaaggcccggagagcctggctcccagctcccgcgccacgagtcagcagggtcctgcacaggcctgactcccaaacccctccgctgagggagggccacttcagtgccactggggcgacgcttccctggagatgggaagtggggtgagaggcattggggaaacctgtggggccggagcctcctgtttctgccagtggtctttctagcccagccctccctcaagcctgaggctggcaagatgctcacactaagcccgggacctcagcagtaccatctgcacccccagggaccttagcccgattcatgccatcttggatggcctcccccagcactcaatggctcagccaacttcctccccctcccacaggcacatctctagaagccagacaggaagagaccaccccccccaaaaaaagagccctgaagacctctgcttcctccccccactcttgaatat

SEQ ID NO: 319491 - DNA, 999 bp, Homo Sapiens
  misc_feature (719)..(719): n is a, c, g, or t
  misc_feature (834)..(834): n is a, c, g, or t
cataaaacaaatttattttaaaaatcaatatcttgcatttcagatatacagatgtatcttttaccagcaggtgaaagcaccttttccagaatctgcttccagcagaatcaatactgatttcgaaactggttgcttaggtcttggagctctgtcactaaggtgtccatagctgttatgtcatcagctaattccctggacatttctccagttgccacatctgtaaaaagttgctttgctttagataacaagccccgtaaattgagtcgaacagaagaaagcatttgtacagcttcttgggaactggatttgtttttactgcattttatggccacatgtgcaagtcctaaggctctttgaacaacttccttaaatgatgtaatatctttctcccaacaattggactgggtgtcacacttgtatgcctttgagaggcactggaatgccttttcattttcatcaggcttttcactctgcccatttccatatacgtgggcatacagcctccagatttctccatcatttgtcactcttgaagtcactctgccaaataactcctgcagctttcctttgaggccagttgcaacatctccacttcgatcagtcatcccatcaatcactgccctgactagaatttttaggacctgaacatctttgtatttgtcacgtaagtccaagagccggtgataagctttaatggcttctgaaaattccccaacgtncagtgctggtgaggatgtagtttttcccaaatctgccagtgttcatagttacacttgagagcttcttgtaaagttctaaaagtttttaattttttgttttaatcggatatggganggttgacaaattgttccaagcttcagcattatcgggttctagagtcacacagcgctgaaatgcctttgctgaaccttgatagtcttccaaggccaaataggcacaaccgagagaaaaccacaccccgagctgcatgggattaatcttaaccgagcgttcgaagca

SEQ ID NO: 319492 - DNA, 1032 bp, Homo Sapiens
  misc_feature (977)..(977): n is a, c, g, or t
  misc_feature (1008)..(1008): n is a, c, g, or t
  misc_feature (1010)..(1011): n is a, c, g, or t
  misc_feature (1014)..(1014): n is a, c, g, or t
ggcctgggtggcgaattcggcacgaggcgtgtttttcccagggtgccccgcgctgctgttatggccgcctccttgaggtagtatccgcacatggaattctagggccgcaggtgtatttacggtaactgtcgccactagatttcagcgcctttggactctcctgttttcactttcttttgttgactcccgtgtggccctcgtgggagcctgttttggctgcagcggtgtctggggtgatgtggaccccggagctggcaattctgaggggattccccactgaggctgagcggcagcaatggaaacaggagggggtcgtcggttcagagagtggatctttcctacaattgctgctggaagggaactatgaagccatattcttaaattcaatgactcaaaatatttttaattcaacaacaaccgctgaagaaaagattgatagctacctggagaagcaggtagtaacattcctggattactcaacagatttggacacaacggaaagacaacagttgatatttctacttggtgtgagcagtttgcaactttttgttcagagcaactggacggggccccctgttgacttacaccctcaggactttttgtcatctgttttgttccagcaattcagtgaggttaaaggactggatgcatttgttctgagcctgctcactctagatggtgaatcaatctacagcctgacctcgaagcctatactactgttattagcacgcattaatcctagtggatggtaagacataaactgacagctattcagagcttgccatggtggactttgagatgtgtgaatattcatcagcatttgcttgaggaacgctcacctctgctttttactcttgccgaaaactgtattgatcaagtgatgaaactacagaatctgtttgtagatgattcaggtcgatatttggctattcaattcatctggaatgtgcatatgtgttttatattattatgagtcngaaagcaaagatcagtggatattgctaaggnanngcnattacaattgattgacag

SEQ ID NO: 319493 - DNA, 1162 bp, Homo Sapiens
  misc_feature (92)..(105): n is a, c, g, or t
  misc_feature (884)..(884): n is a, c, g, or t
  misc_feature (924)..(924): n is a, c, g, or t
  misc_feature (998)..(1010): n is a, c, g, or t
tttttttaaccccacagaatatatttaattcaaattaaacatgaaacctagaataatgttgggtccttatcaagtagcaattacattgtttnnnnnnnnnnnnnngaacagtacatttctgtctacattccgacaatccaacgaggcggcatgggtcacatccagtttgatgaggtgacagagccagcagtcaccatccatgggcatggttctgaggggactggggagacacagaccatacatgatacaaaatgattctgcagcaagtctgaaggagcgcagctccctcctaatacataagaatgaacgtccaggtagcagagagtaggcgacttgcataatgagcgcattttattaaatagatagttaacgcactgcttcttactcattccaagttgctgtaggtgctgcccgcattaacagcagggacaaaagcttcctatgtgcgtttcagcaggaatactctctccactccaggtacttctttgttttggatttttttggcatgatttccttcccatgtaaagaaagccaacttcttcaagacacaggtcattcagctttagtggtggcctccaggttctccttgggccgtgcagaaggccaggtcccgcacagtgaggccctcctttgtcctccactgaaagcttttcactgttcggtctgcaaagaaagaggttcgcctgcccctgctccactcgccagggtggaagtggtggagggctgggaaagggctttcttcacagggcagtgctctcggtatcattgtctatatccagcaggatgcggccaggcacgtctttgctggctgagtctgagtgcatttcaggaaagatgctgcgatgcggttctgaaaccctgggaattggagtcttagtcctggnaaaccttccccacctgtgagggcactaggaagggcatctngttactatcttggaagctgttggtgctgtgttggtgaggctgctgtccccagctgagtggacaccaggaggttnnnnnnnnnnnnncacgctgggccggttccttggctttggtactggtctcggtctcggtaaggttccagcatgtggctgtgcagtttcagggttaccccctgccagggtctgaggagctggcagactggggttctgttttcctaggggcggagtactggggggcg

SEQ ID NO: 319494 - DNA, 936 bp, Homo Sapiens
  misc_feature (186)..(198): n is a, c, g, or t
atcattgtctatatccagcaggatgcggccaggcacgtctttgctggctgagtctgagtgcatttcaggaaagatgctgcgatgcggttctgaaaccctggaattggagtctgttactatcttggaagctgttggtgctgtgttggtgaggctgctgtccccagctgagtggacaccaggaggttnnnnnnnnnnnnncacgctgggccggttccttggctttggtactggtctcggttctgggtaaggttccagcatgtggctgtgcagtttcaggtttaccccctgccagggtttgaggagctggcagactggggttctgtttttcttaggggcggagtactggggggcgttggagtctggggaggggtgtgagatggctgctcaagtccatgctcactgggcaatgccatggggttgggagggccctggctattgggtttggtgtgcatcagtggcgtggcctgcgtagggggctgcggcggtgggtgattgggagcttggattggagacaagctgctggagtacctccggggtgctgagagctgggagggggcggagggctggcctggaggctggcccgtgtgctgggtgggaggagaggggcttcgggtgggtggctttggtgacagactgggtggatgctgagatgttcctgaagaactctggcccccggggtggccaggaggtgggttgcccggtttcgggggtgctggagcgggttttttaacagctcggcgcagtgtatgcgggctgggccctgcagcattgtgaggttggcccatggagagctggtgggagccagcagctgcctggggctgattttggccagatgctatctgactgttgtttctccctggtgctggcacagctgcagatacagggtccttcggtttgggaggactgccgtcgcctgggctcggccccgtcttccag

SEQ ID NO: 319495 - DNA, 903 bp, Homo Sapiens
  misc_feature (661)..(661): n is a, c, g, or t
  misc_feature (846)..(858): n is a, c, g, or t
  misc_feature (892)..(892): n is a, c, g, or t
cacaaaataaagaaacttcccgtaagggcttctgtaaaaaaaagctattttatccaaataagggatggccccgttgaggcaaaccggccccccgggattttgagggcttgaaccagcgacgtgtcaatgttctccaatttgaagggcagctcccctaatcctagatgaactgcagtacaggagtagcaacttcaaaatggcgcatttattaatagttagtcacccatggttctacccattccagttgcttaaggttctgccgaataacagccagaacaaacgctcttaagcgcgttcaacaggattactctctcaactccaggtacttcttggttttggattttttgggcatgatttccttcccatgtaaagaaagccaacttcttcaagacacagtcaattcagctttattgtgggcctcagggttctccttgggccgtgcaaaaggccagttcccgcacagtaagcccctcctttgtcctccactgaaagcttttcactgttcggtctgcaaagaaagaggttcgcctgcccctgctccactcgccagggtggaagtggtggagggctgggaaaagggctttcttccacagggcagtgctcctcggtatcattgtctatatccagcaggatgcggcccaggcacgtctttgctggctgnagtctgagtgcatttcaggaaagatgctgcgatgcggttctgaaaccctggaattggagtcattaaatattccaatctcagttcttactgaatatggcaggtcatacatctgttactatcttggaagctgttggtgctgtgttggtgaggctgctgtccccagctgagtggacaccaggaggttnnnnnnnnnnnnncacgctgggccggttccttggctttggtactggncacggtctcgg

SEQ ID NO: 319496 - DNA, 725 bp, Homo Sapiens
tagtgtgattgcatttattcttataaatgtacagagctgtagaagtgcaagccaagagttctatagagtagtacataaacaccatatggtaccactcctgctggggggtaagcttggatacacctctctcctcaggaaactgtcacccggacggttggtccagttggggatgccccaggtccagggattctggaagccaggatcctgttgtatcattaagcaacctgctatgatccctgtcatagttagacaggtgcaaccttggagggtaatgtctactggagggtacaggaagaagagtccccaagacagcaccagcagcaggagcatgttgaagaggccatgggcttaggggggatgaggtccaagtcctcgtcatctggaatctcatccaggtgatacccatcctgaagcagctgccggctcacatcctggttcacctgctctgcagatgaatacccggaggagtatctggatcccagctccccatcactgtcagagtcgagggacaccaggttttcatctggactctggctaagagcagtatagcccttgttaaacttcactgaccttttccctgaagagtctgggcggttcggcgaggcccccagcatgccttttctccgcagaacggccttggccaggtcccggtgcttctgcagcttggcttgaatggagggtgcgcgcgttaccatgtatggcccccgcttttccacggccgcggg

SEQ ID NO: 319497 - DNA, 426 bp, Homo Sapiens
  misc_feature (75)..(75): n is a, c, g, or t
cctgaagaaaccaacaggtaaagggctaacctgcaagttcactttctaagggtcagtgacttcagtgctcactgncactgtgtgagcttatgagtggccaacagggctctgtaggcctcatggtgagcagggcccaccttggagggtaatgtctactggagggtacaggaagaagagtccccaagacagcaccagcagcaggagcatgttgaagaggccatgggcttaggggggatgaggtccaagtcctcgtcatctggaatctcatccaggtgatacccatcctgaagcagctgccggctcacatcctggttcaactctctgcagatgaatacccggaggagtatctggatcccagctccccatcactgtcagagtcgagggacaccaggttttcatctggactctggctaagctgtgccgaat

SEQ ID NO: 319498 - DNA, 1219 bp, Homo Sapiens
  misc_feature (4)..(4): n is a, c, g, or t
  misc_feature (20)..(20): n is a, c, g, or t
  misc_feature (57)..(57): n is a, c, g, or t
  misc_feature (103)..(103): n is a, c, g, or t
  misc_feature (140)..(171): n is a, c, g, or t
  misc_feature (175)..(175): n is a, c, g, or t
  misc_feature (331)..(331): n is a, c, g, or t
  misc_feature (346)..(346): n is a, c, g, or t
  misc_feature (350)..(350): n is a, c, g, or t
  misc_feature (366)..(366): n is a, c, g, or t
  misc_feature (369)..(369): n is a, c, g, or t
  misc_feature (417)..(417): n is a, c, g, or t
  misc_feature (497)..(497): n is a, c, g, or t
  misc_feature (508)..(508): n is a, c, g, or t
  misc_feature (563)..(563): n is a, c, g, or t
  misc_feature (577)..(577): n is a, c, g, or t
  misc_feature (632)..(632): n is a, c, g, or t
  misc_feature (707)..(707): n is a, c, g, or t
  misc_feature (786)..(786): n is a, c, g, or t
cgcnttgtcctcccttttgnatgtggccgtgtggaaggagcgggagcgctttgtccnctcgcggcccagctcagcccccggggccgctgggctgagaggggtntgcgccccgtggccctgcccgcttcatcgcggctgtnnnnnnnnnnnnnnnnnnnnnnnnnnnnnnnntccntcctctccgctccccctgcggctgagcctgccccgagcgcgaagaaggggccgtctcggttggttttgaggaagaacgacagttcgagtcgggggaggttctcgctttacaaacaggaaaccgaaaaccactgacacactgtagtttttctgattntagccggaggcgggnccgntcccgcatctcgactntanctccggtccctttctccaacctatttctctcccagcccccgccccccnagcgcccttccacggaggaggagattcactttgtgaacctgagactgagaatttaagaggcactgaaggtttcatgcctncccaccccccntcctcttttcgtgtatttgtacaccccacgcgcatggattgcggagaaatgggcncctttcgggaggcnccaaaattcccgtgccacagaatctctcacaacctttggggatcaaggactgctntggcgtttacctcgccagctgggggaccctggaacaaaagccagtgccgttcccagtgccgggtctctggacacngcaagatgagtagagtttgcgaccagaaactttcggtgtttgggttgtgttctctggtttccgccctggtggagggagngctcgggtgcgcgcgcctggtttgtgatacactcgcaggtggaagcaagcccagcctcctgaccttactgggaagaagacagcaagcccaagccacagcttacttttgaaaatagaaagataatgcttgcttcaatagacagagacatcagctgtagatttcatagtgaatcccagtttagcaaattagcaacaaatagacttgaaagatgactgcctgaaaataaaattttctatcattttatgacaatgatttagcctgttgattagacttacgcactaataaatgccagggctgtgtacagaataggagtgtattttagcttcagctgtttcacatgcatctctcactggtatgtgtgatgagtgtgatgaatgtaatgtaagccttaactcttaagcagagttgcaagtacattctgtgtcccaaaaaa

SEQ ID NO: 319499 - DNA, 810 bp, Homo Sapiens
  misc_feature (409)..(410): n is a, c, g, or t
  misc_feature (412)..(415): n is a, c, g, or t
  misc_feature (417)..(417): n is a, c, g, or t
  misc_feature (419)..(420): n is a, c, g, or t
  misc_feature (450)..(450): n is a, c, g, or t
  misc_feature (483)..(483): n is a, c, g, or t
  misc_feature (659)..(659): n is a, c, g, or t
  misc_feature (662)..(663): n is a, c, g, or t
  misc_feature (683)..(683): n is a, c, g, or t
  misc_feature (687)..(687): n is a, c, g, or t
  misc_feature (699)..(699): n is a, c, g, or t
  misc_feature (713)..(758): n is a, c, g, or t
  misc_feature (762)..(762): n is a, c, g, or t
  misc_feature (765)..(765): n is a, c, g, or t
  misc_feature (768)..(768): n is a, c, g, or t
  misc_feature (775)..(775): n is a, c, g, or t
  misc_feature (778)..(778): n is a, c, g, or t
  misc_feature (782)..(782): n is a, c, g, or t
  misc_feature (795)..(796): n is a, c, g, or t
  misc_feature (799)..(800): n is a, c, g, or t
  misc_feature (803)..(803): n is a, c, g, or t
  misc_feature (807)..(807): n is a, c, g, or t
aaagaaggaagaggtttatttggccaggagcattggcagacttgcatcttaatagctgagatccctgaaaaagaaattcttggcctttttaaaggcttacaactctaaggggtccacgtgaaagggtcatgatatctcaagcaagcggggaacgtgactgggggctacacgcatcagctaacagagcagaaagttttgcaatgctttttcatacaatgtctggaatttacagataacacaagtagtttacggtcaggggttgatattattattattgttacttttttttaactaccagggccgggtggtttcgccaaggtcttctggctatttatcttacttctgttttgttttgttttctaactttttgctttctctctttcctcctgtcttgtaaactaggcaaggnngnnnnangnnggcagcaggagtagtagtggtctccttctnactgtgggactggcccctttggtttagggtatnaccaaaggcagtgtctaggccagcccagtgtctctgcccagcaaacctccatctgctgtgcactcacagccaggccatgctggtgtttggtacaggttgggtgcatgaaggatgaaggttttggcctgtctggggcttttgcctgcctttcttcctttctttccatccttccttanccnncctccctccctccctctctntttntctctttgtttnctttgtttcttctnnnnnnnnnnnnnnnnnnnnnnnnnnnnnnnnnnnnnnnnnnnnnnaccntcngcnaactganacntccncttcctgggttcnngcnnttntccngcc

SEQ ID NO: 319500 - DNA, 1062 bp, Homo Sapiens
  misc_feature (205)..(205): n is a, c, g, or t
  misc_feature (207)..(208): n is a, c, g, or t
  misc_feature (221)..(221): n is a, c, g, or t
  misc_feature (226)..(226): n is a, c, g, or t
  misc_feature (228)..(228): n is a, c, g, or t
  misc_feature (243)..(243): n is a, c, g, or t
  misc_feature (245)..(245): n is a, c, g, or t
  misc_feature (254)..(254): n is a, c, g, or t
  misc_feature (257)..(257): n is a, c, g, or t
  misc_feature (260)..(260): n is a, c, g, or t
  misc_feature (262)..(262): n is a, c, g, or t
  misc_feature (264)..(264): n is a, c, g, or t
  misc_feature (279)..(279): n is a, c, g, or t
  misc_feature (412)..(412): n is a, c, g, or t
  misc_feature (418)..(418): n is a, c, g, or t
  misc_feature (934)..(934): n is a, c, g, or t
  misc_feature (954)..(954): n is a, c, g, or t
  misc_feature (958)..(958): n is a, c, g, or t
  misc_feature (1001)..(1001): n is a, c, g, or t
  misc_feature (1012)..(1013): n is a, c, g, or t
  misc_feature (1031)..(1031): n is a, c, g, or t
  misc_feature (1041)..(1041): n is a, c, g, or t
  misc_feature (1048)..(1048): n is a, c, g, or t
  misc_feature (1051)..(1051): n is a, c, g, or t
aatatataatattcaactttatttcaaatataccaattttaaaatttatcaatatacccattacgattctttctgagtgacataccacacaaattcaatacggattctctaaagaatcctcttaggctacttcactcaaagtctctgcagctgcctgcactgtgaaggctgcaacataaatctgtctcttcacttctccccaggncnnggaaggaaccacntagcntncaatatcaaacagancntcacaaatnccnggnantnactcccccgcatacntgttgtggctgcttggagcatagatgacatgcctataaaaaggcctgtctggtaaccctaatggatcaataaatgctctttccagaaacatgagttgatcattcatcattcttaatactattgggttgctttngtgaangtgctggggtctctcactgaacttggaagcaatttctgtaaaattctttactgcagaaaaaagtgaatcaaatgatacactgtatgtcttcatttcctgtggatgtttcatagaaatactgtagattttgtcagcatactttcttaaaactacagcataatctcgacaatcaaaagggagcactatggaattggctagctcaaacaccatccctcctcgaacctgggccacagtgaggtgatatttaaacattggatcataaaacttttccaccaactcatatgtttcatagacactgtgatacagtggatagccgctgaatttgtttgtttcccaatttttagtataccgtgctctgcctgaagcaattccaagtcgttggaagaacacctcaaaatcatttccagatcccaatttgcttatcctgggcatgccactgaactctggggaaggactttttttagtccactttcataaagagatttgccttcaaagccttcatcagggctttcagcncttttgttaggttgtgtacnagcngtacatcagcggtggtacaatcaactctcagagtgtagtttcntctatagatgnncagcatttatataagcangccacgctcntgaaggngcntgaaatctcct

SEQ ID NO: 319501 - DNA, 916 bp, Homo Sapiens
  misc_feature (35)..(35): n is a, c, g, or t
ttcacttctccccaggccttggaagggtcccactngctttcaatatcaaaccagagcatcataaattcctgggaatgactccccctgcattacttgttgtggctgcttggagcatagatgacatgcctataaaaaggcctgtctggtaaccttaatggatcaataaatgctctttccagaaacatgagttgatcattcatcattcttaatactattgggttgcttttgtcaaagtcctggagtctctcactgaacttggaagcaatttctgtaaaattctttactgcagaaaaaagtgaatcaaatgatacactgtatgtcttcatttcctgtggatgtttcatagaaatactgtagattttgtcagcatactttcttaaaactacagcataatctcgacaatcaaaagggagcactatggaattggctagctcaaacaccatccctcctcgaacctgggccacagtgaggtgatatttaaacattggatcataaaacttttccaccaactcatatgtttcatagacactgtgatacagtggatagccgctgaatttgtttgtttcccaatttttagtataccgtgctctgcctgaagcaattccaagtcgttggaagaacacctcaaaatcatttccagatcccaatttgcttatcctgggcatgccactgaactctggggaaggactttttttagtccaactttcataaagagatttgccttcaaagccttcatcagggcttttcagctcttttgttaggttgtgtaccaagctgtacatcagcggtgtacaatcaactctcagagtgtagtttccttctatagatgagtcagcattaatataagccacgccacgctcttgaaggagtcttgaattctcctctgcccactcagtagaaccaagaagaccaaatt

SEQ ID NO: 319502 - DNA, 663 bp, Homo Sapiens
tcagcaggaacgcgattcttttcctagactgcaaacaatccccttgggggacccctccttgtgacacctaagactgtggaggtgatgatagggtgggtttaggtgcagcccgcctgctgcccatcagctctgcagtcagtgacagcttcggtggggaccggcctgaaaaaggagcaattcttccccatctgggagctgacccagcctgggagggaacatcaagttagaggaatctctagaggcttcatgtgcagatcacctgagcggcagcatccttcaagtgctgtgacaaggaggacctggaggtcaggggttttggtaatggtgagggatcacggggttctccaaatgtccccatatcactgagtcacgtggccaatacctgctggactctgggctgtggagggggtggaggacgagctggtgcctccagagtcgcagtggctggtgctcccgctgccgctggggctcccgctggcggagggtggggactgtgaagacagggacggggagcctgggctcgttatgcactgagccaccgcgaaacctggcaccttggccaccgatgccaaccacgagcgcttcacttgtggggtccttcttccccggggccccttggtcgtaaaaccggaaagcacgggcttgagtgttgggtgaggagcc

SEQ ID NO: 319503 - DNA, 855 bp, Homo Sapiens
  misc_feature (6)..(6): n is a, c, g, or t
  misc_feature (49)..(49): n is a, c, g, or t
  misc_feature (64)..(64): n is a, c, g, or t
  misc_feature (387)..(387): n is a, c, g, or t
  misc_feature (392)..(392): n is a, c, g, or t
  misc_feature (518)..(518): n is a, c, g, or t
  misc_feature (538)..(538): n is a, c, g, or t
  misc_feature (542)..(543): n is a, c, g, or t
  misc_feature (546)..(546): n is a, c, g, or t
  misc_feature (568)..(568): n is a, c, g, or t
  misc_feature (588)..(588): n is a, c, g, or t
  misc_feature (590)..(590): n is a, c, g, or t
  misc_feature (592)..(592): n is a, c, g, or t
  misc_feature (598)..(598): n is a, c, g, or t
  misc_feature (631)..(631): n is a, c, g, or t
  misc_feature (646)..(646): n is a, c, g, or t
  misc_feature (664)..(664): n is a, c, g, or t
  misc_feature (683)..(683): n is a, c, g, or t
  misc_feature (686)..(686): n is a, c, g, or t
  misc_feature (738)..(738): n is a, c, g, or t
  misc_feature (764)..(764): n is a, c, g, or t
catgtngatgaaagccaaactggagaacccggctggcttggagagaatnaaaagaaagacaggntgttccctgcaaactatgcagagaaaatcccagaaaatgaggttcccgctccagtgaaaccagtgactgattcaacatctgcccctgcccccaaactggccttgcgtgagacccccgcccctttggcagtaacctcttcagagccctccacgacccctaataactgggccgacttcagctccacgtggccacaccagcacgaatgagaaaccagaaacggataactgggatgcatgggcagcccggcccttctctcaccgttccaagtgccggccagttaaggcagaggtccgccttaactccagccacggccactggctccnccccntctcctgtgctaggccagcctgacttcctcctccacccctccatgagactaggccacatgcagccccggattgtgcttctcttcccggaccccctgcagtgttccacctcgaggcttttgcccatntgcgccctcggcctggagtncccnnccnccgaagccctagctgtcaaagnccttctcatccttcaaggcncntntcagangctgccccctctgtgaaatttacgctgatgccnccaggcagaatccanccctgtttcctctttatncctgcagtgaatagtaggnacncctttttagtatatttcattctgccaggtggtacacttggttgtttttatcnctgtcttccccattacttgtgaattncctgctagtaatactgcccatctttatagtgctttgtggttaataaagtgcttttccctaaattatctgggggaggcagagactgttttta

SEQ ID NO: 319504 - DNA, 1041 bp, Homo Sapiens
  misc_feature (10)..(10): n is a, c, g, or t
  misc_feature (28)..(28): n is a, c, g, or t
  misc_feature (34)..(34): n is a, c, g, or t
  misc_feature (38)..(38): n is a, c, g, or t
  misc_feature (82)..(82): n is a, c, g, or t
  misc_feature (115)..(115): n is a, c, g, or t
  misc_feature (190)..(190): n is a, c, g, or t
  misc_feature (279)..(279): n is a, c, g, or t
  misc_feature (314)..(315): n is a, c, g, or t
  misc_feature (322)..(322): n is a, c, g, or t
  misc_feature (340)..(340): n is a, c, g, or t
  misc_feature (606)..(606): n is a, c, g, or t
  misc_feature (849)..(851): n is a, c, g, or t
  misc_feature (881)..(881): n is a, c, g, or t
  misc_feature (888)..(888): n is a, c, g, or t
  misc_feature (895)..(896): n is a, c, g, or t
  misc_feature (898)..(899): n is a, c, g, or t
  misc_feature (916)..(916): n is a, c, g, or t
  misc_feature (921)..(921): n is a, c, g, or t
  misc_feature (924)..(924): n is a, c, g, or t
  misc_feature (944)..(945): n is a, c, g, or t
  misc_feature (956)..(956): n is a, c, g, or t
  misc_feature (962)..(962): n is a, c, g, or t
  misc_feature (967)..(967): n is a, c, g, or t
  misc_feature (971)..(971): n is a, c, g, or t
  misc_feature (976)..(976): n is a, c, g, or t
  misc_feature (983)..(983): n is a, c, g, or t
  misc_feature (991)..(991): n is a, c, g, or t
  misc_feature (997)..(998): n is a, c, g, or t
  misc_feature (1007)..(1007): n is a, c, g, or t
  misc_feature (1019)..(1019): n is a, c, g, or t
  misc_feature (1024)..(1024): n is a, c, g, or t
  misc_feature (1026)..(1026): n is a, c, g, or t
  misc_feature (1034)..(1034): n is a, c, g, or t
aaagcctganccactttgtgtttttagnctcgangtantaataatcatccccttactcttagactaattccttttcccccgntcactttgcctgtatactctgtaaaaatgaggnccttagaaaatcaacatttcctgtgaacttgagagactatacaagcagtgcccaaatcagtagggttaggcaggnaaaaccagttggatagcagatatattatgatctgttggacaaaggtatagttgtgtgcatgtctacaaggtcatcgtgattcgccattngcttaaggatcatgtaggttgaccagggtgaggtnngtttatntgctgggttgtgtatgtngtggtaggggatgcagtatacaatattcatgaattaaacacttagctaactgctttcctgaaaatggtctgtgttctaaaagacaaagatctaggttttttgctgttttttactttaacttatgaagattcaagtcactaatttgttacttgctctggtttaaaatgaaatgcaactggctatggtaaggtagagaagacagctgtattgatatcaagaatatttagagacttttaaattaagtatctgagttacctcaccttatnaaaaatatatgtcaatatactaaataccccacacagatccaggatgtgggatatttaaaaatacatttctcttgtatcagcaccaaaaataccagtttctgtacaacccgtgtcaagtttttaagtatacacacattaaaattatttctgataaaataatcacaaactccacagaaataattaaagatatatgcaaattactttccaatacattttgacatcacagtcaggcattcacttggnnnaatgttataatgtatgtcactgaattttgnagtaagntgtttgnngnnactttgaatataggaancatcnccncacagggaggcctggtattnnaaacttagganattacnagatntgtnaagcntaggggnagatttgnacgccnncacaattanagaggagggganatacntncccccggnatataaa

SEQ ID NO: 319505 - DNA, 1259 bp, Homo Sapiens
cacttttggtgtgcttctgaatctaggtctgcatgctggcggcggctctggcccaggcctcctggaaggtttctcaggatgggcagcactcgtggtgctgagccaggcactaaatggactgctcatgtctgctgtcatgaagcatggcagcagcatcacacgcctctttgtggtgtcctgctcgctggtggtcaacgccgtgctctcagcagtcctgctacggctgcagctcacagccgccttcttcctggccacattgctcattggcctggccatgcgcctgtactatggcagccgctagtccctgacaacttccaccctgattccggaccctgtagattgggcgccaccaccagatccccctcccaggccttcctccctctcccatcagcagccctgtaacaagtgccttgtgagaaaagctggagaagtgagggcagccaggttattctctggaggttggtggatgaaggggtacccctaggagatgtgaagtgtgggtttggttaaggaaatgcttaccatcccccacccccaaccaagttcttccagactaaagaattaaggtaacatcaatacctaggcctgagaaataaccccatccttgttgggcagctccctgctttgtcctgcatgaacagagttgatgaaagtggggtgtgggcaacaagtggctttccttgcctactttagtcacccagcagagccactggagctggctagtccagcccagccatggtgcatgactcttccataagggatcctcacccttccactttcatgcaagaaggcccagttgccacagattatacaaccattacccaaaccactctgacagtctcctccagttccagcaatgcctagagacatgctccctgccctctcctacagtgctgctccccacacctagcctttgttctggaaaccccagagagggctgggcttgactcatctcagggaatgtagcccctgggccctggcttaagccgacactcctgacctctctgttcaccctgagggctgtcttgaagcccgctacccactctgaggctcctaggaggtaccatgcttcccactctggggcctgcccctgcctagcagtctcccagctcccaacagcctggggaagctctgcacagagtgacctgagaccaggtacaggaaacctgtagctcaatcagtgtctctttaactgcataagcaataagatcttaataaagtcttctaggctgtagggtggttcctacaaccacagccga

SEQ ID NO: 319506 - DNA, 971 bp, Homo Sapiens
ggcacagggtaaaggctctgttgacttcagcacgaccaccccagccccaggcaggcagaacagctaggtgaagaggcggacagtcccgtctgcccccgaggagaagacccacggctgggtggggtggaagatgacgtccagcactcccagatctcgggtcagcacgtgtcccttcagcaccttgacgggcaccagcaaggggttttgcagaaggtcattgtaccaccatgccatggcaggcgatgacactgccgtcgtccgagcctgacgcaaagagtgggtaccgcgggtggaaggccacagcccgcagagccttcttgtggtgtctcagcatcctgtatggcttggtggaaagatccaggtcaaaccacaccagcttgctatcgtagctcccacagatgacgttgtcacctgcagggtgcaccgccaggttggacacccacttgcagttgggcatcagcttcttggtgagctcctggcgcagcaggtggtagaggcggacgctgcgctgggacgccaccaacaggaagggccgggcagggtggaaggccactcgctgcacctgtccgtggctgcggcggaacggactctggctgcggcgacggctcagctggtgaatcagcacctgggtgtggccttgggtggccagcaccacggccaggtagtccccacgcccgtgccaggtcacctgcgtcactggcttcccgtggcagatgcgcagccgcaggcccacttggcgctcctcctctgaggcctccagccagcgggccggctgcaaggggggctcctcaggcgggacgaaggcgctcaacagctgatctgtgctgcccgccaccagccggtcccccagagctgggttcagcagcagcaccgagtcctccacggctgcagccaccaggcagacagcggggctggggttccaggccacactcttccctcgtgccgaattcgccacccaggcctcgctacct

SEQ ID NO: 319507 - DNA, 1345 bp, Homo Sapiens
  misc_feature (191)..(203): n is a, c, g, or t
  misc_feature (228)..(228): n is a, c, g, or t
  misc_feature (251)..(251): n is a, c, g, or t
  misc_feature (254)..(256): n is a, c, g, or t
  misc_feature (265)..(267): n is a, c, g, or t
  misc_feature (270)..(270): n is a, c, g, or t
  misc_feature (298)..(298): n is a, c, g, or t
  misc_feature (332)..(361): n is a, c, g, or t
  misc_feature (380)..(380): n is a, c, g, or t
  misc_feature (388)..(388): n is a, c, g, or t
  misc_feature (423)..(423): n is a, c, g, or t
  misc_feature (450)..(450): n is a, c, g, or t
  misc_feature (764)..(1048): n is a, c, g, or t
cccctctcattttattttacttaatcctcttatttacagtagatctgacacaggcattaaataactgcagagagagaccatggtagggcgggtgcaggaaaacatgggtggcccgaagaaggaaacacagatccagctagagaaaaagggaagggtccacctgtgggtggagtgtggaggctgcagcattnnnnnnnnnnnnnggaggttagagaggatgaggaagtnaagggatgctggaggacaaaggnttnnnatgcctcgnnngcnacagaatattcagagcaggaggcaggangcccctcatttgacattctgtgggcattatgggnnnnnnnnnnnnnnnnnnnnnnnnnnnnnnaaaggcaaaggggtctgangagatggngccaagacattcagaggctagatttggaattttcnggctggcatgcagaggaaaaggaaggngttagtgattagttgataacttgctaaaagaagccagagaaaggatggtgggggcagatctgggctcaggggaaggaggtggaatagtccccaaagccagccgatgtttccaaggtggccactggggacggagccagaatggccgcccctcccccagagctccctgggaagtggaacttgaaggatattctgggaaggcgaatgggggaagggagccatccataaaaacaaagtggatattcagcctaggtcaaccccgcccctctgggtagcagctatttgggtgacagaacggcctaggaagaaactgaagnnnnnnnnnnnnnnnnnnnnnnnnnnnnnnnnnnnnnnnnnnnnnnnnnnnnnnnnnnnnnnnnnnnnnnnnnnnnnnnnnnnnnnnnnnnnnnnnnnnnnnnnnnnnnnnnnnnnnnnnnnnnnnnnnnnnnnnnnnnnnnnnnnnnnnnnnnnnnnnnnnnnnnnnnnnnnnnnnnnnnnnnnnnnnnnnnnnnnnnnnnnnnnnnnnnnnnnnnnnnnnnnnnnnnnnnnnnnnnnnnnnnnnnnnnnnnnnnnnnnnnnnnnnnnnnnnnnnnnnnnnnnnagagcgaaactccatctcaaaaaaacaaagaaagaaactgctgaagtcgggggctgctagaggattttcaggaagggtcaacacaggcctcacttccagtccctcatttcccagctcacagagtcaccagagggtgagaagcagaacgtgccagcaaagagggaaaaggccacagaaccaccttgtcctcaattacaaaggggtgcatttcagaggagggaatagggatggacaggaggagaagacctgcccaggagccagataaattcaaagtcaccaagatggcgactgtgtaga

SEQ ID NO: 319508 - DNA, 522 bp, Homo Sapiens
  misc_feature (181)..(181): n is a, c, g, or t
agaactgtacacttaaaaatggttaaaatggtaaatgtttaaaatggcaaatatgtatttatatattttaccacaatagagaaaatcaagtctttaaaaatgatagcccctatgtttttatgcttacctaaataaaccatatttaatatttggcaatataagctaaatttgatagagcaangaattgctatgtttataataagcatgttggactgaatttcatcatttattagaatgtgcatataagaaagatacttgtatttgtaggcctctgaaaaacatctaggtaggtagagagccttgactcaccttgccgaaggtcctgaagaatggaaaaaagaaaaatgaatcttcaatatcggtttttcacctcaggaaattctagtaccacaaaaatataatgttttagtaaaaacatttccattgcagtgcttatatcatgatatgaaatttaaaatccacattagccaattcattatttaaatgacccacccctgaaccctctcatagtgtacatgagct

SEQ ID NO: 319509 - DNA, 387 bp, Homo Sapiens
  misc_feature (249)..(320): n is a, c, g, or t
  misc_feature (328)..(328): n is a, c, g, or t
  misc_feature (335)..(336): n is a, c, g, or t
  misc_feature (339)..(339): n is a, c, g, or t
  misc_feature (343)..(343): n is a, c, g, or t
aaaaggaataaaaggtttaagaaaagagaaagagaaaaggaattaattcagtgaaggatgattttgctcctagttttggagtttgaatttctgccaggattgaattattttgaaatctcctgtctttttaaactttttcaaaataggtctctaaggaaaaccagcagaacattagcctgtgcaaaaccatctgtttggggagcacattcttccattatgcttggcacatagatctccctgtggtgggannnnnnnnnnnnnnnnnnnnnnnnnnnnnnnnnnnnnnnnnnnnnnnnnnnnnnnnnnnnnnnnnnnnnnnncatctccnttttccnntgntccnagttgtagatggaatagaagcccttgttgctgtagatgtgcgtg

SEQ ID NO: 319510 - DNA, 1894 bp, Homo Sapiens
  misc_feature (169)..(202): n is a, c, g, or t
  misc_feature (755)..(767): n is a, c, g, or t
  misc_feature (1546)..(1575): n is a, c, g, or t
  misc_feature (1579)..(1581): n is a, c, g, or t
  misc_feature (1583)..(1583): n is a, c, g, or t
  misc_feature (1585)..(1596): n is a, c, g, or t
  misc_feature (1598)..(1601): n is a, c, g, or t
  misc_feature (1603)..(1603): n is a, c, g, or t
  misc_feature (1605)..(1605): n is a, c, g, or t
  misc_feature (1608)..(1608): n is a, c, g, or t
  misc_feature (1611)..(1612): n is a, c, g, or t
  misc_feature (1620)..(1620): n is a, c, g, or t
  misc_feature (1622)..(1622): n is a, c, g, or t
  misc_feature (1631)..(1631): n is a, c, g, or t
  misc_feature (1636)..(1636): n is a, c, g, or t
  misc_feature (1638)..(1697): n is a, c, g, or t
  misc_feature (1702)..(1702): n is a, c, g, or t
  misc_feature (1718)..(1718): n is a, c, g, or t
  misc_feature (1723)..(1723): n is a, c, g, or t
  misc_feature (1748)..(1758): n is a, c, g, or t
  misc_feature (1771)..(1800): n is a, c, g, or t
  misc_feature (1821)..(1821): n is a, c, g, or t
ccctttttttgtgggggagggttggtggtatatttttcccctcttttttccttcctctcctacatctcccttttcccccgatccaagttgtagatggaatagaagcccttgttgctgtagatgtgcgtgcagtctggcagccttaagcccacctgggcacttttagatnnnnnnnnnnnnnnnnnnnnnnnnnnnnnnnnnncagcagtgatatatatattccaggtggtttttagtctttactgatgaaagggtgttcatgttagtttcttcaaaaccctatctaatactaggcaaagtagccaagagccttttgttttgtttttattttgataaattagtggagaaatggcattttaagaggagtctcttctcaacttacctgagagtcgaattcttctcttccctaaccaatgaagctaagtggttatcccagaaacttgtcttctaaaagggaggactccaggccatcaataaagatgtccaggcagtgagcgtactttttacaccctgtagaattgtgggctgtagcgttactctgattttctgtctagtatcagagaatgctggtagcttaaaatttttattttaggacttgtactctgaattttcaggaaccgtcaaaggagcagcagcaaattcacatattttcgacttgagaaatgcttgtggtatgtgttttccaaactgccccctatatgtaaagttcagtttaaccactgattgccttgttattactaggttttttgagattnnnnnnnnnnnnntccctggtttaaaaccaacaatgatgcctagtgagtatgtgtccacaggccataacagggtagaagagagacatcgtgcaacccaatgagtagtgaagggactgtgttgcttgtgaagcggtgtagtagcatttttgcagattcttggctgggtttagtgtactgatctagaaaagctgtttttctgctcctttgtggaaggcagttatgatcaggctgcatggacaaagcaggtagaggggcaccatcaggggctcttgcactattttcacctctaaatattacatactcagtagtgccctgcttctagggctctgaatacgggcttaaagtcatcttgtcctgctggaatttgctgtgcagagccataagcctcccattttgttagcgtcagctaggccaataggaacagaccgggaccttgtctcacactgatgatacctcacatgttgaccggctatgtgaactgcctatttcctatgctggagttttgatttttaactaaacgcaaatctgtagattctctcctctcccatcccagaaaacaaaacaaaataatgcttttcgaaattgtttctaggactttaaaacataatggtatatccaaaattctttatttcagaatgcaacaatagattccattaatatagactcaagatcaaaacagcatacctgctaagctaagatagatggtgttgattccactgggttttgatcaatacaataacaaacctttttcctttgacatactctgaattttgttgtttggggggaggggnnnnnnnnnnnnnnnnnnnnnnnnnnnnnnatgnnngngnnnnnnnnnnnntnnnntntnttntgnntttttgtntnttggctttnttttngnnnnnnnnnnnnnnnnnnnnnnnnnnnnnnnnnnnnnnnnnnnnnnnnnnnnnnnnnnnngatgntgggtgggtgtcctgntgtgngtgttttggggccgggggctggtcnnnnnnnnnnngctccaccgggtnnnnnnnnnnnnnnnnnnnnnnnnnnnnnntttccctccttgccgcccggntcctcctggcggccggtttgaatttgcgtcttctcttgatcacccgccccgcgacacactcccgtcccatttg

SEQ ID NO: 319511 - DNA, 1393 bp, Homo Sapiens
  misc_feature (265)..(274): n is a, c, g, or t
  misc_feature (531)..(548): n is a, c, g, or t
  misc_feature (597)..(644): n is a, c, g, or t
ggcgagagaagtgtggggtggtgatcgaccgcggggcggaaatcgtggggggtgattctgcgccaaaccccccggtgggtggggagagaatggttccacagatatgtgtgcgagcgagaaaatgttatgaagagacggggcgcacaaagcataaatcttcgctggtgtgggacaccagcggccgggggcggttgtaatttttgacgggtccgcggggcctcccggttctgcgggcccgcccccgtgcgggaaggggggccccgcnnnnnnnnnncccctaaagaggaataggcgtgtgtagaaagatggggtgtaaaaagaagaaactgcggggggtaaccacaacgcgcgggcgagttgtttattttacaagggggagagggggacaccaggggcccccttgttctcgcgggggcagaagggttttgtcgttagggaaacacaaggggttggtaccgcaagggtgtaaattaccgcgcccggggggccggccggccccccagacaaaaggggttaagaaaagaatttttnnnnnnnnnnnnnnnnnnagcacaagcgcgattggttggttttgttccactatacgggtaggcggtnnnnnnnnnnnnnnnnnnnnnnnnnnnnnnnnnnnnnnnnnnnnnnnngttgagttcgcctagaaggggggtgtcgtttttgagtagaattgcaattttgtttttctccggagaagttgtttcttcagtccttaacaactccgctccttatatgggctttggtggaggtcatggggcagcacctgcaggtctacgttggggtggaggtgttcggtccttgcctgcttcatgagctcaattcctcaccactgtgctgtgaatggcacaactcacatggtaatgtagcttcacatccagcctgggaagtacacaggcgtcaaggatgctcatttcagaaacatcgctgactgctgcggcctctacgtttcaaatgatgaatttcttagtagccttgtcattgggcacacaacaaccacagttcatacagcaaatgggctgcagtgaacagtgcacacctggttgtggacctctttggcacgaccattgcttcttctttgttatcttggaggtgcaggcccaagaaagatgaagtaaaaatcttaatttgagggtgactaaatgaatccttcaagaccacttaccccaaatccacattctgcaagacagttcaagaagaaaggcaaagtagccatctatctcaaggggctatgggctccacaatacttagcacttgtccccaagtgtaaacacttcccatggcgtgcttcttccgtctcccaggttaggcacaacgatgccaaggtgctgtcatcgacactcccatcctttaagaatttcaggccagttgtggtgctcat

SEQ ID NO: 319512 - DNA, 1031 bp, Homo Sapiens
  misc_feature (225)..(243): n is a, c, g, or t
  misc_feature (246)..(246): n is a, c, g, or t
  misc_feature (249)..(249): n is a, c, g, or t
  misc_feature (270)..(270): n is a, c, g, or t
  misc_feature (282)..(282): n is a, c, g, or t
  misc_feature (285)..(285): n is a, c, g, or t
  misc_feature (288)..(288): n is a, c, g, or t
  misc_feature (303)..(303): n is a, c, g, or t
  misc_feature (305)..(305): n is a, c, g, or t
  misc_feature (307)..(307): n is a, c, g, or t
  misc_feature (309)..(309): n is a, c, g, or t
  misc_feature (311)..(311): n is a, c, g, or t
  misc_feature (314)..(314): n is a, c, g, or t
  misc_feature (331)..(331): n is a, c, g, or t
  misc_feature (333)..(333): n is a, c, g, or t
  misc_feature (338)..(338): n is a, c, g, or t
  misc_feature (346)..(346): n is a, c, g, or t
  misc_feature (357)..(357): n is a, c, g, or t
  misc_feature (365)..(365): n is a, c, g, or t
  misc_feature (368)..(369): n is a, c, g, or t
  misc_feature (371)..(372): n is a, c, g, or t
  misc_feature (374)..(374): n is a, c, g, or t
  misc_feature (388)..(389): n is a, c, g, or t
  misc_feature (393)..(393): n is a, c, g, or t
  misc_feature (396)..(397): n is a, c, g, or t
  misc_feature (407)..(408): n is a, c, g, or t
  misc_feature (417)..(417): n is a, c, g, or t
  misc_feature (423)..(423): n is a, c, g, or t
  misc_feature (433)..(433): n is a, c, g, or t
  misc_feature (438)..(438): n is a, c, g, or t
  misc_feature (446)..(446): n is a, c, g, or t
  misc_feature (450)..(450): n is a, c, g, or t
  misc_feature (452)..(452): n is a, c, g, or t
  misc_feature (455)..(455): n is a, c, g, or t
  misc_feature (464)..(464): n is a, c, g, or t
  misc_feature (474)..(474): n is a, c, g, or t
  misc_feature (496)..(496): n is a, c, g, or t
  misc_feature (561)..(561): n is a, c, g, or t
  misc_feature (575)..(576): n is a, c, g, or t
  misc_feature (579)..(579): n is a, c, g, or t
  misc_feature (585)..(585): n is a, c, g, or t
  misc_feature (592)..(592): n is a, c, g, or t
  misc_feature (595)..(595): n is a, c, g, or t
  misc_feature (600)..(601): n is a, c, g, or t
  misc_feature (603)..(603): n is a, c, g, or t
  misc_feature (608)..(609): n is a, c, g, or t
  misc_feature (614)..(614): n is a, c, g, or t
  misc_feature (633)..(633): n is a, c, g, or t
  misc_feature (636)..(636): n is a, c, g, or t
  misc_feature (639)..(639): n is a, c, g, or t
  misc_feature (645)..(645): n is a, c, g, or t
  misc_feature (648)..(648): n is a, c, g, or t
  misc_feature (658)..(658): n is a, c, g, or t
  misc_feature (663)..(663): n is a, c, g, or t
  misc_feature (724)..(724): n is a, c, g, or t
  misc_feature (828)..(828): n is a, c, g, or t
  misc_feature (841)..(841): n is a, c, g, or t
  misc_feature (923)..(923): n is a, c, g, or t
  misc_feature (928)..(928): n is a, c, g, or t
  misc_feature (933)..(933): n is a, c, g, or t
  misc_feature (943)..(943): n is a, c, g, or t
  misc_feature (945)..(945): n is a, c, g, or t
  misc_feature (947)..(947): n is a, c, g, or t
  misc_feature (952)..(952): n is a, c, g, or t
  misc_feature (962)..(962): n is a, c, g, or t
  misc_feature (966)..(966): n is a, c, g, or t
  misc_feature (972)..(972): n is a, c, g, or t
  misc_feature (978)..(978): n is a, c, g, or t
  misc_feature (987)..(987): n is a, c, g, or t
  misc_feature (1010)..(1010): n is a, c, g, or t
  misc_feature (1012)..(1012): n is a, c, g, or t
  misc_feature (1021)..(1021): n is a, c, g, or t
caggaggtttcatatcatttattgtaaagcacaaaacaggcattttaaaagtgaaagtatacattgaaaaagtacatttatatcacaaagcatcaaccacataattgcaaatacatttgctggaatgtgtacatctacactaaatactaaaaacaaaccaattttcatttctacacagaaatattaacctcctatcagtagtgatagatattttgtacattttcnnnnnnnnnnnnnnnnnnnggnaanaataatttataaaccaaaaanaaaattaagatnttnatnaagtcgtctgcatcnananantnaanaaaggatatttatttcncnaaaanaatgaagnaaatactgtangggccacntcnnannangggcccgggggggnnaggnggnngctgtggaannacatggggnattgtntgggaaaaanaggangaattgtngtananaanactcagccnagggtgaaanaaaaaatggctgaccacctggnggagccccagtcggagcaggaactgcctgacccattttcttgtagtactcttcccaagccttggnataataaacctgtnnagntggggngggattntgnggatnncnttgtnnattantttgagttgtagttggtgnacntgnaggggntgntggtggtggntgtgnttgctgaaagaaaaaagagagagaaataagaaacacaagatgatgaaatataggataaganacaaaaaaatagaaggaaaaggaggagcatgctgctgcaaaaatgagagagaagcaaaacaaaagaactggggagcaaaaggggctggaggaccatgaggagcngggcatggtggtncaggattataaggtgcagggttgtatggtccaattggagttccaggccctggaggcccaggaggtccatgggggcctggganacatngggcncatggggtanangnggccnaaagatttantggncaacantctttnttctatganttacgagatagtctatctgttgngngtgcacgantgtagataac

SEQ ID NO: 319513 - DNA, 877 bp, Homo Sapiens
cacagctgtcctatgaggtaggcaggtttcaggtattcacactaatgaggtattttccccataaacactgaaggatgccaagaaaagtttgcattcagatctagtttccatgtattcaaaaaatgaataagagtttaaaaagttgttttaccaactttagtttcagaattgacatcaggcatttcttattttaaaagtccacccttcagagaagataagaaatttctgaagtccacctttggaatcttttgggattcattctgactaagtaacatttttagttgagagaagtgtttctttgttttgctggtgttctttgaggagcaagtagatactgactgtccagatgtaggtgttctgaaaaccgatgctgggctcttgcctttcgagccagacatgtcatgatttgggtttgcagtccttctctctggtgtcttcaggctgagtttacttgtaggagtggcaggattgctcttcaatgttgacacaaagcttctacttttaccatgatgtttcactgttctgttgcatgttttacaagtgatcaacaatacacttttggagtctttgaactttttcaccatttttgcttctttaaaactgagtgtatagtttctcgcttctcgattaagaagtttctgtattttgggtgtcaacctggctttgggtttgagacgcactcgagagttatccagaaccaacagctggaaacagtatggacacgtttcttcaaaagtgctcttatcatcgtgcgacgaagtgtaggcccagaggaggtagcgggcttggcccgggcagctgttgtgcagtccccgcgctgcagcctcaaggtagtgcttctgtctcatcgccgccgccgctgccgctggctcgccgc

SEQ ID NO: 319514 - DNA, 1376 bp, Homo Sapiens
  misc_feature (1186)..(1186): n is a, c, g, or t
  misc_feature (1190)..(1190): n is a, c, g, or t
  misc_feature (1316)..(1316): n is a, c, g, or t
agagaatgaagtttctttctgtctcttaagtgatgtgtgagtggatggacagattgccctcagctttaagggcagttcaggatgatctgtcttaagatcgatgctctgtggaatgagaaaaatgcgctctgcagggcatgcccactgcatgtgctgggaggctctcctacatccaatgggcagatgcgcagtctccacggaggcctcaggcctcggtgtgagccagggctgcttcaaacatgtcggctatctaaagtccagcatcttccggtgactctggaggaagaggtgggcccccgtgctggatagtgggaggttctacatcattacctggtcctgagagctgagctgtagcctcctggtggactggagaagttcccacctctgcactaggctctgttgctatggtgagctgcatgtctggaggcttaacagagacattgggcaaatctgaatgctgagtttgatggtgacctggaggcgaaacggtgacttcatgatgttctggaggctgagctggggtctcctgctgggctggagaagattcaacctccccagaaggctgagctggctgctcctgctcactgggggaaagttcaggctctacaggaggacctggaggctcagttggggcctcctcttggtttgcaggaggttccatctcttctggaggctgagctggggtctcctgccgagtctgagaagattcaacctccccagaagactcagaaggctgagctggctgctcctgctcactaatggaaagttcacgctctgtaggatgacatggaggctcggttggggcctactgttgggttgcagaaggttccacctcctctggaaactgtactggagcctcctgctgggcttgggaagattctttctcattggtaggctccgaagttatggtaacctccacatctgcaggtttaactgtaatgttgggcaagttataatgagcttgatcctcacctggaggttgtactgtcacctcatgatttggtagagtttgagctagactctccatagaggactctggaggcagagctggggcctcctgctgggttgaagaaggaggtgtggaagctgctctggggcttcttcctggagtgaagaggactggatatcttcaagggtctctggattttgagtttcaggctctagatggaattgagcaacacgtccnactnactcaggggaccctggaggctcatctgagttcacccggagttctggaggcaggctgccaggatactgtgtatccatactcgaatattcatcctgcaaagtctgtttctaacgctgtggtttggatnattgctgtggaattccaacaatttcagcaatgctccaatgctgagctagatctttcttca

SEQ ID NO: 319515 - DNA, 1224 bp, Homo Sapiens
  misc_feature (20)..(20): n is a, c, g, or t
  misc_feature (24)..(24): n is a, c, g, or t
  misc_feature (46)..(46): n is a, c, g, or t
  misc_feature (72)..(73): n is a, c, g, or t
  misc_feature (80)..(80): n is a, c, g, or t
  misc_feature (83)..(83): n is a, c, g, or t
  misc_feature (100)..(100): n is a, c, g, or t
  misc_feature (108)..(108): n is a, c, g, or t
  misc_feature (110)..(110): n is a, c, g, or t
  misc_feature (134)..(134): n is a, c, g, or t
  misc_feature (150)..(150): n is a, c, g, or t
  misc_feature (162)..(162): n is a, c, g, or t
  misc_feature (190)..(190): n is a, c, g, or t
  misc_feature (208)..(208): n is a, c, g, or t
cctgtcagtccagagatttntttncgccccctcctcaaaactgggngcgggacccagtgatactgggaactnnccagaantgntagcattgctttacaanttcaggantntggatgggcttcggagctccccanttccagctacaggatnggtccctctccngccgacgcctcttgagcagcgatcccanttcctgcagagagaaggntggctctcccagatgcaggagaagacggtggcaaggagcagaaagaaggccagtggcagcagaacggccagcatcagcatggtccctgacatctctgggggcagtggctctaaatggatttttgcaggttgtgtcggactgggcagtgcctggagctgcctccaccagaccttggttctcacacctggtgtggggctggcagcgggcgctgggggaggaggtattctggaagtgccctgccttgcaggggaccgcagtggttgttaccctttcccaacttcatctttgagctcgggcttcagtgccaggcgggcagtcagaaagtagctcgcagtgtgtacactcgagggcccaggcagcacagaactttcccggttggcagcggcactgggtcttccgtttgcttgtgcagggggcaatctcctcgaggcccatcactgggtcacaggggcggcacagctggcagatggtcaggtagttccagtgctcgttgtaggaattctcggcacatgtggcacaaactgtgtcccggatgcggctacatttagctgagacataggtgcctggcgggcagcgggagcagcagatgcggtgctggggctcatagtattccttttcctggtccctgcaggtctggttctccgacgcatatggaggcaccgcctggggctgcgatgctgccaggagcccgaagaggcccagcaccagaggcccccaggccaggccgggggcagaggtggcccaaggcaggagcatggcggccactcggccaggcggccagcaacgtgggggcctgggaggaaggcaggaggcccgacgtcctgggcagcggtggcggcggctgcccgagcccagagcctgggacgggactcagggccgatgtgcaccccagggccgggagcggccaggccgggcctccagggctcccacggcggagctcaggaagtgggagtggagcgagctggccgcggggcggggacagggagcgctgggagccaggccggcctgtcgcaatc

SEQ ID NO: 319516 - DNA, 2009 bp, Homo Sapiens
ttttaggtcccattctttttatttgcatgtggttacaatataaatacacttgccattttcctccccttccaaaactcttccccatacctaggaatcctacccaaccccctagttgttaatgactccctttcctctcctctaggaggggagggaaggagcgtcctccctataatttcatcttcatgcagggtctacctcagtccacgtgaagtgtggaaccccaaagggtctctgaagcttggggatgagcaccacgaatcctttagaggggcccgtgacgtccttgcaggtgaccgtgtggcggctccctcggtgccgtgctccggtgcggcgtgccgtagtgggcagcagttggtatcatgtgccctgtccgtgcctgaggctgagcagccccagggggtgggtgggtctgccgggaggcctcaggtttgctcaggcagtagggagagtcctgtggagggcaccgtacccagccagtgcccacctgctctcagaggtgtctgagccttaatcccttagggctctgcttccccgggccctactcaggcccctgtgaatcccacgtgggcagggcagcctcaagggagaaggtgcccttgtgccccccttcttctgccttttctcagactccgtcagtcatgggtgataaattggttccttgggcccctgttagagggtgtggcaccacagtgctctgtctccgctaggtgccaagccttgccatcttcctggtggggtgtagagagcccgggagggccagggtccccctcttcgggaatggggtatggaggttcgggggtagctgggaggtctccaggacccggtggtccccccagtactggtccattgtagatgtagatgttgccagtgatagtcatagacccgccggtgacatgaatgccattggtaccgtgggccacctggctctgctccccgggttccaactgcggctccctggtcaggtccagaggactctgctgttgcggcacccctgcctccaaaactggggctgcggggagcccagtggatactggggaaacatctccagaaatgggtagcagtggctgtaccaagtcagggaagtatggatgggccttcggaggctcccagcttccagctacaggattgggtccctctccctgcggacgcctcttgagcagcgatcccagtttcctgcagagagaagggtggctcttccagatgcaggagaagacggtggcaaggagcagaaagaaggccagtggcagcagaacggccagcatcagcatggttcctgacatctctgggggcagtggctctaatggatttttgcaggttgtgtcggactgggcagtgcctggagctgcctccaccagaccttggttctcacacctggtgtggggctggcagcgggcgctgggggaggaggtattctggaagtgcccggccttgcaggggacgcagtggttgttacccttcccaacttcatctttgagctcggcttcagtgccaggcgggcagtcagaaagtagctcgcagtgtgtacactcgagggcccaggcagcacagaacattcccggctggcagcggcactgggtcttccgtttgcttgtgcagggggcaatctcctcgaggcccatcactgggtcacaggggcggcacagctggcagatggtcaggtagttccagtgctcgttgtaggaattctcggcacatgtggcacaaactgtgtcccggatgcggctacatttagctgagacataggtgcctggcgggcagcgggagcagcagatgcggtgctggggctcatagtattccttttcctggtccctgcaggtctggttctccgacgcatatggaggcaccgcctggggctgcgatgctgccaggagcccgaagaggcccagcaccagaggcccccaggccaggccgggggcagaggtggcccaaggcaggagcatggcggccactcggccaggcggccagcaacgtgggggcctgggcctcgtgccgaattcgccacccaggcc

SEQ ID NO: 319517 - DNA, 583 bp, Homo Sapiens
ttaagatgtggagcattaaggcattttcagaggcgcccccccctgtgtccctcagccctggtccctcacctgacatctctgggggcagtggctctaatggatttttgcaggttgtgtcggactgggcagtgcttggagctgcctccaccagaccttggttctcacacctgcagaggaaaaaaagatgatgaccttttcacgccctggcccaccagtgtcccgactccactgggcaggcggggaggctgaaagtggtgagtcgagtccgtggtgtcaaggataggcgctgggggttgttagcagctgaggcttctcagagggtggaaggagcttgggtggggctgcactcacctggtgtggggctggcagcgggcgctgggggaggaggtattctggaaagtgccctgccttgcaggggacgcagtgggttgttacccttcccaacttcatctggcaagagaaaggcaggccagccagggtgaatgggcaaaagggaggggccctttgccggcctgtgagtttcctttaagcctcaggatgcccatccaccccattgcgtagctctcacctttcccaactctgc

SEQ ID NO: 319518 - DNA, 1611 bp, Homo Sapiens
  misc_feature (220)..(220): n is a, c, g, or t
  misc_feature (232)..(232): n is a, c, g, or t
  misc_feature (237)..(237): n is a, c, g, or t
  misc_feature (255)..(255): n is a, c, g, or t
  misc_feature (260)..(260): n is a, c, g, or t
  misc_feature (264)..(264): n is a, c, g, or t
  misc_feature (295)..(295): n is a, c, g, or t
  misc_feature (970)..(970): n is a, c, g, or t
tgtgacttgatttctgtgtcttaagtggatgaaggttaattccctgtgttaataggtgttaaatacttagaacaggccccacccctcaagcaagtgcagtactactagtcctgtttggggagtatacacagtaggcacccaatagtgacttaaaacagggccacgatggtcattctcactaccctctgaggagaacgacacaactgacctgcccacccanggggagcttggnaggcngccccccactgctgagtngtgcnggcngggggctgcacaggatccagcatggggggcnggggaaagccagctttattgagttaacttcccaggacctgggacatcttagatctccccttcccccaggagataggacccctaaacctcccctgggtcctaggaccacctgacccaccacttgtagtctccagtgaggaggggacccttatttggcaagagatgaacatgtaagcagctgtccgccggaggaaaggacgatggctgaaaggaatgaaccaccgcaggcggtgtctctcctgtccagctgtggacaggacctccacggcccggccttcctggcctcggtgctctggctggcctgggcctgccgtggcggctcagcttctgttgtaggcttggggttggccaggctgccggtctggggcaagatcactcgatctccaggatgaggtcgtcaccttccagtgtcatgtccttggtcacagtgaaccttgcggacagtaccctccatgggtgaggtcaccacagtctccatcttcatggcactgagcacacacaggggctggcccttggccaccttggcccctgccaccactttgatgtctatcaccttcccaggcatgggcgccccgatctggcccttcacgtcctttagggccttggggtggaagtgcatctccttcatggcctgggtgtccttgaccaagatggaccgcagctgcccattgagctncaagcagacctgcctctggccggcccggttcaggtcgctcacggccagggctttgatgtgcagcgtcttgcctcgctccagctccacctcaaactcctctgcgatcttgggtccctgcaggaagaggcgagtattcaggctatccagggggccaaaggtggcagtgaagtccttgaagtgggcaaacacatcggggtacatagctgctgagagcacatcttccggccgtcacctcctccccatgccggtctaccagctccttctccagtgcctgcagatccaggggagggagggaggctccaggccgcccctccacccttggcaggtccttcagtaccttagagcgaaagggttcggggaaccccccatgggggacaccgatgtagccctgcaggaactccaccacggagcggggaaaggacagctcttccgcctgagcttcggcctctgcccggctcaatccattctgcaccataaactgggccaggtcccccaccgatcttggaggagggcgtcaccttgatgagatcgcccagcatctggttggcctccacataggccttcttgacctccttgaacttggagccaagccccatgctgtgggcctggaagtgcaggttggtgtactggccatcccggga

SEQ ID NO: 319519 - DNA, 1495 bp, Homo Sapiens
  misc_feature (135)..(161): n is a, c, g, or t
  misc_feature (243)..(255): n is a, c, g, or t
  misc_feature (399)..(401): n is a, c, g, or t
  misc_feature (426)..(426): n is a, c, g, or t
  misc_feature (491)..(491): n is a, c, g, or t
  misc_feature (496)..(496): n is a, c, g, or t
  misc_feature (548)..(548): n is a, c, g, or t
  misc_feature (555)..(555): n is a, c, g, or t
  misc_feature (641)..(641): n is a, c, g, or t
  misc_feature (669)..(669): n is a, c, g, or t
  misc_feature (912)..(913): n is a, c, g, or t
  misc_feature (1000)..(1047): n is a, c, g, or t
  misc_feature (1211)..(1211): n is a, c, g, or t
ccggtactggacccggcgggatgagcgaggtggaggcggcagcggtggctacagcggtccccgcggcgacggtgcccgcgacggcggcaggggtggtagcggtggtggtaccggtgcccgcaggagccgcagaannnnnnnnnnnnnnnnnnnnnnnnnnnacgcctcgggccccgctgctgggaccccctcggcgccgggctcccgcacccctggcaatccggcgacggcggtctcgggaannnnnnnnnnnnnggcccggagtcaggcggacaagccggtgctggcaatccaagtcctgggcactgtcaaatggttcaacgtccggaatggttacggattcatcaacaggaatgacaccaaggaagatgtctttgttcaccagacagctattaaaannnacaaccccaggaagtttctgcgcangtttggagatggggagactgtggaatttgatgtcgtggaaggagagaagggcgcagaagccactnatgtnactgggcctgggggagtacccgtgaagggcagccgttatgcccccaaccgangtaagtnccgccgattcatcccccggcctccctcagttgccccaccacccatggtggcagagatcccctcggcggggacaggacctggcagtnaaggggagcgggctgaagactctgggcnacggccccgacgatggtgccccccacccttcttctaccgacggcggtttgtgcgaggccccggctcccaaccagcagcagcctatagagggcactgacagggtagaacccaaagagacagccccattggaggggcaccaacagcagggagatgagcgagtccccccgcccagattccggcccaggtaccgaaggcctttccgccccaggccacgccagcagcctaccacagaaggtggggatnntgagaccaagcccagccaaggtcccgctgatggttcccggcctgagccccagcgcccacgaaaccgcccctacttccagcggagacnnnnnnnnnnnnnnnnnnnnnnnnnnnnnnnnnnnnnnnnnnnnnnnncagcccctgagacctcagcccctgtcaacagtggggaccccaccaccaccatcctggagtgattccaactcaactcagaggacacccagggctgccatctggtttctgccagtttttccaaatgacctgtaccctacccagtaccctgctccccctttcccatnattcatgacatcaaaacaccagcttttcaccttttccttgagactcaggaggaccaaagcagcagccttttgctttttcttttttcttccctccccttatcaagggttgaaggaagggagccatccttactgttcagagacagctactccctcccgttactcaggctgagaaggaaccagccagctcttacctcctcctggttgcttttcttgcccccaccccaagtttatttttgttttcccccggccccctacctctgaagccattttatgatctgtcatgt

SEQ ID NO: 319520 - DNA, 452 bp, Homo Sapiens
  misc_feature (224)..(224): n is a, c, g, or t
  misc_feature (229)..(229): n is a, c, g, or t
  misc_feature (243)..(243): n is a, c, g, or t
  misc_feature (245)..(245): n is a, c, g, or t
  misc_feature (252)..(252): n is a, c, g, or t
  misc_feature (262)..(262): n is a, c, g, or t
  misc_feature (327)..(327): n is a, c, g, or t
  misc_feature (345)..(345): n is a, c, g, or t
  misc_feature (350)..(350): n is a, c, g, or t
  misc_feature (352)..(353): n is a, c, g, or t
  misc_feature (355)..(355): n is a, c, g, or t
  misc_feature (373)..(373): n is a, c, g, or t
  misc_feature (387)..(387): n is a, c, g, or t
  misc_feature (401)..(401): n is a, c, g, or t
  misc_feature (417)..(417): n is a, c, g, or t
  misc_feature (422)..(422): n is a, c, g, or t
gtgctggtgcgcatgggcggcctcttcgtgctgctgctgactgtgggtcgctggctggacctgctgggcatccttgtctccctactgggcgagctctggtgtctcgtgggcgtccgcaccctgcttgacctctgccagatacaggattttccatcccagaggcctccagtgtcaacaccaagccagcccctgccctcggcaccccagtcccaaagttcggcccncaagngacctgcctaaggnangatctgnaatttgtctnaagcccattagcctgatctccgaggccttgaccccagggcgatgcctggaggtcatgagtggcanagttggcctcctgcccanagctnannantaggccctgggagccccnagaagggaaggcangatttggggatggnagcctctggagagggnacacntggggacccctggttgaacccttttttttc

SEQ ID NO: 319521 - DNA, 1784 bp, Homo Sapiens
  misc_feature (188)..(196): n is a, c, g, or t
aattgggggggaggaaatccccaaaggccccttaggtccaaggaggccaggggaattttcccttagggaagccaaggttaatgggcccatgtttcacctttaccctagttgggggcgcgcgcggcccaaacggaatggttctagaaaggttcttggaaaggccgaggcgggccggacaaggctgtgcnnnnnnnnnagtgggggtttgatgaggttagaaattcctttattcgttatcaaaacaaactaacagtaaatgtatattatatgctttaattttatacatataagttatcttgtttggatacatctttcatcaggactctgccacatccatactttgtccttgtggtgagagaggataaaatgttatataatttgttattcaaagaacatggcaaccgtaacagacaaaaggaagcatggcatctaggggaggagagtggagagttttccatacacaaacacatttaaacttccctgtacaaaaatacctgctgttgctttagaaatcattttccgttatgaatagtcaggtcttgcagtacaaatccaggtgcagtgccagcaagtatttcaaataaatttcaacgacttgatattcaagtccaaactaaatatttaatgttttctttattgcaaatatgatgtctttgacctgaggtatagagttgtcctctagaatctttgcataaggcatagggacatcagcaccagtgacacgaacagcaggagcatccaggaaattgaacgcaggaccttccatgatcctggcacagatttcagctcctactccaaactgtggccagcctccttccacagttacaagatgatttgtcttcatgacactggcttctatggtttccatgtccattggtctaatggtacgcatatttatcacctcacattcaactccttctttagatagcactgctgcagcttctaagcagtggcccacaggtcttgaatgggaaaccacagttatatgtgttccttgcctttctattttggcttttccaataggaatcagaaaatcttttgactgagcttccggaggaaattcaaaaggaaccccatacatcaattcattctctagcaccaccactggattgttatcccgaatggctgatttaataagtcctttagcatcctctgaattccagggactgaccacctttaagcctgggcagtgcccataccaggcagcaaagcactgtgagtgctgggcagctacacctgctgaggcaccattgggccccctgaagactataggcacaggctgaaggccaccagacatgtagtaggtcttggcagctgagtttataacctggtcaatggcttgcatggagaaattgaaggtcataaattcacaaatgggccgcaacccagccatagctgcacctacagcaattccagcaaagcccatctctgatatgggagtgtcaataatcctcttgtctccatatttcttccacagccctcgactaaccttgtatgccccatcatactgggcaacttcttctccaagcagaaataccttctcatctctttccagctcctcatccataccctgatttatagcatcacgaactgtcacctgcagcgcagccggcgcggtccagtgaaagcgcctcttcagcagcccggagacctcccgaaggggtctccgcaccaagccagacaccgccgccatcttggtcgtgtcctcgtgccgaattcgccacccaggcctcgtggttgtttaggtgtgttagggagagggggaaaaaagagagggggaggag

SEQ ID NO: 319522 - DNA, 1042 bp, Homo Sapiens
  misc_feature (11)..(11): n is a, c, g, or t
  misc_feature (15)..(16): n is a, c, g, or t
  misc_feature (44)..(44): n is a, c, g, or t
  misc_feature (49)..(49): n is a, c, g, or t
  misc_feature (74)..(74): n is a, c, g, or t
  misc_feature (81)..(81): n is a, c, g, or t
  misc_feature (84)..(84): n is a, c, g, or t
  misc_feature (95)..(95): n is a, c, g, or t
  misc_feature (101)..(101): n is a, c, g, or t
  misc_feature (128)..(128): n is a, c, g, or t
  misc_feature (441)..(441): n is a, c, g, or t
  misc_feature (689)..(689): n is a, c, g, or t
  misc_feature (701)..(701): n is a, c, g, or t
  misc_feature (707)..(707): n is a, c, g, or t
  misc_feature (715)..(779): n is a, c, g, or t
  misc_feature (834)..(963): n is a, c, g, or t
tcatgccatgnattnngggggtgacaggcccaggtgggatactntctgngagcccatgtctttctgtcccagcncctgtanttnacagagtatgntagagntcagccattgctagggagctgccactnaccacacagagaggaggaaattcttcagccacagcacttagagctgagcctgacatggtcctcagcaagatgttgcaagttcctaatctgaacacagaggccagggagtaagcatcatctggagcccagagctgactgtcattacccacaaacataaacaccctgagtttggccttctccccaccctgccgaggttgtcagagcctcagcactggctctgccctgggtggcagcccctgggaagcccagctgccacctctctacaaatggccctgtagaagctgtgctcagtgatccacttcctggggggggnggcccaccttgttgccattacaccccattacaaactgatgcaaccagctttcaacagacactgccaaggaagatacacattacaacagcatgctgcaatacctctgcctgtgcaagagactgacccacatccaaaaaatggacatcttcccaccccagtgtctcactccactgagctggaagtggcctttgtcaggaccctgtgaggtcttgagtggatctgcttttcccaagatattaaaccagtgnctttaaatcctngctgcntattaccnnnnnnnnnnnnnnnnnnnnnnnnnnnnnnnnnnnnnnnnnnnnnnnnnnnnnnnnnnnnnnnnnttgatggggttttcaaacattttttaagtgtttgttgaaggatgacatatatgcnnnnnnnnnnnnnnnnnnnnnnnnnnnnnnnnnnnnnnnnnnnnnnnnnnnnnnnnnnnnnnnnnnnnnnnnnnnnnnnnnnnnnnnnnnnnnnnnnnnnnnnnnnnnnnnnnnnnnnnnnnnnnnnnnncttactacctggctccaaaggctaatgtccattctggcttctaatggtgtacagtcatttctcctgttttcaaacttta

SEQ ID NO: 319523 - DNA, 1617 bp, Homo Sapiens
  misc_feature (784)..(792): n is a, c, g, or t
agcatcactgttttaatttcatgaaatacaagtacaaaacattgtataagtatactttttactacatggagatgaactaatacatttatgtttttatcagaatctgtatcacccagcgctggtcaatgtactagtagctttccacagggattttttatactattcctataaggttttatcatgaataaaaaagctcacaactcttttcagccattgcagattcacatttatcttaatattcctgttcaagatgctctggagaactgttaagaactacaaaatcaccttaggcagagttttgaatgagtaattttatttcacgttggccaagatctcccttatgttggcattgcaaagacactgcacttatctgaggttagaaaaaatgtagtcttaatagccctcttaatgtgtagcaaggcaaattaccatttcctaaaatgtccagaatatcatagtagttagttattcgttaagcagtaagtcatgaaactccacttatagaagacaatagcaacagaggaccactaagtcctaaatataccaaagaaaaacaagtttacaaatattcaaactgtctgtcttctctacctctaaaatggtttaaccacatcaagtgagagtaacatcagccgattagaaagggaaaaagtaaactgtgctagcgtccggcattcagcttccatagcatgtctcacagttttcggccatttcagctaagagttttcttatgacaggcaaaaataatgattaaaataccattagctttgctgagaaatgtggnnnnnnnnntcacaatgtcaaaaatatttgaaactaattttgtttttataaataaataaaatggtgtttatcttttcttaaaattcttgctgttaaaacattcaaagttatgtcaacctgtaaggataaaggggtatttaagataacatgtttggaaaactaaacccacatttttaattgccagcattatgctttgttcttggtagagtcatccttgtttcttctttttacatcccaattataaaccctggccatattgacttctgtggtagtaaattgatctcgaagaaagtcaaggtcttcctccagggaatcaagattctttgtggcagtcgataaattcttttccaacaatgcctgagcttcatcaatatcatattcaagcattacattagcccccaaccacagacacactttatcggtaggaggaactgaagctttgcaatacaggttatctgccagcaagaatctggtctccattgagttggtggactcttttttcttctgcatgtattttagaatttccaaagtctgtttaatttcaggaatctgaccttttagccttcttttcttttgagcaaggttgagttccataaacttatacttctggtactgttcatccagcttctttaatactgtatctgcagtctcattcccaggctgtttcatgaaggaatctacatcttccacaaacacggcctcaggaatccccaggtggagccgccgcccattccctgtggccatttctcctttgccacaactgtccttaacggccgccatcttggggatgcgagcgcgcgactgcctcccgggccgccggccgccgggattccc

SEQ ID NO: 319524 - DNA, 1439 bp, Homo Sapiens
  misc_feature (484)..(484): n is a, c, g, or t
  misc_feature (489)..(489): n is a, c, g, or t
  misc_feature (504)..(504): n is a, c, g, or t
  misc_feature (724)..(724): n is a, c, g, or t
  misc_feature (729)..(729): n is a, c, g, or t
  misc_feature (827)..(827): n is a, c, g, or t
  misc_feature (862)..(862): n is a, c, g, or t
  misc_feature (876)..(876): n is a, c, g, or t
  misc_feature (1286)..(1369): n is a, c, g, or t
acacattttcagacatcatcttgtttattacaaaacttaaaacaccttccaggcaagatccaaagcaattttatcctaacattgttcaccttcatctgtagagtcaaatgtatctgccagcttgtgttgacaagggggaatgcttcccatttggtcaaggttgagggacagtaaaggaatcttgtattctaatgagtacagcatcctttcattgtccaagccatccaccttaggctttgaggttcaagtccagggtctggagaagagaaagtttcatacccaaccttgtgggtctttccttcggtaggtacattcgtgtcagcacagtcattaggaaaagtctccagtatgaggaggtgggcaattcatcacttgagacctggttttagaggaatagggaggcgaacaagcaatctgcccaccgttggccaagactgagaagatggagggctgtagggcagtcaggatgaggagaacctggaanagagnaaatttggctcccangttctgctcacccaggtgtagcctggcttgacgggaaatgatgcccagggtccagagagccagcagtgtggacacgccgaggaaagtgttgatccatagagctgtgctcccctacagaaatgtctgtctgggtcatagatgccgtcggggatgagaaacaggcccaccagggtcagcgttatcttcaagaaggcgtattggaaagggcccaacatcagcngctgnagcttcttcctggtgagcagcagccgtggacagcaggggcagcagcagcagcaggggcctgtgtggaccatcaacggggtgtccctcagcgtcctcancactgcctccttcccccaaagccttccaccatgancagcatcagcaggnaaaagcacacggcataaaacgaggtgatggtcatttccaccagcaccagggaacgagggatccagagaccaaagcagcacagcacagacaccaccgtgggtgccgagctcttccagagcagagtccgcctcttgattgggcaaagggtgttcttgtacatgtagacggcatcctccaggaagatggcaatggagcccagcgccagcaaggtcaggatgctagtgagggcaagttccacagggcccagggctctcaggagttgggctgctgtgggaggctgagagaagcaggcggaggggatgccgtaattggtcttcagcacctccagaaagatctgctgtgtacctggggtcaagctttatctgggtcctgcccggctccatcgccgcgttctctccagcaatcccgcnnnnnnnnnnnnnnnnnnnnnnnnnnnnnnnnnnnnnnnnnnnnnnnnnnnnnnnnnnnnnnnnnnnnnnnnnnnnnnnnnnnnagcagaattgcagagtcttcccctctgccgctctccctccttgagcttcccgggcccactttctctctca

SEQ ID NO: 319525 - DNA, 1033 bp, Homo Sapiens
  misc_feature (124)..(138): n is a, c, g, or t
  misc_feature (696)..(704): n is a, c, g, or t
aacaatctcccatgggaaggatgtacgaaaaacaaagccatacaagcattccaccaattacagaattacatatttgtgattatgtgaatgttcaccctacagtttatctggaaaaacacttttnnnnnnnnnnnnnnncttttgagtgtttcactggattaactgccataaaaaatgaactgcaaagaatttcaggagagatacctaaatttaagtacttttactttttaaaaatttcaaacttttatagtattctgctaacatatctcctgtgaggaacacttaatactgaattttcccctcaatagccaagtcaggatatacttatttcatttttcacccaagtctttgtttctaaacgcattatgtagaatagatttgatcgtcacagcatcttgagtagctaatgaggtaggagtattcttaagttcttaggcattaatgaagcaaagcaaaagacaatcaaattacaaagattttcttttgtagtggttgttctttaagtaaaatgctaagagcactggaaattggtcaaatgctactcacattttaaaaacgaagaggaaaaacccattagaaagccctgatacacatagagtctgttaaagggaaaaacctgagtactggaattaaattcattttggcattgtaaggtaaggtatctacgcctaaaaatgccaagttttctgcccaggnnnnnnnnntctttaccaaggagataaaatttaaacagaaaacaaaattaatctatactttcttttcagaacaagttaatttgcttttaacccagttctcttttcctatacacaaactgattaataatttcagtatactgcatatccagtaacacatttaaatgaagttagcagtcaacttaccaactgtgccagagaagacactccttatatggaggcttcattaacataatgctgaacaactagaaaacatgtaggtaatagatttcagcaccatctgttagtagattgtttcaaaatgcatacaccccctaaattcacataaacctaggaaattt

SEQ ID NO: 319526 - DNA, 2352 bp, Homo Sapiens
  misc_feature (148)..(157): n is a, c, g, or t
  misc_feature (174)..(391): n is a, c, g, or t
  misc_feature (400)..(538): n is a, c, g, or t
ccccccgttttctccccggggggaaattttttcccaagggcccaagggttttatcccccggggatttaagtttcttaaacccgttttgggggggttccctttggcgcaaattttttaaaaatttccccccctctcccaaaagggcccnnnnnnnnnntaattttaattagaggnnnnnnnnnnnnnnnnnnnnnnnnnnnnnnnnnnnnnnnnnnnnnnnnnnnnnnnnnnnnnnnnnnnnnnnnnnnnnnnnnnnnnnnnnnnnnnnnnnnnnnnnnnnnnnnnnnnnnnnnnnnnnnnnnnnnnnnnnnnnnnnnnnnnnnnnnnnnnnnnnnnnnnnnnnnnnnnnnnnnnnnnnnnnnnnnnnnnnnnnnnnnnnnnnnnnnnnnnnccccaaagnnnnnnnnnnnnnnnnnnnnnnnnnnnnnnnnnnnnnnnnnnnnnnnnnnnnnnnnnnnnnnnnnnnnnnnnnnnnnnnnnnnnnnnnnnnnnnnnnnnnnnnnnnnnnnnnnnnnnnnnnnnnnnnnnnnnnnnnnnncctggctaggctaggtttattatttttttcccccagaaaagagactgaaagttgaatttgccttatccaaaatgcttggaaccacaagtgtttcagatttcaggattagggatacttaacctgtaccaagttccaattcatggagaggggccatgattctgctgtgcttgagcagagagatctccttgccagagcctcacccaagagaaagaggtgggtacctgcatgcccccaggtgcctaccctgggaggtgggcacctgcatgcccccaggtgcctaccctgggaggtgggctcagaagttagagagcaagggcacagagtcaccaaaacctgtcccaacaatccccagacaatatgcttcctgctgagtccattttaaatcacacaacactagccgtggcacaggcccggctgcgaggcccatgatgcttgggagctgttgtggagaactcaacctcatccagaggccagagggctgacaagagcagctgggcaggagggcctgctgtgggcagggtgggaaagccgccacatctctacttcccaagaaaggccactaggtgcaggaaaagggggcgaagggtctcaggactagtgaaagtctgcattgaaggctctgccgatgaccagccgcctcacctcgctggtcccagcccctatctcatacagcttggcatctcgaagaaagcggcccatgggaaagtcattgatgtagccattgccaccaaaacactgaatgccgtccagggctacctgtgtggcacactcagctgagtaaagaatcacacctgcacagtccttagcagtgcaatggccctcatcgcaggccttggcgacattgtagacatactgccgacacgccatgaggcgggtgtacatgtcagccatcttcccctgcatcaactggaagtggccgatcttctggccaaaggcttccctcacgtgcaggtagggaatggtgtggtccaggaccgcttgcatgagcccaagaggccccccggccagcaccagccgctccaggtccagcccactcatcagcacgtagacacccttattctcatggcccaggatgttggcagcaggaatcttgcagtcttcaaagattagctcacaggtgttagagcccctcatccccagcttgtccagcttcttagaggtgctaaagccaggcatacccttctccacaatgaaggctgtgatgccccgagaagctggcacagcagccagatctgtcttggcatagacaatcaggacgtcagcatcagggccattagtgatccagaacttgttgccattcaggatgtagtgatttcctttcttttccgctttgagcttcatagagacaacatcagagcctgcattgggctcactcatggccagggctccgatgtactcaccactgatcagcttcgggagatacttctctttctgggcctcattcccattgcgtacaagctggttgatgcagaggttggagtgggcaccgtaactgagccccactgctccggaagctcgggatatctcctccatcaccagcacatgctccaggtagcccaggccggagccgccatactgaacaggggctgtgatgcccaatacgcccaggttccccagctgcttccaaaattctcgcaggttcttgaactcattgctgcgatcgatctccttggccttgggggccaggtgctcctgaaggaacttagccatggtctgacgaagctgcctctgctcctcgcttagcccattgattgcatcgtccacgggcaaaagcgagtgggcccgctgggaaacgaagccggcaagcggcgccg

SEQ ID NO: 319527 - DNA, 1016 bp, Homo Sapiens
  misc_feature (415)..(424): n is a, c, g, or t
agacattaacaaactaaatgcagataaatgtattctacttcacaggacagtaagtgtcctagataaaaacaagcactggctccaagcagtcgcccattctagtcccgcaacggtaatctatttttcttcaaatgtcagttcttcacagtttcaatactgcagcagcaagttcttccttagatcaagaaagccgtggtccgtatttcagaaaatcttaagtagagataagtgagcaagcttctgggtgccacgtgcagtttgggtgggacaattttacctgaagtcctgcagactggccgtggggatgacgggggccccgtcccttgcggtgttcttcatatcgattcagggaagcgaactgtgcagtgctcgcattctatttattggtccctgtcaccccgtggggtgtcacagnnnnnnnnnngtcaatgcttcacagaggagttgttcagagcaggtcaggcaggacgaggccaggaggctttggttcgacacagttgatccagaagttggcacagctggcgtgatactggtgccctccataggccagcttgaaactgtctgtttctgagttgaatgcccggctcctcgagtccacattcaagaggcacactccacaggcaagctcctgagcatttttaatcccaggccgtaacatacaggaggaaaaatccagcgagttttcatctggtgtgagtgtggcgagtgacatgaagccgattaggttattccatactttatcgatgtccttcagcaactgctggagtttctcactgcacactgcagtggcttttatccccagctccacacgcttggttaccctgtacacttcaacaacacctgacgggatgagagagcagagagagagtgttggcagtggagacacagaggacccagacaggggagcattattgcttgctgatatctgtgagaaacaatgggtgtatctggacagaggtgtacttactattctttgggaccaatccacttctcaatgctgctgtatagcttactgg

SEQ ID NO: 319528 - DNA, 1591 bp, Homo Sapiens
  misc_feature (254)..(275): n is a, c, g, or t
ttatgcacgagatcaactgtttattgatttttttcctcaaatactacacatttaaaggaactgttaaactgaaaaagacttgacaatttttggtaaatccgtagcacagaaatgaggatttctgctggtaagttctcaggacagacacagacacaggtccactttccaagcaagacatctgctcactggaaacggagtgaatgcatagctggtgacggcggcgggcactgctgagtcacgtgaaacacaggttnnnnnnnnnnnnnnnnnnnnnngccggcccgcgtggcccccgcgtaactctggctgcagcacctgctcccgggcgactccgggcagcccgagacactcgtgctgcgggtaagacccagcttctgtttgtgcacaagtaacacgacgactgaaatctgcaactactgcaaagacgcgggcacttttacagtgttctgctacggagccaggacaaaggccggtcagaagccggaccagcagtcagctggtgacgacgagcctccctccagcaggcaccacgtcagagaggccccaggcccactgagcccgggaggagacccagccggccagccagatgtgtgcctgaatgccacagacttcaagcagtttacaaacgaaactcactgttaaaagctgttaaatctcattaaaacagtagacgagtgctttagattctctgaatatcaaataatatatacagatagacactgagacatgacagtctaatctaaagcatctttacagatgcatttgcttgaaaagttagtcttctttttaactctgaatcagtgataaaattgttaatttgcaaaagagtacagttttaagcaagaatagagtgaaaataatttttaaatatggcgatttgggggagttctacctaaggttctatgtaaagcttccattcagatgcccaaaagcacaaagagcattcccaatagaaacccgaccataacccggtcccaccttcctggcataattccttttctcaaacatctgccacctgaggctaagcctacacacggcgtggctgagtaacagggtaagggaatagggagatcgtttcctcaagactggtgcgcatcaatctgtgccataatttaagtagaaatgaacaggtgtataaaaaagtataactgtacacagcctttaaattaaaaacctcaaaatcttcactcaaaatgggatgtaagcttgttcatttaagttgcaggtgatggactcgtcagagagagtaatcagtggaacaagatcagtgtaacccaccattgactcggaaaggagagacaaagtcaagaacatagagatctatgataggccaacaggcacagtgggcggggaggggcggctatttctgttgttctgcgtcttcctgcgctcagatccctccagctgcactcggaaaggtgccgagtcccaggcgaaatgaccagctcatctgccttccaggaacaccatgaagccaagaagcaatggaaccatcatctcttgcaggaaaaggagtggatgcccacgtggctggctgaagctcctgggcccgccgcctccgtccccccgctgggctgtccccgactcatca

SEQ ID NO: 319529 - DNA, 978 bp, Homo Sapiens
  misc_feature (62)..(62): n is a, c, g, or t
  misc_feature (125)..(133): n is a, c, g, or t
  misc_feature (192)..(214): n is a, c, g, or t
tatttttccatttctttaatcttagcaaactttttattattattattatcaagaggagagtntgagaaagatgtgatggcaacccttaaggtcatttaaaaactttacactggactgtacaagannnnnnnnngataaactatttacattttcagactttcaaacatattcaaagcagcaatagacactagnnnnnnnnnnnnnnnnnnnnnnnctaattgcccaaatagttaccagccatgggccaagtaggtacctgcattatacatagaatttctacaaagaaaatctgcagttaaaatttgctccaggatgtattaaatgcccttagcaattcaagggccacacccagtgttgctataggaaccaaagcacagtaccttgacaacagagttgcagttgtcccaacagccctacacaaactttacactttgaaacagcagccagcatgtcagtccagcatgtcagtgaattgtgctgattaaattaacatagaatacaatttcacaatatacatcacaaacaaattacaacgtcgggggaaataaaagagttacagtaagataagttatgtagtaacagcttataagcttgtctaaggtaataaaaattttacatggcaaatacaataatgaatgaacataaatgctaagcattctaatttgctacaagctggaggagggtacaataaagactgcactttcaaaaaagcaaaaacacatatgacaaaggaagacaaagggagaatgcacatgagcagacctgcaatgtgcagcatacaaaacagttaaatatttgcacattccccatactccaagagcaccagcactgaggcctcactttatgcttgtggttcttcaggaataagaaactactgagcaaggtatgtcactgagttttcttcaagcgttcatattgccatggacactgattagaagagttatctgcattaagcctcgtgccgaattactggccgcg

SEQ ID NO: 319530 - DNA, 689 bp, Homo Sapiens
gggaaacgggagggagacagaatttaaataagtaatatctcatcagatccatttgatttttaactagcgaagaaaaagtcattttccagatatggtgagggagagaattttttttaactctgcgactacttcgtaaagcccaaggtcatgatgtagcatattcacactctaaacgtgagtttcccctgcagaaaataatctacaccaacccataattattctttacgatgatccaccttttataatgtagatgtttaaaataaaaaccaaaggaatgaccaatgagagccacagtccctaggaagaactgtaaatgaagacgaatccacatggcacaggatttctcccaacatcctcaaacgggaatcatccgaatgcatcgattctacagcccaaagcctttgtccacaactcccaggggtcagagcttccttctttcgcgccaggccaaagttgctacgtgggatccgatgttgtcgccagactttcagccaaaatcagccttcaaattaacctggaccgcccaacctccgtgcctttccgttacgccgtctcaagggcaaacattccaccctaactcgccagagggtgaactgcccccaaatctaactgaaaacacttgcccttctcaagcctaacgagctgggcctgcagcgcttttctgccaccactgactacgatgacatagc

SEQ ID NO: 319531 - DNA, 371 bp, Homo Sapiens
  misc_feature (290)..(290): n is a, c, g, or t
  misc_feature (331)..(331): n is a, c, g, or t
  misc_feature (337)..(337): n is a, c, g, or t
  misc_feature (344)..(344): n is a, c, g, or t
atcacaattaagtttttattgtatctgctgagatactttccatacacacgtaagcatatacatatatacacacacacacattattgtacacttaatttatgtccttaatacattctgaagcactttccatatcagcacgttgagatctagctcattgggtttaaacatctgcatgtttcattttatgattatacaaaaaaatttttcagcagttccctattgatggggtatttacatatttttgttttgtctgacatggacaaaccattggcaaatggtaccatcctttngtctccatggatggaatcatgcccttgggggctcactccanatccgnatttggnaggggcctttgggggcctttggccctt

SEQ ID NO: 319532 - DNA, 736 bp, Homo Sapiens
ttttaatcacaattaagtttttattgtatctgctgagatactttccatacacacgtaagcatatacatatatacacacacacacattattgtacacttaatttatgtccttaatacattctgaagcactttccatatcagcacgttgagatctagctcattggtttaaacatctgcatgtttcattttatgattatacaaaaaaatttttcagcagttccctattgatggatatttacatatttttgttttgtctgacatgacaaacattgcaaatgtacatcctttgtctcatgatgaatcatgccttgagtctcactcatatctgatttagatgagactttggactttgactttaaagttgatgctggaacaagttaagactttttaggggctattgggatggaatgaatttattttgcatgtgaggacatgaatctggggagcccaaggtgtggaatgctatgttttgaatgtgttgtctccacaattcatgtgttggaaacttaatcccaatgcaacagggttgggaggcggagccttctgggagatgattaggtcacaaggactctggcctcatatttgattgatgccattataaaaagggtttgcgggagcatgttagctctcccttgcccttccatcttctgccatgggaggacagcaagaaggcccttcccagatgctggcacctgatcatggtcttcctggcctccagaattgtaagaagtaaattt

SEQ ID NO: 319533 - DNA, 1180 bp, Homo Sapiens
ccctgtgggagtcaggccccttgagagtcagcacactctcactttcttgccgaagaattgaaaagacccgtgcccatcttcccaatggctctgatcttattcctgatgatctccttacgaactgtagtgcttccttctgcttcatcatcagaaatcagttcgtcatcagagcatatgttgagcacatttacccagcatctctgtgactttttccccaacaaaaggcaaagaccatgtgaaaacatccataaagtttggaagccagtaggggtgtggagaacagttaaactgcctgatattcatgacattgttttcatatttcaacacagcagctttattgttatagacatctaggtaattgggggcagagaaaattgtaataagtgatggaaaacctgtggcttggctcttcctgtacattcgatacccagcatcttgggcttcatgggctctgataattgatagtaaattattgttctgcaaaaattcacaaactgcagggtaactgtagaaataagagcaccctcggacagtgttgtgggtatagtgctccaaggtcttctcattgccataatcctctgagggatcagcccacagcagttcacacactggtccaaaggcgggaggttccgtaaacctgtctaatttcctaatgtcctctaaagaagtaatttcaggtgacattcctccatgtacacagagaaactgctggtttaagagggcagcaagaggaagacagtcgaatgtgtgcatgcaggcatcgtacaccttttctgaatatttgattcgacattcctgtttgaaggtgaagtagtctgtaagatgcctgcattcatgatttcctcgaagcagaaacaatgttttgggatggttaatctttaagctccatagatacagcacacactctatactgaaatagcctctgtccacatagtcacccaggaagaggtagcgagtattactaggtgatcccccaacttcaaacaacttcatcaggtcaaagaattgtccatgaacatcaccacacactgtgatcggagcctccacctctatatggtcttctcctgcttcaggatggcagccccatcattgatgatctttaaggccacctcctcttccacccgaccttcttttactaaatggtttttcaaaagatccattttaggtttcccattctccc

SEQ ID NO: 319534 - DNA, 984 bp, Homo Sapiens
  misc_feature (611)..(611): n is a, c, g, or t
ttcaaggtaggaagcaaaaatctttatttttaaaaaattcacatttattaaaaacagcaatttctagccaaataatataaagcattttaaattatttgaaagtatatacactctttgtataagtgaacacttaaaactgtacagatttaaacaaataatcatttagcaaacaagttgggtcactattacctactcagcactttgtaaggtgtttgagtgtttcagaaataaaagatcaaaagacaagaaccaatgtcattaaatatttttataagaacacactccgctctgtaaatcaaattaaatcagtcacgtacttactggtacaataatcatgccctcatttctttggaaaggctattaaaaatcaaatgtacatataatacacaaacctggatattttacagtttatttcattaaacatgtatttaaaaaacagttaagtaaatacaatcttcctaattcattcatttcatggcaaagaatgaatatgggccctctttaccttcttaccttctcaaaataggagagtaataagctcaatcaagcaacggtccatcaccaatttaaactgagtgaaaaggaagtgacctgttacaaatgacaacaantcagggtatgcaccctgcagaagtgctgcctcagtacgtctaatgagttacaggcacccactgcaccaaaaggtcccctggtcccattccagaacccctgacaatgtccacctctagactagtgtttgaaaaactcagaattctttttgaactaagaagctggctgccttaacatcagcggcaaaaccaatccaatcaggaagtaggaatttgttggaaaattcatagatatgcataatttatgatccctgatatggtgtggtagttttcagatgtggatagtgtttgtcatccttaggtttgctggtaaaatgtattctgctgtagctgggctagagatccacacagctggtccacagcacagcacagccag

SEQ ID NO: 319535 - DNA, 963 bp, Homo Sapiens
  misc_feature (30)..(30): n is a, c, g, or t
  misc_feature (92)..(92): n is a, c, g, or t
  misc_feature (358)..(358): n is a, c, g, or t
cctttaaaagtaaaccttttggttaccccngtgtaccaaaactttaaaccaaagatttttcccatgaagacaagccaaaagtggggttaaanggtggccgcctaaaaactgcctgaaaaccttgggaagtgttttgtgtgcctttccgtatacttcctgtgtatggggctttaaaatgcctcccaaaaatgttttggatagagtttttaaaattccccatgaaaatcctattttataatcatttcaaggtatagaaaaaaagaaatcctaaactggcattgagggacaggcccaaatctcacaaagtaacttaaattctaggaatatataaattacattcatatgttcatttaacacngtatcaagtgctatgtaaggtaactgtaatggattctgaagccaatctcatttaaaacagtacagtaaatcccattctaattctacaattaaagcacttattccaggtaatgtgcgtttcagcaaagctgacatcttgtacaacagtgtcaccttaaagcttcatcaaagattcacagcaggcctgaactgtaaaagttcagaaccaacaatgccacaggtagttattcatcctaatttctcgcagggagtgaagggtctacttgagtgatcctacggtcacctaagcctagaacagtgttccctgaaaactccagcaagtttcctcaccaaaatctcttcagtgtaatgtgtttgggacttgctaggctagaaaaatgggttccactgatgtataaacatacattcgacaccttcaagaggtgtacagacatagtgtttcccagactcacttgacctttccagggaacacctggaataatcactggctcttgggacagtcatttcctagggaacacaattagaggaatgccaagttaaagcagattttctaaagtagtggttcacatattgtagtaagcatcagaaacacagatgccacacccc

SEQ ID NO: 319536 - DNA, 1506 bp, Homo Sapiens
cccatggaaacacttttatttctggaagtcagaagaaaaacaatgtgcacaacctgaatgacacagagcggcagcgctgaaaccacaggggctgccgagagctggcctttcacagcagaccactgttttccagtgagaatggtgggccattccaaaacaaagctaaagggttccaaacatccagaatggaagctgcttcccccaactccattacctatactacaggatggattgctttttgtgagaccccttcttccactgtgcaatttttgcattatttaccctcccccgatcttaaagctatatggcgtccaggagagtgcggctgatgcagcttggccatcactgtgatgcagctggagcagaagggcggcccgttcacttcagccagatccacttgtctcccacctcggtgttgtacccagggctgtacttgcggcccggcagctctctgaactgatgtaagacacggtcagtctgatgagctccaatggtgacttccgggagaaagataggaatgcttgtgtaattcagcacctcaaacttatcctgaaccagtaatcgcaggtggtataaagtgcgattgtcctgcttgagccacggccctttatcgaacttcaggtattcaatgtcctctaccaccttttttgaatcttgagcttcccttgcagaatactgtaaaacctcacatttttcactcatctcagggagaaaggttttcttataggcattctcaatgtcctgtagataggcagaggtgatcttcatttcatgtggatctcctttcttctgaatccgcctctggacctctggaacgggcacatcgatgtaaatcaccaggtgggggggcaggtaatcgcagatggtgacgctcttcacctcgttgtagtggtccacacactgctttcggatgaatccctggttgtacatcgcctccaggaacacaaagtcactgaagatggagcgctccaacacaacaccttgtcctgtggtcagcaagtgctccaaggcatctgagtactgcagcaggcgactgctgtacaaccaggactgcaggcggtaactgttgccatcattgcttctcggatcatcgtaaaatttctccaaactacagttgccattatagtcggtggcgaggggcttcccatctcctgtggtactgtctggataatgaatccccgcttcaggaaagtgcttgaagcctagtttctctgctatttcttttgcaagtttgccttttccagtacatatattgccatctacagttatcactctgctgcgttctgtcagtcttttgcttgctttatccccaagtaggaaatgccacattccatagcgcagtttgcactgcacactgctatgaattcctctcacgcgctgggcgcccgccgccacgacccgggcggacgcggacgtcgctgccagcttcaggagccgcaaggccatggctacccggtcagctcaggatcaaggacccaaggggacgcggtcgcgacggggccctct

SEQ ID NO: 319537 - DNA, 415 bp, Homo Sapiens
  misc_feature (393)..(393): n is a, c, g, or t
gacattgagaatgcctataagaaaacctttctccctgagatgagtgaaaaatgtgaggttttacagtattctgcaagggaagctcaagattcaaaaaaggtggtagaggacattgaatacctgaagttcgataaagggccgtggctcaagcaggacaatcgcactttataccacctgcgattactggttcaggataagtttgaggtgctgaattacacaagcattcctatctttctcccggaagtcaccattgggagctcatcagactgaccgtgtcttacatcagttcagagaggtcccagcagaccagggagcacagatggggtcagcctactcagttctccactggggctccctgtttttcagaatgggtctgtgtgttggagaagattnctaagtgcccggggattagggt

SEQ ID NO: 319538 - DNA, 614 bp, Homo Sapiens
cttgaacaggatttttaactcagacagtgtaaacatcatgacaattctggaatgtctgaagtttgagatagaagattgtctaagaaaagctgagattgtcttagctgtttgtggtatccgaattcctctggaacatgggcatcaggaaccaagcgatgccactgctactgggcagggtttttatattttacctaaacagagacaaatgacgctgacctaccttaatgaaatttcagaaaaaccatctggaatcagccccatcatgtccagattggaaggtatctggggatcaatgaaacataccagaaactacttttcttcccccaaaccaatgtaatgaatgtcaaagtattgatgctaatttagattgtgattacatattaagttttgcttcattaattgtagcactggcagctgttttgtgaacgctgcatattaaactgtaggcagctgacaacaaatatcagcggaaggggatatttaaaagccagttaaattaatcaatgttttttaggaaactgagccaagattaaccccctggtgcttttacccacagaccctcgccaaagtctcccacaagggaacatttgtaggctattttgttttgagatgtt

SEQ ID NO: 319539 - DNA, 603 bp, Homo Sapiens
  misc_feature (564)..(564): n is a, c, g, or t
  misc_feature (581)..(581): n is a, c, g, or t
ggtgaaggtactttgttctggaagatgttgtcatacacttttccccagttattttcaaacttgacatgagcctatgttgactcactgggtgggggtcccttcttacgcagcacacgtggcaagtgcctgaatcggggctggaggcacttcagagcctctgaggggccaccacttctggcccaaaattgcagggttgtagatgaggctgcctgtggagaactggtgtgaggaggaagctgtttccaacaaagagcactttcatctgttgagatggctgtggtgagcaactgaacgagcctaccgtgtgtacctgaattttccccgtaactcatttcttccatatgaagaaacaccaaactatgtacagagaactttttacaaaaggcagaccttttttaagctgtgtaacccacatagcctaaccacctggcagaatgactacgaataggggtcattgtgctggtaaaagcctctattacgactgtaagtaagttggatgttggcaaaattaaattgttacagtatttagagctgctgtagctgttccttcacaacataaaatangataaatgactagtacntctttcaggtgggtggcaagca

SEQ ID NO: 319540 - DNA, 1011 bp, Homo Sapiens
ggccacactggctcgtcgtgtcgtgcgtttttcttgtgtcgttgttgcgtgtttttgtttctctgtcgtcgtgtttcccttgtctcttttattctcgtcctcccctttttggccttcgacttcgtggggtggtgtgcgcttgtcccggctctgcccccgttggttctaccttctttatcgtgtagacctggtggtactcgtgcttcgtgttccgtttaactttctggatgtccccccccatgcatgccgcttcatccggccatggccatgagcaatgtgcaccggatccgcgtgtgtcaaatcaggctcattttctggagaaattttgtcataagcatctttcataaatgtaatttcttcttattggtgacagttaattccagtccagaaatggaccatctcccttgaacgttcttgcttatcttgcataaatcaacctctgaaagatcttgtactcgttcctcaaatggaaccacaaaaggcaactctgtcaggaacagcaagctgtctttcctcagacacagacagcggcggggactccaaacccacgtccagggtggactgcagcgggcctatcctccccatccgccggaacctccacacatgtctggatgctggcacatagagctgagtgaccttatctgctttaatatcttcttgttctgacagccagtggtttggaggactaaaatttctcctcgtgtctctggacttcaacattttcactagattggtgataaccttaaataactgaatccatcttttctgttccatctgtatgcattgttgcatttcagagctagtagtgactccatactctgaatgctgtaatatattcttctcgaacttctggcttggtttctggataagccacttgatgatccccaggcatgcatctcgagaggcatcgagacaacagctatcagctcttctaaagttaaggcatcattgatgattgtctgtgacctacacttcaatgcgacgcgtggttgacgttcccaattccgggcc

SEQ ID NO: 319541 - DNA, 1710 bp, Homo Sapiens
  misc_feature (1299)..(1309): n is a, c, g, or t
gatgctctgggatcccgcgcttccgagactcgcagtctacgcgagctgcctgtttttttcctgcttggacgcgcatgagggccccgtccatggaccgcgcggccgtggcgagggtgggcgcggtagcgagcgccagcgtgtgcgccctggtggcgggggtggtgctggctcagtacatattcaccttgaagaggaagacggggcggaagaccaagatcatcgagatgatgccagaattccagaaaagttcagttcgaatcaagaaccctacaagagtagaagaaattatctgtggtcttatcaaaggaggagctgccaaacttcagataataacggactttgatatgacactcagtagattttcatataaagggaaaagatgcccaacatgtcataatatcattgacaactgtaagctggttacagatgaatgtagaaaaaagttattgcaactaaaggaaaaatattacgctattgaagttgatcctgttcttactgtagaagagaagtacccttatatggtggaatggtatactaaatcacatggtttgcttgttcagcaagctttaccaaaagctaaacttaaagaaattgtggcagaatctgacgttatgctcaaagaaggatatgagaatttctttgataagctccaacaacatagcatccccgtgttcatattttcggctggaatcggcgatgtactagaggaagttattcgtcaagctggtgtttatcatcccaatgtcaaagttgtgtccaattttatggattttgatgaaactggggtgctcaaaggatttaaaggagaactaattcatgtatttaacaaacatgatggtgccttgaggaatacagaatatttcaatcaactaaaagacaatagtaacataattcttctgggagactcccaaggagacttaagaatggcagatggagtggccaatgttgagcacattctgaaaattggatatctaaatgatagagtggatgagcttttagaaaagtacatggactcttatgatattgttttagtacaagatgaatcattagaagtagccaactctattttacagaagattctataaacaagcattctccaagaagacctctctcctgtgggtgcaattgaactgttcatccgttcatcttgctgagagacttatttataatatatccttactctcgaagtgttccctttgtataactgaagtattttcagatatggtgaatgcattgactggaagctccttttctccacctctctcaacacactcctcaccgtatcttttaacccatttnnnnnnnnnnntcttaaagccaaaattagaaaaataactccctacttttccaaagtgaattttgtagtttaatgttatcatgcagcttttgaggagtcttttacactgggaaagtttgtagaaattttaaaataagttttatgaaatggtgaaataatatgcatgattttaagtattgccatttttgtaatttgggttattatgctgatggtatcaccatctcttgaaattgtgttaggtttggttattttgtctggggaaaacaatatttactggaaaagactagcagttaagtgttggaaaaacctggtggtcgtttaccaatgtttgcctaatccattacaaaacatctatattgaaagcactgataataactctgcaattgcaaacccttctaaacaacaaaacaaca

SEQ ID NO: 319542 - DNA, 397 bp, Homo Sapiens
ggtgtttctctcttttatttaaaaacagtgcttcattaccatgtgcaaaggctgaggcagtgctcctccttcgcttagagtttataaaagccagcaacatgatcaataatttatacacatggagagtaatacaaaaaaataaggaataaaagctaaagatctaactactccgaccttcacaattccagctacttgataataataggagtaacccaatgaatactgtatggtctgaaagctactatacaatatgattcttaacgagaagggaagggaattagagactgtcacaaagccctgggatgcttctctggagttagcagggaaacaggaccctgggcaagcagctcgggtgtcctaggaagtgattctgggggaggacgggaggggagagaga

SEQ ID NO: 319543 - DNA, 751 bp, Homo Sapiens
caaggagaaaacgcaggccgagggaccagccttccaaatgggcttcaagctccaatgacctccgctcgccccctcgaaatgtctggaaaacataatgggcagattttctgtcttcaaagtttccggctaaacctcttcaagttctttattgtttgggactgagacactcagccatgttaatgggtagtttcttttgtatttgccttgaaaggccaaaatatttttatattgccacagacaaagccacctatttaaaaatgaactccatgtccgtcgtttcccaccaggagactatgtaccatgtgtgtgtctctatgtattctggggtcttgaaacaggtttctcatggggatggtcattcaccacggtccagaggggcagaacaggcggcgcttgccttgcccagggggcctggggaacgtgggccctcatctcagatctgcccccagtatgtttaggacgcgagccccagaaggatctgggagtaaacttaacattcactgtgtctctgctctgcatccgccatttgtgtgtgtttctggactgtgggctgtgtgtaccttggttggtgactcagtgagaagaagcaggaatgccaaagatactgtgaatgttctgagttttgttgctgttgttgttgagaggttgtttcactggtatctattgcattgtataataaatgaccagatgaatgaatgagtgaagcaagagagaatgaataaacaagtaaataggtaaagaagtaagcggc

SEQ ID NO: 319544 - DNA, 924 bp, Homo Sapiens
  misc_feature (880)..(881): n is a, c, g, or t
ggatattgcatttttattgcaattacaaaaagactgcttccaatttaatcagcatataatctgataccaactacattttactacaagcaacttcttgtgttgagacattctgaatggatatatggagccttgctaagtgtaatatttagaagagaagagcgcttaggtaaactgaggcaaagctgctatcccctcattcaagcacatgatgacagtcttactggtagcacctgctgtccttttagctcattctcggttgacattaggagcaattctaattcctttattcgcttttccttctcagggtcttcatcattatagtgtctctgaatggctgcggcactggctgagggacattgactatatttacatgtaacgctacagggtatggaacatgactggagacattttgtgcttcagaaatgtggtaataggaatagtcgttgttaacagtgggctggccagtggcagggagttgagctgtaggcggagcctgagcaaaacccatccaatgactgttcttctggaagcttgtggccactgctggctggctggcttttgaagactcctgcagataaccttcctgttcgaccttccgacggcattgtagaattccagtggttcttgatagcattatcagttcgtccaggcagtagctttgcgatttctgcccatctgttccccagtctcttgtgtgcctggtaaataattctgtcttcctcttctgtccaggaggttttcttaacttctggattcaagtggttatgccacctctccctacattgttttccaattctcccctttaagtgcttggcaataacagaccaacgtttcggaccgtatttctgtacaagctctatcactctctgatcttcttctnntgtccaaggacccttgatgagctcagggtttagtactttctgc

SEQ ID NO: 319545 - DNA, 681 bp, Homo Sapiens
tcaacatgaggcccacggacttgcccccaccaggtttttttgaaagacaactataagtggtgtctctttggcatagcagccaaatattctgaagtgaaattgtggatactttatctacttcaggtagtgtctcatttaatatatgagcagggatgttggcactgtcatcatgaataattgttgaatcacccatcacttgatgttatgactgtctatagggaaaaaggggaatttcccatcttataaaatgacaaaatttgtaattaaatgggaaactgtagtgttcctcataacaaagcctaagcctgtctttcaaatctgatacctctttctctaaataacctgttttccaaccactctggccctcttacttgtcctagaatctgtggtgccctgttatgttttcatatcttttttcattttatttcatcattctgcagagcccttcctcaaaaaagcttctattcatcctgtgagatgaatagacccagctaaaatatcacttgttctatggagtctttctcagactgaataattttattttctcccagaatgttacaaccagagtaatctttgtaaactacagatttgatcatgcctcaataaaaaagttttaatggtaattaacatttcatatcaaactcagtgtatcagcctagtggtctctgtcttcatttgccc

SEQ ID NO: 319546 - DNA, 658 bp, Homo Sapiens
  misc_feature (489)..(525): n is a, c, g, or t
  misc_feature (611)..(611): n is a, c, g, or t
tttgaaaccattttgtcacatctgttggagagataatcactccttttccttaacattctgccagctttctgatgttgaagtgtttcagttgactacctgatgcaaaagctataaaataaacagtgggaaggggaaaaattggtgtcctgttttaatattttcttttgtagccttgacactgatggacattttccaagctgactcagtgttcagtgtcaacttaactctcagatagtgttgccatcaagaaagcatgcaacatcattggtttctaattgattttatggcttgtgacaatattttatctggactgacatgcctctgctgcttttgctttgtacttcattgctggtaataaaatttcagatggaaaacttacaaaatatatacttaattagaagaaaaaaatagagaaagggctattagaattaaaaaaatttgaaagtaacttaatctaacatttatggcacagtttggacatatccatannnnnnnnnnnnnnnnnnnnnnnnnnnnnnnnnnnnncccccttaaagaagaaagtctcaattccattgattttcaattcttagccactggctcattgctttgagcaatgcttgattgattcnatttatattatatgatattgggttgataaaataccagtttcaatgat

SEQ ID NO: 319547 - DNA, 929 bp, Homo Sapiens
  misc_feature (57)..(66): n is a, c, g, or t
  misc_feature (723)..(723): n is a, c, g, or t
  misc_feature (809)..(809): n is a, c, g, or t
  misc_feature (863)..(864): n is a, c, g, or t
gtcattaatgcttgatataaatttactcaacattaaattatcttaaattattaattnnnnnnnnnnctttctaaggaaaaataaacaaatgtagaccgtgattatcaaaggattattaaagaatctttaccaaaaatttcaaccctacaacctaaaaacgcaaatttctatttttaaacatcagaaaataactcttggttcattacttatgacccaaagtttttatttcactattcaatatctgaaaagtatcatttattttcccttaactgccccctctggtggtgattctaagtatctcagccaaaaaaacacaactttttacaacaaacactaagtttctccatatgactctcagttacgaaaatatttaaagatatgcattagaaataaccttaaaaattactcttataaccaggacaaattaatttttatgaccagcagcactcgaagcttaaaaagtttaatttttggtggacatgtctatatttgatatatgacaatacagaatatgaattactcagcttaaccatatgtacaataaaatacattcacgtggcataatctctaagataacaattactgaaagctgaagcttacttgattggccatgtggcaagcgacaggcacaaaacaattttccaagtcaataggaaaaacctcagagctgaaatctttatatgctgtactacacagctgtattctgggcacttatgaatgttnaggaaacctgtcttaaaagttaactaggttaaaaaacctcaaacgagagaaagtgatatccaggaccaactgctacaaacgcatantgcaaactaaaaagtcacacgtaattttcaatcaattatttcttgttcctagcnngcagcattaattgctgctctcatcccagttctacggagctctccctccattcgcatgctcccaac

SEQ ID NO: 319548 - DNA, 766 bp, Homo Sapiens
  misc_feature (28)..(28): n is a, c, g, or t
  misc_feature (57)..(57): n is a, c, g, or t
aaaatgaccccagttccaggaggagaanccctcaccctcatcctcctcccataggcntaggtgtggagaggagatagaaggaagtttttttaaaaagtaattagaggtatagaattgtaggcttcttaaactcttgagtctctgtcattgtgtcaaggaaaccatgaaacgcgtgacaaatgtgtcatatcttatgggaagttaattttacttgaagtggttgaggtaggtggtaccttgtttttatgaaaaacgcaggtccatttcaaaatagaaatataaaacataaattgtttaggggaaaaaagagactttaaagaaatatttcaaccttgccttctagacttctctataaatatttttctctgccataagaggtactttgctgggaaagcttacatcattcctgtgtaatagaaagactataaatgttagggtcagataggagttatgatttcagctccctgacctgctggctctgcaacctttacaaatttacttaactacactgaacttctcttcatctataaaataccttttttttctagtcgtgatccctgtggcccttgtggacccatgcacatctgctcaggaaacgtggaattgttgtgaggatatgatggggttccagggtttcctcctgggagctggcactttgaagccggtgggacttagcctgcttttctgtctttaaaaggctgtatgtcaagtcatcactatccatctttttctagctgttgctttttcatctctttcttgtttgggc

SEQ ID NO: 319549 - DNA, 768 bp, Homo Sapiens
catttatttatccatatccacagagaacagacttccgtatctatgccagtagtaaacccaccagcaagatcaatattaaataaaagaaaggatacttatatcaatctcccaacaagacttaagaaaaacactattttccatactcaattactcttgaagcctttttaactcctactctggaactggtatcaaagtacaattctatcaatgacctaggtaggaatctattataatgaggtagcatttaacttacacaaattgaactatactttcaacaaatttcctcttcaataaaagcaggaatagagaattatactcatcattctattcaatgtacttatgcttcagaatgcatataaaatgagataaatgaatctgctcctccctcagtcagcctgagcaaagccatgcatctcttcattgtataagcatctcactggaccaagtgacactctggcgtctaaagatacagtatgtgactttttgtacatcatgggtcgagtgcaagccactggaacactacttagtcttgtgctgaagcaaaggaaaaactacctattccagtgctgaaagaaaactaggttctgctggacctactgaaaaatccaagctatgggtgataaagtggtattaagggtaattttttaactacatgatttctgccctatactgtagaccctaacccccatatatatgataaaattctacaatttatatctgtcaatcagctaacatcatttaccatatcttcaaacggtatttaacttc

SEQ ID NO: 319550 - DNA, 686 bp, Homo Sapiens
tactgctgagcttcatgtttattctgtgcgtcggggaaaggagaaagcaatgggacagagaagggaaaagttgcgactgggtgacgaattcattaggtgcatttgaaagtaaatgcaatggaaaaaagtaacaaatgctaaagttttctaaaagtttaatgaagccaataaggcatataaattgtgttctggcagacattaagacctgctttctcttaccaaagaaaatggcacgttttatcaaaatttgacaattcagagtaaagggtactgagattaagcttcagagcaccaacttaaacaaaacaaccaaaaaattgttatccaacgtggaaagaggagcaagaaccaaggcataaaggggaattaaatatgtgttcctccatctcaaaatccttttaggaataggagttctggccacttgtgagcaacacattgcaccaccaaaccccaattccagaatctaaatttacgatagaaaaacaaaggtaactccaaacgcatgtcttgtatattccaaagggaagcttgaaagtattcataatacataggcttgtctgtttcaggtaaaatgacagattgctataattcttcctgctattatagtcaaacaaaaaatgacccactttcgcaaaagtttagaaatctctcactttcattcctagttttagtatggaattcacttt

SEQ ID NO: 319551 - DNA, 853 bp, Homo Sapiens
  misc_feature (399)..(399): n is a, c, g, or t
  misc_feature (439)..(439): n is a, c, g, or t
  misc_feature (731)..(731): n is a, c, g, or t
ggtggaatggggtaagagcaaaccttttctccttttacctaattttgtttcatccataggattttcagtggaaagaagggactgaaagacataagaaattaatttctgcatttccatggacaatctgttgagctcaagccatcttctaaaacatggaaatgtcatctttgtggcatatattaagtggcagtttattttctttccctgccagtatacttcgttgggtcggggagaacaaagaatggttttgaaaccagagctttcagttcccttcatggtttccagaggtgagaagcctctgtgggtagtagatttgggatggaacacacacaacccttctaatgaccctaagttgttaactaactgcctttgaatggttgtcttgaaatacctggtgtntatactgcagaaaaggaatgcagctgttttccacagtgtntgtccccaacttctgtttgtactcagaatcgttgaacatatgaagattttggtcccataatccttaaactatagcctgaggtgcacctgattacatagagtttggatggagcaaaagaaaaatccaatagcattttgcagagtaatgtatataattatgggctcacttcctactggagatgttgaaagtctaaatcggtttgaccattttgattgatggcacaatctggtttagaaaactttgtttagatcaatgacataaccctgctgcctctgcctgcccttcccctccnttctcccatccccttttccctatctggtgtctgtactttgatgaaggtgagctataatattggtggttaacataatccagaaggcttagttctgtgtgtgttctgtccctatataaactggt

SEQ ID NO: 319552 - DNA, 2132 bp, Homo Sapiens
  misc_feature (1160)..(1192): n is a, c, g, or t
  misc_feature (1965)..(1965): n is a, c, g, or t
aaattctataaatcaattattccccttcggtcttcaaaaatatatttcctcataaacatttgagttttgttgaaaagatggagtttacaaagataccattcttgagtcatggatttctctgctcacagaagggtgtggcatttggaaacgggaataaacaaaattgctgcaccaatgcactgagtgaaggaagagagacagaggatcaagggctttagacagcactccttcaatatgcaatcacagagaaagatgcgcctgatccaagttaatatctctaaggtgagagccttcttagagtcagtttgttgcaaatttcacctactctgttcttttccatccatccccctgagtcagttggttgaagggagttattttttcaagtggaattcaaacaaagctcaaaccagaactgtaaatagtgattgcaggaatttttttctaaactgctttgccctttcctctcactgccttttatagccaatataaatgtctctttgcacaccttttgttgtggttttatattgtaacaccatttttctttgaaactattgtatttaaagtaaggtttcatattatgtcagcaagtaattaacttatgtttaaaaggtggccatatcatgtaccaaaagttgctgaagtttctcttctagctggtaaagtaggagtttgcatgacttcacactttttttgcgtagtttcttctgttgtatgatggcgtgagtgtgtgtcttgggtaccgctgtgtactactgtgtgcctagattccatgcactctcgttgtgtttgaagtaaatattggagaccggagggtaacaggttggcctgttgattacagctagtaatcgctgtgtcttgttccgccccctccctgacaccccagcttcccaggatgtggaaagcctggatctcagctccttgccccatatcgcttctgtaatttgtacctaaagagtgtgattatcctaattcaagagtcactaaaactcatcacattatcattgcatatcagcaaagggtaaagtcctagcaccaattgcttcacataccagcatgttccatttccaatttagaattagccacataataaaatcttagaatcttccttgagaaagagctgcctgagatgtagttttgttatatggttccccaccgaccannnnnnnnnnnnnnnnnnnnnnnnnnnnnnnnngactgcactgtgagttttgtagtgtcctcttcttgccaaaacaaacgcgagatgaactggacttatgtagacaaatcgtgatgccagtgtatccttcctttcttcagttccagcaataatgaatggtcaacttttttaaaatctagatctctctcattcatttcaatgtatttttactttaagatgaaccaaaattattagacttatttaagatgtacaggcatcagaaaaaagaagcacataatgcttttggtgcgatggcactcactgtgaacatgtgtaaccacatattaatatgcaatattgtttccaatactttctaatacagttttttataatgttgtgtgtggtgattgttcaggtcgaatctgttgtatccagtacagctttaggtcttcagctgcccttctggcgagtacatgcacaggattgtaaatgagaaatgcagtcatatttccagtctgcctctatgatgatgttaaattattgctgtttagctgtgaacaagggatgtaccactggaggaatagagtatccttttgtacacattttgaaatgcttcttctgtagtgatagaacaaataaatgcaacgaatactctgtctgccctatcccgtgaagtccacactggcgtaagagaaggcccagcagagcaggaatctgcctagactttctcccaatgagatcccaatatgagagggagaagagatgggcctcaggacagctgcaataccacttgggaacacatgtggtgtcttgatgtggccagcgcnagcagttcagcacaacgtacctcccatctacaacagtgctggacgtgggaattctaagtcccagtcttgagggtgggtggagatggagggcaacaagagatacatttccagttctccactgcagcatgcttcagtcattctgtgagtggcgggccaggctcacaatt

SEQ ID NO: 319553 - DNA, 414 bp, Homo Sapiens
  misc_feature (379)..(379): n is a, c, g, or t
aacctccaagacattttattttgacagaaaaggtgtgacacatccatcagaaatgggatcagaaatttttggtctcccagtccccagtcctgatttttaattcccaatttcaaaattctatactaacatccaaactataacttgacttttaaatttaccccactcctcgggaagagaagtgcaatgcaggcaggcagctgtttccagggggatcagaaaagggtaaatgaatactcaaggtttacagcgtcaaaagggtatgttgaggataattcttatgactatgtaaaagacaaggtagtgaaattgtgagggccctggcggcacaactccacagaatgactgaagcatgctgcagtggagaactggaaatgtatcncttgttgccctccatctccacccaccctcaagact

SEQ ID NO: 319554 - DNA, 1154 bp, Homo Sapiens
  misc_feature (131)..(131): n is a, c, g, or t
  misc_feature (1029)..(1029): n is a, c, g, or t
  misc_feature (1033)..(1033): n is a, c, g, or t
cttcagagtttttaattattattattattttaataacaacctgaatcccagaacttccagatactgtccacactccctcccctgggcagaggagaggaggcacctcaagggaacaagatgggggtggggtntctgccggggagcctccgactcccccaagccgtctactgctggggggtcccaggagggagggtgggggttggttccctcccagagggggttccctctgacgccccgtcctgaagccctccctcctccatcaagggtggggatgatgaggagatggggcaggggccgggggaccaggcctttactgagccttgaactcccaccccggggacacggggaccattaaagctgcataggaagagggggcaggcggctgacgcaaggccgggcagccccaaaggcacattgtaagggaagggaggctcagacggagggcccattgggcgcagggggcccaagccgtgggacccccgaggagggcagctgagccagctgctccgggctggccagggcgcgcagcagcccattctcctgctccagcgcagcgttccgctccgccaattcccggatttgctccttcagcacctccacctcctcccggaccgcaaacatgaggtgggacttcaccaagtccatggcttgctcgattttgttgtcaatgccaaccaggcttccggagccactatcatcgtcgctgtctaggtgaccactgatggccaacatggagtgggccaggctgaacttctgagctgctactgctccgaaggggtctggagatttgtgaaccaggctggcatcgtgggtgaagtagagggccggggagctggggcgagagtcaagtgggggcacctgccccatctcttctggagcacccaactccatccgcagccgcatgtctacagctttcctccgggacagtggaggggtcctggcccctgagcccccagcctccgcttccaccctcagagagggcaggggcgtggcagcccgggatgtgcccgcactctcaccggtctcaancaanttgggcgctgctggtgtgaggaggccgacagtgggggtttctctgccttggctttgctgggcaccaccagctggcccagtcccccagtgaaggagcgggcctgaggtccaggagaggtgcc

SEQ ID NO: 319555 - DNA, 1079 bp, Homo Sapiens
tgcgtgagccaccgcgccaagcctaattcctacttttctaagaatgtttacagcaaagtggtcattgccaaaggaacttgtagcagtacagaagatgggctcagaaatgaaagaagtctattgatgtgactaatttctcaaccatttaatagaattatggattttctattaaaaataacttgacccttttcgatgcatttaataaaatgccaagttcattatttgttaattttttaaaaccacaaaattcaatatgtcttgtgtcagcatattttttcaaaggccactattttacttctcccccaaaacgtttttaaattaaacagagaactctcaaagcacctgagaattacttcagtttttcatttattcaaatagttgcttaaagtgaccaacttggttttcttttgaatagtaatttcttgggaataagaataccttaaataatataataaagcttatgtgtgagaatttagtaccaaatgccgtgttaacagttatgcgtgagtataggcatttgggagattccatgaaaaaatttgataaagtcagtagaaatttcagtaatggctcataagtctagctaatgctgaatattgaattgccttgaatttgtttttttggaagtgttacttaaaggaaataaacaaaagtcatttaaggatgtgttcactagtgtttattaggtttaagccaaatggatcttagtagagatcttacgccattcagcaaaaggattatcacagaagcatcacaacaggcgcagacttaaattcaattaaaagtaggcaggaggacataattttgttgtatagaaattatggaatagggcctaattttaaagagtcttcaaagataaacatatcaggaaaaatatagctcataaaatatggggaaaaaaatctgggaagatgagtatttgttaatgctctgtagctccattgccctcagtatacaaggaatgtgcccacaatagggttggatttaaaagtcttcaaagctttggtctctttttctttcgttttcctctgatacagaatgcgaatagtctcccggcctccaaccccctctacatcccc

SEQ ID NO: 319556 - DNA, 723 bp, Homo Sapiens
atgcaaaaggagctgggagagagcatgaggatgtttgaggttccagagctggaaggctctgaaaagtaggattttgtacctaagaccctggttaaagtgcagtgatggtctggagagagacaggatgccccctctcccctccttagcacctggtcttgcccttccagtctctgctctcatgggcacagagtatagcctaagagcatagtccttcatgttccgggaggttacaggtgccacagttgactggggaaggggatgggggcaccctaaggctctgataccccagaagggactagtccttatgaagtgtcaccaaatacacagcagacacagaagaggtgggaggcggtaggtctaacaggaagggctcaataaccagaatagttcaggaaaagcccagatattaatcctcagctctgctgacattctaaaaaggagcatagcaccccagggtgccgttgaggattcttcctttctctagagactactctgctctgagctaacctccccattttctgcccttggcagcatctatttattgctacattgtcaaggaggaacaattgccccacaatgcttctccctgccaatctggttctcttggggaaacctcagagtgggggagaaaaaggaggacaaagaggagaaagttttttagggtctcccttcccataagaaggcaaggtagactcctctcagagcccttaaggccctaatccc

SEQ ID NO: 319557 - DNA, 452 bp, Homo Sapiens
aaatttttaagtttacatattaaaatcataaaaagtaaattttatggtttgtgaattacatctcaataaagctatttaaaaatttgaaaaaaagaaactccctgggactgggaaccagcaaatggcaaacatgactgtagtcctagagcaggggtatcaacagtttggtgaaacagcagctttttcacaggagcctttcactcctgtgtcaatgaatgctcacatgatgctgccccacagagcagcagtcttccccaggccaggcgagggggcccagcatcaacgttctttctccatccctggcacaaactggacgtgagtgcaccagcctggctttgggggcagcagccacgttcacagcctggctctgccactgtggctagtgagcactaggtgtgaagatacccacctcacaggctgcaagggcattttgctgtacacaggaaattcag

SEQ ID NO: 319558 - DNA, 997 bp, Homo Sapiens
  misc_feature (367)..(384): n is a, c, g, or t
  misc_feature (938)..(938): n is a, c, g, or t
ataggttcttttaggtttttattatgatctcttgtttttatacctgaataacaattttccccaaaggaatgatgatatgtaatctttattctaaaaaggacacatagtgtattgatagcatctggtcagtggttatcactgactatcttcaataacaattactcatctaagaaactcttccttttttctttaaaatcgttggtgctgatccagacaagccctgggctgctgctcctcatcctgataggatctagcttctagactgacccctctcaagaacaaaatacagggagggacttgttctggattccctttgggcaaatgcagctgcaatactcagcaggcttggcctcaaacttccagggcnnnnnnnnnnnnnnnnnnaaatgtatactattaaagttggattattaatctaatatttgtgtttgccttggggactaataaacctcacaacctgaggatcacctcagttaaaccaaggctttgtcatcacagagctactcagcagaggtctgtctcagctgttccttgaactaaggaaggagtcagtcagctaggagagaaaagtccttttgaaagcagacagcatcatgtaccttgctgactcagctacatacataaggcctcaagccttgctgccagttcttaaaaggaactgtgttctcttttcacttttccctggcttatggggcagtagagggtttccgacctcaaatgccaataccaggtaggtagaaggaccttaggctcaactgctggctcctcgtaataacacacactgtattctgtggtgggtgccactctgctctgcctgtgtcatgtcacctttcctaatccagcacatcctcgcccaagaaaaccctattttggggtcattcattctattcttatttctctcttatttgttctgatgtttcagttggacttgattccancgcaggctctggctccagaggaagagatgggggctttgtgaactgggatgttcctccag

SEQ ID NO: 319559 - DNA, 645 bp, Homo Sapiens
  misc_feature (570)..(570): n is a, c, g, or t
  misc_feature (618)..(618): n is a, c, g, or t
ttttttgtttgagatctttgtattttgttaacaaacactgagatccatcgaagctgtgtgggtcctggcagaggtcagcaaaggggtccttggggcctgcatcagctcagaagcccagacccctccctgacaatccttgcctcatcgctcctgtggctaagatacttcttcagccctttaacaggattactggtgtatgtgagacagccactagcagcccctgccctaccggcctctcccccaacccttctccacatacatcacccccgccaccaagcaggcagcactggggcttgattccacccctcccagaggatatggagaaagccccacatctggagagggacagggcaactgcatttctggcaaatgtgggtggcatgaggctgccagtggctttacagttcaggatctccaggtgcgtagctgggccccatagcctcctgtcctccagtgaaaagatgagaagactctgctccctgggagtcctggagatcctggtgactaggtaccccaggcttctgctggtctccactggggtaaaaaagcggcctggcctgccctggcccnactcacatatgttctggatgattctgcaggcagtggatgaattcaccnactggctggccctcgtagcacaccttg

SEQ ID NO: 319560 - DNA, 2458 bp, Homo Sapiens
ttttaaggttgggagatatttattttctttaaacaaggtcataaataacaaaaaacaaagtaggtcccagactccggaccatgcagcaggacaggggtgggaggttgttgagtggaaaggtggagggggctacacatcacctaagacagtcacagaaaagatgggcttcaggacactgccccttcctgcccttggaaatggcgtgcctgggcaatagggacaggccacagtgctgtgtcgaggcagctggaagaaggcaaagactggggatgccaggctgtaatgtttctgtgtggagtgatgtgaaatccacaaatggcaaagagaagctgtaggtttgaagaggcaagggggcactgcacacctccaggaaccagttatgaaaatggttaaatttgatgattaaaaacaattccataggctttggcctgtggctttgtgcatgggctgtatttaacctgggttgctctgtggcaggtgagggcgcaggaggcccctggagcagcctggcctcagcccagggcaggtgcccagacatgtgggagtgggacagtgggctctcccagatgggaggccatgtgcttggaccggctggacctgattttcaggctcgtttcttgtgatgctatccaccaccaccgctcgctatggctaaggatgggatcttggcctctctgggtcttccaaacctggaagagtacgactgggataaaacggtacctgactagtgttttatttgaaagggaaaaataaagaccaccccatgcattgtccatcccatgaggccagggctgggccatgccaagacaatctcaaggaatggaggtccctgagcctgggaagacatttgaactcagatgtatcgcctgatgctaggaagaggggctcagtatggcaaatctggaggctttaccctaggcaacgcagggagagcaggcaggagctaccccagtacagggaagggaaaggagcaggggagccctggactggggaagccgatgttggtcaagggccctggaaaacaatgcttttggcagaatacatgaaaaggttggtacatctcggggtgcccgtctaccgggagccagtgtcacatggctgggcgggatggagaggagacagtggcatcacagtggcctctggtgcgacgtatttacaacagagctcgatgttgaggaggggtggacagcaggtcactaacagccaggaaacacacactggaatccaccgatgggttctgcaaacctgtgccggatcaggaaagtggcaacagcttcagctaccttgtcaggggcatcctcatggactgcatggccacactggggtaggacctgcatctggaacttcccttgcatctggccaatggtcagatctttatccaatctatcaacaccagccaagagcagcaatttaggaatgggacaactaagaaagagattggataagcctcggaaccagccgtcccagtatttttctgtttttgccagttcaattctccaggtgtatggatggtctttcttggtctccatgtcatcttcctttttcctcttgcttatagactcacttccttcctcatcttcttcttcttcctctatgattccttccactatagattttgagccttctggacttgtaattccttcacactgtttgacttggccaaccattgagacacgggcagactccagatttcgaatctggccactcttcacactccattcaatagcattctccagagacttgaaggttttaggacgaccccgtaagaaattctgcatgctattaagtgcatccatagctgtaccttctacaacatcaatcatgcacagacccaagaggcttggtaccaggttggatgatgctgtgtggactgcaatagcaccacccatgctatgtccaatcagcataattggaggaggaaggtccccatacatggcttcaaccacattgccaacgtcttttgccattgtttctgcagacagatcttcaggattcttgacctttgtttcaccatgacttcgcagatccaaagctacaatcctacactgaactctactaataatcgctgccgtgaacacagcccaagaaagggcagaatgacctcctccatgcagaaggagcaggactggaccctctgaaccactcttgtagactcgaaaagtatccttgccagtttcattctctacttctacatcttccatggactcaaaatactgactccaaggaacaggggaaaagtcccgctttcttccagggcccattcgcatcttggctccgctctgactgcccccgctgccgggtagaggtgggcgagagggaaggcggccgaggtgcatgctcttttcgagggccgacatcgaggggaggctgcacgcacgtagtcaaacagtaggcgaagcttcgtcccacgttgagtgtggcccaaccggtatcccgggaatccggaccggtccagcca

SEQ ID NO: 319561 - DNA, 1372 bp, Homo Sapiens
  misc_feature (32)..(32): n is a, c, g, or t
acatgtttttttgttgtgcgtcgtctgggggnattacacagcgagggtttttagattccgagaccagggtgaaaaatctgctctgatccaacaaagcacccccactgtgcttggcagccgatcagccactgtgggacgatgacccaagagtcccggacctcaccctgatgcccccatctggagactctcgggacacagcaggtgtggcgtctgggatgtactttattggacaagtggtggcccaagtcttggtctggaagcactggggccctggacccaggcactgagtttgaggaggcccagagttcagggctgtttggagcgaggccacaagcggctggtgagggagccaaggaagaggttctgcttgttggacttggagagctcggccaggcgctgctgctcctcctgctctagccggctttgccgctgtttgaaagccgccagcgggtcatcctccagggcatagtgctccagcacggttcgcacgtcctccacaccattcagtgcaatggtcttgaggaaggcagacagatccaacaagacccggtcatcagagttgccgtcccagggccgcagggcaacgccgttatagggctgcaggcggaaggcttccttcttgcagtccacaactactactcgagctgggtcccgattcagacatgaaatatcctttacatggtgtccatccatgtatcttgtggcgtcccggaataggcggtaggagatgaagccatgggggtccacactatcaatgagtggaaacgcagtcatgccagtctctgacgtaaagatgacaatttcatataaaggggcaagctgctggaacaaggtctcgatgcctgggcgcttcttaaacctccagccagtggccagcgaccactcaggatgcaagaggacgccggtgagctccaaaacgagcgtgtagggtggctggtagtacggttcctgcagagggtctgggagaaggcaagggctggtgggctcgatgatcatctgtctataatctttgaaatatttgtatgtccggcgcaactgctgtaccagaattggatcattgtcgaactcatcaggaatcttggcaccattttcgtccaccgggttgtttccaaagatatagacgacgctcacagtcccaccagctccaagcagcccagcaagccagagcgcaacttttttggcatagctgggaccctctgagcccggctgctgctgtggcccttgcgccttagtgctcccgcggctcccgatctctgcggcctgatctggggcccggcggggcggcgtcgccaacctcgtgcacagtcgccgcgagccgagccggagcccgcttcgcaagcgcgagaacaccgctgccgaggccgccatcttt

SEQ ID NO: 319562 - DNA, 383 bp, Homo Sapiens
  misc_feature (77)..(77): n is a, c, g, or t
aggaagccaaggaagaggttctgcttgttggacttggagagctcggcccagggctgctgctcctcctgctctaagcngctttgccgctgtttgaaagcgccagcgggtcatcctcccagggcatagtgctccagcacggttcgcacgtcctccacaccattcagtgcaatggtcttgaggaaggcagacagatccaacaagacccggtcatcagagttgccgtcccagggccgcaggcaacgccgttatagggctgcaggcggaaggcttccttcttccagtccacaactactactcgagctgggtcccgattcagacatgaaatatcctggaagtgagtgacagatcaggtcaacatctgtgcccaactctccccccatcaa

SEQ ID NO: 319563 - DNA, 609 bp, Homo Sapiens
gtaaacactttgggatcaaacaccttttctaaatggtcttcgtgaataggaggcatggcaaagtgaggagcaggagagtttggcatcctggccttctttcttttcatgggcatacaaactgcgctatccatctgttttataatttcagtgaatttttccatatcagaagaagaatcaaatacactatcatcactaccagcagaaatgttcaaaaggctggcagggctatcctggccatttgtaacagtctgatctggcctttgaggagtggctaagtgatttccgctgctgggagagttggtgggactggattcagccatcaggggtgttctgctgccctgactttgagcctgaataggcagagttttctctgatgctggcggtatgacttgtgggccagattttgccgcgagctctgctgtgcaatgagagtgttcattgcccagtacttcctcttgtgggggagcacaacttgcaacggaaaccacttcaggttcattactgtgacaagttggcaactgcacttctctaacttcagagctctctgggatgacctgggagctcacatcctgggtgctctccacggggagcacgaaggacctgacctgg

SEQ ID NO: 319564 - DNA, 460 bp, Homo Sapiens
  misc_feature (300)..(300): n is a, c, g, or t
  misc_feature (414)..(414): n is a, c, g, or t
  misc_feature (435)..(435): n is a, c, g, or t
aagcaattactttttgacttgttcctctgaaagtgcaagaggcgtacacctttcccaaatgtagactagaatctgcaggatgccacccactgtatagttctgctttcccagagaggaagaacttttagaaaccaaatgatcttaattgttattgcccacccctgggcttttccgggtagaaaattcacagtaggaatgattgttaagagagagtgcttggaaccgtgggttaacaggaaaggctacctaacttcacatatctgcaaccagaggcagccaccaaggcattacttaggcagncagggaaaatgattgtatttgagttcctgtgtgtccaaaactgagggcaccatggttctttggaaaacatggccacctcaagggtggggcgcggtggcttcacacctgttaatncccggcattttggggagggcnagggggggcgggttcaccgggggct

SEQ ID NO: 319565 - DNA, 716 bp, Homo Sapiens
gacatgtaggaaaatcaatagtataatagcatatatgcatactttagaccagaggaaccttggaacagctttcagttatattacttccaaatgctcaaatcatgctaattgtgtttctgtgactttgcttttgctggatacttcaaagcccacacattatggaagtattacatctcaagataatagaattgggtgagtgttataatggaatatagattccttatccaaaacttctggggccagacatgccttgaaggtcagaattttttggactttattaactgtatcatatattaccctacattttgtggagttagagacagcaccatataatgaaacatattctatttctgcagtgaaacaaaggaatagttacaccaagtaaacttttaaataaaagataaatcctctcacatcagatcaggttttgctgccaaatttgctaagaaaaaagctttcaatttgcaagcaagggattatgaactagaatatattattttccagaatcaaatccaataatgtatacatgatacaatatattttaaaggatcttcagtagttcttcctacttagcagaaataaaccataatgacttgaaattttctttatgaatctgagcatatgatgttgattggggtttatatgaaaacagttttgcctattaagaggctcaaatccagggagttttggggcccacccttccgactgatgctggc

SEQ ID NO: 319566 - DNA, 886 bp, Homo Sapiens
  misc_feature (805)..(805): n is a, c, g, or t
  misc_feature (856)..(856): n is a, c, g, or t
tagagttttttaaatgtaagataggaagaaaaaagtgtggactttggagccagccatactagcttcaaaatctacctcttccacttatcagttgcatgtatttgattttagcgaattattcatagtttcacttttgtttataataggtagataatatagggttgcaatgaggattaaatttgataatacatataaagcttccagctcagttttttatatggagcaactgctcaataaatgttctcatatattgatctgttaatgttaagtcattttgagggttctaatatgtatttaatattctactctataggcatttgcaaatgacagttccctcttcctttatttccttggattgctaaaatagtacaagttttaaatagggttttttgctctagggaggcagcggaatagagttaagaggtgatttgccaagtaaatgaaagatgccttttagtgaaagaagcagaaagcatgactcatggctccagtaataagaacactcactgcttcacgtgagaacccttaagacagggcagttccagggtatggcattatcagggctctggctctctggtgttctcttgggctctgccctgctttgtatgctgccccattcctcgggctaattcttcttgtgaccacaagatggcgatagcagtttacagatttcactagctcctctcccctgcagaaagctccagaaacaaaaaggggccatcttcgcctgggtgtgtctttatgagagcaaagaaacctttcccaagagtcccacaactgacttttccctcatatcttattgggngggaatgggttactttgaccatggcctaaaaggcaattcacaggcaaagtngattgggctttagggaccattgggggaccc

SEQ ID NO: 319567 - DNA, 684 bp, Homo Sapiens
  misc_feature (22)..(22): n is a, c, g, or t
  misc_feature (142)..(142): n is a, c, g, or t
ttctgggggttggatacacatntgatatccaacccacagaagatggttacgtaggagagtcccaaaaccctgatttttcaagagacaaatccccagggtgtttgcagaagaaaatctttcccaccagaggaactttgaggcnttccagatagtaagagaacagcgagccccttagagcaactcacacatgttttccaggccagacaacccatactcaccagcggaatgtagttttgagtcaacttgcagctgccacaaaagaagttagcaaacttactcagaagttcttgataactccatgtgggtcaccttacaccataaagtggtttgtaattaaaatgtttttgaaactgtgaacagaccaaagtgtctagacatcgggaggctccaatcctacaccatcccgactgcccatgattactgtatgatagatgcccacaacctgccaaagaacatgttatgttttctctatcagagcatctttaagggcatatttctggaaagccccccctcacagcctgctgggagctgcctgggaaatctttggccaccaagaggaaggcatgcctgggcatctagggcactttccctctggtggcaggcctgggcttgcagaacgtgagccatagctggctcaggctgcctgcggaagcccacatatggaaggcaggatttccgggaccc

SEQ ID NO: 319568 - DNA, 326 bp, Homo Sapiens
ttcttcaattgatgcaactcagtaatttttattgcaactggaagacaatacatcacagaaactttatggtaggtctggggaaaagtgttatttacaataaatgatgaaatagtttgtctttggcaatatgattacatacgaagaatgcaaaatgcaggtatggatgccttccaagcaacaccaagtccctagagttcggctgatcgcgcctgcctccacactgtttctttaggtttacatgaacataacagaacatcacgttctttctcctttatggttctccctttctattcatgatattggcagtttcatacagaaaatacagg

SEQ ID NO: 319569 - DNA, 1711 bp, Homo Sapiens
  misc_feature (103)..(103): n is a, c, g, or t
  misc_feature (166)..(166): n is a, c, g, or t
  misc_feature (213)..(213): n is a, c, g, or t
  misc_feature (630)..(630): n is a, c, g, or t
  misc_feature (1659)..(1659): n is a, c, g, or t
gccgctcttggtgtcccccgatcagtagacctgtttatcttgtgcgaggaaaaacaggtgggtggtctgctgcagtggaaagcgccgtagatcaaccggacgncggggggaagatactttccccccgccggggtctttcggtacgcgccatacagcacgtgtgggncgcccatattagtggcggcgcgcagcggttcttcttgtcttatacanccccccggatatctgttttcgcccggtacgagcggcgggcgcagagagaaatttatgcgttagcggcgcggaaaagggggcgccaaaaacaacaggggggggatgatcaagcggcagcgcccccgccggcttgtgcggtgcggggtgatttataaaaggggggggtggcacgcggcggcaaagagcgagcgcccaaccttatgtagggtgggggaccgtgagcgtttttccgccccgtccattattgttgccaccggggggcgatcgggagaaagaagtcgctgcactcgtgtatcaaggggtgggtgcgaggatttttgcccgcgctatacccgcacggtttatttttgtgtcgccggcgacaggggtacctcgctcgacacacaccagacgatcgcaggcggcgggcacttaatnaatttctggtagaactatatcgcgagagatcgtgcggcctctcgggaccgtttctcctgcgccggggcggagaatgtcccgcgacgaacggcacctcctccagggacttcccgcgttcgggggtattgtgtttccgagaccacggttatcgttgtgcccgccgggggcgtcttttttttggtgtgcgggaattcccaggcccttgattccggtgccgcgggttttccctcgggaacccgcgttaggaccctgttccgctttcccaccgggggccgcccggcccaaatgaacggttttgaaaagtttttgaggggcggagggcgcgcgaccaatacttactacggccggtgcgtgtctcgctcgttgtcggctttcgcggcggttccctttgtttggcgggtacatctatcatgtaatttaatctgcttttttgtatattagcttttacatatagaatcgggtatctcaggatccctaatatataaaagacccgcataagaaaaaaacatttgatgatatgcataaaatcacaaccgcaataattggaccataattagactagttaagagatgaggaatatatgctcatttgtaagcgataagtgattatataaagagaaaacatgggttaagtaacacagtaacattaatttttgtatataaacaaattagttatctcaagtccttaaaagtttacatttaaaaaaacaggtcaagatgaagaaataactttgtagtttaaacttccacatgtgctcctttgggtggttttgccttggattttgcttcctttgaaatctttccattttgacattgagtaaatctggctactgtagaaacaccatccacaaacttggttttgaaaagaacgtttgcattgttgaacataccttcttttagtgacaccacaatgaactgagaatgtgtgaaatgagtacgcagcatctgtccaatgttttgggtatgagaaagatccaaggctgcatctacctcatcaaggatataaattggagcaggtttgaagagaacntggacagtattaatgaccaggccactaaagacctctgaccaccactaagttc

SEQ ID NO: 319570 - DNA, 561 bp, Homo Sapiens
cattttggaggatttggtttctttcttcttcttcttcaaccctagactccaagtcatgtagaatctcttctaattcctgctttttagcagcaagtcttgccctcatctcttctgcttcagcaaagagctcagtctctgcttgtagttgttctgcaaggatattcttctcttctaaaagctgctggtgcttccgctccatctcctccagctctccttccaccttcgtctgcttctccttcaccttcaacagctcttcatctttggcctgaagttcttcctcctggcgagtcacttgtagaagcggcttcacctttgtgaagactcgccaccactgccagtgccgtaatttcaggtacgcggcacagttccgctgcaagacctttaaggcacttagttgctgctgcttcttggcaaaggtctttctgtgcaggtaacctctgcaaacggcctggaagaagataatgatatcggtgatttttaaatctctttcttcctctaagtgtgccagaactccagctctgaaaaatatctttgctctgttcaattctgtacaaatttggg

SEQ ID NO: 319571 - DNA, 1201 bp, Homo Sapiens
  misc_feature (112)..(112): n is a, c, g, or t
  misc_feature (118)..(118): n is a, c, g, or t
  misc_feature (200)..(200): n is a, c, g, or t
  misc_feature (250)..(250): n is a, c, g, or t
  misc_feature (877)..(901): n is a, c, g, or t
aagtggttgggatgtggcccccacccccaggttcgggaatgaagccaagccataaagagaaaaaagccagttagacaccgaaaacagggggagagccagcacacacaggccntagttntgacagccgcggagggccagctcccggcaagtcctaggttaaaatccatttttatctccaggactcacgccctggaaggtgngctatttccgtctctcctgcctgaatcttgctgaaggcagccccccgaanccaggccagccacttcagactagagtcgctgatctgtttcccagatcctggctacccctggtaggaaccctcaggacccaccacaaaaagctgaatcctgtcccctgtcccctctgccctcctccttccccaacacatctactggaagcgtgcccccttgtgtattctcaggggtttgtgcctctaatggtaattctagcttctgtgacacagtgcgtttggaacagacactagaattatgtctgcccaagttcaatgacattctaagtggagttcacaggacaagaggcaaatgagactaactgtggtaccttaggctcagggttttaatggcctcatgtattgccaaataaatacatacaatgtgctttacttttaaacaaataaagactgtaaaccaatagttatgacaaggagaaagagagagtttgagcctcacttttttctactttaaaaaagataaacaaaacccttgcttggttacacgaagttaactacctgtttactgactgggtccctgaatgaactgtcataaaaagaagcccaagatatataatatgtaagcgaatgtttatttgggcatttttaggtttttcattgaactacttcctagaagggtttcctctnnnnnnnnnnnnnnnnnnnnnnnnngcttacctaagaatgcctctttcctgtccccaaaacactgtcttgaacgcattcattacaggacaagccatgaaggcaggtcagtttacttaaggacatcacatctcttgagaaagataatgtgtacaaaacaaaacagaacatgagctgtctttctcagctctctactttgtaaataaaaagggggaaaggtgtgtgtcccttcagcatgcctcgtgcggcacacgataaagaaatcaaggggaatggagaaggtgattttcttcacctgcccatcgggtcaacctcagcacccagacc

SEQ ID NO: 319572 - DNA, 1093 bp, Homo Sapiens
  misc_feature (32)..(32): n is a, c, g, or t
  misc_feature (40)..(40): n is a, c, g, or t
  misc_feature (71)..(71): n is a, c, g, or t
  misc_feature (783)..(820): n is a, c, g, or t
cccctaaaaataggtaaggtaacacctaaaangatccccngcctaaaaatcctactgtatgtaaaaggggnccttacctgaaatagggactttccatgatacctgtgtccttaaaaagtgagtatgatagggctacaacaacattacctattaataaaggttacagaagagattattgctgtactttttcctcataaacaccatcaaactttgttgcagttacaaaaagtacaaccaagttacttttcctcttactgaatttcattatgtttcacatatttgcagtttttattcagcagagaataattcttaaaatcttttctgtaagaattctaagtatttaaatgtgtagcttcacattatactaccatgtttcacccttcgtttcccaaatacacaaaaacatatacattttttcaaaaatgaaataagatgcccacattaaaaaaataaagcctacaaaaagttccagagctaaaaaagattattcatatggcacaaagtgatctcctactagtccaaagttcaaaaacattttaatgaagtccatttatatatattttgtttgcttttcaatgaaatactacatttattgaggcgaaatcacattatttttagttcttggagtcaacaagtgtacacaaatgtttttcaacagttattgaaaataggagaccaagttgaacgtgccaaagagataccattcagttggattttctagggtcaacatgaagaaaattagagaagggatttacttggttggtttccatagcttgatagacnnnnnnnnnnnnnnnnnnnnnnnnnnnnnnnnnnnnnntttttatccatacgggaatggagcgtcccttttttgtcttttctgacttgacatctgccaagggaacatacttaggaacatatttagatgaaaaagactcctccatcctgaaatcactgagttctaatggccggcctgcagcccctttgattggtctgcggcaactagcactaattcctgttggtgtagatgcttcataggggaacatttccttaagaatatccctttctactcttctttcctctgttttttctcccacttcggcaaagcagg

SEQ ID NO: 319573 - DNA, 480 bp, Homo Sapiens
  misc_feature (23)..(23): n is a, c, g, or t
  misc_feature (44)..(44): n is a, c, g, or t
  misc_feature (195)..(207): n is a, c, g, or t
tcacattatttttagttctgggnttcaacaagtgtaccacaaangtttttccaacggttattggaaaatcgggagacccaagttggaacgtgcccaaagagatacccattccagttggattttcctaggggtcaacatggaagaaaattagagaagggatttacttggttggtttcccatagcttggatagaccnnnnnnnnnnnnnctgccacaacaacaaacagcaaaatttttatccatacgggaatggagcgtcccttttttgtcttttctgacttgacatctgccaagggaacatacttaggaacatatttagatgaaaaagactcctccatcctgaaatcactgagttctaatggccgcctgcagcccctttgattggtctgcggcaactagcactaattcctgttggtgtagatgcttcataggggaacatttccttaagaatatccctttctactcttctttcctctgtttt

SEQ ID NO: 319574 - DNA, 646 bp, Homo Sapiens
ttttaacattttcattcattcatttaatgaggcttagcaatgatatcaaaagggtcagtctcctgacgttggggagctcacagtacatgcaaatttcttacaaattgaaatacaggttgtcatggaacaatttacagaaggctgtttctatgagggaaataaagggggtgtgccctagggatcaaagtatatgcaaggggtggccaaggagggtcaccttcccagaaaaggccatacttgaactaaggataaataagaattagccaggcagatagtgtgaaggagggaaaggggtaatacaggaagaaggaattgcactgggcaaagacattttggggctagggagaattctctaaggctggcattttctaagatgtgcatgtggaatgacacaggtaagcctggagagtggacaaagtgctgtagtaccttgtatccaaagccaaggcacgtgggcacagagctgaagctaaggagagtacttcagttctgtaataagggctgtcaggagcagttatctcttgagtaggatctctctgacttcagggaggaaagcaagggttaggaggatgaggtggggctatgggttatccaggaaggaagtgagcagagtacattcacgtggcagcgctgggcatggaataca

SEQ ID NO: 319575 - DNA, 531 bp, Homo Sapiens
  misc_feature (36)..(36): n is a, c, g, or t
  misc_feature (318)..(403): n is a, c, g, or t
  misc_feature (438)..(456): n is a, c, g, or t
tatgcccctaaccagaatgttatacttaaacttttnttatatgaattactttgttacatgcccattagtggcctccttaagagttcatccttcctagattaaaaataactggtctaagttgtgactattcttcttaattgaaccatgaagtgaaacaagtagtatccagacattcagctcatagctttctgagcttctgtagccaaatatccttcaggaagtttacttgttagatatctaaagggaaaagaaactgccatctccatatgaaagtaagaaacaggacttttttgcatatcataaaaaatagggtttgcnnnnnnnnnnnnnnnnnnnnnnnnnnnnnnnnnnnnnnnnnnnnnnnnnnnnnnnnnnnnnnnnnnnnnnnnnnnnnnnnnnnnnntttgagatggggttttgcagaaaccacatctctgnnnnnnnnnnnnnnnnnnngccaagtgtggtggcacacgcctgagtccccagctacttgggaggctgagaaggtgggagcaacacgtgagtcct

SEQ ID NO: 319576 - DNA, 943 bp, Homo Sapiens
tcagaatcccagagcccagcctggccgtgttagagctgtttattaacagggagggcctgtaaggtccttggggcagtggtgtggtgataagtcgaggactccatctcagctcacccagccggggcctctctttaactcaccctggtatggctaaagccaagggccaggcacctgaaagaaagtgctaggaggaaagggcatttcaccctcctagacccagccccttaccacacccagggggatcccagggaaaacctagggaaagaagtgaggaagaacggggtcaagagcacaggccagggaccttctcttccacttgggatcggctttctcactcccaggagcctgtacaggagggccccaggcttgagggaagggcattgccttgagagatcctgggagaggcaagaggatgtgactgatagggtcaagacagggtgaacaggcaagggcaggcaggagacaggagatggtgagtgagcagggctgtcctcacttcctgatcccaagaggtttcctcttaaggggtcagggctgggacagatgccttctagggcacatggtgttattcttaaggccctatgtgaccccggaagggaccaggagggagaggctgcactcacctggaagactctgcttcaccctgacatgatgtgcttgacaaaggcttcataattgatgcagccattggcatcctcttgcccagctaacagctgctccacttcagcctcagtcatcttctctcccagggtggcaaggacgtgccgaagctcagcacccatgaccgtgccattgctctccttgtcaaagacacgcaggccctccacgaagtcctcataggtgccctgctccttgttgcgggaaatgtgctgcaggatgggcaagaacgtctcaaagtccagcatcttgacattcatctcttcaggcttgggcttgcccagca

SEQ ID NO: 319577 - DNA, 447 bp, Homo Sapiens
  misc_feature (166)..(166): n is a, c, g, or t
  misc_feature (389)..(389): n is a, c, g, or t
  misc_feature (411)..(411): n is a, c, g, or t
  misc_feature (419)..(419): n is a, c, g, or t
aagagctgtttattaacagggagggcctgtaaggtccttggggcagtggtgtggtgataagtcgaggactccatctcagctcacccagccggggcctctctttaactcaccctggtatggctaaagccaagggccaggcacctgggaagactctgcttcaccctgnacatgatgtgcttgacaaaggcttcataattgatgcagccattggcatcctcttgcccagctaacagctggctccacttcaggcctcagtcatcttctctcccggggtgggcaagggacgtgccgaagcttcaggcacccatggaccggtggccattggctctccttgttcaaaggacacggcagggccctccacgaagttcctcatagggtggccctggctnccttgtttgcggggaaatgtgnttgcaggnttggggcaagaacgttttcaaaagtccc

SEQ ID NO: 319578 - DNA, 858 bp, Homo Sapiens
attcagaatcccagagcccagcctggccgtgttagagctgtttattaacagggagggcctgtaaggtccttggggcagtggtgtggtgataagtcgaggactccatctcagctcacccagccggggcctctctttaactcaccctggtatggctaaagccaagggccaggcacctggaagactctgcttcaccctgacatgatgtgcttgacaaaggcttcataattgatgcagccattggcatcctcttgcccagctaacagctgctccacttcagcctcagtcatcttctctcccagggtggcaaggacgtgccgaagctcagcacccatgaccgtgccattgctctccttgtcaaagacacgcaggccctccacgaagtcctcataggtgccctgctccttgttgcgggaaatgtgctgcaggatgggcaagaacgtctcaaagtccagcatcttgacattcatctcttcaggcttgggcttgcccagcacacgcagcacctcggcattggtagggtttctgcccagggcccgcagtacatccccgcactggccgtaggtgatcttcatctctccagtcggggtccggtcaaacaatgaaaaggcctctttgaactcttcaatctggtcggcagtgaagtctatctttacactcttggggtcaaaggcaggttccttgggagcctcaggagctggggcaggggctggtgcaggggctggagctggagctggagctggcttggctgcctccttcttaggctcaggcttcttgggagccatgttgtcttgttgggatctttggcagaggagtgatctctaggacaggctgatcccttcttgccaattggtggaaacc

SEQ ID NO: 319579 - DNA, 1336 bp, Homo Sapiens
  misc_feature (118)..(118): n is a, c, g, or t
  misc_feature (641)..(681): n is a, c, g, or t
  misc_feature (1214)..(1214): n is a, c, g, or t
  misc_feature (1275)..(1275): n is a, c, g, or t
tggtggggtctttgtagaagagaagggtctggcggcacccagggtcactagagtgcaggtgcaggcaccaggagagagcctctgtcacccatagcttggttgtttgtccctcccctgntgcactgccaccaccaaccctaatctttggacagtatgcatgtgtgtctacaaacacatgggacaaggacaagccgagctgtttataattcgagtggataaaggcagatctagatcaatgtgtgaggatgtgggtgcagacacacacccacacgacaatatagtggaggcacagcaaagagacctgaggtgccttgggtctgagatactttcaagcaaacaagttcttccacttgatgtcccacggtggctctgtttggtttgacaacctaccctacaggtggccagaaaaagattctcccagcttgatttccccttgcaaagcagttgagttagggagacagagcttttccattcccccaaaaaatgtggattcccaaggaggtttgttccttctcttttgaggacatccatcttcttaggggagggagggggtgttaggtggacctggttagttttggaggctttgggtttttgcagtttccatctacccaggggaatccaagttcttctcctccatcttnnnnnnnnnnnnnnnnnnnnnnnnnnnnnnnnnnnnnnnnntttccccctcccctctgcaattcacttccctctccccacgttgcactttcttctctcctccgaaattggcccaaagtcctccttctgggttcaagagtggtcaggattcatgggtccccttccccacaagccccttccccatggcactggccctgggcaaggggcagggttcatctcttttggccggcattcagcatgaccttggagacgaagttgacgatggcagaggccggctggttggggtcaagctcagcaaagaggtggcaggcgttgtccgtggtgctgccctgcttccgggccacgaagccgaagagcttagcaggggcaccaccctctgttttcatccactttctttcctgtggatccaggtcacagaaggtgacagtgttgagagggtagtggcgtctgaaaaagaagctttctctgggttgtcagtcagagtgattccctgggcagagactttgaagtgaacgatggtggcagctggcgtggggtctgcagccaacgtctcagatgtggctttatgatgagtnctgtggcccagtgagtgactccatgtccacagagttgatgaagagcacattgcaggctgcnccttgtttcagcaggtctgcagttgagttgcagggccggagctatctttcgattcatctgt

SEQ ID NO: 319580 - DNA, 677 bp, Homo Sapiens
ccaaatccatgttagtttccaacactcttctttcctttatgtagatcccaaggttccatctggtatcattttccttttgcctgagaacttcctttaacctgtagtatggttctgctgtttttgtctctgaccaccactaagttcagttaggttttctttccaggtatttcccaaggcaaccttgaactccagaccatccaaaacagtttgaccctctggtggtgcaagcatagcattagcaccaggcaaaagagtagaaaaaatagacccaaagtccttgttcaccttttgccatgcaatatttagggcttggtttttcttctggtcaaggtcttctatagttgtaagaattttggatttgtcattttctacaattctcttcttcttcatcaagtcattgtatcgctcttcagcttctgtcaatacattcatagctctcatattgacatttcttcctagtttctccttcatttcttgcaacttctgaagtctctgaccagcttctttagggttgttagttttgaaatcataggcactattgggttggccaaagaggtgtctctctgcattaatccagtcataatctttcaacattttggatacctttgcagcaccatcttcagcctcccgtttatgtttgctgatgttgtggtctaattccttaattttaagctgag

SEQ ID NO: 319581 - DNA, 832 bp, Homo Sapiens
aatgtagaaaccacattttattaaccatggatttaattgagggcagtttattaggtattatccattcgcttatgcggacatctggattttgcagagaaattatagccattattttattaagataattctaacgagatcaatttagtttcttgaagtagcatatattcaattcttcaatagggtttggtttaatttagctatcaaagtcagatgtctctaaactttacacactaaactcatcgtgagcagaaaatttattctttgtacatattccttctgttttggttcttcaagctgaaacatctcaacttccagaaatatggttgccagatcaaaaataccagagtcctaagggttaagatttgaatcgagaaaaagatacatgtacacattgtattatatacaaacaagcaacaacaaaaagtttcatcatgtaaacaaaagaatataaattatagacataattggaagtttcaaacagtccttaaatcattgtgagcttctctaaaaggcacaggtcttggagtgtgggcacagagccattagtcagatgtctgggtggtctcccataatagcaatgtatactctaaagtgggctttttgtgaactctgtcagggtgaatgagttaggcctcttaaaggaatgaaatgctttcacatttggggcaacaagtgaaaaatactgaaaggagggatacaactagggttagatttattgttgacagtgattttagaaataaccactaaaaaggtgttaaaagatttctagataaaattctgactactgaaaataagaaaggataccttttgtagctctacaaatggtttggtg

SEQ ID NO: 319582 - DNA, 1652 bp, Homo Sapiens
  misc_feature (18)..(18): n is a, c, g, or t
  misc_feature (28)..(28): n is a, c, g, or t
  misc_feature (31)..(31): n is a, c, g, or t
cccggggatcccatgaanctagtggttntcnatgctccaggtgaagcgtagggatcgaggctttgcttctttgttttcatctttttgctcagcagatacattgcgacttgagccctcatatctcccgtttcctctcatattcagttggaagccttttgataaacctgaatgacatgtttctccttgtgagttttgaagttaatttactaaagagattagtggagcctcggcttcgagtctgggacaatggtgtggcttcatgggacaggctgggagaggcaggagggccattatatgttgcggttcgccgttcccggggctggccgtggaaagtgctacgactggcagtgcctcttgggaagcggattcgatctggggtggctgcactactgatactgtgtgttgaagcaactggagttctctgatcaggaatagtgctgttttctttgccattctgaatcactgagtgtctatcagctgtagttctctcactgcaaacataagtatttcgtcgtgtcattccaccagatgctgtgttactactagggacagtggagcttttcttgcgttcaggaatatccgccttattaggattacttgcattcccaagcatgggactggctggagcaattccctttcctccaacagcactgccacttgatttccgggaggaaattccatcttctttgaggtcactatctgcagtgctggtctgactccttttcggatacgccacaacagaaggaatagctggtccagcatggtcactgtagcgtctttgcttttggcttgaagaaacacttctctgcactttgtggtgaggagactggccagtactgttgttgagatcactgctcggcctaacctctgaagattttctccccaataacaaatatgtagctgtgatttcatcgtatttcatcttactaagagattcttgaatttcttcttgtgaatatcccattcccaccataatatctattcttttttggtctgagatgtctagctctggttcaacaaatggtttgagttcatcttcttcatgccctgcattgatccacctgtccttcatgatttgctctagagtgccgcgtttaattggatttagcaccaggaaacgtttgagaaggttttcacagtctgtagacatgtagaagggaattctgtatttccctcttaatactctctctctcagttcctttaggttttgcccatcaaagggaagtgagccactgactagtgtgtataaaatgacccccagactccacacatccacttctggcccgtcatatttcttgccctggaagagctcaggtgctgcgtatggaggactgccacaaaacgtgtcgagtttaccgccaacagtaaattcattgctaaaaccgaaatctgctattttaatgttcatatcggcatctaacaatagattttcagccttgaggtctcgatgtacgatccgtttctgatggcagtattgaactgcagacacaatctgtctaaatttagatcttgcttctttttccttcatcctgccatgtgcaaccaaatagtcaaatacttcacctccacttgcatattccatgattaggtagagtgttttttcagtttcaatgacttcgaataacttcactatattgggatgatttaaatct

SEQ ID NO: 319583 - DNA, 908 bp, Homo Sapiens
  misc_feature (67)..(67): n is a, c, g, or t
  misc_feature (91)..(91): n is a, c, g, or t
  misc_feature (257)..(257): n is a, c, g, or t
aggcccccggattgatctccccgccagggggtacttagtaattgactggcttgcccaagtgtagggnaagattgcttcccatatacaccantttcaacaccacataccggtccacttttcacaccccaccccagacggggaggcaccatggagatggggcccacacgccgactcttcaggggtaacggaaagtagggccagggggccgcataggttgcacatctttaatgtagtgcattcgtagaaaaaaggcccantttcgctcccaggcgtgctctcgtcctcagactttaatttcatgatttagaagatgcagacgttattgcctaaatattattctatacatttccatcagtgttcaggaaaacactttaattgctacttaatttacatcataatcactgggttacagctttagctcattggcaattttggaagcaatatttttgaaggctatggatgtccccgatatccgcttaaaccggaccccgttcagagacagtcttggcagcttgcacacttccatttcccactgcacgaggttctccgcgtgcccatctccgtggacgcagaagagcaagaagcgctccctctgctcatagtcgcagttattggcgtccaacactttgcggatttcccgcatcatgtccccgggatccattgaactagtggttttcatgctccaggtgaagcgtagggatcgaggctttgcttctttgttttcatctttttgctcagcagatacattgcgactccttgtgagttttgaagttaatttactaaagagattagtggagcctcggcttcgagtctgggacaatggtgtggcttcatgggacaggctgggagaggcaggagggccattatatgttgcggttcgccgttcccggggctggccgtggaaagtg

SEQ ID NO: 319584 - DNA, 575 bp, Homo Sapiens
  misc_feature (528)..(528): n is a, c, g, or t
  misc_feature (542)..(542): n is a, c, g, or t
gacgaaatacttatgtttgcagtgagagaactacagctgatagacactcagtgattcagaatggcaaagaaaacagcactattcctgatcagagaactccagttgcttcaacacacagtatcagtagtgcagccaccccagatcgaatccgcttcccaagagtcactgccagtcgtagcactttccacggccagccccgggaacggcgaaccgcaacatataatggccctcctgcctctcccagcctgtcccatgaagccacaccattgtcccagactcgaagccgaggctccactaatctctttagtaaattaacttcaaaacttcacaaggagtcgcaatgtattctgcttgagcaaaaaggttggaaaacaaaggaaggcaaagccttcggttccctacggtttcacctggggggcattgaaaaccattagtttcaatgggttcccgggggacatggttgcggggaattccgcaaaagtgtttggacggccattaattgcggatttggaggcagaggggaggcgnttttttggttcttnttgcgttccacgggagatggggcacgcgggaga

SEQ ID NO: 319585 - DNA, 630 bp, Homo Sapiens
  misc_feature (60)..(60): n is a, c, g, or t
  misc_feature (213)..(213): n is a, c, g, or t
  misc_feature (434)..(434): n is a, c, g, or t
agtgcggggggggttccccagggggttttttgttgtgttttggttaaaccctaaaccccnaagggttgacccttacctcggtttcctttcccctctgtaccctctcccaaaggaactgagagagagagtattaagagggaaatacagaattccccttcctacatgtcctacagactgtgaaaaccttcctcaaacgttcccctggtgctaaancccaattaaacgcggcactctagaggtaatcatgtaggtggaaacaagcagtaactttcggagagtctttagagtgaccttagatctttgcttgatttgtatgccatactggatatatcctgcggctttttaagcaagaattgaaacattaaaaaatattttttgagtttatgctttgaacgatagtcaatgaaatgttgaaaataaatttttgtaaatantacgggttatcagaatatttcattttactctgctaatgaacagtttaccttttttaagcaaatcatgaaggacaggtggatcaatgcagggcatgaagaagatgaactcaaaccatttgttgaaccagagctagacatctcagaccaaaaaaggattaggtaatccctccatggcctgcatgttccatgtggtttt

SEQ ID NO: 319586 - DNA, 514 bp, Homo Sapiens
ttttttaaactgacataagaacagttttattttaatcacttaagacttgtgcattattcaattttgagactgaaatacttgtttccctttcaactgattaggaaatggtctgagctggcagaagttaatcctcacattattcagctaatgagagacagaatcctaaaacctgattccaacttccgcctgtacctcacaatgcaagacaaagcctttcattttaatgttgtacacatataaggaccatataatctggattaactttaggtaacaataacttaaaagataggaaaatgtatcatattacagagatttaaaaattgtctatacaataaatgatgaagaaaactaacaataaacaggacgacgttcaaatactgaatacaattaacaaatggggccaaaagatcaacatttatctctcatcatctttcatgcaatgtctcagctttcttctcccaaacataaaggcagattaattcaaagtagccctattaagaatatttgtttatca

SEQ ID NO: 319587 - DNA, 879 bp, Homo Sapiens
taatgctggaaacgggaacactattctaaatctgaatctgacgatccctcctcatgcttccttcacatcggctgagaattaacaaaaaagtcttaatattttcatagttagacaatgaaataggcttcataaatcattcaaagtaaaattaattttaaaaattgaaagtggaaatctaccatagtaaacagaaatgctataaagaccagacaaagtaaatttaatcagtaacatgacaggaccattaaattggtcttgaaaagcagaaggcagatgatgaaattgcacttaattctgtatcaattcagatcctatcatccctactcctttgtaataaaataagcatttacaacatggtttcttacacatctcccttacaaaaaggctaagcacaatcacttatacattctagttggtttttaacatttggtcataactgataaacaaggtcacacaattttaccctatcgagtctgttgatctgtgtcagaatgccttatgccagaatcagacagttctaatacaggatttacaaatccagaatactcggaatttccattatcatccatttcggcactaacaaaatcattttcccactccagcccattggaatcatcagaggctgatgtaggattacttccagtcttcttgttgctatacttaagtgctgcccgtagaatgtcttcctctgttttggaacgttctctcattggaagcattctattcattccttcttcatcttcccactctagatctaaggatgtgctgtcgtcatttccactagttgatttagttttggtcattaaatcacaactgctttctgtatttggtgtcaaaactgtagcatctgatgagagtctactacttcgaaaaacttca

SEQ ID NO: 319588 - DNA, 966 bp, Homo Sapiens
aattttctcaagagtggcatactcatgccaaatattattgctctgggccatataggctggtcttcctccacactaaaatgggtgtcttgttttggtacttaaaacagtctactccaggcatccagtccttacagaccaaggaagagcatagcgatgcctgttggaattgcagatgcattctggccttctcccccgtcctggaaacattttctttgaggaaggctcttagaacattagatagtctgctgaggttgttggcccagctccatacacccagtagaacagtggaacaactcatgcttcatgctgccaagctgctgtacttcaaaggaaacagatctagcacactgctgcacccctgcttccacactccacacttcaccccgctgcttttctctgacccgcccctggccttgtaagactcatgtaagctaagtccaggatgcctgtggcctgcggcttgattcttccctttaggattcagcaagttaatggcttcctcgctatagaagtgagactttgacttgatacctcttggtatatcaaaaagatattcatccagaaagtaccaaatgttctgaaagacccgctcttcactccagttttccctagggtgtttctggcagggcgtttttaaaaggcatctacctgagttgacgctaatacttgtcaccacctggaacgtagttatcggtcggcaggctgaacatactccagattccccagaggccacttctgtagcccagcgatgcatctgagcctctctgcgtggtttatgcttgaaaaatagataatgcttttagatggttcactgccaggccatgggccccacacatctcaggccctgtgtgagggagcacactgagatggtgcaggagtgaatgggcatggcttggcctcgctacctcggggacctgttggagttctggcagcagggtgtctgcaggtgggacggcgttctgggca

SEQ ID NO: 319589 - DNA, 919 bp, Homo Sapiens
  misc_feature (51)..(51): n is a, c, g, or t
gcagctcagcccattcatttattgctttccttatattccactgtttattanttaagttgtattttcatatgttcctatagaatttattcacattacctggctaataatcaacagtttggggtttttatataatagctcttcagatatattgctggtatatgaagctcaactgatatgcatagggacaaatcagaagatatttatgctggtagatccaggggcattgtagcaccttaacagttaaaactcccacccttctatgaatgttaagttttagccttaaaagtcaagttagtttgctcacactttctctcacataaaatattagtttctttctcaatattaaacattattattatttttttacaacaaaagtgttcaggacaaacatcacaaaaccataatcccagataaatggtctaaaaatgcagttaagtcatccgtgtatatcaattctaaaataaaggtttgagcctttgaccatgcccacagatgcctaagttcttccacatcatcatttctacagtttgacaaaactagaatacacagtcttaagtggggggaatatcataaaaattcgttacttcaatgtttaactttttcacaattacttgaaaattcatagcacagcatcactgtaacttgctaatcatgaaagctgtaaattaacaatcattgcctctcataatgactgcaccagtatccatttttatttattcctaatttaattcaattgcaactacctgactggaagtttgaggtagcttcatagtggttctatttgatggaaggagtatgtcttaaagtaccctctgcagcatgagagtaggtcaaaatgagagggaaatacagtaccaaatataccatcttctcacttggcatacaaactaaaaaaaaccaccaaccaaccatttcttta

SEQ ID NO: 319590 - DNA, 692 bp, Homo Sapiens
  misc_feature (565)..(565): n is a, c, g, or t
  misc_feature (567)..(567): n is a, c, g, or t
  misc_feature (576)..(576): n is a, c, g, or t
  misc_feature (579)..(579): n is a, c, g, or t
  misc_feature (585)..(585): n is a, c, g, or t
  misc_feature (589)..(589): n is a, c, g, or t
  misc_feature (592)..(592): n is a, c, g, or t
  misc_feature (603)..(603): n is a, c, g, or t
  misc_feature (609)..(609): n is a, c, g, or t
  misc_feature (621)..(621): n is a, c, g, or t
  misc_feature (625)..(625): n is a, c, g, or t
  misc_feature (638)..(638): n is a, c, g, or t
  misc_feature (645)..(645): n is a, c, g, or t
  misc_feature (653)..(653): n is a, c, g, or t
  misc_feature (662)..(662): n is a, c, g, or t
tagagcgaagactggcagcgggaggctgcctgccctttcctgcacgcaggctgcacccacccagccctcaacagagcgggctttgtgctcatcagggagcattggctcaccacttcctagggaagtcccggccccctggagaatcccactgggcagctgtgactcaggtgtcaatgaagttagtgccagcacctgcagagctgtccattcggtgggacaacagtggcgcgaagacaggcagcacagcgcggcactgccccaacccccagcggcgctcagagcctgcagcttgcgttctagcacgaggttcttgaaccctgtcttctgctgcacctcctggatggctgcggtgaacttccgatagagctcgtcccgctcctgctgcacctgtagggacagcgctgggggtgggcgatgaggcccctcacctggggacatctcgctgggaagatgctgcctcccacctctgcacctgcctggaacacgctgcctcccaacagtgcccactcccacagcaccggggtcagtgtgttgtccacactgcctgcgccctggccctttgtananccatccacncantggaangcangangaacacatcancataancccttctctcangaangtgtctctggaanccataantgtcctgntaagaactnaacaccccaccctgaaactgcttcatgggt

SEQ ID NO: 319591 - DNA, 717 bp, Homo Sapiens
ggtatactagatccaatactatttagtttattatcgaaattggaaggattcattgagcagcatagaagtttgtttacatgttactttgagatgctaggtatttgtggaattaaaaagaatcaggctcttttgtactttgtttttaaatctgtgatgcttttcaaatttaattcataataaattgatgcaatttcatacttaggaacatacaaaaggtaatgtaaactctgccacttttttgtgttcaaaattttggtttttatgaagccagatggattgaagagttacataagcatttgaatgctctaatataaggctaatgattttctgttagtgtttgaatatcttcattccgctcaaattcataacagttctatttaactgaattaaataaccatatgaaaaatcttttgggtctccccctttttacacagataattatttttgtcataacactttttaattgtttttcatcataggggcctttgctgaactacaaaaatgtgtaacaaattaaaatctgatgtgaatgatattaatgctacttttagcaaactgggcttcctaatacaaaattttaaatttccatttgtatcatgcttttaatatgcactgtaaatttcattaacttaaacattttttaatagccatggaactgacttcttaaaatctgttgcctataaatatttcactgctaagtacatacagaaaaacagt

SEQ ID NO: 319592 - DNA, 1278 bp, Homo Sapiens
ggagagttgggatgggggttggggtgaagcacacttattatcttcagttgcagtgatttcaaatttaggattttttgttgttggtttgaactgtccccttagtttcttgttatttccaatttgttctgcttagtcattacttttaattcttttcttactaaaattttatggtggttgggggaagggagttagcatcactaacctgacagttgttgccatgaatttgctttgtttactgctagtatattagaaatcctagatctcagaatcacaatagtaataaacaacaggggtcattttttcctaacttactctgtgttcaggtgtggaatttctgtctcccaagaggaaatgtgacttcactttggtgccaatggacagaaagttctacctgtgctacataggagaagtttggaatgcacttaatagctggtttttacaccttgatttcgaggtggaaagaaattgatcatgaatctctaataaatttaaatctcttaaaccagtaggtgcttaatattttttgatttgattaatgcccatttaaatctcatgggttctattaaaaaaatatatatatagggccccaatccattgccatcaaattgcccttggacttttccaaggtatattatggggttttatgcaaaattccaagctaccatgtaactttttttaaccatttaacaaaggagggggaactgtttcctaccttctttacatgttgtgcattgttgtggtccagaaatgccaaacctttttaaagatggtgcaactttgagtccttggcttgactatacaggccttgaacttcatggcatatcaactttgccatatctgcaggagagctgttctatatgaaatagctcagagttgcaaatatcacatgtgaatgatacggtaacttttaagaaatgtctgtattgtatttgaagactttttggcatatcaactttgccatatctgcaggagagctgttctatatgaaatagctcagagttgcaaatatcacatgtgaatgatacggtaacttttaagaaatgtctgtattgtatttgaagactgtttgccataaatctgaaatttgaacctatgtatttcaatttggtatgctaaaaagttctgaattaatgtaaagttttttgttataatattgtaatctcagttcaaaagttaactgcaaaatataaaacccaatgatttctatatagtaaattgaactgtaaaggtaacttgtgtgtgattctgaatacatagataaatgtttttattcctcaa

SEQ ID NO: 319593 - DNA, 1482 bp, Homo Sapiens
  misc_feature (448)..(448): n is a, c, g, or t
  misc_feature (455)..(455): n is a, c, g, or t
  misc_feature (474)..(474): n is a, c, g, or t
  misc_feature (1325)..(1384): n is a, c, g, or t
tttcgattgaggtaaataaaaaagctttatccagcaacacggagataagagtctgtccaacccgacaagttccagaccccaccctgccctcacatcaggctcttccggtactgactgtgcggggtggtctgtctgaggtgggagtccggggtctgcaggtccatctgtctgtacaggtctctcagctccctgacctcctgcagcaccctctttgcctggctccaattcgatgatgcctctcccagcagccgttccgtctccagcagcagctgctctgactcagaatccggcggagaccgaggggggtccttggcctttcgcttcccatctcccagtccctgaacctctgccagaagctcctgagtctcctccagtttccttgctaccaggtcctggatccgggacagctgccccgggttggggagggcaggggttgggggttcctcancccgcanctggagggtgcgggcagangcagcatcccgctgagataggatctcctccagggaggcgcagcggcctttctctgtgggcgtcaacttcttgggtgcctggggggtgtaggtggcccctttgtctgttttttcccaaggtcgggagagactgcttgcccggtctgcggagggctggatgcggtctgagtccgctctccgccggctccctgccagctgggccacagacttgtccaggtcaacccgaaagctctcagcacaagaggttggttcctcaggggaagggtcttcctcttggatcaagtccaaggtcagcatcccatccgaggtagaggtggaagccacagccattaggtgtccccttgttggggggcggcgggagtgctggatttttgccctgtctcgagtgggatgggcaagatagctgtcctcctcaacggtgacctcatccaagatacggttcttggctcgggtgatggcagagttgagggcattgatccacgattccttctcttctggactcactgccaggaagatcaggttgggtgccgtgttaccgggctgtttggagtgggcaagagtaaacttgctatgatttttcttgctcctgctcttggacttccggagctcttcacacttctcatagtcactcaggtcaaatacctcttgaatatttttctcatcttttacctccttctcagagatgtagagctggtcccctttcagcaccacatagcggtttttccaaatctccctgaaaatccctttcccgcagaatttccggacccagccgaccttctcgggcggtgcaggctgctggtttccatcctgaggtccccgcttggcggaattgttcttcttcatcattcccannnnnnnnnnnnnnnnnnnnnnnnnnnnnnnnnnnnnnnnnnnnnnnnnnnnnnnnnnnnccgcgggggctccctccccgcgggagggcgtcggagctgccccggcgccgccgctcgacgcgtgggtcgacgatatcccgaaattccggaccggtaca

SEQ ID NO: 319594 - DNA, 1076 bp, Homo Sapiens
ttttgtaaagaccacaaagatttaatttaaaatcacagtgtctcagctggaatgccccgtccatagcgggcacccctgcaaattaaaagttcctcaagaggcccctccaagcccagcaacaaggggtgagcagggcccagctgggggtctggcaggcctctggcccctccacatgattctggagaggaggcccagctctcaggtgctagctgggacaggttctgctgccggcgctgcttctacaggctccttctgcaccagcgtgggctcatcctcaccgtcctggggagggtggaccagaaccttgtctaagatgccaaactcctgggcctccatggggctcatgtagcggtccctctccatggcggactcgatcacctgcaggctctgtttggtgtgcttggcgtagatgttatagagctgcttcttgagcttcatgatctcctctgcctggatggcaatgtctgtggcttggccccgggcgcctcctgagggctggtggatcatgatacgggagttggggagcgagtggcgcatgcctggggtgccggcggcgagaagcagggagcccatgctggcggcctggcccacgcaccaggtgcagatcgggttgaggatgtactgcatcgtgtcgtagatggccaggcccgcggtcaccacaccaccagggctgttgatgtacatgtggatgggcttcttgttgctctcggattgcaggaagaggagctgtgcgataacaaggctggcaacgctgtcatcgatcgggcccatgacgcacacgatgcgctcccgcagcagccgcgagtagatgtcataggcgcgctcgccgcgacccgtctgctccaccacgatgggaatgagcgggagagcccgggtcgccgtcgcgtgcaggcaccgctgcagggccaggccgttctggagtgtccgctgcggcggccgctgcgctggaaagtgagcggcgaggcgaggccccagcgcggggtacctgcatgacgccacccgggccccccataccaatattccgggccacatccctccgcacgccccggtcggcttccgtccgatggcggaactac

SEQ ID NO: 319595 - DNA, 940 bp, Homo Sapiens
  misc_feature (243)..(262): n is a, c, g, or t
  misc_feature (845)..(897): n is a, c, g, or t
ggttggtggtctctttgtctgcttttatttccagttcgatcttctgggtttagttttgtctttaaaaagaattcaaaaaaagactgacaatgacagttttgagttggatagtgaaaaagtggagcctccataatcagtgtggttgccttcagacctgagtacttagctgagggtgggtgagagccctttgttccaaaagtccattagttttgctgttgtttaggagtaggtggttgttgttgnnnnnnnnnnnnnnnnnnnnggcttttgtaatggaatccatgttcacatcctgtgaactctgtctcctgaaaccctggaagtatttcttagaacctgaaatattgttttcttccttgaattttctctagaaatgcagaaattaggaaggtgatgggtctgtatccccctgcccccttctttcccatgcttgactcccgagagtactggcagtgcagcacccatcattgacgtaagcggctgtcttgtccagtgtttgtaggcatcactgcctcagctgttaaggagacctgtgtcaaaacttacatccacattcctacacccccacaacccatcacttctggtgttaaccctaaaatacccacatgtattgagctggtcttctgcatttaagtatttctccccagtttttttccccactgtgtgtggggggagggtccataaacccgagtgtgcctttgctttccacccttgctagacactggtagatgcaacaaactcagatttatatttgttgtaaagttgtaaaaatattgtgatgtcaccaattttccttccatctccacatcccctaacatctgattcacgacttaatgtatgttgtnnnnnnnnnnnnnnnnnnnnnnnnnnnnnnnnnnnnnnnnnnnnnnnnnnnnnctctttattacttaaaagtaataaaacctgactgttctatatt

SEQ ID NO: 319596 - DNA, 713 bp, Homo Sapiens
  misc_feature (355)..(363): n is a, c, g, or t
  misc_feature (561)..(569): n is a, c, g, or t
  misc_feature (674)..(674): n is a, c, g, or t
cgattttattgagcaaaatttatttttatatgtacatacaagagacatattctttgacatataaaaaatacagaaatatttacatgtatacaaaaatattaaaacagatttcagaaataaggaaaacaagcaagtttttacaaaggatactttcttgggaaatacacacaatgaaaaaaagctttagaaaggtgacaatacatttaatagactccagaagttgatatttctgttggtatcaattgagtaagaggaatataaaatgtctgaaatgctaacagatggaaaaccagacatatttaagactgtctaggtaaaattgcatgggtttcctttaccataaaattgaatcaannnnnnnnnaccctcagtatcactatctacttttccttttttcttaaaatatttaaattgtttgatttgtattgagaattttaaactttttctcattaaattgtaaaaatattttaagaggttgtctatcctctttatcttctggggggaaaaaaacctcaggatactacaccgatttcaacataaaattgaaaatcacaatacaannnnnnnnnaagttaaaacctaacattttctaactaacattcatgatcagtaacaattgatttaataagaagatcacaatcttcataaattctttttgcttttctttgtaccangcagggggacctattttacactggctttgaaggaacttg

SEQ ID NO: 319597 - DNA, 1689 bp, Homo Sapiens
ggccacgggggaaggcccaaggggggaaatgccctttttttccggggggaaagtgggaattgccagggggaaaggagccagaaaattccgtttattcccttcctggagaactccccagtgagcttgggttccccacagggccaggtggccccccaaagttcaggtgccgaatgcttcccccatccccaggggttaattcctgagactggcttttggatcaggttgggagggagcctcatcagacgatcacaggcagaggtggctctgagggcacccgagagatactaaccccaacgcctaccagggcacaggggctctggctgaacacaaaggtttaagatcatccgaaggcccctgagttgccaaaacacccaaatgacactgatgtgttgtggccgcaaaagctggggaggaaatgtgaaggaggcaggaaaaggacctatagatctccaacagaaaaaccagaagcagacaggggtaaccccagaggcatctgggtgggccctgggcaggctggaggagagcccacagcaaatagtctcagggcccttgcatagtgacatactcaccaccctcagcatcgaagggacccactgggtaaagagaagccatgttatcctgcccccacccagatcatagtcttccaactcaatgtcctggatgtatggcaggatggccacaggggtaggaggggattcagaccaggacccggagatgaggtgttaatgctgtcctagcgtgagtgcctgcgtggagcatggaggggtgggcaggcagggaaggaggcttcagaggtagacattgagggtctgcaggatgccccggcggcagagcgggcaattgcggtggtagacggggtggcgcatcaggatttcagtgcaggcctggcacaggcacagatgccggcagggcaggagcaacactgtcttgctctggtcctggcagatgacacacttcttccgctcctcttgctccttcagcaatttccaagggtcttgcccacctggaggctcctcctcattgagcctctctcggcccctgacaggtgtcactctgatggtcctggcctcctcctcttctgcctctgatctgcgccccgcttcaggaagagtgtcctgtctccgggtcctaactgagaataccctcatagggtcaccctggggagctccaggtgcccctccccggtttggccaactcgccagctgcagactgcggctccagactcggcgccaggcctctgagcccagtgctaggcgagagagccgcatgacatcctctcgaagacggtggtaggatggccgggcatggagctggctgagtgcctgggtagccagcctcagggtgaagtccggatgcaacacagtcaccgtcactgccagcacacaagctagcaacaccaagccagtgagattgacaagcacaaagctggccaggaggcgggcagctgaggccagcagctccagggctagttggcagggtgtccaaaggaggatggccatggccacagcactgctggaaatgtgggctaggaaggcagccactacgtctgtcatcctccacagaggcccggtcactgcatcccacagggccagcaccagggaaaagaggttctgagtgccgatgaggcagatgttgaccaggctgttgatcacataagccaccaggctcatggcaatggcacagatgtca

SEQ ID NO: 319598 - DNA, 458 bp, Homo Sapiens
atcttgtctcttttcatcgtgaatggtgtgatgctgacgagaatatcttatgctttcttcagcctgttgcaatctgagccaatgattttctttgcactgatcctttctactctggagagaagctcttttgacacagatcctgccccgtttaatagactccagctgctggcactgccttctgagttctttcacttccgaattcttatcgtcctgcagccccaccacagtcaatgactaagttcctctggactttcacatggatcgtaatagacaacttcatcctgtttttcttaccagaccctaaaatgtgcctccaagacagtcgtgggaacagtatggagccagcagcagaagccactcacgaaccaatggaggagaacaactcagaaacagacccaagtcaatctaaggtttaacttttataagtctttcaagagagtccaactgtgtagtaagca

SEQ ID NO: 319599 - DNA, 761 bp, Homo Sapiens
  misc_feature (27)..(27): n is a, c, g, or t
  misc_feature (153)..(214): n is a, c, g, or t
agagttgtttctttaaacaattctttnactctgttaacaaaggtatatatgttacttctgaaatgatctttattctcatgttatttataaaataatttgaatatttcttattttgaaaagctaattagatcatatcgtatatatgcatatagnnnnnnnnnnnnnnnnnnnnnnnnnnnnnnnnnnnnnnnnnnnnnnnnnnnnnnnnnnnnnntgacaggagttttagccttttatcttggtggctgatattagatattaacgttgctcttaagtgtacttaagcacactaaaacattgaacacaatatgtgtttgataacacaattatcaagggaactgaggataaaagcactcatctttgcatcacaatatgacattattagcatctgttaactttacaaacctgattcatttagttcttcatagccaccatcttgataatgaataaagaaaaaacaaatgatgtattttgtcactctattcatttttatctataaagatttaaaatacctttcttttgagttaggttggttttatggttggaagaaggaaaggaggtagacctttgaatgccttgattgctgcccatttctctaggcagtgaagaaaggcagctaaagtgctgtctctgattatcaaatgccatatatgtgagtatacctgtgttgtttgtcatgctgttgtgaatactcacttgcttttttatccactcatcttttttatccacgagctcctgcattaaagtagttagtaaccagt

SEQ ID NO: 319600 - DNA, 1034 bp, Homo Sapiens
atcatagagtcaataatgtattatacatcttagatttatacatttcatatatgcttttaaagcttcaattaacagttcaatacaaaatttaaaaacaaatatatgcagcagtggttctcaggcacagaactgaggaggagactggagcaagtcttttccctagcatacatacagtgaatactatgaaccatgagagtggtatgtttccttctgacctagctgcctttttgattgaattttgttacaatgaacagctttaataggtatgatattgctaactggaaacaatgagatttaaaaataaattgataacctgtattttcttgaagtctttaagacctaaaatgattacttttctcctaatagagctccagaatcatccaatgaaaataatattgtccataaagcatctagagtatctgcctaagaaccactgcccagggttattcaatgtcttcaggcctcacaggatgaggtaatggtatgatggatttcttctcagtatccctggaaagtgctttcctcatatcataagcgtcctcatcaggctccccgttgctggccgaatagtactctatgaccgtcctatatacactgtagcccaactgcttgtacatgttaactgcaacttggttagatactcttacaaagagatccacaaaaaatccaccctttctttctgaaatctcctctagtaactccataagtttagcagccaaaccaaggcgtcgaaattctggggcaacagacagagctgtgacgtgcccgtgccattcttccctagctactgagccttctgctttacccataatataacccattaattctccaccaggtgcctctgcaacaatgaaatactctggccagtgggcgaggtattgtaggtagaaaggaatcccataagtttctgtaagtggatccaagttaatgttgttgaagcggaacaggtcgtcgcaggtaaaggcccgtagcgtggtcatcgcgccgccgccgcttccgaagaccgttcgccaagaccccgcgcccgccctccc

SEQ ID NO: 319601 - DNA, 559 bp, Homo Sapiens
  misc_feature (295)..(358): n is a, c, g, or t
  misc_feature (360)..(368): n is a, c, g, or t
  misc_feature (448)..(501): n is a, c, g, or t
gtggatgcaagcattttgctgaggaaactgcatagcgttcccaggactctagggcccacgacccctcaaaagttaagagccgctgatctaatctaaccccactttcaccctcagttaacaaaagaggaaaactgaggcctgagagggtgtgacttgcctgaaatacctaacctggtgagtgatgggtggaaccagctcctaggctttctgcgcaggtgtccaggggacagagaagggtggtttaaactagagaggtggcaggcagaagtagatggatttgataactatttaggannnnnnnnnnnnnnnnnnnnnnnnnnnnnnnnnnnnnnnnnnnnnnnnnnnnnnnnnnnnnnnncnnnnnnnnnaaaaatggagacaatcttaacaatattgggtttgaaaagatttcttttttcttttctaaaggcagggtcttgctttcatnnnnnnnnnnnnnnnnnnnnnnnnnnnnnnnnnnnnnnnnnnnnnnnnnnnnnntgggctcaagagatcctctcacctcagcctcctgagtagctgagactacaggcacgtg

SEQ ID NO: 319602 - DNA, 879 bp, Homo Sapiens
  misc_feature (161)..(307): n is a, c, g, or t
  misc_feature (379)..(432): n is a, c, g, or t
  misc_feature (512)..(520): n is a, c, g, or t
  misc_feature (522)..(585): n is a, c, g, or t
agtcctacatcagatagaatttttacaaatattcgtcctagtctatggcttatcttttcatttttaatagtttcatgcattttgagaaacaaaagcgttttattttgatgaagttcaatttattgatttcttctatcatttacactttttgtgtcatattnnnnnnnnnnnnnnnnnnnnnnnnnnnnnnnnnnnnnnnnnnnnnnnnnnnnnnnnnnnnnnnnnnnnnnnnnnnnnnnnnnnnnnnnnnnnnnnnnnnnnnnnnnnnnnnnnnnnnnnnnnnnnnnnnnnnnnnnnnnnnnnnnnnctgtgtgtcgtggcacgtgcctgtagtctcagctactcaggaggctgaggtgagaggatctcttgagcccannnnnnnnnnnnnnnnnnnnnnnnnnnnnnnnnnnnnnnnnnnnnnnnnnnnnnatgaaagcaagaccctgcctttagaaaagaaaaaagaaatcttttcaaacccaatattgttaagattgtctccatttttnnnnnnnnngnnnnnnnnnnnnnnnnnnnnnnnnnnnnnnnnnnnnnnnnnnnnnnnnnnnnnnnnnnnnnnnntcctaaatagttatcaaatccatctacttctgcctgccacctctctagtttaaaccacccttctctgtcccctggacacctgcgcagaaagcctaggagctggttccacccatcactcaccaggttaggtatttcaggcaagtcacaccctctcaggcctcagttttcctcttttgttaactgagggtgaaagtggggttagattagatcagcggctcttaacttttgaggggtcgtgggccctagagtcctgggaacgctatgcagtttcctcagcaaaatgcttgcatccac

SEQ ID NO: 319603 - DNA, 828 bp, Homo Sapiens
  misc_feature (816)..(816): n is a, c, g, or t
gctcaaaacagggaaaattctgactagacaggctccacgataaccatgatcttgctgttcagctgcaggccaatgtcttcacctctatcaaaatttcctgtattcccactatgatcaacatcggctctggcctggcactgctaggcatggcgaccgtgctgtgtgacatcatagtcctctactgcatgaagaaaagactctactatcgggagaagaaatataaatatgtggaagattacgagcagggtcttgctagtgagctggaccagtgaggcctaccccacacctgggctctccacagccccatcaaagaacagagaggaggaggagggagaaatggccaccacatcaccccagagaaatttctggaatctgattgagtctccactccacaagcactcagggttccccagcagctcctgtgtgttgtgtgcaggatctgtttgcccactcggcccaggaggtcagcagtctgttcttggctgggtcaactctgcttttcccgcaacctggggttgtcgggggagcgctggcccgacgcagtggcactgctgtggctttcagggctggagctggctttgctcagaagcctcctgtctccagctctctccaggacaggcccagtcctctgaggcacggcggctctgttcaagcactttatgcggcaggggaggccgcctggctgcattcactagacttgtagcaggcctgggctgcaggcttccccccgaccattccctgcaccatgcggcagagctggcatttctcctcagagaagcgctgtgctaaggtgatcgaggaccagacattaaagcngtgattttttta

SEQ ID NO: 319604 - DNA, 1950 bp, Homo Sapiens
  misc_feature (1474)..(1488): n is a, c, g, or t
gctacgggactcaacgatgggcagatcaagatctgggaggtgcagacagggctcctgcttttgaatctttccggccaccaagatgtcgtgagagatctgagcttcacacccagtggcagtttgattttggtctccgcgtcacgggataagactcttcgcatctgggacctgaataaacacggtaaacagattcaagtgttatcgggccacctgcagtgggtttactgctgttccatctccccagactgcagcatgctgtgctctgcagctggagagaagtcggtctttctatggagcatgaggtcctacacgttaattcggaagctaagagggccatcaaagcagtgttgtctcttgtgacttctcccccgactctgccctgcttgtcacggcttcttacgataccaatgtgattatgtgggacccctacaccggcgaaaggctgaggtcactccagcatacccaggttgaccccgccatggatgacagtgacgtccacattagctcactgagatctgtgtgcttctctccggaaggcttgtaccttgccacggtggcagatgacagactcctcaggatctgggccctggaactgaaaactcccattgcatttgctcctatgaccaatgggctttgctgcacattttttccacatggtggagtcattgccacagggacaagagatggccacgtccagttctggacagctcctagggtcctgtcctcactgaagcacttatgccggaaagcccttcgaagtttcctaacaacttaccaagtcctagcactgccaatccccaagaaaatgaaagagttcctcacatacaggactttttaagcaacaccacatcttgtgcttctttgtagcagggtaaatcgtcctgtcaaagggagttgctggaataatgggccaaacatctggtcttgcattgaaatagcatttctttgggattgtgaatagaatgtagcaaaaccagattccagtgtactagtcatggatctttctctccctggcatgtgaaagtcagtcttagaggaagagattccacttgcacggcaacagagccttacgttaaatcttcagtccagttatgaacagcaagtgttgaactctttctgcttgttttgattcaaagtgcagttactgatgttgttttgattatgcaactaagtaggcctccagagcctctctagtggcagagcagctcacactccctccgctgggaacgatggcttctgcctagtacctatccttgtgtttctgatgcagtggtagcattggttcaagttctctcctgctgtggtcagagttgcttcgacgctggccaagtgcttttcttcttgtgctcccttctgacctgcaggacagttttcctggagccatctggtatgaggtattaatttagcttaactaaattacaggggactcacaggccgtgctcctgaccgatccatacactatcactggcttccnnnnnnnnnnnnnnncaccaatggtgcgcatgtgcaggaaatgacaaattcgtatgtcaaactatacaacgatgtattccttaaaccgcatgactattcagatggctactgagttatcacggggccatttattacccccctattttatttgcattttacccaaaacaatgtccgggaacacccgcgcctttttttgaccacccaaaaaccatagcacttaaagttgcacaacccgcaaaagaagcccttactcgggtaaagaattgcccgcacccccttaatttttaggcttgaataccctttttggtccccacctcctcccctttctgatagtttcaccccctattggggactaacccaccctgggttttccgcttctccctcccaagacgccagctcgctcttctttaaacccacccgcgttccccctttaaatgcccacggcagtctacctcaacccagaacaccctcactctc

SEQ ID NO: 319605 - DNA, 1017 bp, Homo Sapiens
  misc_feature (17)..(17): n is a, c, g, or t
  misc_feature (31)..(31): n is a, c, g, or t
  misc_feature (47)..(47): n is a, c, g, or t
  misc_feature (65)..(65): n is a, c, g, or t
tcatcggtgccacatcngccccattcctcancttcatcttccctgcnatctgtctacttccgatncatgcccacggagaaggagcctgcaagatccacccccaaaatcctggccctgtgttttgctatgcttggcttcttgctgatgaccatgagcttgagcttcatcatcattgactgggcctcagggaccagccggcatggaggaaaccactagggtgaccctcatcctgttctgtctactcaccctagcagccctgcccagactcttcagcccctgcttcccatccagtggccagtcgggggatgagaaagactcgattaacactgtgggcattcagccagggccccatgtcctctctgtggaaggtttttgttcaagagccaggaccaaagcccttgggccactaccctgctaggctctggagctgtagaggcttcctgaactgggagcagggtagggctgtcgccttagatcccgcccaagcccctcattccctccttgcacagatgcatacactggggcccagcagctgcctcctgaggtgacacagcctgtaggaacatacacagctgggatcagcctgcagccatcccccgaccctgctgctaggccacggtctgcgccctggggcctcatctcccccagcccacttgttttccccccttttattccctaggcccttttcaagactcctgggcccttggatactcttctcccatctcccttcacaggatgacaccctcccataccccatagctggggccagcaggttctgctgagggtggggctggtgtagggacccccaagagacccctgtcctgtcccttcaccagtcctggggaggctgggactccccctgccacaagcctgggccacagctcacattccactgctgggagaagaaacagccgagcccagagtggcctgcccccgggagccaaagaccccagtggccacactgggatagggtggggaggctggcagccctcttttataaatattatacataagacc

SEQ ID NO: 319606 - DNA, 695 bp, Homo Sapiens
tgtgccacttactagagatggatgacctagggcaaaatatttaacatcttttcttcatttgccacaaccataaaaatggaggggataatattattagttacaggtactgtcatgagacttaaaagagttgatctcacagctgtagccattacgaacttgaacttcttttaatttctcaaaagcatcaagcttaatctctcatctctgcttgcttctagcacatgcttttccctttgccagtaacattctcttctgccttttcttgcttccctttaggtcttcatttaaatgaaatgtgtagaaagccttccttgacctcctatgttacgtgaaagtgcctcctactatttgacctcaaaagttccctacgggaacagcacttaaatttgtctaagttcctgttcccctgctaggctctaagctccttagaggcagaggtcatgtctgtcttgataactactgtaatacctggggcctagcacagtactggttcacagtaggtgctggataaatatttttggaattaagttggaatgaaataagaagtcatattatgtagaaaggaaaccaaaaaaggatttccaagataaatctttcaatctgagtagaagtatatgcctctccacatttgaaatacataggagggcctcctctcatatattaggagtctcatcattgaacaggagaagtggcat

SEQ ID NO: 319607 - DNA, 685 bp, Homo Sapiens
gatggaattttgtagttgaaaaatacttcagagtttgtaaaagatagggttttctaaaatagattaataatattagtaatctaatagagattgtcccaatataggattttctaacccaatctaatagattttgaggaactgacttttatttctctaaagccttaattacttggggaaggtagagtggttgctagctgtgatgtcttgggagcagataggaaaaatgacttatttctcatctcagggaatagatgtgtgcttttgtgacatacttgattagggtctctgatttttagtcatttttcaaatggtggaaatggaggtccagagaaacttaagtgacttgctgaacttttgagattctgatctcattaaaattcatattgattcagcataaaataaagatggactgcatatttacttttcatggtactgacaagttctccagtcagtaccatgaaagtgtaaactgttgtaaactattgtaaggatgtactatgtacatcaatgtaaactattgtaacaatgtactacaactaggataaaattaggatttctattcccagtaattttcaattaggtcatgtgacaattaagtcttaatcactctttcttagacaaacacttgaaggatctactgtctaaattgctgaactcaggctattttgaaagtatcccagttccc

SEQ ID NO: 319608 - DNA, 487 bp, Homo Sapiens; identical to SEQ ID NO: 296534

SEQ ID NO: 319609 - DNA, 1261 bp, Homo Sapiens
  misc_feature (782)..(1201): n is a, c, g, or t
gaaacagcacaggaaaagtgactgctttaatgtattaggcaaaattttacataaaatcagaaatctatgatctgtccctgctccaatttgtaaaaaacgcaagattcatcagaagccacgtgcagttcagattcccagctggccggcggtgcagatctggagtccagcctcaggggatgcgctactttccattctctgcattgaacattcgttctgtcagcatccgctccagcttcactgcatcagcggcaaacttgcggatcccgtcagagagcttctccacagccatctggtcctcgttgtgcaaccaacggaaagacttctcatccaggtggattttttccaggtcactggcttgggccgccttggctgagagcacaggcaccagcttggcgttgtcctgcagcagctctcccaggagcttgggtgagatggtgaggaagtcacagccggccagtgctttgatctcgcccgtgttgcggaaggaggcgcccatgacaatggttttgtagctaaacttcttgtagtagttgtagattttagtgacactctttaccccagggtcttccaggggctcataggatttcttgtcggtgtttgccacatgccaatcaaggatgcgcccaacaaatggggagatgagggtcacacccgcctcggcacaggccacagcctgggcgaaggagaagagtaacgtcatgttgcagtggatgccgtgctgctcctcgagctcctttccagcctgaattccttcccaggttgatgacagctttataagaatnnnnnnnnnnnnnnnnnnnnnnnnnnnnnnnnnnnnnnnnnnnnnnnnnnnnnnnnnnnnnnnnnnnnnnnnnnnnnnnnnnnnnnnnnnnnnnnnnnnnnnnnnnnnnnnnnnnnnnnnnnnnnnnnnnnnnnnnnnnnnnnnnnnnnnnnnnnnnnnnnnnnnnnnnnnnnnnnnnnnnnnnnnnnnnnnnnnnnnnnnnnnnnnnnnnnnnnnnnnnnnnnnnnnnnnnnnnnnnnnnnnnnnnnnnnnnnnnnnnnnnnnnnnnnnnnnnnnnnnnnnnnnnnnnnnnnnnnnnnnnnnnnnnnnnnnnnnnnnnnnnnnnnnnnnnnnnnnnnnnnnnnnnnnnnnnnnnnnnnnnnnnnnnnnnnnnnnnnnnnnnnnnnnnnnnnnnnnnnnnnnnnnnnnnnnnnnnnnnnncctcgtgccgaattcgccacccagccttcggcgccggcgggtgacggcgcgtgcgtgcgg

SEQ ID NO: 319610 - DNA, 552 bp, Homo Sapiens
caggggaagtttttcgcccacagcccttgtggttccctctgtggggccacccaaggggaaggggctttttcattccgggggggtttttttcccagggcccttggctttgggccccccttgggttggggagcccccggcccccaggctgggggtggtgcctgccagcagcttcttccccagggagctttggggtgaggatggtgagggaagttcacagcccgcccagtggctttgatctccccccgtgttgcggaaggaggcgcccatgacaatggttttgtagctaaacttcttgtagtagttgtagattttagtgacactctttaccccagggtcttccaggggctcataggatttcttgtcggtgtttgccacatgccaatcaaggatgcgcccaacaaatggggagatgagggtcacacccgcctcggcacaggccacagcctgggcgaaggagaagagtaacgtcatgttgcagtggatgccgtgctgctcctcgagctcctttccagcctgaattccttcccaggttgatgacagctttataagaat

SEQ ID NO: 319611 - DNA, 574 bp, Homo Sapiens
  misc_feature (195)..(196): n is a, c, g, or t
  misc_feature (227)..(227): n is a, c, g, or t
  misc_feature (239)..(239): n is a, c, g, or t
  misc_feature (248)..(248): n is a, c, g, or t
  misc_feature (335)..(335): n is a, c, g, or t
  misc_feature (343)..(343): n is a, c, g, or t
  misc_feature (370)..(370): n is a, c, g, or t
  misc_feature (383)..(384): n is a, c, g, or t
cccacgggttcccacttgggcctttgggggccccggccccttggggtcttgaggaaagccaaccaggggcaaccccaggccttgggggccgtttggttcccttgccaagccaggcttcttcccccaagggaaggctttgggggttgaggaattgggtggaagggaaaggttcacccaggccccgggcccaagtgnncttttgaattccttcgccccccgttgtttgncggaaaagggangggccgccnccaatgaaccaaatggggtttttggtaaggcttaaaccttttctttgtagggtagttgtaggggatttttagtgacccactctttanccccccangggttcttcccaggggctcacataggnatttccttgtcgnngtgtttgcccccatgcccaatcaaggatgcgcccaacaaatggggagatgagggtcacacccgcctcggcacaggccacagcctgggcgaaggagaagagtaacgtcatgttgcagtggatgccgtgctgctcctcgagctcctttccagcctgaattccttcccaggttgatgacagctttataagaat

SEQ ID NO: 319612 - DNA, 614 bp, Homo Sapiens
tattcaattcagtaaatctttattgagctcccacggggtgcgtgaaatttaggatctataatttacataagtaggaaagtgttactttagcccccttttttaaaaaaaagcaaattacaatttctgtatatatttcaagtgaatcatttaatgtgagtgaggctcagttaggtgttaccataagtattaacagaagaaaaagggaaagcacaaacattttccctctaccagaaaagggtctgatgtaagataaactagcctgttggtttaacaatagctcattaaaaaggccagagaatctgggagaagatgtacttggaagcactgtcctctgagggcccattcccaagggacagcaaaatactgaaaaaaattaactggctcaaaaattatattgagagataaaaagagttagtcacagcttagaaaaaaattccagaataaatgacactagctagattagtaattctgatgtttccttgtcatagtactctgtgcgaaacagagggactacaaactggtgcccctttgaacagagtggttttaaataatagattctccagtgcaccaactgtattttcaagtataattctggtatttgtacctagaaatac

SEQ ID NO: 319613 - DNA, 1021 bp, Homo Sapiens
  misc_feature (45)..(45): n is a, c, g, or t
atgattaagcaggagggagacacaacacggaaatattgctgacantgctgaagcaggttgcttcttcagctgaccgggctcacttgctcaaaacacttccagtctggagagctgtgtctatttgtttcaacccaactgacctgccagccggttctgctagagcagacaggcctggccctggttcccagggtggcatccactcggctgtggcaggaggagctgcctcttctcttgacagtctgaagctcgcatccagacagtcgctcagtctgttcactgcattcaccttagtgcaacttagatctctcctgcaaaagtaaatgttgacaggcaaatttcatacccatgtcagattgaatgtatttaaatgtatgtatttaaggagaaccatgctcttgttctgttcctgttcggttccagacactggtttcttgctttgttttccctggctaacagtctagtgcaaaagattaagattttatctgggggaaagaaaagaattttttaaaaaattaaactaaagatgttttaagctaaagcctgaatttgggatggaagcaggacagacaccgtggacagcgctgtatttacagacacacccagtgcgtgaagaccaacaaagtcacggtcgtatctctagaaagctctaaagaccatgttggaaagagtctccagttactgaacagatgaaaaggagcctgtgagagggctgttaacattagcaaatattttttcccttgtttttttctttgttaaaaccaaactggttcacctgaatcatgaattgagaagaaataattttcatttctaaattaagtcccttttagtttgatcagacagcttgaatcagcatctcttcttccctgtcagcctgactcttcccttcccctctctcattccccatactccctattttcattccttttttaaaaaataatataagctacagaaaccaggtaagccctttatttccttaaatgttttgccagccacttaccaattgctaagtattgaatttcag

SEQ ID NO: 319614 - DNA, 733 bp, Homo Sapiens
  misc_feature (666)..(666): n is a, c, g, or t
  misc_feature (672)..(672): n is a, c, g, or t
  misc_feature (681)..(682): n is a, c, g, or t
  misc_feature (688)..(688): n is a, c, g, or t
  misc_feature (712)..(712): n is a, c, g, or t
cttttagaaatggagtaagaatgcttcaaataaaaaacgtaaaacccatcccatcccataaagggcccactcacgtaaacaggaagcttattaaaagaacttttcttggtttcctggcaaaatccagcttttattttggtggcagcatctattaaggaggagactcattttgtgggcaggatgaaaaattaaacattgcaaatccatcaggtacttgctggattagagttagttgactgacttgttggctacagggaacaaggtagttctgaaaccaaggaacaagctgccaaggaacagtccagccctgcccaaaagatgatgggtcttctccatccgggcaggcacaaatcaactcgagggttccaaggggggccagtagacgccagcctaccttactgtaaagtgtctcacatgcatatctaactgttctctcctttcctttacatttaaatcctgttgtattggcttctctgttttccctttcctggaagcgctgtagcgtaattaaaagagtatgagttttggaatttcaaaacttggtttatagtccagcctctgccaaatactgtgacatgttacctgcttgagccatcattttctgatatgtatattgggactaacaattcttccttaatcagctcaagtttcacaaaatatgggttnacatcncgtgactcnnaatcanctgaggcaaaaattcccatatctntgggcctctctcgaattttta

SEQ ID NO: 319615 - DNA, 480 bp, Homo Sapiens
acaattgggatactatttccatgctctggggatacctcttccacctttgacggtattgttgttgcattgcaaggcaactgaattttatataatttgtgtatgaccaggtgaagaaaacttctgtcctaccctcggaaagaaaggttggtgggccagaggtaaagctgctgttatgacttgtgcttctcaatcagaatttgctcttgtcatggcactaagcagataatccccccagaactgaacaacagctgctgaatacctttttttcttttggctatactagtaaattcacacccacagcctttcggcctaacacataacacttcccactgctgcagcttttgcagctttcgatttgcttatttcggcgcatggctggttgaaaagctgcatgaagatataaatatgttttcagagagaaaatgaatttaattataccctattctttttatgttgtctttcttctcccactttattttc

SEQ ID NO: 319616 - DNA, 913 bp, Homo Sapiens
gagtaatattgcatgaaaatgtccctatgttacatccattcagaagttttgttgttttactctaaagctgggaaaggaaatgagagggaaaagaccccggagagggaagaaaatctcagtattttgaaaattgagattacttcagagccttagccacacctaaaatacctcctagttaatagtggtataaatgcctcttcaatacgttttccagaatccaaagcattttggtttatccagggcccagggcagcacagctgtcaccaagcaggagagttaaggattcaccatgagctgggaaatgcttttgccatgagtatgagcaaattccctctttccctgaatcatggacattctagattaaaagaacatttttttgtgctcttaacaagaaaaccatggccctcctttgttcaagtatcagaagaaataaacccacagctccagagaaggtgaccattctcagaactccagctattcactctccagggagaaggacctcaaatcgccactctttgggcggcaggtgcggtccccacggccggctctacgaggaagagttctggctcttttgtccactgagatggtcttggtttttcacttaacaaattttttaatggaatctttgtttttgttctccatcttgtttgttagagtctctcggcctttatttacaaattccttgcaactagagcgctccttccccaagatatggtagtgagagtaatttttcattgtagctgtagtctccatcagtaacagcaggccctggaagacttgatcacctttttctgtgtcattttcagtcaaatgagggcctctcttacatcttgtttgctttcaaatccccaaatatcatctccatctcccaattaattttattctctctttcctctgtattcgctttctcctg

SEQ ID NO: 319617 - DNA, 1247 bp, Homo Sapiens
acacaacatcagccatcatcaaaaatagtgcccatgctgggaagaacaggattcctgaactagaaggtggtcttcaaaccatggcgtaccgatttatgtatattacagatagataaatttaagaggtctacatgaataaaaatctctcaaaggggaacgaattccattctgtcatgccaggtgtttgtcagaaccttgaaaacgaaggtggttttcagtggagcttgtattaaaaatagaaggtatttatacacaggccctgctcctctcatggccatgaaatcctctggtgttgtcaggacccctgggcaacctcagcacccctacgggtagcccatctgcagtctgcatcttccgggagagccggggactcgtaccggggctttttctcctgggtccccatctcggcttggcgacgcctccggacccaggggctgccagagggagtgacgctgctgtcagaggaataatccatacacttgcggaagatctcagggctggtgctgcagttcagtctaccttcctccgccagtggggactttctggaaacgcctttgcgttgggccaaggggctgctccaaggacttgtgcacggggaggcatttggactcagaaagagattctggtggccagacgggctgagcttgttggtggccgcgtgccgtcggcccgccataggggatgtggggttgctctcggggtcagaggagctgttggcagaagactcatcacccatgtactgaagctcctcgactctcttgttcagggacttgttcaggtggatgctcgcagtgggctcctcgtcatgatttttgtctttggcaggtttctttttgggtggcttcataccaatcaggacagctttcatgttctctttgccctgagattctgtgatcatgaactcatgggctttgatggctgcttccacctcctcgaactccacgactggcacactcctgggtccccacttggctgtagcggctgctgatcctccggatgtcagggggcagctctctcccaggtttgaggatccgcactgatgagatgactccaaaagtcccgaaaagcttgaggaggtgttccatcaccttctcttgcacccttccattcttctggggggtggccagagcccacagcttaggagacaagtagagatcatagaccaggagcatcttgctggggaggttctcgttggggaacagtgggacgggggtggtcctcctcacattccggtggtcctcattcaa

SEQ ID NO: 319618 - DNA, 838 bp, Homo Sapiens
  misc_feature (128)..(128): n is a, c, g, or t
  misc_feature (433)..(433): n is a, c, g, or t
  misc_feature (522)..(522): n is a, c, g, or t
  misc_feature (564)..(564): n is a, c, g, or t
  misc_feature (573)..(573): n is a, c, g, or t
atgtgtctttggtttggcacaggtggagcagacatgtgagatatagaatgaatgggaggccttcacacttactcactatgtggaaggtggtagttgatcatgatggtcagttccataggcctccaggnactggtgacacactaccactgttgccataattcttaaaagtcattttatgtggggctccttcctagcaacttcccttcaaacacatagctccgtcccttccaagagctaagaaatttttagcacttgccaccatctatttgttcatttgtttactgattacattcctcccattagtatataagctccgtgataataggaaactttgtccactattgtatatttctaactcctaaggacactattgggcgtattatagtatggcagtttaatacttggaataaatggggatttctgtttgttcttnactgaggtttgcaaagcttcatgaaagtggaatataaagattctcgttgttctgtgtgcattggggacatggaacggaacttgtgtttntctgagtgaggggagcctctggcagagagtcctacctgcaantccattatntccctgtgactgggcagaatttaaaaatttttaagagaagagatgaaaaatcttctggattcctacttaatttagacatgggtttggctcttaacggaaaactttaacctacctacagggaaggctttttcgctgttacccttacttctgtctcctggatcttatgagtggagaaatgagcctttgtttcacttacaaatccacaaatatttatgctgtcatatgaacacatgtataaggcgctgtgtcacattgtggaagatac

SEQ ID NO: 319619 - DNA, 712 bp, Homo Sapiens
  misc_feature (49)..(49): n is a, c, g, or t
  misc_feature (320)..(328): n is a, c, g, or t
  misc_feature (501)..(544): n is a, c, g, or t
gattccttctcccctggtttttgaggatccctgggtcttctgagactgnccaggagagggatggtggggccagtggttgtgtgaaagcaggaggggcagccctcctggacaagtgtgatccccctataaacggctctcaggaggttagtgagtaggagattctgccttgttctgatgagcctgtgcaggggctccaggggacattgctgtccagggggcacagaagggtggtgagtgtgatcaaatctagtctcactcccactttttagtctcactcctacttttgtccaccacccctgcctcctggatcttctcccacnnnnnnnnncagctttaggacctggggagatcctgtgagtcaaggcagacacccaatcctgcccccacactcggggtcctccaagaggttggggggcagagtcccagagcagccctttaccccaggtccaggccctggaatcctgagactcgcgtttccttggccagtggtaacacaggacnnnnnnnnnnnnnnnnnnnnnnnnnnnnnnnnnnnnnnnnnnnntttgctcatttctttagggaacttgggagtcggggttggaggtgctgggcaatggaacttcaaattcaatgtcgcccagcagtgaggggagtcgggaggtgaggcctgtaggccaaccaattggtggagtctcagcgatagcccaggtgagaagtggttcacccagag

SEQ ID NO: 319620 - DNA, 1065 bp, Homo Sapiens
aagtcctccattcagccttttttgtaagtgaggaaaaggaatgcagcaaagaagagttcgacatggagtccttagttccatcaggatcccatttcgcagcctttagcatcatgtagaagcaaactgcacctatggctgagataggtgcaatgacctaacaagattttgtgttttctagctgtccaggaaaagccatcttcagtcttgctgacagtcaaagagcaagtgaaaccatttccagcctaaactacataaaagcagccgaaccaatgattaaagacctctaaggctccataatcatcattaaatatgcccaaactcattgtgactttttattttatatacaggattaaaatcaacattaaatcatcttatttacatggccatcggtgctgaaattgagcattttaaatagtacagtaggctggtatacattaggaaatggactgcactggaggcaaatagaaaactaaagaaattagataggctggaaatgcttactttctgctctcattttctttcattttgtctgctgtctttttgaatgccaatactttcatttaaaatgttttgggagcacggcaacccaaaatgactgaacggtggtccaaaaatccaaaccaactgataattacttctcgaggtgataggaaaggcacaggaagttaggactttggctgaaatgatgaaaacacatgttcgccattttagggatcagcgccctcgactcctgccaactccggctcccaacgatgatcatgtttggatgtatttattgaattgtcctttgctgatgaggaatttttaaagtatttcatagaataagtcctttggtatgcagatgggttcatgcaggtaattttaggtatagcccatcttccatttcctaagcaccggatagttggaaggtgacgttgaatgaaaccatctttgcagtggtatctaataagggagttgatttcataacgaggtttcatctttccaaaggtcttggcattttctacaacagggggctggccgcaagcaactgttcctttcttgcacgtataggtgagatggtaattg

SEQ ID NO: 319621 - DNA, 802 bp, Homo Sapiens
  misc_feature (672)..(692): n is a, c, g, or t
tttccagttttggtgacaggtcaaaggagccaagggaaaacccttttccaggcctaaggttacataaaaagcagccgaacccaatgattaaaggacctttaagggctccataatcatcattaaaataggcccaaactcattgtgacttttatttttatatccgggattaaaatcaacattaaatcatcttatttacatgcccatcggtgctgaaattgagcattttaaatagtacagtaggctggtatacattaggaaatggactgcactggaggcaaatagaaaactaaagaaattagataggctggaaatgcttactttctgctctcattttctttcattttgtctgctgtctttttgaatgccaatactttcatttaaaatgttttgggagcacggcaacccaaaatgactgaacggtggtccaaaaatccaaaccaactgataattacttctcgaggtgataggaaaggcacaggaagttaggactttggctgaaatgatgaaaacacatgttcgccattttagggatcagcgcctcgactcctgccacctccggctccaacgatgatcatgtttggatgtatttattgaattgtcctttgctgatgaggaatttttaaagtatttcatagaataagtcctttgggtatgcagatgctacatggaagnnnnnnnnnnnnnnnnnnnnncacacaatattacttgctccataccctaaactgccgataccacagccgtaaaatgaaggtgtctagtagttgttatagcacggtagtccattctttctaaaggaccaccc

SEQ ID NO: 319622 - DNA, 977 bp, Homo Sapiens
  misc_feature (472)..(495): n is a, c, g, or t
  misc_feature (946)..(946): n is a, c, g, or t
gaaaaaacccggaattgggggaaaggagcaattgggggaagaaaaatgttcaaacccacataccattttcccccttaaccagggaaagaaaatgccccacacttatttttctatattaatccgctccattttcttaggaatggggcaaaacaccttttggttaaaaagctatatccttttcccactcttttcataataaacacttgatgcattctatccgtcacattatttaatcagggacaaagtacttatattatatgattccaaattgtgtgaggaaagtaaaaggctaacactgaaaaataactagcatactatgttcattttcaggtcttagggaaaataacatccaataaattaaaacagtatggcttacttcatttatttatgtatgcttcacagctgcagcatttcatacatgaacattcaaaactttataaaagattaaaatggttatatatacaaaatttcnnnnnnnnnnnnnnnnnnnnnnnnttgcatgtgttttaacaatcccccaccctccagagccctaggtctatatccgtatgaaatgcattgatcggtaaccttatgagttagtgttatgaaagccattaaaaagtagacctggttgagttaattattagcactttgacccctaaaaaatgttcctggttacagaaaagtcctccattcaggcctttcttgtaagtgaagaaaaaggaatgcagcaaagaagagttcgacattggagtccttagttccatcaggatcccattcgcagcctttagcatcatgtaggaaggcaaactgcacctatgggctgaggatagggtgcaatgacctacaaggattttgtgttttctaggctgtccaggggaaaggccatctttcaggtcttgctgacagtcaaaggggcaagtggaaacccttttccaggcctaaactacataaaggcaggccnaacccatggtttaagggccctttaggggtcc

SEQ ID NO: 319623 - DNA, 1099 bp, Homo Sapiens
  misc_feature (41)..(49): n is a, c, g, or t
  misc_feature (1032)..(1032): n is a, c, g, or t
caaaagcattattttggtgaaaatcccaatatatgagtttnnnnnnnnntcattaacatcattaacagtactttaaatcaattactccttttgcctgcaacagggtccagcaaagccttaccacctcaagcaaacccactatacctatctatgctcaagaagtagtttggctactgaagacatgctggtctcttccaagtctttcctcaggatccacacatcagacattcatctctattctccaaagagcacaccatggctgctgtgttcctctccttctcttcttcctcttttgataccttttctttatcttttagcttctccttatttagagtgaactggattggattagctgctggtcttgtccttaaataatacatcccagtcttcaaaccctgcttccagccgtagaagtgcatactagtgagtttgccatagttaggctcagcaatgtggatgttcaaagattggctttgatcaatgaaagcacctctctcagctgccatcttgagaacagttttctgagagatttcccacacagttttataaagttgcttcaggtcatcaggaatttctggtatgctctgaatagagccattgcatgcaataatctggtttttcatctcttcatgccataggccccgctcggtaagatctttcaataagtgaggatttacaatctgaaattctcctgacaagactctgcgagtatagatgttgctggtgtaaggttcaatggactcattattccccaggatctgagcagtggaagctgtaggcatcggggcaataagtaaactgtttcttataccatactttgcaatcttctccttgagaaccttccagtcccataggtctgtaggagtaacattccacatatcatactgaagaattcctttgctaactggagagccctcataggtttcgtatgggccctgctccttggcaaggtcacagctggcttccagagcaccataataaatagtttcaaagatctgcttattcagtaactgggcttctgcactctcaaanagggtatctcatcaggataaaagcatctgccagaccttgtaccccaattccaatggggcgatggcgt

SEQ ID NO: 319624 - DNA, 1386 bp, Homo Sapiens
  misc_feature (589)..(589): n is a, c, g, or t
ttatttttacaatacatttttcagaaataatctctaggtgaagctttttccttttatacacatatacaaaatttaaacagcaatatacacataatcacagtgaggacgttggcaaattcaccaatctgtagtgtaaatacaaactgcaaagcagccttccaagagaacaatgccacacagcaagcagagctggccaattcaatagcaaacaccaacatgtccctgcgaaaggggaacagtgcaagagaagcagcatgcgctttggatacaaacagcaatttatggctaatgggtgacaaaactgtggtaacagtgactctctcgctgctatgcataaagtcctaggacatctgtttgtctttataccactccacaaactcgtccaacaaaactggccatgctccatcttcatcatagttgctgaggtcaagattaattgttctgctaaactctaggacattgcaccactggtctttattaataactttgtattttgattgctctaagaattggtgaaaaactggaaaaaggggccagatttttcctaataacagtcccaacatgcacttggcagtgtttatgtcctagntgcgctggccttttcaggactggaaagctgaacagcactcacttactcctgctctgcaagggtgccagccagcagctcgcaatcactaacaccatcttcggcccgtgcaaagtcaaacgcatatctgtaaataagtttaaagtttgtagaatcatttaagaatgatcttaagtaatccaaagtattttctgagtttttctgttgtatcacattggagagaagtcattccttttaacccactcctgtagagtaaaataaccccatgttttgtgcatccaatttccaagttaggacaagcataactacgttttctggttcaacaccaatgtcttcacaaaatttctccatgccttcagggcctacaacatcatcagttcctgcatattcatagaaccattccaagcaccttttacttgaaaaggcttcttcttcagtctttattctagtcgaatcatattttctatacatgctatcatgtctacttttcttggcagataaatcatctccagaggcaggtcttctctttttccttggtggcatcactttattaaagcagtctgaagaactgcaagaccgcagacttcctgtttggtgatcgtcttggccaatgtcttctgttaggttcagcttattaagggtgtggtagatcttatgaatatttgccagtgttgagagatgagagttcagctgaaaattgacagcggcggcatccgagtgcattttcaggcagctcacacccggctcgccgcccaggctcccgcgctcgcctcgcggtccccccaccagctcactgcccc

SEQ ID NO: 319625 - DNA, 533 bp, Homo Sapiens
  misc_feature (482)..(493): n is a, c, g, or t
aaaaagcttaacattatgcatttattatattgtatagagccatattacacatgcttggtgcttcaaactgagttatcaatgtttttctggatgcaaagccatctgatgctggatgcggatgccttaaatactatatttctgcatctatgacctatgagctaaggaaaaaccaaggacaattccagaaatggcaaagaacacttaagaaaaagatgtacatgagacgaaatgctaagtccttgagccagggcctacagaagttaccagaaagcgaataaaaacagaatttttctcaccacctgttgataatagagcctcacatgtccgggtatggacaatgtagaaaaaagaggttgttccgtttggtactgatgcctttctcccctccgtgatgtgtgcggacattgtgcggcccccagagagagcagcagacagaacagagcacagcaaactgccccctcctcaacacatcccagtgctgnnnnnnnnnnnnacagcatctggttgtctcatgaaaagcggtcaatttgatc

SEQ ID NO: 319626 - DNA, 821 bp, Homo Sapiens
  misc_feature (31)..(31): n is a, c, g, or t
  misc_feature (58)..(58): n is a, c, g, or t
  misc_feature (85)..(179): n is a, c, g, or t
  misc_feature (653)..(675): n is a, c, g, or t
accaataacggcctgccctgccctttttttntccttaaactgttaattgttccataantagagatggtgtctcaactatgttacnnnnnnnnnnnnnnnnnnnnnnnnnnnnnnnnnnnnnnnnnnnnnnnnnnnnnnnnnnnnnnnnnnnnnnnnnnnnnnnnnnnnnnnnnnnnnnncggccatcctgcctttttgccaacctaagatgagttgcctcaagcagcaatagggtcttaaaatctacagacaagcccagcaatgaaaatcacggcttactgaagacagtaacagcttaaacctggaaaaccgtaaacaaaacatggtcactttcatcctttcgcacctgtctggtgatggtggtggtttttctaagagggtagagtattagaaaagttttgtggtctggtaaattttgggtccatggttacacggctgatttaaatcatatccccactctggaataccctgataacttgagagctaactgggtaaccactaacaccactgaattttcaaagctcggacagaaaagtcagctgaagtggttaatcatggtgttacaactagacatttagtcctgcttcaattcttgcagagctgaatcaactcaaggaactaaataaaaagaggaaggcaccgaggtaagggannnnnnnnnnnnnnnnnnnnnnnaaaacctctttgatagcagaaagctcagggctttcagggtggggaatttctaggaccctgccgggcagtcgtgggaggcttccttctcggcactgggacagggaccggacaccctctccataaccacctgggggagtagtcacacg

SEQ ID NO: 319627 - DNA, 652 bp, Homo Sapiens
actggcatcctgtacatttacttttaaaaaaggataacaaaaatgaatattaacaaaaatccgggacaacaatattttcaagcaacaaaaactggggtggggaagcttattctgaaggtacatttaaaactgaaataacaacttaatgaaaattaagaattgcatagcgctgtgaatttagccttcagcaaaacaaaacagaagctatttggtattgatacaaatccatctatttgatagttagtcatccaatattatgtacatattttatatactgaatgtcattttaagtcctgttttccaaactccatttttctgttgctgggtttttgttttttgacaagttaaacactttctggcactttctatgacagaatttcttctgaacatacatgaactgacattctcccaaagcgtcccttgtgagtggacgtgcctttctgctacatatcgttcatttgttacaaaatgaaataatccacagtgcgatgtgtctgggtccaccgtcacagcaacatccaggctaaaccaggctggaccaaaccttctcaggccagggttcttctgcctctctctcctccgctctccagagtcccaactttcagctggtaaagcttcagaaagcattaacaagcaccatggttaaagggct

SEQ ID NO: 319628 - DNA, 508 bp, Homo Sapiens
  misc_feature (44)..(55): n is a, c, g, or t
  misc_feature (214)..(214): n is a, c, g, or t
  misc_feature (309)..(309): n is a, c, g, or t
  misc_feature (453)..(453): n is a, c, g, or t
  misc_feature (478)..(478): n is a, c, g, or t
  misc_feature (492)..(492): n is a, c, g, or t
ttttttaactgtaaaatatttcatagttttaattctgaagccannnnnnnnnnnnactggcatcctgtacatttacttttaaaaaaggataacaaaaatgaatattaacaaaaatccgggacaacaatattttcaagcaacaaaaactggggtggggaagcttattctgaaggtacatttaaaactgaaataacaacttaatgaaaattaaganttgcatagcgctgtgaatttagccttcagcaaaacaaaacagaagctatttgggtattgatacaaatccatctatttgataggttaggtcatccnatattatggtaccatattttatatactggaatgttcattttaaggtccctggttttcccaaactcccatttttctggttgctgggggtttttggttttttgaccagggtttaaacactttctggggcactttctatggacaggntttcttccggaaccatacagggacnggacattctccccnaggcggcccctgtgag

SEQ ID NO: 319629 - DNA, 649 bp, Homo Sapiens
  misc_feature (36)..(36): n is a, c, g, or t
  misc_feature (45)..(45): n is a, c, g, or t
  misc_feature (55)..(55): n is a, c, g, or t
  misc_feature (73)..(73): n is a, c, g, or t
  misc_feature (81)..(81): n is a, c, g, or t
atcattccatttccccagtgggacaaccattttttngtaaacacntgtcagatgntaaaaatacggccttaanacattacngtcaccaaagtttataagcaataagatcagagagcaggagccgctgcagcacctctaacagtccagggctgaggcgctgaaggtgagtttccaggtgaggtccactctgcccggtctcgggccgcaccagggggctgctgtggcctgatagccgagtggaacaacgccacctacgtgcgatttagtgtctggaagattctagagatctgcagcatgacaggccccgtttctggatcattcatccactgggtgctgttcagtgggttctccagcatgtcttcaaatgctagcaatgttttcgggttggtcaggcccagctgcaccaccgggttatccaggatggcctgaaagagaggactgtcggggtcgatgcccttgtccagctcctccggagagggcttccggtcccccagcagccactcgcacgcggcattctgctggttgttgttcactctgagggcatctatcacctctttctcgtcgaaccccatctccatcagggaaatgacggcccgagcatcagcccgaaactcccttttcctccggatcataatcgacttcctgctcg

SEQ ID NO: 319630 - DNA, 943 bp, Homo Sapiens
  misc_feature (164)..(239): n is a, c, g, or t
atttgggtgggagagattccacaggccctatgttcactggccacaggattcttccttggagaacacggtattggccactgtttcccttaacctactggggcccgccggcgccaaaagagatggtttagaaaactttttcgagggccgagggcggccgacaaggnnnnnnnnnnnnnnnnnnnnnnnnnnnnnnnnnnnnnnnnnnnnnnnnnnnnnnnnnnnnnnnnnnnnnnnnnnnntaggaaaagggactttattaaagaaaagtcatctgtgagtgactagttaaattagcatgcttgacattaactctgggttgaaacctacctccgtcaaataacaagtggactctccaagcaaatgtctacacggcaattcaagcagcaactcaagagcccagaggagcactggagacgaggccatcactccacttcccagtgcgacaaccacttttttgtaaacacctgtcagatgctaaaaatacggccttacacactaccgtcaccaaagtttataagcaataagatcagagagcaggagcagctgcagcacctctaacagtccagggctgaggcgctgaaggtgagtttccaggtgaggtccactctgcccggtctcgggccgtcaccagggggctgctgtggcctgatagccgagtggaacaacgccacctacgtgcgatttagtgtctggaagattctagagatctgcagcatgacaggccccgtttctggatcattcatccactgggtgctgttcagtgggttctccagcatgtcttcaaatgctagcaatgttttcgggttggtcaggcccagctgcaccaccgggttatccaggatggccgcggcattctgctggttgttgttcactctgagggcatctatcacctctttctcgtcgaaccccatctccatcagggaaatgacggcccgagcatcag

SEQ ID NO: 319631 - DNA, 751 bp, Homo Sapiens
ggcagcagcaaatgagagattgtttgaggagacacaaatacggcaaaactctaccgggaagcagagaggtaagccgcggccacggcgacggccacaccggagggagggatgaggtgcataggggaggggcaccccaggcccaaagctgaatagtagatacatggctattagttttattcttctttaaagttacatcatcatatacacttttgtatgtacgtatctcacaataaaaataaaccattgccatcgaagaccctgacgagtagtaagagcaaaagcccaaaccacaccttgtcctcccgtgagttcctaagctgctggcgcagtctccaccccgctggccctcggaaagccactggcactggttttctgaggcctatgtcagggtcatcgcgcaggagacagtcacaccacgatcagaacctgacctgcgggccccacagtgacgtagcgggactacacccgcaggatgccaacctgcatggcaggacgtgctgccagcgcacggcgatcctcagcgctggatcctccgtcatcgcctccgcagcacctatttgtcctgcaagggaaccagccagcctccccgacccgagacttagcataaagaaggcgcacatacctagcaatgttttcgggttggtcaggcccagctgcaccaccgggttatccaggatggcctgaaagagaggactgtcggggtcgatgcccttgtccagctctccggagagggcttccggtcccccagcag

SEQ ID NO: 319632 - DNA, 687 bp, Homo Sapiens
  misc_feature (659)..(659): n is a, c, g, or t
tggaaacacagaggtgaggaggaggaatagtaattgtcaatgagcttttaataccaagatacaccccctgcccccaaagaagagtcctcttttagggaatcagaaccttcattgtcctagaagctgaaagattcttggaacattttagcttttactctcaacttgctgttctctttacattccttaagttagactttcgggtgtggcttctctctcaggggtaacatttacttccattttctagactgaaccaaaagtcttctgcagaatctcccaccgagtgtggtaagaaggaaggacaaaaggctttaggatataaatttcatgttacagagcatgtcattgtcaaaggaaatctgtggccctgagattttaagaacataaaatgtgacatttgatatttctccagcccagggaagtaagatggttagcaatggttgccttaatcaaatggtcccatttttaaccccaaaggaagtgcccacagcaagaggtttgtgtgatgcacttatgtcctccggtgaggaaagggggccacatatgaaaggccccttaggtcagatcctgagagtaggcacatttgagtgcagattcctggggccccaccttcaaaccttactaatttcttgaatcttctggggaattaggggccaggggantttgcccttttcttaccaaacttacccc

SEQ ID NO: 319633 - DNA, 1134 bp, Homo Sapiens
  misc_feature (76)..(181): n is a, c, g, or t
tgggctcaggtgattctcccacctcagccttccaagtagctgggactacaggcatgcaccacattgcctggctaannnnnnnnnnnnnnnnnnnnnnnnnnnnnnnnnnnnnnnnnnnnnnnnnnnnnnnnnnnnnnnnnnnnnnnnnnnnnnnnnnnnnnnnnnnnnnnnnnnnnnnnnntgagccactgcgcccagccttacttatttttaaatcagattttttaatcaactaaaacagctatgagttaagtacctgccctgcaaaaatttttagaaaaagttttaggattatgaaattaagaattattttccttaactggaacagttctaaaatttatctgatacttctctaacaagtgagtgatctcatgtaaccccagtttgtatcttaaaggctgcagcatagaattgagctgtataacagtgttagaactgtcaagtgataatcacagaacagtttgtatcggttttataattctcatgtcttgatcagatctgaaggaaataggcataccctccaacattctaaaaattatttatttttattaggatttgtttattaaagttccacgagctgctttatggtcagttgggctgagtagtagatatcttaaagacatgcagtgaaagtgaaccctgtcatatcatggtgcctctttcaaggttcctctgtaagttcctcatcttgcagaattatttcaataccaaggtatggttgaaccagctgtccagccttaactctatttagtgccccattactaatgttcttttaactggtttgtatgtgttttaactgtccagtgtttggattttacctcttgatagctccatttgtccctggtgctgcttttaaggatgtagggccatgtgatcaggtatcaagttgagtaggtacgcagttggcctggtgatgtatctgtgcctgttttatcttctcccagaagagctgctttggtatagttgtttacttggattcatacaaagaacgggcaagcatcttggaaagctttctgaagcttataagaaccctgaagggggtttggaaggggaacagtaacaaaggctgcctttaatgtctttgggtcccaaagcccttaaaatgaatgtttctggaaaaaactaaagtggatt

SEQ ID NO: 319634 - DNA, 683 bp, Homo Sapiens
  misc_feature (660)..(660): n is a, c, g, or t
atttgtagctattggaaataagattattttcttggtttattttctagattgtttgctcttggcatacagaaatgctgctgatttttatatgctgactttgcatcctgcaattttactaaacctcagttctaacagttttctggtagagtccttaggtttttctaaatttaagatactattgtctgcaaacaagggtaatctaaatttttccttccaatttggatgccttttcttttcttctcctgtttaattgctctggctaggacttccagtaccacgttgaagaaaggtggtgaaagtgggcttccttgccttcttccagatcttacaggaaaggcttttagattcccccctcatgatactagctgtgggtttatctgtctgtggcttttattgtgttgaggcatgttccttctacatccagttgagtttttatcatgaagggatgctgaattttactgaatacttttttggcatctatagaaatggacatatggttatgtccttcattcttttgatgtgatgtatcgcatttacagatctgaatatgtttttaaggtggttctcacattgctataaagaaatacctgagactgggcaatttatataaaaaaagagttcattggctcactattctgcaggctgtacagcaagcatganagcatctgccttggcttctggtg

SEQ ID NO: 319635 - DNA, 939 bp, Homo Sapiens
  misc_feature (881)..(881): n is a, c, g, or t
ccccccccaaaaaccacaatgtgggggggacctcttcccaatagggatttcccgaaaaggaaagatttttggtttggccaaaagactgttcctttaatagtaatatttgaaatgtctttcttcccagcaggaggtcttgggaaggttgatggaatccctccaccattcccccctggtaggatccttctgcaatgaggaggaactgagtggggactgaagggatccttacattcactgtatcaacagggctctctccaaaagtgactgctcatgtgttagttaagaaagagctgacaaaaaaaatgaaaagtttcctgacattctttgcattcgaaggacttcttcctacagtgtgggtcccattatgaatgataaaataacagtgggtaaaggccttgctgtattcattgcagcaatagggttctctcatgtatggaccctttggtgctgcagaaggtgtgacctgcgtttgaaggccttcccacactcgatacacttgtagggcatctccccagtgtggatgacagagtgctgaatgaggtacgtgctccggtgaaaggctttcccacactgggtgcattcatagggcttctccccagtgtgaatccgctggtgctgtatgagttctgagctgcatctgaaggcctttccacatgccatgcaatcatagggcttctctccagtgtggatgatgtaatgttgaattaggtgggctctattgctaaaggctttctcacattctttgcactcaaagggcttttctccagtgtgggtcctattatggcgaataaaagtagaccggtgggtgaaggcctttcgacattgactacactcatagggtttctctccagtgtggattggatggtgctgcatgaagtacnaactgcgtttgaaggccttcccacactcaaggcacttgtatggtttctcccccggtgt

SEQ ID NO: 319636 - DNA, 703 bp, Homo Sapiens
  misc_feature (187)..(202): n is a, c, g, or t
gtcattaaagcaaactctaaaccacagttgtaaagtattcaatttacctcaagtccaagctgcatctccctaagacactgttcccatcacagtagccattttaagccaatcttctttttacacacgggtagtttctgtagagaacatttttctcaggacgaaaatgcatcgagcatgcataagaaannnnnnnnnnnnnnnngcgcaaatacatttaagagtttctataggggtatcactgaagaaaataaaaccctgggatttatttgcttattaaaagcaccaatttaaaaaaatccctcaaaagcttatattgtggcaagaaaaatgaagtcactaactcaacaaaaaataaggtaactttcagagccaaaattatctttaattaggtattgttataatgcattttaaagtgaggctgagtttgcagaaaataaaaacaagacatcctcactgattagtaaactctacatcattattctacacaacagataactttctaagtacagctgattttactggcagagtattcaaacaaataaaatgctatcacttctgaatgactcccctttccctctgaaagtactctgctattcctacccaaacccacccttatgaattaactaccaagataatttgtttaaaagatatattttacaatgtttataaacaactagtatcaaattactagttttagtattaa

SEQ ID NO: 319637 - DNA, 997 bp, Homo Sapiens
  misc_feature (800)..(940): n is a, c, g, or t
cttagaaaacaattgtaaatgtaataagcaaaaaggatagaaaatgcccacaggggaaaaaaatgatcccatctggggtcagagccatcgtgtagattgattcattcttcttctagcattcttattcaggaaggaaaacttgaacattttctagattttaggatatttaagatttgcaaggaattgggggaaagggaaaaggaatgaaatttcagtcccactggcagggatcaaatagagattttctcaacttttaaaagaaccgttttacatgtcccaatcacctcatagttcctgagtctctcttctgcataaggcatgtactagttgttaagggaggatacaataaggtcatgattgctttaaaattattcataataaaaacacattttgagacttgattctaaatgttaaacttaaatttgagcaatttaattgcccgttgaataggaatgaaatcccaccggtaggcagttatttcttacaaccactgtgtgtgaaattgaaatcttaagataccatttcaaatattcaccttctctaaggaagttctccccaaagagttgtgaaagataagaaactgacccaaagtcatatgcagtaatctctttttctttacacactcaggtcaaagtagaagcatattattaaaaagaaacgttatgccctgaatttggctgttctgaggttacctcttggaacccaaggatatatttaatttaaaaactgacttgagccccatgcaaaactgtgacaaggaaagtaataatttatcagattaaataaaaacaagcagatgnnnnnnnnnnnnnnnnnnnnnnnnnnnnnnnnnnnnnnnnnnnnnnnnnnnnnnnnnnnnnnnnnnnnnnnnnnnnnnnnnnnnnnnnnnnnnnnnnnnnnnnnnnnnnnnnnnnnnnnnnnnnnnnnnnnnnnnnnnnnngtgtgggccaccgagcccggccaggatactggggagtttaaattcctgctgtgagcc

SEQ ID NO: 319638 - DNA, 722 bp, Homo Sapiens
  misc_feature (364)..(493): n is a, c, g, or t
  misc_feature (581)..(581): n is a, c, g, or t
  misc_feature (625)..(680): n is a, c, g, or t
aaagggaagagggttctgatattgaagatgaggacatggaagaacttcttaatgacacaagactcttgaaaaaacttaagaaaggcaaaataactgaagaagaatttgagaagggcttgttgacaactggcaaaagaacaatcaagacagtggatttagggatctcagatttggaagatgactgctgattccagtgccacagatgaacccacaaggacatagctgttccctaacttggtggatggctccagtttgcttttaacgaaaatcacaacttcaggagacatctgaaaagaatgatgtctctgaaagctgtcctttcagatgagggagaaatgaaggatttcacacttcagaatatttnnnnnnnnnnnnnnnnnnnnnnnnnnnnnnnnnnnnnnnnnnnnnnnnnnnnnnnnnnnnnnnnnnnnnnnnnnnnnnnnnnnnnnnnnnnnnnnnnnnnnnnnnnnnnnnnnnnnnnnnnnnnnnnnnntctcattaaaaacaacaaaacaaaacaattccagtcttggagtagtctaacagaagaaaatgtaaaattatttgagtgtaaataatanatgtcagtatttatcatgatgggtcacatatagacatatgttcnnnnnnnnnnnnnnnnnnnnnnnnnnnnnnnnnnnnnnnnnnnnnnnnnnnnnnnnagctcttttttctgaggctattttatagttatttttaaacat

SEQ ID NO: 319639 - DNA, 776 bp, Homo Sapiens
  misc_feature (309)..(317): n is a, c, g, or t
  misc_feature (444)..(495): n is a, c, g, or t
  misc_feature (504)..(667): n is a, c, g, or t
  misc_feature (691)..(691): n is a, c, g, or t
  misc_feature (741)..(741): n is a, c, g, or t
gggaatttatatcaggagtgtaagttactgaattttgttatttttcagaattcttgtgtgtttgattttctttatatgtttatatggattttaggaagagcttgtcaatttatattaaagaaaagctacattggaatttgcattgaatctgtagataaatttgttgggtattttgatcttcatattcagtattgctatatttgaatattgagtatatctcagtttattcagctctttgatttctttcagcattttaaataattttcagtgtatagtatgtgcagttattttgttaagttcatttctaannnnnnnnnctaggatactattaatgaaattttaatttaattcttattttgtttattcctataatataaaagtactatctaaccttgtatgttgatcttgtggcattgatgaacttctatattagctcaagtaggnnnnnnnnnnnnnnnnnnnnnnnnnnnnnnnnnnnnnnnnnnnnnnnnnnnngagacagannnnnnnnnnnnnnnnnnnnnnnnnnnnnnnnnnnnnnnnnnnnnnnnnnnnnnnnnnnnnnnnnnnnnnnnnnnnnnnnnnnnnnnnnnnnnnnnnnnnnnnnnnnnnnnnnnnnnnnnnnnnnnnnnnnnnnnnnnnnnnnnnnnnnnnnnnnnnnnnnnnnagggttttcaccatattagccagngatgggtctcgatctccctgaccctttgttatctggccccgcctcgaccntccaaaagtggctggggattacagggcgtgaagtc

SEQ ID NO: 319640 - DNA, 647 bp, Homo Sapiens; identical to SEQ ID NO: 121292

SEQ ID NO: 319641 - DNA, 634 bp, Homo Sapiens
ctgtctctctcacaggggtttggttttcagataggagttaggtatgagaacaagaagagagaaaacttggcgctgaccctgttatagtggttatagtggtgtccctaaagggaggaaatgatttcaggtaaccacagtgaaatgttaagctgaatgaagagttttatatgtatggtttaaacagagttgaaaagtgagattcctgaagtgttctttggctgtttaacaattatttgtatgagtgttttattaaaataacggctgctgtctttggtaacatagatgagggtggatttttaaatggctttgtatcgacccctttctacaataatggagtagtctatgttgctccatataaattacagaatgaaaatagatggggcaaaagtttgactaaactttacctttttatagtttcactttttaagttatatttagaatatattgatagattataaattgattgtgaaacttttttctgaattttttcaacatgttttactcagttacatgagttaaaggatattttcagtcctgttatcttcaattgcagtctttaaaaaaacccaccctattgttctacttgttatatgtctattcatacagtaaattcatttcaaggtttatgccagtg

SEQ ID NO: 319642 - DNA, 586 bp, Homo Sapiens
  misc_feature (484)..(484): n is a, c, g, or t
  misc_feature (489)..(489): n is a, c, g, or t
  misc_feature (498)..(498): n is a, c, g, or t
  misc_feature (500)..(500): n is a, c, g, or t
  misc_feature (507)..(507): n is a, c, g, or t
  misc_feature (516)..(516): n is a, c, g, or t
  misc_feature (519)..(519): n is a, c, g, or t
  misc_feature (534)..(534): n is a, c, g, or t
  misc_feature (545)..(545): n is a, c, g, or t
  misc_feature (552)..(552): n is a, c, g, or t
taatataaaaataaaactttattctgtctcatcaaaagctaccagctgctgaagcaaacatgaagggtggcgggggggcagggattctagggccccagagtaagtagaccacactgagtcccttttggtcctcctgcctggatagtgctgagtggaaggggaggagctgggacccaaaggtcttggcttaggtgtgggagcagagaacatgagacctcattatggtcctaaatctccaaaggctctactggacaaacaagcttgatgttaagagagaggggaatgagtgacattgagaaacaagatcacccttgaagagctgtctgctggagagcatacacacgatcctggagctgggcctcttcctgatgcctttccagggcttgcagccctgactgctgcaggaagacctgaacagcctctggctgatacaggaacagcagatgcagcagctccaaactccggcctactacttcagtgtcanaaaangctaatgtntncaacaangcggggaancangggccctggccacancccgctggcantaaacangacccttttctgcaacattgcacccaaactgtga

SEQ ID NO: 319643 - DNA, 693 bp, Homo Sapiens
gtatgaatattcacagagatattcatcgtggcattactgattgtactgaatatgcgggaaaccattaaatggaccaacattgtgttgtggttataaaatcttggtgccattggagccggaggcagaaggaaaaaatcagtaatactgatttggtatttatttaaaaatttgatattttgctcttcatggaccttgcataaatttgatttttaaaaatactgtgttaaaatattatcttcattactgaggtttttggtgcccccttaattttgtacctgaggcatgtgcctcactcacctcatcccagtcacatctctgtgtaatgtgttatgtttcttaaataatacatatttgtattttcaaacttgagtaatgtgccgacacctccccatcacaaaaaaaggagatatatctgagatactccagaattccaagaataagtgatcttgcagagtttttgcatgtttcaatatgataaacaatatattaaaataaaagttaaatctattatgtaatgattttagaatgcaattgtataattgtaaaaagcaaacagcactgaaaggttgtagtagaactcagttatatggtggttactcatgacttaaaatacgtgtatatgcacatagaaatcattgaaataaaaacaaaatttaaacagcattcttttagaattttcagactatgtagacc

SEQ ID NO: 319644 - DNA, 381 bp, Homo Sapiens
  misc_feature (71)..(84): n is a, c, g, or t
aaagccaattaaaagatccagacataggagaaaaccctgaatagaaacaaaacttttgaatgctggattcnnnnnnnnnnnnnngttatctggacagcttctttgagactatttaaaaactggtacaacaggtctctacaacgccaagatctaactaagctttaaaaggtcaagaagttttatggctgacaaaggactcgcgcaacgcagaaggcctttcccaccttaagcttccggggatctgggaattttacccccattctcttctgtttgtctgagtctcatctctctgcaagcaagggctgaaatcattttgtttggttgttttgagggagagaggcggggtgggggggtgcaaatctgccagttcctgtgccgaat

SEQ ID NO: 319645 - DNA, 664 bp, Homo Sapiens
  misc_feature (578)..(600): n is a, c, g, or t
tgtgtattggggaaaatagctaaaagtctaatttttacccatttagactttgttatttccttgtataaagtgacaaatcggggctcttgtatcagtgccagctgtaatgtttttaaatgcagtggctgccttctattgtcttcctatttttgataatgcagattgttgggaaatctgtaaggaagtaactgattccaggcaaattgttttcttccttctacccaccccaacccctacccatcaccttttaagaacatagtacgccagtgtaacgtgggaaccattgagattgtatttgccctgagtattaaagctagcttagcaaaatacttttaaaaacatattggtaaatgatacccataaaattaaattagttatattttattttaaaatgcaaaatacattgatatttattaatcattggatttagggaaagggacagatttttggtgaacctgacttgtggcagatggtaaggaatattataaaacatttggatgagaacaatcagggcgaactgcatttttctgttacactggtaatcatttgaaaattgatttacctcagtgtttaacagnnnnnnnnnnnnnnnnnnnnnnnaaataataactaattgtcgagcactgatagagatgcagattttggtggggggaggtggtggggg

SEQ ID NO: 319646 - DNA, 585 bp, Homo Sapiens
acacctggtccccacaaggccctcaaacccctgagtcctctaccaggagatcctgtatatgggaactgattttggcccagctccctctgcccactccgccaagcagagcggatgtctcagatcaagagactcctcagtgagaagaagacctgccagtgccctcaccggtttcagaagacatgtagccccatttgaggcacgaggccaggcagatcccacttgcagcctccccaggtgtctgccccgcgtttcctgcctgcggaccagatgaatgtagcagatcccaggcctctggcctcctgttcgcctcctctacaatttgccattgtttctcctgggttaggccccggcttcactggttgagtgttgctctctagtttccagaggcttaatcacaccgtcctccacgccatttccttttccttcaagcctagcccttctctcattatttctctctgaccctctccccactgctcatttggatcccaggggagtgttcagggccagccctggctggcatggagggtgaggctgggtgtctggaagcatggagcatgggactgttcttttacaagacaggaccct

SEQ ID NO: 319647 - DNA, 1481 bp, Homo Sapiens
taggtagcgaggcctgggtggcgaattcggcacgagggccatctgcctcttctgggccatgataggctggctgagccaggacaccaaggcagagcccttggaccccgaagccgacagccacgtggaggtcttcggggatgagccagagcagcagttgtcacccattttccgcaatgccagtggccagtcatggttctcgccacccgccagcccctttgggcaatcttctgtgcagactatccagcccaagagggactcctgagctgcccacatggcctaagatgtgggtcctggatccttcccccttctcaccataaccccctctcagtgtttccccaacttctcccttttagcagggtccctttagagcccaactccaggtcaaatctggagctcaaatcccagtgctccctccccaggagtggggccccaactcttccaagataccagcattcctcaagtcctcccaaaacttcctacccacaccctcttcccaaggccctcaggggcagaaaacatctccttcaacccgtccccactccttcctctgcatgaccttgggcaaacccttgccctttcaagccatcagctcctgcctctctgccatgagggctttggatcagattcctcttctcgccaggatgaggacacgcactgccctccatagacacagatgaagggggtgggggtcattcagctcgaatgggtcccagatgctcacttggcctttccctgcaggatgagtgaagacgtttgcctctcacagtgtgtcttctacctgcattttggcatcagagccccccagcccacccaccacaggcaattactagccctagttgataggtgaggtgggtgaagaaggctggaggtgacatgtccgaggtcacacaacaaagcagcatgcaggaactagaaacacatcttcagcctcctcctgggccagctcttgtgctacaggtggggcggagccagcccctcaccttcctggttccctgagggtcctcagggtggaggacaggtttggcccagaaagactagccagaagcctgatggtcccaggtggctctggatatactttggatatggatttaaatggtctctaagagccgggggtagggggcaggaaaagtgggttgtctttgcccctcaaagtccacctacctagaaaccaagcccacggtcttggccgtgaccctgataataaatgggctctctcagaggcgccagcccctccctccccagccggaggcgtcatctctcttctgtaccactagagggagctctgatgcagctggagagcagcgctcataggtctcgcccctcccctccctaatccttaccttcagtctcccccagcctgaaagcccctccctagggaatccctcaagcggccccccaccaagggcacacccctactgtccttagtgcctcacagcccccctcctcatcctggacccctttcatcccaccgtcccctgcat

SEQ ID NO: 319648 - DNA, 760 bp, Homo Sapiens
  misc_feature (709)..(709): n is a, c, g, or t
gagatccatcagttcaacagggatgtggaggacgagatcttgtgggttggagagaggatgcctttggcaacttccacggatcatggccacaacctccagactgtgcagctgttaataaagaaaaatcagaccctccagaaagaaatccaggggcaccagcctcgcattgacgacatctttgagaggagccaaaacatcgtcactgacagcagcagcctcagcgctgaggccatcagacagaggcttgccgacctgaagcagctgtggggtctcctcattgaggagacagagaaacgccacaggcggctggaggaggcgcacaggtcccagcagtactactttgacgctgctgaggccgaagcctggatgagcgagcaggagctgtacatgatgtcagaggagaaggccaaggatgagcagagtgctgtctccatgttgaagaagcaccagatcttagaacaagctgtggaggactatgcagagaccgtgcatcagctctccaagaccagccgggccctggtggccgacagccatcctgaaagtgagcgcattagcatgcggcagtccaaagtggataaactgtacgctggtctgaaagaccttgctgaagagagaagaggcaagctggatgagagacacaggttattccagctcaaccgggaggtggacgacctggagcagtggatcgctgagagggaggtggtcgcanggtcccatgaactgggacaggactatgagcatgtcacgatgttacaagaac

SEQ ID NO: 319649 - DNA, 931 bp, Homo Sapiens
cctttttttaagatttttcaggtacccctcactaaaggcaccgaaggcttaaagtaggacaaccatggagccttcctgtggcaggagagacaacaaagcgctattatcctaaggtcaagagaagtgtcagcctcacctgatttttattagtaatgaggacttgcctcaactccctctttctggagtgaagcatccgaagaatgcttgaagtacccctgggcttctcttaacatttaagcaagctgtttttatagcagctcttaataataaagcccaaatctcaagcggtgcttgaaggggagggaaagggggaaagcgggcaaccacttttccctagcttttccagaagcctgttaaaagcaaggtctccccacaagcaacttctctgccacatcgccaccccgtgccttttgatctagcacagacccttcacccctcacctcgatgcagccagtagcttggatccttgtgggcatgatccataatcggtttcaaggtaacgatggtgtcgaggtctttggtgggttgaactatgttagaaaaggccattaatttgcctgcaaattgttaacagaagggtattaaaaccacagctaagtagctctattataatacttatccagtgactaaaaccaacttaaaccagtaagtggagaaataacatgttcaagaactgtaatgctgggtgggaacatgtaacttgtagactggagaagataggcatttgagtggctgagagggcttttgggtgggaatgcaaaaattctctgctaagactttttcaggtgaacataacagacttggccaagctagcatcttagcggaagctgatctccaatgctcttcagtagggtcatgaaggtttttcttttcctgagaaaacaacacgtattgttttctcaggttttgctttttggcctttttctagctt

SEQ ID NO: 319650 - DNA, 443 bp, Homo Sapiens
  misc_feature (30)..(30): n is a, c, g, or t
  misc_feature (62)..(62): n is a, c, g, or t
aaaaccccaaaccaactggctgccatcgangtgaaggggtgaaagggtcctgtgccctagantcaaaaaggccacggggtggcggatgtgggccagaaaaagttgccttgtggggagacccttgccttttaaacaggcttcctggaaaagcctagggaaaagtggttgcccgctttccccctttccctcccctttcaagcaccgcttgagatttgggctttattattaagagctgctataaaaacagcttgcttaaatgttaagagaagcccaggggtacttcaagcatttcttcggatgcttcactccagaaagagggagttgaggcaagtcctcattactaataaaaatcaggtgaggctgacacttctcttgaccttaggataatagcgctttgttgtctctcctgccacaggaaggctccatggttgtcctactttaag

SEQ ID NO: 319651 - DNA, 435 bp, Homo Sapiens
taagggagaaaaaggccaaaaagcaaaacctgagaaaacaatacgtgttgttttctcaggaaaagaaaaaccttcatgaccctactgaagagcattggagatcagcttccgctaagatgctagcttggccaagtctgttatgttcacctgaaaaagtcttagcagagaatttttgcattcccacccaaaagccctctcagccactcaaatgcctatcttctccagtctacaagttacatgttcccacccagcattacagttcttgaacatgttatttctccacttactgggtttaagttgggttttaggtcactgggataaggtattataataggggctacttaggctgtggggtttttaaataccccttctgtttaaccaatttggcagggcaaatttaatggggcctttttcttaaccatagggttccacccc

SEQ ID NO: 319652 - DNA, 797 bp, Homo Sapiens
  misc_feature (35)..(35): n is a, c, g, or t
  misc_feature (50)..(50): n is a, c, g, or t
  misc_feature (77)..(77): n is a, c, g, or t
  misc_feature (523)..(523): n is a, c, g, or t
taggttgaaggcagaaattacttaaatcccattcngacatctttatgctntgagttttaagagaagttttctttaanacaagtagtctgttcctatcttacagataatgtgactcttgtgatgttttcctttggccaccaggaatccctgagccaaatgttacaggccaaatctagcaactggattgaacttaaagattcagtgatgatatctgaagagtcttagcgtttgtgtcgtgtttcctaaaacaaagactccatcataagccatgtgaattcctacttcaggacggacaagagtcagaagtggtaatacagggaatggcataagtgattttcccttgacactacagatgcgttctgaaccatattttatgacacctgacaaagcagaatttgtcaagccttgtttaagagtcccagttggagcacccagttggaaaccccatttgccattcaattacccataactgtcaatagtgttgattttacaatgtgtggttttgaaatagatctgcacaaanttctggtgccaggcaccaagaaatggaaatcaaaataaatctgaggttatatgaaataaatatgcaatagcaaaaacaagttttttaaataactgcctttgccttttgttttaattcatctaacttaatttcaggggcagaaaaacaagtcaagtttacaatgactttcaggctgttagaccctaatactctaagttgtttttttccaggattttgcttttcattcaacaacaaattgtttagcaactaataactggtctgaattctttctgcc

SEQ ID NO: 319653 - DNA, 765 bp, Homo Sapiens
  misc_feature (695)..(695): n is a, c, g, or t
  misc_feature (703)..(703): n is a, c, g, or t
  misc_feature (747)..(747): n is a, c, g, or t
actgataaaagaactctgctaaaccaagagtgtgggaaatatgtacaactttgttgtgtcaggaattgaggagccgaaagaaaaagtagatggggaatggcaaaggtttgtcctgtgaggtggataattaaggctagaagaaatcctttggagagatctgcgcttggcagataacatcatctcaaattttcttatgttgcaactaaataagaaagttcctatttcaactatcttagagttgtgtaagaatgtatacaaatatttgatatttcccttcggtatataatgagatgagtaataataatttctatatttctcctaattacaaatttgtatattaaagttataatgcgcacttagaaatgaaccaatacaaaactgggaaattccacagtgtatcataaacactcaagtaactatgatgaagggcaagacaaggaacacctaaaacaggctagatccacctccattccactttccaagtccctaaacccttcttcgcatctcctgatataagcaatatccataatttataatggttatttcctcaattttcttcatactttaccaactaggtatgcaaccctaaactccatcgcttggtctagcctactttgaacgctgtataggtgcaatcctacatgttcctcttgtttgtggcttcctgaactcaacattatgtttctgaaatttantcccatanttgcaagcacatgtgattttttttcacttctctatattgttccnttgcatgggaattactgt

SEQ ID NO: 319654 - DNA, 805 bp, Homo Sapiens
  misc_feature (28)..(28): n is a, c, g, or t
  misc_feature (44)..(44): n is a, c, g, or t
  misc_feature (232)..(367): n is a, c, g, or t
  misc_feature (398)..(414): n is a, c, g, or t
  misc_feature (482)..(667): n is a, c, g, or t
  misc_feature (672)..(672): n is a, c, g, or t
  misc_feature (674)..(674): n is a, c, g, or t
  misc_feature (687)..(687): n is a, c, g, or t
  misc_feature (708)..(708): n is a, c, g, or t
  misc_feature (728)..(728): n is a, c, g, or t
  misc_feature (740)..(740): n is a, c, g, or t
  misc_feature (749)..(750): n is a, c, g, or t
  misc_feature (794)..(794): n is a, c, g, or t
tttccccccttcccttcaccccttaccncccgatccaaaatacnagccccaaccacaataaactgtgttctttaatttaaaggaaagtggcagacttgatacctgctgaatatttcgtgtagacagagtatgacaatgaatgagatccccagtcattgcccttgtaagcctgggaacccagtttagtgggagagactaatgtaaacagctttaatcaaaagtatatcaattnnnnnnnnnnnnnnnnnnnnnnnnnnnnnnnnnnnnnnnnnnnnnnnnnnnnnnnnnnnnnnnnnnnnnnnnnnnnnnnnnnnnnnnnnnnnnnnnnnnnnnnnnnnnnnnnnnnnnnnnnnnnnnnnnnnnnnnnaggcatatcaatttatggttatcaaataggnnnnnnnnnnnnnnnnngagactgagtgtcgctctatagcccaggctggagtgtagtgctcattgcgacttccgcctcctgggtnnnnnnnnnnnnnnnnnnnnnnnnnnnnnnnnnnnnnnnnnnnnnnnnnnnnnnnnnnnnnnnnnnnnnnnnnnnnnnnnnnnnnnnnnnnnnnnnnnnnnnnnnnnnnnnnnnnnnnnnnnnnnnnnnnnnnnnnnnnnnnnnnnnnnnnnnnnnnnnnnnnnnnnnnnnnnnnnnnnnnnnnnngtgtnanccactgtgctggnctcaaataatttttatcaaanctacttccattaatggttancaaggcttaaanactaattcnntgctttattttgacacttgttccccacatgttgctttttttccngtgtcctatgg

SEQ ID NO: 319655 - DNA, 1128 bp, Homo Sapiens
gccgcacccgcgacgtccccctccacatcacaatcaatgaaggaggcctgggtggcgaattcggcacgaggcttctttctcgacaagatggccacaccggcggtaccagtaagtgctcctccggccacgccaaccccagtcccggcggcggccccagcctcagttccagcgccaacgccagcaccggctgcggctccggttcccgctgcggctccagcctcatcctcagaccctgcggcagcagcggctgcaactgcggctcctggccagaccccggcctcagcgcaagctccagcgcagaccccagcgcccgctctgcctggtcctgctcttccagggcccttccccggcggccgcgtggtcaggctgcacccagtcattttggcctccattgtggacagctacgagagacgcaacgagggtgctgcccgagttatcgggaccctgttgggaactgtcgacaaacactcagtggaggtcaccaattgcttttcagtgccgcacaatgagtcagaagatgaagtggctgttgacatggaatttgctaagaatatgtatgaactgcataaaaaagtttctccaaatgagctcatcctgggctggtacgctacgggccatgacatcacagagcactctgtgctgatccatgagtactacagccgagaggcccccaaccccatccacctcactgtggacacaagtctccagaacgggcgcatgagcatcaaagcctacgtccgcactttaatggggagtccctggggagaccatgggagtgatgttcacgcctctgacagtgaaatacgcgtactacgacactgaacgcatcggagttgacctgatcatgaagacctgccttagccccaacagaagtgattggactctcaagtgacttgcaacaaagtagaggggcatcagctcgcatccaggatgccctgagtacagtggtgcaatatgcaaaaggagtactggcctggaaagggggcacctgaaataactggggggcccttccctgaagagccggggttaccaagtacccaaaaatagtcccccaaggacttttgaaaccctggtcaacggccaacttccggggacctttttgaggggggacccaacccgggcccaccc

SEQ ID NO: 319656 - DNA, 1265 bp, Homo Sapiens
tttttttgttaaatttacaaaaggtaggctccgtttattagagtcacacacaactgactatctcagtgtgactcaagaccacaaaaaacccatttctccttcacttctgagtcctggggttaatacctagaccagcaagtgtactgcttggggtccattcacaggtttacaagtttttcattgagtgcaatctgtgactgtgtgaggttggccaggtaggtcaccatcaaaaggtcattgatgttgctgttgagcatggtctcaaagtcatcgggaactattttcggtacttggttaaccaggctcatcaggaagcggcccacagtattgtcagctgacacctttccagacagtacatcctctgcatattgcaacactgtactcagggcatcctggatgcgagctgatgcccctcctacttgctgcaagtcacttgagagtccaatcactctgttggggctaaagcaggtcttcatgatcaggtcaactccgatgcgttcagtgtcgtagtacgcgtatttcactgtcagaggcgtgaacatcactcccatggtcctcccagggactcccattaaagtgctgacgtaggctttgatgctcatgcggccgttctggagacttgtgtccacagtgaggtggatggggttgggggcctctcggctgtagtactcatggatcagcacagagtgctctgtgatgtcatggcccgtagcgtaccagcccaggatgagctcatttggagaaacttttttatgcagttcatacatattcttagcaaattccatgtcaacagccacttcatcttctgactcattgtgcggcactgaaaagcaattggtgacctccactgagtgtttgtcgacagttcccaacagggtcccgataactcgggcagcaccctcgttgcgtctctcgtagctgtccacaatggaggccaaaatgactgggtgcagcctgaccacgcggccgccggggaagggccctggaagagcaggaccaggcagagcgggcgctggggtctgcgctggagcttgcgctgaggccggggtctggccaggagccgcagttgcagccgctgctgccgcagggtctgaggatgaggctggagccgcagcgggaaccggagccgcagccggtgctggcgttggcgctggaactgaggctggggccgccgccgggactggggttggcgtggccggaggagcacttactggtaccgccggtgggcctcgtccgaatcgccacccaggcctcgctacctagga

SEQ ID NO: 319657 - DNA, 898 bp, Homo Sapiens
gggcttctttctcgacaagatggccacaccggcggtaccagtaagtgctcctccggccacgccaaccccagtcccggcggcggccccagcctcagttccagcgccaacgccagcaccggctgcggctccggttctcgctgcggctccagcctcatcctcagaccctgcggcagcagcggctgcaactgcggctcctggccagaccccggcctcagcgcaagctccagcgcagaccccagcgcccggtctgcctggtcctgctcttccagggcccttccccggcggccgcgtggtcaggctgcacccagtcattttggcctccattgtggacagctacgagagacgcaacgagggtgctgcccgagttatcgggaccctgttgggaactgtcgacaaacactcagtggaggtcaccaattgcttttcagtgccgcacaatgagtcagaagatgaagtggctgttgacatggaatttgctaagaatatgtatgaactgcataaaaaagtttctccaaatgagctcatcctgggctggtacgctacgggcccatgacatcacagagcactctgtgctgatccatgagtactacagccgagaggcccccaaaccccatcccacctcactgggggaaccaagtctccagaccggccggcattgagcatccaagccctacgtccgccacttttatgggaagcccctggggaaggaaccttgggagtgatgttccccccctcggaaagtgaaaaaaccccgttactacgaacactggaacgcatctggagttgaactggatccttgaaaaaccggttttaacccccaaccaaaggaattggaccccttcaggggacttcgcaacaaataagaaggggaatccgtttccgcatcccgaatggccgt

SEQ ID NO: 319658 - DNA, 2298 bp, Homo Sapiens; identical to SEQ ID NO: 121080
  misc_feature (133)..(133): n is a, c, g, or t
  misc_feature (760)..(848): n is a, c, g, or t

SEQ ID NO: 319659 - DNA, 273 bp, Homo Sapiens
actgagttctttagcttaaattttactgtttgttacattagtcttgcaagttaattttaggagacaagagaagaactatttggtgagtgctgccattatgagaaacactgttaaaaagccagctagcagctcctgctctgaccaattttaaatttgttaagaaaagaattggtaaaaggtgaagtcaggaaatgacgagcaggtacatcctagatccttcacccctagaatacatttcagcccagtgatctcaaaaacagtccctacccagcc

SEQ ID NO: 319660 - DNA, 638 bp, Homo Sapiens
tcttatgttaaagaatggcacaaaattaagctaaccagcttgaattacattttctttacttccagaattgtcctggaaaaagcagtaaattcgacctctcctcagctacttgctcttcatagaaactggcctcagtcaaatgcacaaaggctcttcctcctggaaaccagtactgtgagcctcaccacccagggcttttagccagcactcacagtcagtctcctacttcagttggcacagactggataatgagctcctgggatgggaaaagcaggccactttggggttttcttgtcccaaagcctgcttttgaggtattgattttttttaaaaaaagggaatcctttttcctaaagtttaactcacatctattgtcaccagttattatcttcccagttcagctccccttcttcttcccagccttcagcctctccctcagtaatttctgctgcagcaaattttgaggaaaactgcatcactggggagacatcatccttttttgggaccatttctgtcctcagttcaggtaatataagaaaagcagcagaaggcttaatttctgggatcatatcagcaaaccaatccatctcaggatcttttactggcttcttttttacttgaatggtgaattccgtcgc

SEQ ID NO: 319661 - DNA, 768 bp, Homo Sapiens
  misc_feature (211)..(228): n is a, c, g, or t
gaagaaaaaaatttattgggtgaatgaaaagtgattttgcaaaattaggcatcacagaatgttagaagtcatccagtccaactcattcacaacaccccctcccctgcagtcccattttacagacaggaagctccaacctgtagtactcacagatgctgctgagattcatctccacccactcactggaagcaatcaattattttgggggggnnnnnnnnnnnnnnnnnnctgtctgtctaaaaggtgtaaatgaggagtgacatttctacattgtttattctgtacttttccttggagttaatgcaacacctcctgtcgcttagatttttaaaaggaaaaaggagaaatgtgtctagtcataaaggggttgccgttaggaagtcagacttcagactgtgcgtctaagagtagaatccacttctcaagagactgggaatgtaaaatgaccactcaggttagaatttccaactgacagccaggaggaaaacttactctaaagttttttttgcctagattaaattgcattttaaatcactgtttaagctattacagtattactgtaaaaagtttcaaagtaatttttagtcattacctacactgaaatttgaaagtgaagtcaacagcatgctttattctaactgctgttaaaactcaaaactattttttttaacaaattacaatattcctcttagattttcttctggacacctatacttcttcctactgtgtccagtattctccagcagacaccatggtgcatctgactcc

SEQ ID NO: 319662 - DNA, 413 bp, Homo Sapiens
  misc_feature (22)..(22): n is a, c, g, or t
  misc_feature (42)..(42): n is a, c, g, or t
  misc_feature (48)..(48): n is a, c, g, or t
  misc_feature (52)..(52): n is a, c, g, or t
  misc_feature (55)..(55): n is a, c, g, or t
  misc_feature (76)..(76): n is a, c, g, or t
  misc_feature (87)..(87): n is a, c, g, or t
  misc_feature (103)..(104): n is a, c, g, or t
  misc_feature (111)..(111): n is a, c, g, or t
  misc_feature (113)..(113): n is a, c, g, or t
atcccagaagtgaaaagagacngttttagaatttcccaaggntacctnaatnttntcagtgttaaatcctttggtnggtacggtatnaacaaattcattgaanngcagccngnataagacagttgtctttccagcacagtccaaacccagaataacaatgtggaaagaactgaaatgaaggcaggttggacaggatagaagtctggtctgacagcccattccccatttccaggtgcaaataaatgtcccaaattgaaatgcttttctcttcttggtttacaacttctcttggtagctgatccagctataagactgctcccgatctggagtctgggtccaaatgagaaagcattggcaggcgtttctacgcagggataagcacccttccagcttagctctccaagcagctctaa

SEQ ID NO: 319663 - DNA, 930 bp, Homo Sapiens
  misc_feature (70)..(93): n is a, c, g, or t
tttttttaaacaaaaaatgaaatataacaagacaaacttatgataaagtatttgtcttgtagatcaggtnnnnnnnnnnnnnnnnnnnnnnnnaaaatgcaaccctgccccctccccagcaaagtcacagctccatttcagtaaaggttggagtcaatatgctctggttggcaggcaaccctgtagtcatggagaaaggtatttcaagatctagtccaatctttttctagagaaaaagataatctgaagctcacaaagatgaagtgacttcctcaaaatcacatggttcaggacagaaacaagattaaaacctggatccacagactgtgcgcctcagaaggaataatcggtaaattaagaattgctactcgaaggtgccagaatgacacaaaggacagaattcctttcccagttgttaccctagcaaggctagggagggcatgaacacaaacataagaactggtcttctacactttctctgaatcatttaggtttaagatgtaagtgaacaattctttctttctgccaagaaacaaagttttggatgagcttttatatatggaacttactccaacaggactgagggaccaaggaaacatgatgggggaggcagagagggcaagagtaaaactgtagcatagcttttgtcacggtcactagctgatccctcaggtctgctgcaaacacagcatggaggacacagatgactctttggtgttggtctttttgtctgcagtgaatgttcaacagtttgcccaggaactgggggatcatatatgtcttagtggacaggggtctgaagtacactggaatttactgagaaacttgtttgtaaaaactatagttaataattattgcattttcttacaaaaatatattttggaaaattgtatactgtcaattaaagtgttttgtgttaactggttccaa

SEQ ID NO: 319664 - DNA, 1198 bp, Homo Sapiens
  misc_feature (226)..(257): n is a, c, g, or t
ccagcagaacccaattccataggaatccaaactccaaggctgggaggccgcatgtgctggggacaagctcactgctgagagtcggtctggaggacccactggaggatctcatggcggcgtagaccctggaccgcattgtcatagatggtgttcacgctggtgcagaggggctgctgctgcagctctgtcacccgacaagcaaccagccctcccgccacaccaaatnnnnnnnnnnnnnnnnnnnnnnnnnnnnnnnnccaggaacgagtgtgcttccggggtggtggcttgcggggacgggagccagacttagatttcggggcctgatttgcttccttcttaggtttcttctcctgctcccgcttggctgctttgagggcatcatactcctttctccggcgctccttctcttccgccttctcccgcttccgcagttcccgctcctgagcttccttagctcgctgcttagcctcacgcttcttctctgcctcacgttctacttccagccgccgctgcctctcccgctcctgatctgcctgcacggccttcatgtgctgtaacaccttgtttgcacactgcttacactgcttctcatccaagcagtcacctgccaccttggccaggacaggatccagggggttatccttcaggtccaaccacttcaggttcttgagctgagcaaagctgacaggcaaggtgaccagcttgttgttgaggagatccaggtgctggaggttgaccagacggccaaagtctgctggcagctgctgcagcttgttcttactcaggtctagcttcaccaggtgtgtgaggccacagaaatccgacggtagagtagtcagtttattacaagacagatccaggatggtggcctttggaagggcagccagctccttcaccgggacctcattcaggtcgctgaggctcaggtccagttcgttgccgtccagcttgtcgcggaggttcccgcccttgctaccggccttggtcatggtaacgccggctgagcgggccccggctccggggttccggcgggtgaaaggagctgaaatgtcgcttgtcagttcagcggccccccacccaaacgacgacgcctgagccctccgtcgccgccgatgcgagaccgcctccgcccgctggccgcactccgagcctcgcgcctagctcccaccggtgccgcgacgacgaccacttccgt

SEQ ID NO: 319665 - DNA, 2596 bp, Homo Sapiens
  misc_feature (20)..(20): n is a, c, g, or t
  misc_feature (28)..(28): n is a, c, g, or t
  misc_feature (58)..(58): n is a, c, g, or t
  misc_feature (197)..(197): n is a, c, g, or t
  misc_feature (1737)..(1752): n is a, c, g, or t
  misc_feature (2116)..(2147): n is a, c, g, or t
aaacccgggtggggccccgntctttctngggcccttattatttgtgaaggtcctcctncccctgtcggctggggcagagactgaaatactgcccaccctacctttggcatttaatgttccctctccctggcaaaaattcactgcccacagacaaaccacccccactcctacccagccagccctcaaaacacaaaggnacaaagacagtccactcagacacttatttaataactgtagaaatccaaaagaattagcatcaaatcttgaagtcgtgagtgaagctgcgggttggcttgactgggctcagccactgagctgcctcaaccggccaaggaacgggattatgatgactatgcggacttctatattgtcttcatctcattgtgtgtattatgtatttagtttcaataaagcatttgtaccaatggctctggagcttggaggaagactaaaggaatgtgtagtgattctgagtaagatgtagacctacgcagcagagctatgggggagaagattaacaaagtcctttcttctaatatcaggatagtcatgagttgcagtcccatccaaaaggtcattagggctaaaaggccctctgtgtctctgaactatgagattctttgctccctccgggggagccaaggagcttgcaactgggagtttgcagtgaatgagcaccatgacacagtcatttctgatccctctatccagctgttgtgaaaagatgaagcaaaggaggcaagaaaatgcttaatttagcagacaagagaatggacagtgtgatccttgtttgtgctagccattgggtgatgcaccacttttcagctccatgatgctacttgtttcccttcatatcctgtttccatttatgcccttcagttatggtctagaatcaaacaattctaaacctcagtgtcttatgaagctgacacttcaaaacctgcagaagcaggttgcctttgaggtatttagtcacaccaagtacaactagagctgtcatagacagtgtaggtttgcagagatccacctccttgcttactggcaattagggagttaatgctctaaaattaggcaaggagcctggactgttgccattttatggaagccacataagttgggcaggactccacaggagctgcccgtgacctgatgatagcaagagatttctatctctgagtcgtgaaatctgtctaccatgaaagagtctatgcttcacctgaggaataatcgattctggtgtgagttctggtctctcaggacattataaaggagggaaaatgatgtaaagggaagaaagaataccagagtgggaatccagttttgcctcaaactagctgggagactaggcaagtcatggaagacctcagtttctctgtctgcaagtgttatattggactggatggtcatgaagtccctttcatagccagagattttgtgtggctgctaaaatgcttacatctctgaggtcctaaagaaaacaggaatacccctacctcccagtttagactggatttactgagcgtggtgttctagtcccccccagttcctcctgatctaccctgattcccagggaggaatgaaagggtttgtggcatacaaaagtataaatgtagtgacagctgaccatttagtagaaacgagccttgcctttacacagctttatataacaactagaaaaggctatgttttctctctccccacccccaagcctactcctttaggcatgcaggtaactgnnnnnnnnnnnnnnnngccacctcccatttctcctcattccttcagggaaccctgactaaggaatgaagaagtcctacaaagaggaggtctcatgtaccaatctgcagccatttgatgatggcaggtaggtctgatgctaaaaagaggttgtgtccagcagaacccaattccataggaatccaaactccaaggctgggaggcagcaggtgctggggacaagctcactgctgagagtcggtctggaggacccactggaggatctcatggcggcgtagaccctggaccgcattgtcatagatggtgttcacgctggtgcagaggggctgctgctgcagctctgtcacccgacaagcaaccagccctcccgccacaccaaatnnnnnnnnnnnnnnnnnnnnnnnnnnnnnnnnccaggaacgagtgtgcttccggggtggtggcttgcggggacgggagccagacttagatttcggggcctgatttgcttccttcttaggtttcttctcctgctcccgcttggctgctttgagggcatcatactcctttctccggcgctccttctcttccgccttctcccgcttccgcagttcccgctcctgagcttccttagctcgctgcttagcctcacgcttcttctctgcctcacgttctacttccagccgccgctgcctctcccgctcctgatctgcctgcacggccttcatgtgctgtaacaccttgtttgcacactgcttacactgcttctcatccaagcagtcacctgccaccttggccaggacaggatccagggggttatccttcaggtccaaccacttcaggttcttgcctcgtgccgaattcgccacccaggcctcgctac

SEQ ID NO: 319666 - DNA, 369 bp, Homo Sapiens
ggggaaaagaggaaggaggaagaactggtaacaaagggtgggccacggagtgtggctagcagagcctctgagggaggtggcccccaccagaacagaggctccctctgcctggggaggtgcaaagggctggtaaacaacctgactgctgttatttacaaccccccagcctaggggcctgaggggtcagtctaaggaggctgaggctccctccgccctgcccacctggggagggttggggaagtggagagttctgcacagtaggtgcagaggcttctgtctcccaggtatcctccccgaggtctggcaggataatgctgaccgggaggccttacctgccaaggggccagagggtgattttgctcttgagaa

SEQ ID NO: 319667 - DNA, 1031 bp, Homo Sapiens
caaaataatataaaagtaattcacagacttagattaagtgaagatcaaatgaccccaaaatttttcttccttagtttttcacagcaactgctaaagtccataagctgatttttccaagaaaattattctaataattttgagtgttcaatccgtgcaatggtccagtcaggctttactccttgtgtgaactccctctgaaactcatagcttgccctaagaagttgtttagtttcccactttctgtttccccaacttaaacttggaataccactggctccttcttaaagtttccactggggatgttggcactgtttagataccaaaagcaacatcaggatgttaacaaatttccttcctttttcatcatagtaaatggagatgtctcctgttgatggtaaatacaatttcatctatgtttagcagcaagggcatttttatggttgtcaggtagtgaagtaactttttctttcaatgcatgtagcacctctttggccacaagttcttccaacagatcaaatttacactgtgacagcaacttggatacatgagcaaaagcctgcttcgctccctcggagaactctgtgatgctgaactctttgtcgaaataggcccagataaggaaggccttaattcgagtcctaacccagttgatggggttggagaatcccaggacgatcatcttggttttctggtgctgctggggcttctcctccgtgctgtagctgcgctgagggcaggcagggaaagaagcgaaggctgcggggagtcccgggctgctgagcactggccaccgggagccctgggcaggtagcgccgaggctgccaaggccctagcgcttcgtggaaataacgccgctcccaagccgaggcgacagcggcagaagtagcaaagtgtggccgacggcagcctcacctcggccacagcaggagtccggagtcggacggccccgcagggcagcgaccgagagtgcaggaactggggtagcaatcgagcggccagcgccatttttatgacccttcaccccggtccc

SEQ ID NO: 319668 - DNA, 673 bp, Homo Sapiens
gcaactgcttttctgtctccttcttgtttgcctctgtgcttcttaacttgccatacagttcttgtttctcttgcctcacagcttccaccacatgctgaatcctttctgcttcattactaacattctcataggactgcagaagaatttcatactctttttgtagctccttgtgtttctcttgccactcagtactttctgcaatcttagaagatttcaaagattcaatttccttcactaacttttccttgtcttcagtaagaccctctagagctagttttagactttcacaggagctgctgagactctgattttccaataaagacctgtccatttctgtaatgagtttgtctctttcttcttgaagaagagctaaccttcctaagaccgtatctttttctttattttgagcagaaacttggctttccacatctgccagagacttggtgagacgttcaatggtacctctggccaaagacaattcctcttggagacttttgttttcttttagtgcttcttttcgggaaataagggcagcttgcagtttcctttgtatttgttgctttgctctactttcttctccaatctcttctggtttttgcttcatttcacaaagttccacctgtagctgctttatcctctcatcatgctctttggcttgcatttctagctgtgt

SEQ ID NO: 319669 - DNA, 593 bp, Homo Sapiens
  misc_feature (397)..(484): n is a, c, g, or t
ggaactttatttttaaagtattctgaaaattttccaagaattttaaccaccacctacttcccttaaacacacacacatttttatcttacaattataacccctattgcagtacaaaacaagaaacaataattctaagttagccagccaatcaaactacttcagtaaatgatcatactacagcctggaatcactcaaacaaaaaattcttctagttctctttaaagatatttatcgtttattttttcatgaaaccaaagtaattgattcaacaatactaacagttctagcatgcaacaaaccatctactatctaatgtttaatcttcttaacatgtatattttcattcctataaagtttccataagaagcttgcaatgacaataaaggtaaataagtannnnnnnnnnnnnnnnnnnnnnnnnnnnnnnnnnnnnnnnnnnnnnnnnnnnnnnnnnnnnnnnnnnnnnnnnnnnnnnnnnnnnnnnttacataaaatgacatatttgtatataaccaacgcacatccgcctgtatactttatccctagactaatacctaatgcaatgtaaatgctatttaaataactgttatact

SEQ ID NO: 319670 - DNA, 951 bp, Homo Sapiens
  misc_feature (470)..(470): n is a, c, g, or t
ttcggtgcctaccaaggtgaggtctttatggtgtatagagattggtgagtttcagagccagtgtggccagtctagtccctcccctttccctagcccagcacaattccctccattgagggcccacatcacctccagagggaggagggaggggtcagacccccccatagcaccaatctggataggccactctctgacaaaacagagcgagcagtgccttccacaaacggggtaaatggggctaagaaggggggaggccttttcctgtgggagaccaagagtagcaccatctgtagaaagaaagctggggggtaagggaggcacatagatggtggcagacagctgaggggtcctggcttctctccccacctggcaatatgcagacagcaccgtgcctgtgcatgtgcctgtgtggctggagaagtcttcagattgcaaaccacccaaggggtgagggagccccaggtgccccnaaacatgtggggtaaagtcaaggtaagtgcatgtctggagggctggggtgggaagtggagggggttctggggcacagagattgtaggcaatgagaatggagaggcatgaagtccaggagcagcacagcctagagggtaggggtctagaatgggaaaacttaagactgaaagaaggaattgggtaagttcagtggggtgggaagcccagaatagatttaggaggctggggtctggaattagggagttgaggttataagattcagaaccagaggaatctttagggaaaagtctagattccagaatcagaagcatttggaggctgaattatagaatcagaggaatttggatctgaaatcaaaggcagttggaagctgtgaggcttagaagcagaggaatttatagaataaagcatagaattagaaaaagcctggctgggctcagtggctcatgcctgtagtcccagcactttggtgaggccaag

SEQ ID NO: 319671 - DNA, 692 bp, Homo Sapiens
  misc_feature (595)..(595): n is a, c, g, or t
  misc_feature (610)..(610): n is a, c, g, or t
aaactggagctgtaattacagggctactaaagatgtgaagtatatagttaaggttttgtcagcacttttattgtaatacttagtgagattagtcattttagttgttccctttgtatgccaaaaatggaagacagctgtttgtgcactaaaaactgctttttaaaggatagttctctctggttatcaagcatattttgccatcagggaaacatattttaaagcttttgcactgtcaaaatgaagtgtgtaggaatgattgctttagctgttacttctaaataacgacaggaagatctaacatgtggtaatactgcacaaggatgatacaaagtatctggctagattcacaactattccaattactatctcttcctgcaagatgtatttctgatggcactcatcagaccctgaattcattccctgagcttgagagtgctacagaagtgtttagggccagttctgtggcagccctcatggaaacaaagaaaagcctaagggctggtaacctgcatcacgaccagcccatcacccaagaacacagccagcttcttttgcaaggttgtccctgttagtcaatcaaatctaaatctgaganttgtgactgacttanacctattcatcttccaaagtataaaccttaagaatttgtttccactaagtgcattaaatatttgcccctaacagaccaaaaa

SEQ ID NO: 319672 - DNA, 558 bp, Homo Sapiens
ggtgaaagtagacgtgctccggcaaatcaggtctgactttgtcaccctgccgtttcagggagcagaagtccttctggacagtgtgatgcccttgtcagacgatgacccagttttcaccggaagcagatgccgttttgtttgagatgacggggaatacagcactgcttgctcaggtgacaagttacagtccaactggtcttcctctgattcagctgtggagtgtggttggagatgaagtggtgttgataaaccggtccctggtggagcgaggccttgcccagtgggtagacagctactacacaagcctttgacccccatgctgcttcctgagagtctttttttgcactgttgaaattgggcttggcactcaagtcaaagatgaacatcggaataacaaacattgtcctctccagaaagtcctttctttctccatactgtagtcctattgagaagacatttcgtctctgagaaaaaaggatggaactatgggttctcttcgcaaagccaaaggatagtgtttaacgagccagctggcttatcctggttctcagctgttta

SEQ ID NO: 319673 - DNA, 480 bp, Homo Sapiens
tacattaaatttccagttgctccagtacgttttccagttactccctgtaggacttaggctaaaagacttggcactttctcttggcatgtaaagaaaccctaggttcttttggggatggcacggccacactgccagcattcaggagcttcccctggagctcctgaaccccagtgtcacccctgccatctcagtggggctcatggtgtctttcttggcgtgtttctggcccataccgtgtttattttaaaaattgttcatgctaattggcatggggtttcttttaggggtgatggaaacattctggaatttagatagtggtagtggttgcataacattgttgatacactaaagaccattgaattgtacactttaaattggtaaattttatgatatgtgaattacatttccaaaaaataaaataaaattggctgttcagatggctaataattccaaagctaactcactccttctagttagatc

SEQ ID NO: 319674 - DNA, 1057 bp, Homo Sapiens
  misc_feature (124)..(138): n is a, c, g, or t
  misc_feature (149)..(150): n is a, c, g, or t
  misc_feature (154)..(155): n is a, c, g, or t
  misc_feature (157)..(256): n is a, c, g, or t
  misc_feature (279)..(294): n is a, c, g, or t
  misc_feature (762)..(792): n is a, c, g, or t
ggtggggaatttcaaacccctttttattgccccgggttttcttatggaaacaacgtttgcccccttttcctttcccttttggggccccggccgcccaaaggaaagttttagaaaaattttttannnnnnnnnnnnnnncccccaaaaanntttnntnnnnnnnnnnnnnnnnnnnnnnnnnnnnnnnnnnnnnnnnnnnnnnnnnnnnnnnnnnnnnnnnnnnnnnnnnnnnnnnnnnnnnnnnnnnnnnnnnnnnaagttaatggtctttttattggnnnnnnnnnnnnnnnngactagcatttacaacttggaatggacgtaaactgtaatttctttgaacagcaatgttgatggttgtgctgaagtccacagccacagcctactctgccggctccaagtcatggttcagaaggttttaaaaacagagagtccaaagatgctcccttggtaaatgtttcttattaaaaatttgtgtgaacagtgacagcctgacacctgtttcactctagaacaatgcagacaacgctaaaccaacatacacgggcatgccaccagggtgtgtcatcgtcaccatgggtcggagcacacgaagtacaagaggaccatcctaccagtggggccacgtctcaacggtttatccttcacccatttttctgcacgtcatcctgaggtaaaccaattttaaatgtgtttgttttcagtaaaccagctatgacaatttatactaaacaaattgaactagaacccatttgaataggnnnnnnnnnnnnnnnnnnnnnnnnnnnnnnnaatacaaaggcctgactgtgctcaatcgtcaagctgcatgcatgaaaaactggccagcccaaacagtgtattaatcattagcaaatggaactttaaggagtccttatcattaaggtagtacaagtatttatattgtaaaactgatgtgtagcttgatctttaggggacaggaccaccaaccaatacatgcagattttgtgtgtgtggacagaaggtacttttgacattcagttttgctatatagaaacagaatgaataaatgaac

SEQ ID NO: 319675 - DNA, 387 bp, Homo Sapiens
  misc_feature (62)..(62): n is a, c, g, or t
  misc_feature (79)..(79): n is a, c, g, or t
  misc_feature (97)..(127): n is a, c, g, or t
tgggggtaaacccaattttaaatgtgtttgttttcgggtaaacccagctatgacaatttatnctaaacaaattgaactngaacccatttgaataggnnnnnnnnnnnnnnnnnnnnnnnnnnnnnnnaatacaaaggcctgactgtgctcaatcgtcaagctgcatgcatgaaaaaactggccagcccaaacagtgtattaatcattagcaaatggaactttaaggagtccttatcattaaggtagtacaagtatttatattgtaaaactgatgtgtagcttgatctttaggggacaggaccaccaaccaatacatgcagattttgtgtgtgtggacagaaggtacttttgacattcagttttgctatatagaaacagaatgaatcc

SEQ ID NO: 319676 - DNA, 644 bp, Homo Sapiens
gttgaaacaatcagctttctattgctacttttactgtaggcctgactctcaatacagaaacttcaaaatgggcgcctattcaatcagaatttgaaatttctattttatcctgcctcgtgaattaatgagcacaagttctttataggattccagctaatagatgcagaaggaatgacaagatatcactggttggcaacctctaatggaatcccagatgtgggcaaatatcattaatgatggctaaatccatcaggggaaaagctgatagagaacttttgtaatgaatggagtgggctggcagcatccaaacccactatcaatcttaatgttacaagatgagagccattatgtgccatgatgtgatacaacatgggagcatatatcacctatgaattatttttgtggaaaagcaaaacagaacaacagaagccctctagatctgtcagtttatagaacatataggggacagaaaaggtgtacatgatcccattaggatacattcagtaaaatccactgaaggacaattctataggacaaacaacttagtttcttcaaaaattaaaaacaggaaagttaaatctatagattatattaacaaaatgcaagatctagatcttgcctggatcttgactcgaataaacctt

SEQ ID NO: 319677 - DNA, 1010 bp, Homo Sapiens
  misc_feature (139)..(147): n is a, c, g, or t
  misc_feature (176)..(176): n is a, c, g, or t
aaagtaacatttaatgaatacacatttataaaagccatcatcccttaacatggggaaagtgtacaaaaataatgtgaaagtgtaaaaatttttctagaatacaggaaacatatcagcagtaaagaagtttagtttaacnnnnnnnnnaaatgtaaaatagtttggatctgttaaangggaatacagttcgcccaaagcacttattttcatctgttgtaaactcattctttctaccttaagtaaactggaggagtcagctgtgttaatatggtcaaattaatttcatagttttgggagcagggaggttgtgggaaggacagaaggagaacttgggctttctttggtcagctggtggggcttggagcacttgtggttggggccaaaggtcaggtctggaaatgcagctattatgccaaaaccaccagagtgctctttagcttcaggcttcatgaattgcttttaactactcaggtagagcatttttactaggctataaaagtagagttcatttttttctataggtcagcattttacctatggatggcattttctattttcggtgacggactatgagccaggataaacacattactctcttctttaacaaaaagagcatggttaactccaaagacttctctagaccagcctggatggtacctaaactttaatcaaccaatgctcaagtaaaagagcagtatccagccccagcacacctaactgttttgcataacataggtgagtagtgacattttccttatcttttccactgatactgtagggtcagcaccgtataccatgactctactcaatgtcgtccaactttttgtatccttgcttgggtttatcaaagataagttgaaggagcgtgtgttctgtgtacctttgcaaccagttataaataaacgcaaattgaaataaaaaagacaatctacaatggtgcgatgaaagcaacaccctcatccaatggtaattaaattgataaggtcactttagaaatggcttggcaacat

SEQ ID NO: 319678 - DNA, 1008 bp, Homo Sapiens
  misc_feature (947)..(947): n is a, c, g, or t
ggtggctatgctcttgctgtcctcggcgaaggttgctttgacaaacatggggcccaacgcaaagcccaggttgttttctgtgtcactcacgcaaaacttccagcgaggaagacaggtcttcttggtcccgtacatgactttccatgaactttctcatccggcgtcctgaaagcgctggtcagggaaggagcttgttttccgcaccaggttccagatcatgtagttgttgagcaggcatctgtcggtggtgttgatgagagtggagatctgctccaaggtattccttgtcatagaccacaataggctcgggattcattgatctccacggggtagaagatggtgttgagaaaaggcaaccagttgatggcgggtgccaaggtctgcagctcggctgccgtcactttgtggtagatgagctcctcatcacggcgcttctcctgtgggatggtgatgttggccagtgccgtctcaaagtccaagatctgctgcatctggggccggatggcctcctcgtccccgccgcccagcagcttccccagctggaccatgtagttcagatatccggtcagcaccttctcgttttcagttttgttcaggtaatagtctctcgagggcaagcccaggccagactggtccacctggatcacgttgctgttggagttcttggaatcggcactgacatagacagagaagaagggtgaggtgcggtagtgggcggtgaccacctgcagggtgtcctggaagttgtccttggcccagggacctgtgatgttccagcccccgagcctctcaatcaactccattagaggtttggccctgagctcctcgatcctggtctcgttcatgcacgcacggtagtatacttgcgcctttctctctgcctcgctcacgctggccgtggagttttcgaggaggtgcttgatgattgcttggttgtgttcccaganggttgctgaaggtcccccagcgtgagtggccatcagggacatgggttggccttgatccagc

SEQ ID NO: 319679 - DNA, 1274 bp, Homo Sapiens
  misc_feature (1183)..(1195): n is a, c, g, or t
gtttaaaatcatttattattatcaggagtgccttttaggtggaccgctctgtatgactctcatgcttcaaaactattttttattcaagtgacttacaatggccctaggaaacaagttctgttattatcccccattttaaaatgatgaaaatggacaaagcaaaagcaagcaacttaaccaataccccatggcctcacagcctttagaatagtcatattatataaatatggcaataacaatgcactgaaaatgtctccaaaacaaactctacattttaaaaaatgtataacaggaatctaaggaaggggtcttacttctctgattcagggagtgcgaaatcccttaaactcatatcagacctgtgatgaacaaactcacactaagttttaaaaactgcttaatttactttatcatgactagtaatatataagaattttgtatatactttattaaaaataactttggaaaactatttttgcctgatcagcaataaaactactgataagataagctggttatcaaataattccctagtgttaatctggcaaataattgttataacccaatcttgtgaattgaagacaggcacattatagataatcaaaaatattagaaacacatttaaaatgtccatatgtttagtataaatagaaaattcattgactaaaataagtcatgaaacatggactggaattttgtgagctattaagtttcattttgttttactgttttaaaatttaaatagtttggctcatttctacatttgttaaaattgtaatcttaaaatattaaaaaaataactttacaaacacacagatatgactagccattttatctaagttataaaatagttaccccagggagccttcaagatccctatattttaaagcttatttcaaaaaccatcactacttcacatttttaaactgcatccttgcattacagaactgtaaatgtgttgtcatacagtaaatatccacatcccaattctaattacaccattcttgttgttaacacagagcactgcttctaataaaagcatggcatagttctacagtttcaatggcaaaattaaaggttttttttgttgaagagataatgaagcaatcaccaagatatttgaaacaacaaagttaacattacaatgatttcaagaaaaactaagaatatatacacttacatnnnnnnnnnnnnnggaataattcactttatgagagaagaaaagagagacagatttttaaaatatttggattctttagcccataggaaattaa

SEQ ID NO: 319680 - DNA, 1031 bp, Homo Sapiens
  misc_feature (729)..(741): n is a, c, g, or t
  misc_feature (761)..(775): n is a, c, g, or t
gaaatgctctggtccgctacagttcaaaagaagaggtagtgaaggcacaaaagtctctgcacatgtgtgtactggggaacactactattcttgctgagtttgccagtgaagaggagatcagtcgtttctttgcacaaagccagtctctgaccccttctcccggctggcagtctctcgggtccagccagagccggctgggctccctcgactgttcccactcattctccagccggaccgatctcaatcactggaatggtgctgggctgtcgggaactaactgtggagaccttcacggcacttcactctgggggaccccgcattattccacacgcctgtggggtcccccaagcagcagcgacccccgaggaattaacagcccatctcccattaacgcttttctttctgttgaccacctgggtgggggtggagagtccatgtaacagtgtagatgcagactcaccgaccgggacctcagacgcgagggaaaggagcactaagtggggctcgccgcctgcagccaggggccgcctgtgggaacagctattctctgcacattttccactttgttttccccaaaacatatcagtttgaatacttgaatcatgcaggccaatattataatgtgaaaaggtatctactctatttacactcccaaatagcgccatacatgctaaaccgtagagaatgagctcgcttgtgtctattcatcatgtttagcctttggattcnnnnnnnnnnnnnccttctattcctccccaacnnnnnnnnnnnnnnntttttttctctcttgcaaaaccattttttgggctgataacgtatgagcttttccctttgcactgaatgatgttctctccgtctcatcggcagtatggggggcagctgtcccagtgtcaatgtttactcaagggtgttcttaggaggcgtgcgctctctactatgccttgatgttgcctaccttattgtggtatcgtggagtttaaaagatcaagttaggatgctgacttaggattattaatgaaagtgttgcacca

SEQ ID NO: 319681 - DNA, 2434 bp, Homo Sapiens
  misc_feature (749)..(751): n is a, c, g, or t
ggctttgatgacagtttttaattgtgcctttattcaacttagttcattaaaaatgttttaaagatcctataaataaagtgaccactcacatgggatataggtcacccctcagcatgttattttttttcttaaaaagcagtatttcttacaggaatcttactgatcacacggtagttacaataatgtcagatatgatgtatacagtctaaacgagacagtccagttaagaatatacataatgtaaaaatacacatattaaaagttagccaagtggacagacgcatgcggggggtggggggagcaggtgacaggaactcctttaacaatcagtagagggcccagatgcaaagaatctggttttccccgttacagtaaacagctttcactaacgtatacaggtatttcatacacatctaaacacacaagggtaagttgtgacctgctacacatagggtctaaagtggtgtaattgtgattttcctgtgatactcccaagaaaactataaatagtgaaccccatgcaagtactgggaagcactagtcttttatcacaggttgaacctgaggaggtttaactcttgacattagtatctgtaaagagcgtacggctctttttgctatgttttctccacaactgacatgcacttggtgtgggagaattctgatggctgtctgacctaagagtgataactactattcaaaatgtgggtaccttttcagtaatactgagttacacatttaacattaannnaaaacaaacgtggatcatccacagctttaagccggaaggcagaagggagtgtgtctgaatgttaatgttttcagttatactattttgtgtttctcccgctgtactccagagtgacactggtacactgctgctttccgtaacaacacaggcactagtttgaactcagacaaaacctgaaacagaagaaatgccactctttctccagggtcttttaagaaactcgatcaaaattataaattattcaagtttccttttgagtggtgtctttatgtgtgtaactatctagagaacaaaccaaaccagaaatgtctacccctgcaagagtgaggactttgggtgtggttctcttaggagtcagggaccttcagcagtttacagtcagggccgttttctcacacagcccgtttaccctgcgtttgtgccaactgtgatggcaaatgcgttttgcgggggttgcgcttcacaactcaggcctaaagatcctcttagggagatctctctagctgagtagaaaacttctacccaaaaaggcggcgggttctgtgaacctgaagagaagactcagggtctctctgaaagcctttaaattactgctggaattacaagttcctattagtgagaaaagagcattaaaataacttgaaggtctattttattggcaacttagaatgcaaagtattttatttttaaacttttaaaatttgaaaacaagctagcctacattaaataatatagtttccaaagctgaatgtgctcacttggagctcagtttttctgcttgaaacacaaacacaacttcctaacactcctaggtgggaacactactgtttgatgatctgtgattggatgaactgatcgatctcagttggtaacatcccttttttttccttggtaagggtttaaacaattctagaagagatgcattttttctggttttacactgacaatttcatcccgaacgtctcctgggaggcatagaccatgtacaggaatccatcttcatctttctcactctcatacacctctgagattggtgtggagacgctgaccatgctgtgtccgttcaccaacaggaagaaggcctgattagcattgagctgtaagcgccttctaattatcttgatgagctcactcatgttgacatggtcaggtacaaggaactttgttttatccagaacaggaagctgcttctcacccttgtatcgttctattatcaccgggattttggttggatgctgctctcgaataagtcggacatcttctactctttgttcgaaggtgcggcgctgcttgaaggtcttctccgacggcatggtgcggggatccaggcggcggcggcgacggcgcgagggtccccgcggctccaatcaaaccgtagagcagcggtctccaacctttttgacaccagggaccggtttcatggaagacacttttttccacagactggaaagggcataatgtataatcagtgggagcccttagcttgttttcctgcaactaggtggtctcatcttgcccgggagaggaaggcttcctggattggaatgcggcgtccaaactgatacctgacgggcagcgaggactaggccaggggaaaggtctccaggctgccagaccgctgggcagaagatggcccttctgtccacggcacctggttggatgtcaggagtaactgaggagtgt

SEQ ID NO: 319682 - DNA, 566 bp, Homo Sapiens
  misc_feature (555)..(555): n is a, c, g, or t
acattttgaatagtagttatcactcttaggtcagacagccatcagaattctcccacaccaagtgcatgtcagttgtggagaaaacatagcaaaaagagccgtacgctctttacagatactaatgtcaagagttaaacctcctcaggttcaacctgtgataaaagactagtgcttcccagtacttgcatggggttcactatttatagttttcttgggagtatcacaggaaaatcacaattacaccactttagaccctatgtgtagcaggtcacaacttacccttgtgtgtttagatgtgtatgaaatacctgtatacgttagtgaaagctgtttactgtaacggggaaaaccagattctttgcatctggggccctctactgattgttaaagggagttcctgtcacctgctccccccacccccgcatgcgtctgtccacttgggcttaacttttaatatgtgtatttttacattatgtatattcttaactggggactgtctcgtttaggactggtattacatccatatctggacattattgttaactaccgtgtggntcaggtagggg

SEQ ID NO: 319683 - DNA, 912 bp, Homo Sapiens
  misc_feature (875)..(875): n is a, c, g, or t
gcattttcgaggaaagaattatgcaatttcttttgttttctgtgtcattatttattgctttttcaatgtgcagccagtggatggttttagttctttcagatgaactgccatttgtgtttcagctcacagttctttgctgggtaaaagaaatactttctgacagtcacctgagccttaaatgtaagtattacatgacatgcattctgtttcttccagagttctgtctgccacacgaaagagaatatttgcttacttgatagaactttggcattttcatcattcttttacttaaccaggcttatggcatgatctctggaacaaatttgtaggaaaaattactccaattgaatgactgatgtatgtaatcaacttcattgggctgcagtaaactagtggaaattagagagttgttttattggtgttttctactgtgagttaattaaaaattgtttttatttggggtcattatgtcacagtcttgagttaacaagatcttacgtgattggccttttctttgttttctcttaggagttgtgtctcatgaatgacagtactaaagctattaacaactaagagtttgacagagaactataagcctgttgtatctcctaaaagttgtcaactccccacccttggactttaaatgaaaattttattcagtccagctattcttacagtcccctagggattttcatatatctatgtataggagataaaatttgctagttacgatttttaaaaactgggctagtgaaacgaaaagtaccctctgaaaagaaacccatttttagcaaaattatggtttataatgtttttaatggcaaacctaccagcaatggtttttataggtataaaattcttacccacacactagnaattaattcccccttagcccatgggtacaaatattac

SEQ ID NO: 319684 - DNA, 707 bp, Homo Sapiens
gggctgtaccttggctccggctacttcactgccatccagaacttgaggaaaagtgaggaggaagtggctgcccggcgtgcgcgggttgtgtggtgtgcggtgggcgagcaggagctgcgcaagtgtaaccagtggagtggcttgagcgaaggcagcgtgacctgctcctcggcctccaccacagaggactgcattgccctggtgctgaaaggagaagctgatgccatgagtttggatggagggtatgtgtacactgcaggcaaatgtggtttggtgcctgtcctggcagagaactacaaatcccaacaaagcagtgaccctgatcctaactgtgtggatagacctgtggaaggatatcttgctgtggcggtggttaggagatcagacactagccttacctggaactctgtgaaaggcaagaagtcctgccacaccgccgtggacaggactgcaggctggaatatccccatgggcctgctcttcaaccagacgggctcctgcaaatttgatgaatatttcagtcaaagctgtgcccctgggtctgacccgagatctaatctctgtgctctgtgtattggcgacgagcagggtgagaataagtgcgtgcccaacagcaatgagagatactacggctacactggggctttccggtgcctggctgagaatgctggagacgttgcatttgtgaaagatgtcactgtcttgca

SEQ ID NO: 319685 - DNA, 1327 bp, Homo Sapiens
  misc_feature (55)..(55): n is a, c, g, or t
  misc_feature (57)..(57): n is a, c, g, or t
  misc_feature (723)..(723): n is a, c, g, or t
  misc_feature (725)..(725): n is a, c, g, or t
agcgttgtttaaactcttcccacagttaccacatttaaaaggtctttcttcatgnanctgctttgggtctcaaaaaggttggaatgatggaaactgtctccactgtcagacttgtgaggtttcagcacgtgccacgtcaccatgtggaaactttgcttgcacttgttcccgtgttcctcactgtcagtgggcctctctgctttcgggatgtgctgacatagaacaaggttggaacacctggcactgttctgcaattcattatttttagagtcttccccttctatggaaccattcttattgacatctgagatgctgttgagtccttctgcttcaggagaattttcaagtttcaggggcaaggggtctccggactgcttttccaccctgtcctcatgggtactgccacacttagaaaacagggggcgcttcccctggaacgcttcttgtagttgcccctgtggctccgcttcttctaaaatttgttgcattggaatcaactctttgttctccactctgctttccaaactcgggggaaactgtgctccccggaatcccttttgcgcactttctctgcagaagtccctccgttctgggtccaggcgctcccactcctcccaggttagagacacagccgtgtcctggaaagtcaccatcccctgggatgaggttccatcgagcgctcgctgcagagcccgcaccagggccaccgcctcctccccgctntntgggcagtgctctcgcacccaggcttgaagctcctcgggcaggatggtgaggaactgctccagcaccagcagctccaggatctgctccttggagagcagctcgggtctcagccaccgacgacagagttctcggagccggctcagcgcctcttccggtccagccacctcctggtaacgcagctgcctaaagtgcagtcgagaagtttcggggtccggcgaagccgcgggatagttgggctcccaacttccgggtgagtcttcctccactttcacgggcaaaagtccgtcgcgttgggacggcgccgcgtccttggacctcgcagccatcacccagggtcccaactcggcgtcactgccgcgcctctgggcggtcaagctggaattcatctttctccggcatgtgctgcccttcctggagtcttcttttcaggtgaagaaagagcaaacccaaggaactcatcagccgtcaacaccctccggtcccaaacaccgggccccaccacaccaggcccctctccacactctcctttcctcagctttgcgcctacaactctctcggtcaaacaaccgaaaacatcccgtgccggaagcgcgtcatcgag

SEQ ID NO: 319686 - DNA, 1268 bp, Homo Sapiens
atgccttcaggagcatgtttattgtgtttgagatgatacatcaggtgctctctgagctacaaagggtaaaaggaaatcctctcattacaaactgacaaaggtaaaaggtaaaacatttttcacaacagcatgaaccacatactcagaaatagatctgggtttaatacaaatgacataattcctagccatctacagctacttttataacttcatacagataatgaattaggctaaaatgcactataatatttggtagacttcaggaccagtatccttagtacatcacaaaatacattttgatatcccaaagaagcaagacttgcaagtaggcgttttaaacataactaatctacagctacaaagttctactcttgatagcatttacctttttggggagtctcccaggctccaaaggataaaagcagagtagaatcagtataacatatacacagaagtccgtattgtaaaggctataaagatttgcagcacagtgagaagatgccttctgctccttcacactgcatacaaattatgtgaattatgttgcgtatctcttggtccactgtctggctatcctgtcgtgttctgctctgttggtcaaatactgagtggctatgcttccaaccagaggatccgcagggttgcagtctgtcaaaagggaacaaatagacagcaaaacctttgaaatagtcaaagcgggactccagttgtctttaaggatgtccagacagatgactccctgactgttgatgttgcagtgatagattctggtgcggaaagtaacctttggtggcttaaatggataatctgatgaaaatgtgatatccagaaaaaacacaccaccttcatatacagaacccggtggaccaagtatagttgatctccattcataaatgttatctcctttaggcccagcactgcaattaggaggaggatcaagggttatttcagctagctccttctgaattcttttagcactagtggataacttagcagtggttttgctagagagtttggtgtttttcttctgctgggtggcagaaggttttctttcctcttgttcttcaggctctggagcggctgggtctcgctggtccgcatctgaactgccactgctggtgctggggctctcatcatcggacctttgcctatcactggacatcttggtgaagttatctcttggaaaactcggccgcccgcccggcccgctcgcgcgccgctacggtgtgggggagggagagagaaaaaaacccttccttaaggaaatg

SEQ ID NO: 319687 - DNA, 745 bp, Homo Sapiens
  misc_feature (164)..(179): n is a, c, g, or t
  misc_feature (558)..(673): n is a, c, g, or t
  misc_feature (679)..(679): n is a, c, g, or t
tcaatcaatcaatcaatgaaacaattagtgaaatgcctgacttcattgtaactctccctcactcaccttctggaatcttcaaagtcactaaattcaagtccaaattcttgaaattgaccttgccatctgtattagcattctctagaggggcagaactaatggannnnnnnnnnnnnnnngagtttattaaatgttaactcacatgatcacaaggtccacaataggtcatctgcaggctgaggagtaaggagagccagtctgagtccccagactgaagaacttggagtctgatgttcagggctaggaagcaatctagcacgggagaaagatgtgggctgggaggctaggcccatctctccttttcacgttttcctgcctgctttatattcgctggcagctgattagatggtgcccaccagattaagggtgggtctgccttccgcagcccactgactcaaatgttaatgttttttggcaacaccctcacagacacacccaggatcaatactttgcatctttcaattcaattaagttgacactcagtattaaccgtcacannnnnnnnnnnnnnnnnnnnnnnnnnnnnnnnnnnnnnnnnnnnnnnnnnnnnnnnnnnnnnnnnnnnnnnnnnnnnnnnnnnnnnnnnnnnnnnnnnnnnnnnnnnnnnnnnnnntttcantattgaatattttaccccagggatttgaaaggcaggggggtctcaaggggtatctgtattaccctg

SEQ ID NO: 319688 - DNA, 986 bp, Homo Sapiens
  misc_feature (863)..(895): n is a, c, g, or t
atggtgggctgctctctgaggaagaagactggggaagtttctcgggagacttaggtggtgaacggtcccgagttggagaggcctcagatggggggttcactggctcctggcttaagggggtggttgcaaggggttgtggggagccgccatgtcgctcagcaaggagcggagtgggagcaggtggttctgggcctgtgctgctcctttccggagaggggctaggtcgagttgcagatttctccttcttgtctttatctttgtcttcataagggctgctaggctgtttcgtagcagtctccgggctactaggccgttgtgtgctggtagtacctggttcactgaaaggcgcatctccctccccgcgtcgccctgaagcaggggaaggacttcgcccagccaaggcagttgtatgagttttagctgcagcacttcgagacctgcaggagttaattgaggacgtgggagaggaaggaaatcagctcaaagggagaacagaaaaccccctccccaactcccatccacctttcctaactggacaaccctcttccaaaaagcctttagtcgcacaactcaaatcattcactgaaatgcaagtacagtccactttggttcttcttttcccaacacaatcccaaagagcgttctccctctacccctttactcacctcccccaaacatccccaaaccatccacccagcccactccctacccgcttcattcacaactcacctctgagcccacctccttcaggaagccttccccgattaaggaagccagggtaaggattccttcctcccccagacaccacgaacaaaccaccaccccccctattctgggcagtccatatacatcagaacgaaacnnnnnnnnnnnnnnnnnnnnnnnnnnnnnnnnngagaaggggaaatgtatatgtctgtccatcctgttgctttagcctgtcagctcctagagggcagggaccgtgtcttccgaatggtctgtgc

SEQ ID NO: 319689 - DNA, 759 bp, Homo Sapiens
ctgggctccaataggaagcagcatttacaacgtgtctggcttggtgggaggaagattgtcaattgaggtatcatgtgtgttcacctgcctctcttgccctatttctttggttgctataaatttcctgcttctcaaatatctggatttttggctacctatttggcttccgtctttggtgtttatatctgtctggttttagcaggtctctctgattcctgacccacagctcctctccttctctaatattcaagtatgctgcttccctaactcctcattccttctccttgaatttcactttacaattgcgctaggttctaacatcgttggccatagattaccacaaaacataatttcttaaattctgcaaatttctaatgtttctaatcttggtttcctacaagatctaacactaagcttgtgttatcctgattacagtgtatataaaacaatgcttgtggaaaattaacctaggagaaagcttataggggaaacctgatgatgaattttattaaattaataacccttataacaatttcaaatgtaatactatctggatttgaacttcaatacttttcctaagtaaaattcttaaccatggtagaagttatgtttgttgatgttcactcatctataccctccatattctcagcaaagttggcataaatctgacctgaataaacagggttataacattatcaggcttgtaaaatactttatcaaatcaatgcatcagttaaagcaggggtccccagccctggg

SEQ ID NO: 319690 - DNA, 896 bp, Homo Sapiens
agtgctccagagaaaggccggcctgcagcacccgccaccgtctccggccgcccgcacgtccgtccggagctgtgactgatgagaattaaaggccatggatgaagatgggcttgaattacaacaagagccaaactcattttttgatgcaacagctgatggtacacacatggatggtgatcaaattgttgtggaagtacaagaaactgtttttgtttcagatgttgtggattcagacataactgtgcataactttgttcctgatgacccagattcagttgtaatccaagatgttattgaggacgttgttatagaagatgttcagtgcccagatatcatggaagaagcagatgtgtctgaaacggtcatcattcctgagcaagtgctggactcagatgtaactgaagaagtttctttagcacattgcacagtcccagatgatgttttagcttctgacattacttcagcctcaatgtctatgccagaacacgtcttgacgggtgattctatacatgtgtctgacgttggacatgttggacatgttggacatgttgaacatgtggttcatgatagtgtagtggaagcagaaattgtcactgatcctctgactaccgacgtagtttcagaagaagtattggtagcagactgtgcctctgaagcagtcatagatgccaatgggatccctgtggaccagcaggatgatgacaaaggcaactgtgaggactaccttatgatttccttggatgatgctggcaaaatagaacacgatggttcttctggaatgaccatggacacagagtcggaaattgatccttgtaaagtggatggcacttgccctgaggtcatcaaggtgtacatttttaaagctgaccctggagaagatgacttaggtggaactg

SEQ ID NO: 319691 - DNA, 775 bp, Homo Sapiens
aagtagttgcgcagctggggttggtaaggtcgggccatggtggggcagaggttgggaagatggcgtggcgaggctgggcgcagagaggctggggctgcggccaggcgtggggtgcgtcggtgggcggccgcagctgcgaggagctcactgcggtcctaaccccgccgcagctcctcggacgcaggtttaacttctttattcaacaaaaatgcggattcagaaaagcacccaggaaggttgaacctcgaagatcagacccagggacaagtggtgaagcatacaagagaagtgctttgattcctcctgtggaagaaacagtcttttatccttctccctatcctataaggagtctcataaaacctttattttttactgttgggtttacaggctgtgcatttggatcagctgctatttggcaatatgaatcactgaaatccagggtccagagttattttgatggtataaaagctgattggttggatagcataagaccacaaaaagaaggagacttcagaaaggagattaacaagtggtggaataacctaagtgatggccagcggactgtgacaggtattatagctgcaaatgtccttgtattctgtttatggagagtaccttctctgcagcggacaatgatcagatatttcacatcgaatccagcctcaagtgttatttccaattttgtcagttacctgggtaaagttgccacaggaagatatggaccatcacttggtgcatctggtgccatcatgacagtcctcgcagctgtctgcac

SEQ ID NO: 319692 - DNA, 1190 bp, Homo Sapiens
ttttgcttacaaactagatagaaacctttatttcacaactttatcatcattcacattctaaaaagacacggactgggggacacagctgaaaacagtgggaggccagatgctggcatcttccagacgggagcatagccatggtcactctagccgatgtctcctggggctctcaggcggcaaggaccagatgcaccactactgtccaatcccagttttacttagagccacctccttttttggggccattagtccttatttcatgccagattttcactagcggctccctgttcttccaaatcagttcatgaccgtaagtaacataccatattccaaaaagagctcccccaagatgtgccgcatgatcaaaaaatttccatcccaggatcattcctgctgtatccatggcgataatggctttcagggcattccctgctgtgaacgtgaacatcggaaggaaaataatggcaagcctcccttctgggatcttagtgcagacagctgcgaggactgtcatgatggcaccagatgcaccaagtgatggtccatatcttcctgtggcaactttacccaggtaactgacaaaattggaaataacacctgcagataggtacactgccatgaactgctcttgacccagaatgttcactatgctggaagagaagctccacaaaacatacatatttgctgccatgtgaaataaggagaaatgactgaatgttgacagcaacattggagaacaaaggacctttgaggctggattcgatgtgaaatatctgatcattgtccgctgcagagaaggtactctccataaacagaatacaaggacatttgcaggctataatacctgtcacagtccgctggccatcacttaggttattccaccacttgttaatctcctttctgaagtctccttctttttgtggtcttatgctatccaaccaatcagcttttataccatcaaaataactctggaccctggatttcagtgattcatattgcccaaatagcagctgatcccaaatgcacagcctgtaaacccaacagtaaaaaataaaggttttatgagactccttataggatagggagaaggataaaagactgtttcttccacaggaggaatcaaagcacttctcttgtatgcttcaccacttgtccctgggtctgatcttcgaggttcaaccttcctgggt

SEQ ID NO: 319693 - DNA, 636 bp, Homo Sapiens
gctggagatactggggctgaagcatatggagtcacccagcccggtgtccatgtccttggataggccattgcttttagagctggagatgggtgcacaggccgatgtggctagggatggccactttcctgggactttgatggtagatgtccgaaggtcaatctcttttttatgaatattcttcatataatcacctaagcttgaataataggtgagcacgccattggaacacagggtgacgtatttctttttccatgtcttcagccatttcccacttcgctttaagagcatgccctgtttaatggggatggctctgccgctcccgatggtgtcagcatgattctccggggctttcctctctttgtctgggtgactccctttctcagatgtaaacaggttggaccagcgcatggaccgcttgcaaacgggggtgggtgtgttggcagtgggaggaacactgaactgagggtcctcctggctggtgctgggagtcgatggaatggaggaggaatagttatttaaactcccacctccatttctgttcttcgtaatgtgcacggtggaaaccgcaaatgagtgtaactgttcatcaggtatggtcaaagatctatctgcatctctttgtgtgatatgatgagg

SEQ ID NO: 319694 - DNA, 655 bp, Homo Sapiens
atggaatggggagagagaaagtgagaaccaccaaactcagcacaaaacgactgagtttaaacctctgtgctaagagatgatcagagtctatcatggcttctagtagcatgagaccatgtctcacgaatgaccctaggctcccatgacaatgcctacctaagaaagctcaaggctgccaggggaacttactttagtctagccaatacttgatgatggcagtttcaggatctttctttcttatagcacttactaagaagggaatccttcctccatccctttgatatatgtgtgtatctcctagggacttcaatgtatctttgcccccaggatctgaaaggcaatacttttgaggtgtagttctcaggaaggactgagcctctgtcttccagtctctgtgggaggttagaatcctaacttctaatattgccagctggcagacacagctgtcctgatgaggcagacatttaaaatgaccaatcttttgtaatgtttcacttgtgccctgccccctgccctctcccctgcctctctctcccattagaatgccatcacctctgcacaaatgcgaacagaaccagccccttcctctacggtcagtagttactgaataaaattggttttcatcgatttgactaatgtctgatatatctttgac

SEQ ID NO: 319695 - DNA, 1152 bp, Homo Sapiens
caataggtacttttattttaaacaacagcacacaaacacaatgacataacaggaccattagcttaatactgataacattccttgacaagttacttataatttacatatattgtttttatctggaactattttaaatattatcttaagatatactgtaaaacacaaatcctaaatatataccagttgcaaacataatgtgcttagttactgttttccttgttattcaaataaagtaacttaaagttcttcgaaatcatgtccacttgtgttcattgtttcaggatgcatgactcgtcccatgaatagaattgtaccagttctcctgtttctgataagaaagaaaaatggatggtcgacaataacttgaggatacagcacagccatcctactaattgcaatcattcctgagacagcagcagcttctgagccttcttcattaacctctaggaaggacttgtgaattgctttggaaagaaaaatctccttattatcagagaggcctgtcaaatttgcatctttgatgaaaattttcagttattccaagagccttcaaaacatcttttaaatcaatttcctgttccactgtgaacctgggcaggtatacttctactttttgcttcttcacagagtttgcccattcttcaaccagctgtgctttgactaatggctccagagtagcaagaggaacttcctgtctggacagcaccagcatcatgcttatttcatctccttcatatggtatttctaggacttggtagataccaccagcttcattggagccatcactaaattccccataataaaattctccttgctgatacatcattggaatttggacttcactttcatcatctttagtgaaagaaaaggttctagtattttcaggcctaaactgcgacttccagttccccttgaaatagacagcattaatgagggccagataagtggcagcatcaaaatcccttggggataccaaatctttcaccagattgtttgtgttattctccacccacttattgatgtagttggccacggctacattttgactgaagtccacatgatttactgctgcattaaaatattttttcatcatttgcaaaaactcctcattgacatgaaatccattttgcacaaacaaggaattggcaattc

SEQ ID NO: 319696 - DNA, 760 bp, Homo Sapiens
aatctgtttttgcttctgtttttcagattcttcttcttcatctgaactgctttctgctttcttggttttattcttaggaactttctttggtggctgcagattaattcctgcatctgctgtccagtcagagtaatcactggagtagtcactagaactgccatcactgtgccatgctctctcttcttcttcggatgttccaccactgacagcaactacttcgccttcatctgaagaactactgccattttctatctcttctgagggtctaggagtctcttccaatgcagatcttgtacgataattgtgttgatttgtctgttgctttttggattctccaagatccaggaaatgctcatgagcatgattctttgagacagtgggtatttttttctcttttggaacagttaagtgttttcttttctcttctgacctgtaagtctttatttcttcttctccctttgcagttctccattcttcttgcctactggctacaccagctgatagctcgggtactaccacccttcgactccaagctaccagatcccgctctgtggctatttcacttcttggtgcgttgctgtgcatttgccgtacaccttcaatttgtccactacgtcttagtcctacgtttggtggtgaatgaacctctgaggtagaacttatggagcctctacttaaacggctggtattactgatacctgcttcaccagaacgtctcaggtcttgctcctgttgtagtctttgaatcatgctgtccacc

SEQ ID NO: 319697 - DNA, 1173 bp, Homo Sapiens
  misc_feature (267)..(267): n is a, c, g, or t
tgagaaaccgttgaggcgagggatagcgcccaaaccctgaggaaagaagcagttcagacgccaccgcggaccccagtggtcccagggcaagagatgttaggaccccatccaaactgggggcctgtggtcaaatgagagaagaatcccctggacaaacactccatcagcagagcacagcagccaggtcaggcaggaaagccgggtcctgggccacctgcgccctttgctttccagcctaattaactgacacatcacgagatagggccncagatcccacaggttctccacatgctgccgagtcacaaaagcaccacacagggcccatgggttgctgcagcccccaccttcacccaccgtcttgcatgtcacgacacggcacttcacttctctgatgtttctcatcttttcttccatttgttcttttttcaccagtggctcaaagtagcgctcctgcatctcagcctcggcctctttcaggatgcctgtgtgttttgattttgcttttaggattttctgaaattcctcagattccagataggcaagttgttctctcctttttttcctggcaggctccaattcatcctcagcttgagaagaaaacatggtgtttttttctacacgttccttcacctccaggatgtcctgagggtccttttgtttcttcttaatgctgtttgggtttgtttttgtaagaacctggccttttgcccttaatttggtgatagcagctaactttttggcttctgctaaagcactcagttttggtcttggtggtggtgactcatcataaaagagaacatcatctccttccaagacacctcgccccagcttgggcgtcattgtggccggggctccctccagcctggggaactcggatcctgtccgtggaggctgagcagggggctgtcttgatgaagatggcacagctgggctctcaacttcacttgagctctgcagaaatcgcttctgtatttcttctgatttccttctcctcatctccaacatccgctgcttctgttgcttcaagagtgctgaggccgagatggacttgatggctggttttgggctccccataatccctgaagctgtggctttggctaaatgttgttttaagttcctggctccacacgtcggcaggtccatcagttccttgaactcctcaggtgggaattc

SEQ ID NO: 319698 - DNA, 799 bp, Homo Sapiens
gggaccccttttgtgcttttcactggattcgagcctgtccaggttcaacagtatattaagaagctctacattcttggtggagaggttgcggagtctgcacagaagtgcacacacctcattgccagcaaagtgactcgcaccgtgaagttcctgacggcgatttctgtcgtgaagcacatagtgacgccagagtggctggaagaatgcttcaggtgtcagaagttcattgatgagcagaactacattctccgagatgctgaggcagaagtacttttctctttcagcttggaagaatccttaaaacgggcacacgtttctccactctttaaggcaaaatatttttacatcacacctggaatctgcccaagtctttccactatgaaggcaatcgtagagtgtgcaggaggaaaggtgttatccaagcagccatctttccggaagctcatggagcacaagcagaactcgagtttgtcggaaataattttaatatcctgtgaaaatgaccttcatttatgccgagaatattttgccagaggcatagatgttcacaatgcagagttcgttctgactggagtgctcactcaaacgctggactatgaatcatataagtttaactgatggcgtctaggctgccgtgcatgtcgactcctgcggtgcggggctggctgtctggctggcgaggagctgctgcgcttccttcacatgctcttgttttccagctgctttccctggggggatcagactgtgaagccgggaagaccgatataataaatatactgccatcctttttaagatgggg

SEQ ID NO: 319699 - DNA, 487 bp, Homo Sapiens
  misc_feature (390)..(390): n is a, c, g, or t
  misc_feature (429)..(429): n is a, c, g, or t
  misc_feature (434)..(434): n is a, c, g, or t
  misc_feature (445)..(445): n is a, c, g, or t
  misc_feature (452)..(452): n is a, c, g, or t
  misc_feature (458)..(458): n is a, c, g, or t
tacatatattttcatttaattttaggcaaaatatttttacatcacaccttggaatctgcccaagtctttccactatgaaggcaatcgtagagtgtgcaggaggaaaggtgttatccaagcagccatctttccggaagctcatggagcacaagcagaactcggtgggtagagtggagtccgccagcgagtccgtcattgccctgtatcacattcagcgttcggtcactgagaaactcattttcttttccttagagtttgtcggaaatagttttaatatcctgtgaaaatgaccttcatttatgccgagaatattttgccagaggttagggtacgtttccccgcttacctgtgtgagtatgtgtgcacggacaggcagtgggatctctaacntaaagtgtctgtttccaccccgttcaggtggttcacatngcagngttcgttccgnctggggngctcantcaaacggtgggctatggattcatatccg

SEQ ID NO: 319700 - DNA, 1919 bp, Homo Sapiens
  misc_feature (159)..(159): n is a, c, g, or t
  misc_feature (203)..(203): n is a, c, g, or t
  misc_feature (258)..(258): n is a, c, g, or t
  misc_feature (439)..(439): n is a, c, g, or t
  misc_feature (1896)..(1896): n is a, c, g, or t
ttgtggccggtgttatttcggatggccaggacccttggtttagcgtgtttcacccccccagggccaaaaactggatattggttacctccaggaaggcaggttacaggttatccccaccatattgacaaaatattatgggtctcaaagaccggggaactncattccagtagctcagacaagattcttgattggatttcacctgntaaatacattttctttccccctttgatacagtttcttcatataaaacatcttatntaaaagaaaatgtcccattaacactctcatggactctgtcttagtaactgagatataaaatcacaggcgtgagccaccacacctgtcttagtagctgaaggttataattacaggcatgagcttccacacctgttccctgccactatttctaaggacttcttggatccatgactatccctcnccgccccctatttatccctctaccatactgccattccctacagtaaggagtaatccatgggtgagacagggctcagtcattgccccatatctaattccaaggcttattctcaatgttaacacaataatacagaatagatatttcagctacttatggattcctcttccctaatatgtggatgcaaatgtgtgcaaagtgaagaaagaaataataactaaatgaagcttaagtgctacatcaggagagacgtaactattaacaaatgttggaaaacgggtttggagagaggatagaatgagactttcattgagaaaggtgatatggaatgacatctgctcttgccaaagccaggtctctcagatctcccaactaaaaacacaaacagtatcaatatcccagagaatcttaaccgcacatttgatgacacagtaagtcccagcatcttagaatgttgatactgaaagagaccttcaagactggctgctaaaatcccatcatttctcaaactagaaaacagctttaagaagaagaaagtgacttgccttaattaaagattatttagctgtaacactgaggccagagctccagttttctgctcatggaacaaatgttgataagtctttctttttttcttgggcatttgggggtggcttttaatgttgggatgtatgtcaacaccaatggagccactgcttttctggggacaaaagaacagtccctcttcctcaggaaaggtccaatgtgtccacacatctatccccatagccttctatcatgagagagcccctcacagatccagccactggccagtgacttgctgtgaatgatgccaagtgggagtgtctgtaccctgcccaagtctgtgtggtttcctatgctctccttctttgccatcacataaatttacaaatataatgcaagcatgtttatatacatgttcttttaagttaagaaaacctcatcatgagaaaaataaaataaaattgcactgtggcctctcagattaaagactgagttaaaatgaggttgtccaacccatagaagaacaggccacacgtgctgatacaactgacccatcattccatcctggcacttattcccagccaactcatgggaataattccttcacaaggcagccaagaggtagaaggtaaatacaatcagccccatggatggatacagcacaccaaggctcagggccaggtatgtggaggtgctatggatgagggacaggaggccggaagcatagggccagacctctggctctacaatagcactctctccctttgaggaaaagcatttggtcatgagagacatccccagctcatagcaaatgtctacagcagtgagggtgtggaattaggaggtaaagagatggtgctggcctaagggtgacacacttcttctaaacaaacctccagagtagagctgccaataaggcaaatctgaagggttgnattatgaactgggagatgctggt

SEQ ID NO: 319701 - DNA, 463 bp, Homo Sapiens
  misc_feature (17)..(17): n is a, c, g, or t
  misc_feature (24)..(24): n is a, c, g, or t
  misc_feature (34)..(34): n is a, c, g, or t
  misc_feature (41)..(41): n is a, c, g, or t
  misc_feature (108)..(108): n is a, c, g, or t
aacgggcccaacacgtncctgganaacaaactgnacccccnccaattccaaccctggcacttaatcccccagcccaactccatgggaaataaattccttccacaaggncagcccaagaggtaagaaggtaaaatacaatccagcccccatggatggatacagcacacccaaggctcagggcccaggtatgtggaggtgcctatggatgagggacaggaggccggaagcatagggccagacctctggctctacaatagcactctctccctttgaggaaaagcatttggtcatgagagacatccccagctcatagcaaatgtctacagcagtgagggtgtggaattaggaggtaaagagatggtgctggcctaagggtgacacacttcttctaaacaaacctccagagtagagctgccaataaggcaaatctgaagggttgtgattatgaactgggagatgctgg

SEQ ID NO: 319702 - DNA, 906 bp, Homo Sapiens
cttaaccaaataaattctccaccaccagggaccatggcactgaatgaaataaaggggcaatcaccttcccatcattgcatagtctcccgaagcagcaagtgtgaaagaggatactgaaaagccacttcatttttacacagcccaaggatcgtttttatagatgacctgggcacctataatgtccagttgctttatgagaacacacacacaccacattcttccctaccctctaagagaaggtagttcctttcacaataagaaaacacaccctcatactctccagaaacgagctgtcttggccacttgacagcttttgggcacacactatgggcttggcaaggcagagcttagaacagggtcaaaagggcagctccctttagtcctttatacaaaggactgtcagagtcccatgctcctggcagcatctcctcaaagcacaggtgcccagatcccctgcaaaagaaaacaggcagctgggctccaacggtggggtatgacctcctcccaggccagggcttccaaggcagggaagaaggataactcttctctagttacgagttcaggcacctgctgctgcttccaggtttggtataaaaacctcagcccaggcaaagccgggagccagagagcattctgtaggctgtaagatcacgttgtaaaataaaaatattacaataaaattttttgtagttgtccaaaagggagcacctgggtaagcaatgtgaccttctgaccacagttaagtctcactttggactcttctttctgttctatgggtggtcagaggctgtcaccaactcaaaccactgtctgagggcatcgctgagtgtctcaggaagtgcgtttacatctcgaagaatgatatagtatgggaatgggaactcttccatgtaggatcggatttca

SEQ ID NO: 319703 - DNA, 563 bp, Homo Sapiens
caaggcagcttacttcccttcattagcattttctacttcaggttcttgtactaagtcagttttttcccatgtattttacattctaaggtgtattaataagatctctgtttctgtttcatcacgtatgaagtaagatgctgagtaaggctgtatacgtttcctaaagttaatgtagaagaactgctaagaaagtccagtataagtatggggtttggtaacttgattttatttgaatgtttgtatattgcaaatacgtatgccacacagggtctttattaccttggaatatttactaaagttttctgttttgatcaacttttgtgggattacagatttctttagttattgccatactttcccaagagccttttttccagattgatgactaatcactcacagtttagccatctgccatgaaaatacacaaatccaacctccccaacccccaaaaataaaattcagtagtaggacgaattttgtttcaggtattgtcttttgtttacctttctggcattgtttctattccagctctattttattttttaatttaaaaaatgttttaa

SEQ ID NO: 319704 - DNA, 715 bp, Homo Sapiens
aattaagctgctttttggtaattattcataaagtcactgcctttttcagaagaattaaactcactagtagttagaaacatggaatttagcatatatgattttatgtgcatattgagattgtagtcccccttgctaaattgatgtggatctataactgtaaggaagcttattactttatggtttaatatccagcacaaagcgtgtaaataaaataaataggcatgttgtctttatcttcaaagggcattatattgtacttctaggcaagtgcaccaacaggaaaaacaacgcctggaatgggtgggcttggtggaatcaaaaatccgaatcctggttggaagcttggagaagaatgaatttattacactggctcatgtgaatccccagtcatttccagcacccaaagaaaatcccgacaaggaagaatttcgcacgatgtgggtgattgggttagtgtttaaaaaaacagaaaactctgaaaacctcagtgttgatctcacctatgatattcagtctttcacagatacagtttataggcaagcaataaacagcaagatgtttgaggtggatatgaaaattgctgcaatgcatgtaaaaagaaagcaactccatcaactactacctaatcatgtgcttcagaaaaagaaaaagcattcaacagaaggtgtcaaattgacagctctcaatgacagcagcctcgacttgtctatggaca

SEQ ID NO: 319705 - DNA, 310 bp, Homo Sapiens
attcttggttcttataaagtcaggtggacagaatcccatgaatcagggctcccggtcaccaccttcatgctggtccctaaagcactactgctcctacgtcaagcaccattcactctctcatccactcactcatttgtcagtcttccttattttgggtatttgttttccttattaatttttttaattaaaactccatgggcaaaccaaacatctttggcccatgtatttatttgcaattgaggttcataaataaaagaataaatacttaaacgtgaaaggtgactaaatgcggggaagaaagattgcaaat

SEQ ID NO: 319706 - DNA, 916 bp, Homo Sapiens
  misc_feature (169)..(169): n is a, c, g, or t
  misc_feature (185)..(185): n is a, c, g, or t
  misc_feature (191)..(349): n is a, c, g, or t
  misc_feature (353)..(353): n is a, c, g, or t
  misc_feature (355)..(355): n is a, c, g, or t
  misc_feature (358)..(358): n is a, c, g, or t
  misc_feature (362)..(362): n is a, c, g, or t
gttggtgggaagaaggacaagcccgctttgtgttgtgccggcggtggtgttctttttgagaacacgaaggtttatccccggggttctctcttctctcttggtggggccgcggcccgcccgccaaaaggggttgaaagagatattttcttggggggcgaggggagcggcncacaactttgtttttntttttnnnnnnnnnnnnnnnnnnnnnnnnnnnnnnnnnnnnnnnnnnnnnnnnnnnnnnnnnnnnnnnnnnnnnnnnnnnnnnnnnnnnnnnnnnnnnnnnnnnnnnnnnnnnnnnnnnnnnnnnnnnnnnnnnnnnnnnnnnnnnnnnnnnnnnnnnnnnnnngggngntgngggnttttttgactgtaatcaaacttttaattcttagtttttattctggtaaatgaaaacaaaaaataatcaaaaagaatttttatttgtcattgacagttcaatataaattaagtaaaacattaattcatttattctgcactattatcagaatttttctaatttttccgtaaaatgaccatttctaaacatatagcttaatggtcaaaacaagtgcaataaaagattaatttacaagtatcagaagtgaagactgtggtcctataactctttcccccaccaaagttaaaatataattgtcattccaggaaatcaaaatcttttagaatagcacactccaaacaagtgatgggaacactactaattccttagacttcctttggcagcattacttttgataagaagtctccaaataaaatacaaaattttggcacagacattttaatcttgtcaagacaatgtaaggaaatgccccaaaatattattaaattgaccataattaccaatatcagtccctaagataatttttctgaatgaagaattgttttttttgtttgt

SEQ ID NO: 319707 - DNA, 740 bp, Homo Sapiens
aaattttgtctaacctggcttctgaaatttctcaaactaaatattcatgctgttttgtgtttttcttaatgactgaggctagtgatattactcagaaaagtaacagtaacttgggtcttctgagcgtcaggatgttcaccatttaacttgtttctcgttagtgtctagtacgtcggctttcggtagtgtaggtgtgtgttctgtgtcctttcccgtgtgtgcctgcactagtggcagcctctgcttccaggtcagtttagagtagactggctctggtattgctagcaagtagttgctgttacccagtgtagccatgaagcccagctccttgggatcttgacatatatgttccaggcaaagtacgtaatccagacgtttctaactctttctagatgattgcaattgttctccatgttgtctgttaggcgttatgttaattctcgatctaacagtgtgcctgtaacatatatggtagtgaagagacatcacatgcagagaccgttttccttttatcaactacaggtccgctatcgacgagagcacctttctgctaggcagtcaccctacttcccgttgttggaggatttgatgagagacggcagtgatggtgctgctctcttagctgtgattcactattattgcccagagcagatgaaactggatggtgagtggagaatgcttccctgaaacagatccgaaaaggcttaaaggaaaattatagtgtacattgatccacatac

SEQ ID NO: 319708 - DNA, 1339 bp, Homo Sapiens
ccaaaggccagttcttgtgattgtaacggagatataccaaaaactttgtttttttaaagaggatccacctggttcatgaaccctccctcactgctctctgcacatcacggccacacagcacctgcagggaggctgtggggaggtgtggagcaggtgcaacaggcagctactctcctgggggccacacggcggagagaggattcgatgcagcatgacgatcccttcctcccaggcatgacctcttctcagaacacgggaactgacaacactgcgagtggcaactcagcaggtgggcagagaagcagaaaggggccctcagcaccactaggccagctctcagaatcagaagagcagcctccagggagggagcagggctacagggacagcctacgggcagtggagcttctggtttggcacatgggaaaggctggggcgcatgcgctgaaacatgacaccatcagggaagccagaaaggacaacatggacaaggccatcgatctgaacccccagccaaaatgggtgctctcggcttgctcaaaaagtgctgccagcagcgataggttggcaaattaaaagcaaacaaatagaggtcacggccacacaaaggcagtaactgcactcacaaggtggctcagcccaaagaggtctgaatctgaatatgccgcactgtccctgccccgggggagaaggggaaggctgggccctgggaactagagatgatggcattcctttcattccttcctgaggcgggcctggagggctgtgccctggtgactcctgtctcctaaaggagggcagggccggctgaaggatccaggcattgatgtctagttctgaggacacccaggacccgcaactacaagggccatctaaaacgtggcctggaggggatgggggcaggcgggcacaaaacttctgctcagctcactccagctccccacgtgctcatctgttccccagatctggggctgcctagtgagccgttaaacgcctgggttccgcccagggctgccttccaccgggacgccgggcctgctgtggctggaccctgccgctgtggtggtcttctcaccaaggagcctggtctggctgcctggaataacctgcaggtcggtgttctcaggggactgtggcaggttctgggctcgggtagccaggagtgcattgaggtactgcagtcgcgtaaccttgatgagctgcagatcagagagcgccctcacggtgtagtcgggacaatacgcagatgaatgcgtgccgtcacctgggtcgggctgcaggtcatggcggatgggctggagcgaggacaccggggcctcgtgccgaattcgccacccaggcc

SEQ ID NO: 319709 - DNA, 729 bp, Homo Sapiens
  misc_feature (45)..(45): n is a, c, g, or t
gtcgactccgacagagaaaactccggacatgggcctggatcacancagctgcccgctcccgttccttctgcacaagcctttcttctcgtgcctgacgggctctatcgatgaaccatgctctcgaggtctgagacagggtgaacatgtttgcaaacttgcacaaaccctgaggacctgcctgtgtcgcagaaatgccaggtaatcattagtgatcttgcacaggactcgtggctgagaacagcttctcacttcagaaaagcttgttattttttccaaggtcacacagcgagcgaacagtattcgaactccagtttaggtgagtcctggggcccagagtctttcctcggcatcaacaaccacaggaacaaatcacccagcattagtccgtttataaaggcctaccgtccccaaagtgaaaagaggtggaaagggccgcggaaagagcccctggagcacacacgccagatcccagcacttgttcctccgacctggccaggcagggactgtgccctagagccaactccctcaaagtccccagccccaccactcggaggactgacgacccagttctcccgcaggccggaccgcaggccctaccggcctacccgcaggccgacctttattcgccggaggtccccgcacttggggtcggggccgcagctgccactgtctcagcccaaaaaacccgagttctgccagacccggggcagcagccgacgcactaccgcc

SEQ ID NO: 319710 - DNA, 1002 bp, Homo Sapiens
  misc_feature (13)..(13): n is a, c, g, or t
  misc_feature (74)..(106): n is a, c, g, or t
gtttaattatggnatgaagtagaaggttcctctagcgagacaactgccagtcataccagcttctgccaacggannnnnnnnnnnnnnnnnnnnnnnnnnnnnnnnnaaccaaatcaggaaacagcccatcacagcactgcagcacagaataaaatccatgctggttgagatgtcccattatatttgcacaaatgtggttcatcgctggtcgaagctttcaccttttccccgaagaattttccacgttgaagtgtctgtgaaggtgacaagcatcgtgaggtacagggtgatgagtcgggagtcctgcaggatttcaggcttgagctgcttgaggaaaatcacagcagtaccacaaaatgttcttgatctgttgaatccaaaggagggtgaggtccttagaacaagccggggacacataccacaccttaggctcattctcagcatccatgctgctcaggatgctgcgacacaacttctcaaatctctcattatcctctttgattctgaataggaacagcagtttcctggcaatcttgaaaatacaagtgcacttcttttagtggactcagggtcatctgctttaaaaaagtcatcaatctctctcctgatatctctctgcagtcgactccgacagagaaaactccggacatgggcctggatcacaacagctgcccgctcccgttccttctgcacaagcctttcttctcgtgctgacgggctctatcgatgaaccatgctctcgaggtctgagacagggtgaacatgtttgcaaacttgcacaaaccctgaggacctgcctgtgtcgcagaaatgccaggtaatcattagtgatcttgcacaggactcgtggctgagaacagcttctcacttcagaaaagcttgttattttttctttattcgccggaggtccccgcacttggggtcggggccgcagctgccactgtctcagcccaaaacacccgagttctgccagacccggggcagcagccgacgcactaccgc

SEQ ID NO: 319711 - DNA, 1055 bp, Homo Sapiens
  misc_feature (64)..(220): n is a, c, g, or t
  misc_feature (243)..(360): n is a, c, g, or t
tattttatttttaaattccctgggctcccttttattaatcccagaaaagcccccaaaacccctnnnnnnnnnnnnnnnnnnnnnnnnnnnnnnnnnnnnnnnnnnnnnnnnnnnnnnnnnnnnnnnnnnnnnnnnnnnnnnnnnnnnnnnnnnnnnnnnnnnnnnnnnnnnnnnnnnnnnnnnnnnnnnnnnnnnnnnnnnnnnnnnnnnnnnnnnnnnnggggcggggggggcggcaaaggnnnnnnnnnnnnnnnnnnnnnnnnnnnnnnnnnnnnnnnnnnnnnnnnnnnnnnnnnnnnnnnnnnnnnnnnnnnnnnnnnnnnnnnnnnnnnnnnnnnnnnnnnnnnnnnnnnnnnngaccatttcactgattttttattagggcaagtgcatgttctgtaacatatttcacttgcaagcatgaaagatgaggtctctctctttctacatgggccgctcccggggtctggtcacaatataccaccacagtgggggcaaatcaccttcctttcgggcagggggcaaagcttcagttaaaggaccaccaggtggcgtttcctcctgcagctgcttaacctctcgttcccagctttccctccgcagtttcttccactgttctctcttggcaaagtaatcaggatacattgccttctcagaaggatgccagtcatctaagcaccattctgggaccttgtagcaatcgtatctctcataggaggtgcccccaggagagtcagggaagatgtatggctgtggatgctgacggtaccagaattcttcctcggcctccttcagcagctgggtggccttcgccatatccttttcattcttatgttcttcaaaccgggctctcatcaaacaagcaaagtatcggtatttgtctctctggacgcaccacgactcgaggtggcgtagcgcccgcttataaagccgcaacaccttttgctgatgggtcaggtagggtcccgacgccaagaacgccattacggcgctgaccttccccggccgcgcggagagccgggaaactgcacgcctgctgcgggtgactgccc

SEQ ID NO: 319712 - DNA, 535 bp, Homo Sapiens
  misc_feature (92)..(184): n is a, c, g, or t
tggcccaagcaatccttccacctccaccttccaagcagctgcaaccacaggcgcatgcctccatgcccagcaaatttttgaactttttgtannnnnnnnnnnnnnnnnnnnnnnnnnnnnnnnnnnnnnnnnnnnnnnnnnnnnnnnnnnnnnnnnnnnnnnnnnnnnnnnnnnnnnnnnnnnnttgcgagctctgacacccagcccattgccagatattacaggaaacaaaaaattcaagatccagtctagatttcaggtagacgaaaaaacctcaaaaacaatgagctagagtctaataacaggtgcactatatttttttctctgaaagttttttctctatacttactccctttttatcaaacatcatcaaagtattagtaagagtaatctgtttgcaaaataaatttagtgtctttaaagttggcctaatatttacacaagtgcagcaggaatagtgttttaccacacagggtctctttaagttggcttttctggatcttttaataaggaatctcaaattaaacttttaaaa

SEQ ID NO: 319713 - DNA, 696 bp, Homo Sapiens
catttctagagtaaaaaaactacacctccctcaacatcagttctgtactgtttctggtttatgatacacttccaaaacagcaaaaagttgcaaatatgtgcaaacactgtggtccattcagagtactgcttagtcatcatcttcttcttcctcctcttcttcctcaaagctatcttcaaagccctcactgtcctcctggtcttcatccccctctattgctgtatcccactgtgggtgattttctggcacaggcttagcctcatgaacttccaacttcaatggtttaatctgatccaaacccatataggagtctgatctcagaaacacagtatactgataatttccaggcttgcctggtgcaggaaacttcagctctacctcctctgtatctttcagcgtacacacatgatatggcatggatattaatgtctgctccttcctatctgcaatgtaaagccaccaccattcttgtttttcctcaggaaagtaaaggctatacacaggatgtgttatttttgatttggtttccaatagagctctctcttttcgctgtatgctttgttgtaattcttgccactctgcttcatcatctttgttttgtttttcatcttgctctctatcagagtctctgtcactaccatcatctttctcactttgggaatctctattggtttcttcttcttcagaatggtaaca

SEQ ID NO: 319714 - DNA, 2516 bp, Homo Sapiens
tttttaattttgagctacaacacaaatgaatgggccattttattgatttttacctcctaatagtggatacaggttgctgtggtttccagcaggatctcagatgcaaagggaagtgaagaaaacagatgaatccctagggtaccccgccatggaaccaaacaccacgtcaactggaactcttcttgcaaacgaaggctgaagatcaagaatgacattctcacaccacagcacagcttaaatacttctttgacaaaaataataataaattatatttgactcagaaaataaattctgttcagcagagtgacaggagggtccattcattgcattgcacgaggggctctacggaggggtgaggatgggtgcaggatgccacagtgacaagggacatggggtgcgggcccagcagcacaggctgaagttagctgacgcatgcttttggcttttatcccacgggcgggtagtggccggacccctggctgtggcctgtcccaagtgagactgcaactgtccccttcctcctcacgtccgccttgtcttctgtttcttggcttgtctctttgcatcttctgggccgctattgtcagaggctgcctggccgagcgcgccgactccctgtagccggcttgtcaactgcagcagcaaaggaatgagcttgtcatggttgtaaccggccagcagaaccagcagcgtcaatggcagggcaatgtaggatccttgtgcgatgtcctgttcaggcagcttcctcgtgggattaaaaatcaaggtgatgtgtttatggtagcccactgcggtgaaagaaacttgaggcaagatgtagtcatactgggatctggggagtgtggagtccagaagcacaacatagttctcgccatctctgagcagtggggggaaatggaagaacagggactggccaagggaaactgtctggattggattgtcgaggttttcgcttttgtaaagcttgacccataacgtaggaaggtattcagaggaagtgatcacatttccacttaaatcaaattgattaatctgccggaaaactatgatgtttacatcatcgatgtcattattcccaacctcaatcaccctatggtgggggagcgcccgctcaatgtggtcgttgccttctgccttgagctgaacgtggtacacacatcccggcagcaatccacgtaatctgaacttgccctcttcgtctgtcacggtgtcttctccgtaaatgctgcagtcgttctggcccaccgcttccatggcaaccccttgttcgggctctccgtttaaggaagacactgtgccatagcaactgtaagcggttcggtaccccgtgatggtgatcttcaggttctggccttcctgcacctcgatcatctgtgaggatggctcaaaccggaactccttcatcatgggtttgaagtaatactggccagggttcagttttgagaaatgtcagaatgccgttgtcctggttcaagaggttggaacgataacaggccaccgctcagggataagaggactcccgggaggggctggtcatcctcagcttttatctcaaagcttacgcctgccagggcataggccttgaagtctccgatggttccttccactgcagtcagaacatagccctccttctgtgaggtcaccgtgtactccaggtcactgtgcagggggccaaacactgtaggcacctttgtcatcagtaaagactgtgatcagcggtgaacttgcccccttttcactgatgacaatctcgactccttccaactcggggtggatctggccttctaaaaacaggcctgccttcccgtggatctcgatcagcttccctgggcagctttctccactgacaacggcttccattgaagggggataaaagagcagctctttagatgacggtgtaacagtgattttctctccagaccgcgcccagtaagagaaatcatacgagaaggggccttgtaactcatctaccatctcctgcacgggaggcttggtcattctttcttcgccttcctcattgccgtttttctccctctcctgcctgcgggcctcgatctcagccagctgctgctccctccgcagctcctgcacagacttcagagggcctaagaccaaggcgggttcactgtcgatggaagacttgatagtcacagtgacatccatcattttgtcggtggtgatagttccaaggacatggtggcgaatggctgtcaatgtcaagatactaggtgaagacgtgtcataggtgtagaacgcttgctcaaaccggtggcaggagcgaggggtcactttgtacacaccaggcttggacaggcagaatcggttgactcctttggagaggttataaatccccacattctcacgcccatttccatcctgataaaattccagagtgatggcgtgagacagggaacatctcagcatgtagcccgtctgcctgaactcaactgcagacatgtcatcctccagcacttccacctccaggctcttgcctcgtgccgaattcgccacccagc

SEQ ID NO: 319715 - DNA, 474 bp, Homo Sapiens
  misc_feature (401)..(401): n is a, c, g, or t
  misc_feature (418)..(418): n is a, c, g, or t
  misc_feature (439)..(439): n is a, c, g, or t
  misc_feature (453)..(453): n is a, c, g, or t
  misc_feature (458)..(458): n is a, c, g, or t
aacgaccacattgagcgggcgctcccccaccatagggtgattgaggttgggaataatgacatcgatgatgtaaacatcatagttttccggcagattaatcaatttgatttaagtggaaatgtgatcacttcctctgaataccttcctacgttatgggtcaagctttacaaaagcgaaaacctcgacaatccaatccagacagtttcccttgggccagtccctgttcttccatttccccccactgctcagagatgggcgagaactatgttgtgcttctgggactccacactccccagatcccagtatggactacatcttggcctcaagttttcttttcaccgcagttggggctaaccattaaacacatcaccttggatttttatttcccacggaggggaggntggcctggaacaggggncattgggcacaagggtttccnaacattggccctgncattngacggttgttggggtt

SEQ ID NO: 319716 - DNA, 803 bp, Homo Sapiens
attgcttgacttcaaccttctttaggaactgctcttgtctccctctttgccacttagtttgctggctcagtcactacttgaagaccccatttaatttttctctggcagttatagctcttgtgatttcagtacagtctcatctctcagaccaatctcatcaagaaggattgaagggataactatgaggtaagctggacattggagccgtgtttgctgccacgtcagcgtcttgctgggtgaatgtcaagccataaatgggctccagggctctggatctcatcagcattggaaatctattgcctctcatcagtctgaccaaattatgtagagcattaatgtagagactcccattaatgggaatacaagaggcagctggcataaaacatttctttcactttcctttcccactcagattgcttcaagagaccaacagaacacagggattcaaaaacaaggaaaatttagcaacttcattaccttctaataagtaattcctgttagccactgcatcccaccaaaactagtttatttttcccctcaaattcatgatttttacgtctgttacaaagggaattttgctgatagctctttgggtcccactgttccattttatgctaatagattccattctagggcccagccgtctcttgactgatggtgttccctttaacccttggcatgtataatagaattttggtgaatgaaagaacccaaataggccagatagtccccccaggccctgatatccataaaaggcttgggaatgcattatgtaattgtccttagtctttttgtcgttttag

SEQ ID NO: 319717 - DNA, 683 bp, Homo Sapiens
  misc_feature (75)..(94): n is a, c, g, or t
  misc_feature (113)..(371): n is a, c, g, or t
  misc_feature (630)..(638): n is a, c, g, or t
ccaagtactaagtttcagggttctcttcagcaatcattaattaatacttcagccattaattcagatgcaaataannnnnnnnnnnnnnnnnnnngagatggagtttcactctnnnnnnnnnnnnnnnnnnnnnnnnnnnnnnnnnnnnnnnnnnnnnnnnnnnnnnnnnnnnnnnnnnnnnnnnnnnnnnnnnnnnnnnnnnnnnnnnnnnnnnnnnnnnnnnnnnnnnnnnnnnnnnnnnnnnnnnnnnnnnnnnnnnnnnnnnnnnnnnnnnnnnnnnnnnnnnnnnnnnnnnnnnnnnnnnnnnnnnnnnnnnnnnnnnnnnnnnnnnnnnnnnnnnnnnnnnnnnnnnnnnnnnnnnnnnnnnnnnncagccagatgcaaataattttcttagaaaattatttcaaaagttattttaggcccagaaatcaaggattgttccaaccatgaaaatgggtaagacacctgccttaagcaaatctaacctgctattacttgccaaattttatatattcttttctcttgcctgtatttctaattagtgatttgtttaatgaagaactcttcatgtagagcaattaactgggcctaagaaattttgaagctttccatgacataaagtggttnnnnnnnnntgctttgacagtcttcttctgccattagttcaactgcctttacgc

SEQ ID NO: 319718 - DNA, 1373 bp, Homo Sapiens
ttcacttgaattgtttattaggcatttagccacatgacaaaagacaatttgaagaccacagatataatttcaagttgcgtgaacattgattgccctggaaaatatatcagtgaggctttcctaccacttctgatgactgcaagaacatgaaaatctataatgttttaatcaacaaaaatcacagctaatgaataaaagctatggccatgaagattaactttttaattagcaaataatatttctttgttgatgagatactaagcagacaaaatcacaaccctctggataactttggagaaagacatgggaagccacagacagctgagttccatgaaggcaggatgatatttatttgcttcttattccagttttcagatatatctctcttcaatttttgattcctgcagctggcttcactcctactccctctctgctcgcagcacgtcggccgccagctctttgatgtgttcccaggcccgctgcacatgggcagattccaccgtgcgagaacagatggcaaagcgcaggacaaacttgtccctgaggtgacatggaaccaagtggatttttttggcactgtttattctttgcagaagagcttcattcactttgttggaaccctttagccgaaagcagacaagccccagaatgacttccacacagatttcaaagcggggatcctggcgcaccagtgactcaaactcatgggacagctggacatgcttgcggatataagcctgcagtcctttgactccatacatcctaaatacaaaccacattttcaaagagcgaaatcttctgcccagtggtatctgccaatgccggtagtcagtgataagccctgaatcctgatggctgtgcttcaggtaagtggggtccagtctaaaggctcccgttaagtctgttctctttttcacccacatggcagaacagtcaaaattcaccaatagccatttgtggggattaaagttgaatgaatctgcaaactccactccattcagaaggtgccggaaactcagggcagatgaatgcactgcctgcgttaggctgcatcaacgtgcagccatatgtcttccttgttgcagataggaccgacttctaagagattgtcaaaggagcagcatgttgtggtccccagggtggcaaccataaagaaaggaatcaggccagccgctttgtctctctccagggcttcctgcagggcagacgcacgcatggcgaagttgccatctgaggggatggcttttaatttcactccaccaattaacccagctctttccactgaggagtgtgcctgatcggatgagtaagccaccagcttctccatgatagcggcctgtgtgagctctggggaacgctgcctgtcagcgatg

SEQ ID NO: 319719 - DNA, 603 bp, Homo Sapiens
gtggaaaataactttattcatgactgtgtttatcacactatcttatggagaagagatgatcaataaatatttgctgaataaatgaatagcagttacaaaacacttgattcatatggaattaatgttggttctcaaagtgaaaaattacaaacagcactgatgttcagccagtatacaagtctggtcacagcagttgtataatactgaaataccccctgccactgacctttggcccccagatgcctcccactgccactgctctccccactgggaacccctgaagttcccacaggctcataacaaaagggctaatgtctcgcacagcagcgagcacccaggaccgagcagccacatggccgggtctgctggtgaaagcatccattctgactgatcaggacctgaggggcctcatggttacatattttgataatatccctaattataaataaggctcagttatatagtttgaaaacaatgcttctcctcattgcaaaatctcttagaagactccgtagatccaggaacggaaatggaaaatgacagcgtgtcaatctctgaaggttttgggcatttccattagcactccatcttcatgttaaacca

SEQ ID NO: 319720 - DNA, 714 bp, Homo Sapiens
tttttcgaggacttcctctccttggaatgttctttgtccgacttctctttgtgtttgcttttagccttgtcttcggcagcgtgcttcttttcagccttctcggggagcttctgtttatttttcttatcttgcgtggagtccactgaggctctgtccttcctgtccttgtacttttctgtggactctttatccttcttctccttgtgcttttcaaagactttctcttttttgtctctccccgcgtcggcagcccctcggtcctttctcctgtctctgggctccttgtccttctgcctctcagggtgctgcttgtcagaagacttcctgtgtctgtcggaggcataggcctcccgtccttcctccttctcctggaggccgtccgtcctcggcaagtcgctggcctctcccatcttgaacccgctccccatgcagctgtctctgtcgtcctcactctcatctgtgaagatgtctgcgatgtaccagcttttctctttgcctttcttgtcatcttttttttcagagaagtcttctgagatgatcccagggaaagccttctccttcttctctttcccttggtcgagagacgctttcctttctttgtctttgccatgtgtgtctttatgtttttccttggtatcttttttctctttaaaacatttatcaaattctttgtccttctgacatttttccaggattgatttctcacttttgtcc

SEQ ID NO: 319721 - DNA, 653 bp, Homo Sapiens
taaagaaataaatttactttaatggtactttcaaaaagactaatccataacaaattaagttatactgtatttcctttgctacccagaaccacagggctggttgtcaacacatattgaagaaatgtaagcaaaatacagaaagtgatgattttcaaaaggaagagaagaaactccttttcaacaaacactttatatcatttattaatgcagtatacattagatctaaaatctgcagtttctaagcacaccatgtttagatctttcagatccttctgcagttttaggttatttctacagaggtacctttaagtgaatgaataccacattctgtaattcctgaaaatatagtacagagtgaaatgatttaaatataatttaggcacatattgattatgaaaatagattatctctcaatacaatacttctctgtcttggtaaaaataataaagcaaagaaaataattcatttctgaagttgctttccttcacttgtaaaggtctgatctcctcccactatgcatatgtaccctttactgttaaggaaagctttgcatatgtagatatagaagaataagctacgtaaatactaaagatatgtcattctcccaaaggagacacaggtggttttcaatgattccttgcctcatgttgatg

SEQ ID NO: 319722 - DNA, 600 bp, Homo Sapiens
  misc_feature (523)..(535): n is a, c, g, or t
gaaattgaaaaattaatttattatatgaagaaccaggccaatatttattagcatcaacgactgcagagaagcagtcaacgaaagctcatatccacaatgcattgactggtaagtactggcacatacactcataaccatagcactaatgttttaaggtggtttccaaagaaatgctgtatttgacaatcaattttaatatatattttcccatttacaaggctgaaaagattaaactcacatccaaataatgccttgaatcagcattcaagttgtaaagcacaattatcaaaagatgttgctatatcctttatcgaaaactatactaaaatgataaattcatttgccaccagaaagtactttctcagattcagtgggtctttttcttccaagtgccatgtgtttgggtgctatttttgtaagcaactagtggtaagagaaagggcacctgtcgagaagaccaaagattcgcatatccactcaggaactcatatgaatgacactacttatttcttttcaaacagtnnnnnnnnnnnnntaacctgcttatggatttgaataactataataactctataaatatgcatagcacttaaaaacatt

SEQ ID NO: 319723 - DNA, 1574 bp, Homo Sapiens
  misc_feature (59)..(59): n is a, c, g, or t
cattttgaaacccagaaaaattaaatagtgcacccacaggttcaccaaaaaatatatanttaggggcaggggaggaccctagggttattataaacaaaaagtatagactgtatgtgcttttcagaggggctgaattaaatataaccagctgccaactttgtgctctgacatacttgaattagtgggtatgtgtatactaaattcattatttttgtctacaataaatgaaataaaaacaccaccctatacaatccactattagcagtgagtacaacagcaaaaaaattattgtacaatttacacatactaaaatactttctttctctagaaataactcagaacaaaacctaatcattataagacttaatttgggaaatctcaaattacaacagggagaaaccaaatcaggatgtgtacttgagcccaaaacaaaggttcctggtcataaggctagaagatgagtaagtgcaagtggtagaatacagcatgctcaaattgtatgcttgggtctttgtatatttatcaaacctttaaaattaaataagactagctaaagaaatgtcttcagagcaagataactgggaaatctgcatttcttttgccatttttgttacccaacttacacaatgcgcaaagtgctaagcaacactacaaaacacatttacatcaacactgaagacctggggaaatgaaatccaacaattttattgtaatgagctgtattttctaaatttctcttttattttcctgttttcatacagtaaagaaaacaaaacgcagcacattcacattttcccgaggaactgtaaagatgatctctacagggataaacgttgtaaagcctgaagctcaatcaactgatgttggaaactctcaaagggagtaaaggcttgatctcaatggtctagaacatgtactgtaatttaatagaagagatgggtcgtcttaatatttaatgatttaaaagaacttcccagtccatgcgaagagtacagtccaagaataaatcaaatttctgaacgcattttatgctacatatgtgtatactttgcgatcctcaggtgttcgtgccaaatattctctctcaataagtccttcaatacgtttcttaataacaactggacttggtaagaatcgcgccttcaactgctgagttacctccgctactagaacattgtgctgcatcttctttctagatttcattatccgcactatagcagcttctatctcatgttttctgtcgtcgtctactttctgccttgtttctttcctctctgggtcggattcaccttgtttggcagcaactgtttgaatcttgactctgtgtagtttggatgtgaattgatcattaactgtaaatatatgaccattttctatttcctttgatttgggttcttttgtaagaacccgctgtgttggtttaccacaggcgagggactgtagggctctaacaagctctctttcagggatatctgtctcttgctgaatttcctcaaatgtgtatttttctctattattaaagagcattaatatggtcatctggaaagtggaaacttgcaatatgtgcttccgtg

SEQ ID NO: 319724 - DNA, 885 bp, Homo Sapiens
  misc_feature (769)..(769): n is a, c, g, or t
agaaacccaaacccaatgagccattgttcagtcccaattaattcctttaagaaaatatgatttgcccatttttagtgatgtggcaaaggctgcaaggaacacactttaaactcactgtggcaaaggcccactcttgtgtgtacatggttttagagtatccctaaaataatatcctatcacatataatcatattacatacaatcatgatgccaaatatttgcctaatacattatgctgggcataattgctttcatataatttatctttgattctgttgggcaagtgcatggacttcagtagcatgggtgcatagaggtagtactagaagcagagcagtggaccccaacctttttggtaccagggaccaatttagtggaagacaatttttccacagactgggttgggaatagtttcaggatgtttcaagcgcattacatttattgtgcactttatttctattattattacattgtaatatataatgaaataattatacaactcaccataatgtagaatcagtgggagccctgagcttgttttcctgcaactagagggtcctatctgggggtgatcgggagacagtgacagttcatcaggcattagattctcataaggagcattcaacttagatccctcccatacaattcacaatagggttcacgtgcctatgggaatctaatgcctctgctgatctgacaggaggcagagctcaggtggtaccctgagccgtggggagcagctgtaaatacagatgaagcttcgcttgctncgcccaccaatctcctcctggctgtgctttccagttcctaacaggccatgggactggctatcagttggtgggcccaagggttgaggacccctggcgtataagaaatatggaatgat

SEQ ID NO: 319725 - DNA, 519 bp, Homo Sapiens
  misc_feature (400)..(400): n is a, c, g, or t
  misc_feature (422)..(422): n is a, c, g, or t
  misc_feature (455)..(455): n is a, c, g, or t
  misc_feature (507)..(507): n is a, c, g, or t
tacatttattgtgccctttatttttattattattacattgttatatatagtgaaataattatacaagtcagtatcatgtagaatcagtgggagcctgagcttgttttcctgcaactagatggtcccatctgggggtggtgggagacagtgacagatcatcaggtattagattctcataaagagtgcacaacctaatccctcgcatccgcagttcacaatagggttcatgctcccgtgagaatcgaatgctgcagctgatctgacaggaggccgagctcaggtggtaatacgagcgatggggagtggctgtaaatacagatgaagctttggcttgcttgcctacccactccactgtctgctgggtgggcttggttccccaacaaggccatggattgggtancagtctgtgggcccagggactngggaacccctgtcataagaacatgactactgtnaatggataagaatccagctgtaattggcttgggggccttggagccactccangaaaggggttca

SEQ ID NO: 319726 - DNA, 827 bp, Homo Sapiens
  misc_feature (726)..(726): n is a, c, g, or t
  misc_feature (750)..(750): n is a, c, g, or t
  misc_feature (761)..(761): n is a, c, g, or t
  misc_feature (787)..(787): n is a, c, g, or t
  misc_feature (812)..(812): n is a, c, g, or t
ctcggcacgtggtatctccaccatttcttctgcacaaagatgtcttctgttcatcctgaacatttttaaaaaatgcagaattttatgtgactgcttttttgcctcacaattatgctgtgaattttacaaaaatttattttcttttttgataatttattgtaccaaagctgtttttatagcacatagatgtctgtaaccaataatgtagcagttctgcactttgacacaaggtgtaactagaccatttttaaatgtcagttgaaaattatggctgtactattgcttaaacaaaactggaactgttgttgaatccattagccaatacattttacagcaatctgtgtactgaacattagtagattgacattctaattcaagattacaacatctgttacattctaagtgtgttcaggcttctgaaggtaaagggacactggatccagaagctatggaaccagcagttgattcttgtattcctgattaacctacttgtaaacttgaaagcaagaccttgattgcaccaacaggtccagagtatgagtgcaagcaaagcagaactctcatgcgtgacctgagcagacaggctggtatttaacaggtgcctcgtgttgagattacgctgccttaatgtaacacagtctggcagttgctaaatttgtgttcccattttaaattgaccaattttggggtgtgacacttttgagcggttgaattggggagaatgangataagtaattgtacctgtccagnatcaaaataancctaagaaaagaagcaggtaatctancctcttgccgagtaacctgtttaangattgactcagcaga

SEQ ID NO: 319727 - DNA, 1500 bp, Homo Sapiens
cgattcggagtgggccctcaggggcgattagcttagtgagcttaccccgccggagcgggggagcgctagaggtagttgggtagagaagccagcagggggcagcgtgggacccatatcccagccccaggcggaccagaggtggaaggggcggcgggcgtaggagggtgggctggcgtgttttctcccagcccaagggagtcacagtgccttagaagtggcagaggtgagggtcaaagaacggggtccctgggctggcagagaaggtttgtgtccctgttgaggagccactctgccagtctttgctggtccataggcgtgagagtttatttttgtacaaggggtgagggtggggggcactgtacccttctagccccatcaggggccctgtagacgtcgctatttttggtacgattcctgtcatccctattgcagagtcgtgtccccaataaacaggtgtcttgaggcacagggccctgtgtctgtctgcctacctatgtcctgcttccctctttgggtccttctgtcaggaaatagtcacctcttcagacacttagttatcacccaaagagtttgataagaaatgcagaatattgggttttacccccaggtttcgatgcagtagctctgatggggcccaagaattagcatttaacaaacagccaagcaagttctcacgcactgtggcctgaggacctcattttgagaactgctggactgtgctggatcccagtttgtctgtgaccagttcagcctcaaggagtaggtgcagtgtgggagaaggagcttcagagagtgtgtggaacctctgggagccactgtggaggagacacattctcccaggctcatacacagtcagctagctctgggcctgggaggggtagaggggaccttccagtcttggttttattttctgtgttctagttaagggctggttgagggaaagtgcctcaagttatttatcaccttaatcccagaggactactctagctccttagaggcaaagtgtgagtaaatacatttaatataacaatagtattataataacagtaattacatatataaagtctacggttcccctgtcacaccctcctattgtttgcatagcttcattgcttgtgacacctcagaatggagtcaccagggactccagttgacctggcagagatgattcttctcagggaaagtcagggggtgagaaaagaggagaacatgggctgccagggagggctggcatgtgagtgatgtcctggatacagtggcccaggatgggaaagcaccggaagagggataacttccccacctccagggtatgaaggcaagcaatgtggctgctctgactcctgcaggagaaggcaccaagctagggagactagagatagtggtggcagggcaatactctggtcgttagacttctctctgtgtccaggaagcagagggaagaaattcagcgatcgcccagggctccattatgccccactgccatcccagcccaaagtgtgc

SEQ ID NO: 319728 - DNA, 1340 bp, Homo Sapiens
  misc_feature (60)..(72): n is a, c, g, or t
  misc_feature (188)..(232): n is a, c, g, or t
  misc_feature (795)..(795): n is a, c, g, or t
gggtggaatgtagagatggaagcagaacgtgatgtttggatacaacagctatttaatccnnnnnnnnnnnnnaagcaaaacactcagttttctaccttattttctaatgttgatttcatggtaatactgacagttggaagtgtttaacataaaaactcattgctaaagagcactgaggaaatgggagnnnnnnnnnnnnnnnnnnnnnnnnnnnnnnnnnnnnnnnnnnnnngcatatatgtgattgggtattttaaaaaccagtatcatctgtcatctccaaaagattataggagtcagcttgttaatacagtagtgttagtaggttctgtatttttaattcagtacttagaattctaggtcctttattgcccaaagtcagcacagttagtttataccacagactctgtcttggggcacagtagtggggcggggtagtgactttgcctaaacatcacccagctggaacagaggctgagcggggctttaggcacttgccaggatggggaactgggttgcaccctccttgctccctgttcattttcttgtcactcttcctgcttcccagtgttttattttatgccttgctcgttgtacatcatgatgactgatgggtctttcaaggttgtgagggaaagccgtctccctgcttggacttcgactggctgttcccagagggagagtcctgttgcgacctgagcgggggtggctgccatttccagcatgcaggtgacttccaaagaatgagtcaggtggcactgaaaagccatggggttctgaagaaggcgaatttgnttgaaaagtcccaggggtctgaaatgaaagcatctttaatcaacactcaacactcgcaatattctagaaaaccatatactgtgctggttgaggccaaaggttaacattgctccactgttcaccaaggaagggggcagtggccatccgccgcggcctcacgtgcgttgtaacaagccctcatcacatgtgtgagtcttacgtgcacaaaaagagaaggctttggtactgaaactggacaccttgtgtactcgataccttcacagcttctattggacatattttctttttaggaatgaaggaaaattctcccatttttgagccattcttttgtcaattctacaaaattgcatgtaactttataaatatttttaaaagatatagttttgtaaatatttaatattccgctaatttgattttgaattgtaaatgtcaagtattctgtttttggggtttttatgttttattatactttgttaaaaaggacaaattgtacatttttagaatgtttttatgagtaaatttaatgtactgaaaataaaaatttt

SEQ ID NO: 319729 - DNA, 1079 bp, Homo Sapiens
  misc_feature (11)..(11): n is a, c, g, or t
atatttaaaanaatttattttattatacatatttaaattttagaaagttattaggtagatgtacattcctctgttgctttactttgatcttcagttaccattttccgagatctttccaatagcttatcccatattgtaaaatgtgctcttaagtgaacaggtaaagacacgccctgggaatcttcgtatgagacttggctgggtgggttgaagattgtgaactgctgatacttcatactggaaacaaatacttgttcttggaataagagggccctcactcacatcaatgaagtcacctattctgtgtagcttgactattctctcagggttctgaggatgccttctcttctatgaaatctactttgtacttgctgtgttgaaatatttccaatgccacttttgcttcaactttccagagtttcaaatggaagatctttataaattaaagcatgagcatcctttgtgaaggaacgtaagttctcttttgttggcatccactcatcaagtttgctatccaaaactacgtcataacagaaggcaccagaaattacaggaacttctggagctctgaccaaattgaccatatattcatctttgaatgccctctctatcacacagcccatcatcatagcacaggaacgccaatatgccttattcacttctcctggatcacaatctttgaaagtaagaaatttaatttcacaggactttgttaaaggcttatacatgtcccaaggctgtccatccaccagagccagaatggacttcctgcaataccactcgcttaaatgcatggcacaactgtagggagttgaaatgtttttattcatcacgaagacagtaccggggtcagttttcccaacatgcttaacttctatcttctcagttcggggagttaatgataactgcctggctttctctttattaaagagatcattccgcatttctgtcaattctgtcggtgacagctgagaagctggcgatgttgctataaatctccatttgatcccgccaccgggtgcgaccagccagagccgcagcgcccgggaacccatggccagcgcctccatagcagcccc

SEQ ID NO: 319730 - DNA, 677 bp, Homo Sapiens
aagccacaaagttctttcacttgctcattctgttcccatggtagaatttggacaattttgttaatatctgcctgtgaaggactcctcatcaacataagataggcagccagtcgcttatctcccggagaagcatcatcaaggaaagtctgaagaagaacctcctggtccttgtctttaggctccattttccgcagagcctggatggcagctttctggatcatcagtgatggctttgtactttggacacatttcaggattgaagacttgagttctggagttaactgctccatggtttggcccatatttccaatgacccgcagaatcaaataggtgtaatcttcatccccagtgcagtcatcttgaatctgttccatcaggtaattagcaatgtccagcagcttctgggtccctgtagggtttgtcttatgatagttgttgaccgcgtggctcagcgcatacaaggtggctcggctgcgctgatccctcgccatgttgaagatctctcgcagctgctgtgctgagggctcggggatcagggccaccaggtaggtgaccacatctatcagaagggggttggcatgcacacgtttcagccactggaggatgtgagtggagcactgaggctgtccacactgaaccaaggcttgtaaagtgatggggctggacacctcaatcag

SEQ ID NO: 319731 - DNA, 1046 bp, Homo Sapiens
  misc_feature (116)..(150): n is a, c, g, or t
  misc_feature (905)..(916): n is a, c, g, or t
tacaatatgtaaggaaggaatcaatgctgaagggaaagatggagagaattggcatttcatgcttcataactttgtctcctgttagctgcaatttacacattgctctaagccttcannnnnnnnnnnnnnnnnnnnnnnnnnnnnnnnnnnaataaatgacagattatttgctccctatttgctataaagtttcagaagataatgagtatgaaacctagcaggcatcaataaacactgtcttatattgtgaccaattttgtctatttcagagaaagtgatgagaggagggaggaagcatcactaagacaaagctgtaatgaagtttgaactcttctgcgcctatgtaccttccatctttaactttctctgtgtctctgggctaagagaacacaaaccttagtctataaaaaataccctccaaattatttcacataggtatccttccttgaaaacacaggaaggaagaggaagaaacaggctcagttaggcttttttggggccttctgcctgattttcattaaactcacaacccaatttcatttggctccagagttcctttttaaaagcttctgggaaatgaatctactttctaggctggtttcagggttaatcttcaccaggtaaagttactggaacaaaggaacataatagctaatacccgtgaaaaaattcttttgctccctttaatttttaatggaagccccttctagaaatgattctgaattcctacactgagatgggttttataaattcaaatccagaacaaactaaaaaaggaatgtccaagctgggtgtggtggcacatgcctgtcatctcagctactcaggagggtgaggtgggaagatcgcttcagcctaggagtttgaggtcagcctgggcaacgtagtgagactccatctctttnnnnnnnnnnnnaaagcgggggtgggggtgggctggggtgttagcctgtaatcccagcactttgggaggaggctgaggtgagaggaggattgctggagacccggagttcaagactagcctgagcaatgtagtgagaccctgt

SEQ ID NO: 319732 - DNA, 828 bp, Homo Sapiens
  misc_feature (781)..(781): n is a, c, g, or t
  misc_feature (807)..(807): n is a, c, g, or t
tgtgtacatgccatgtaatatttggggcacatttatactaaaaaaagtatttattgtatatctgaaattcaaatttaactgggcatcctgtatttttatttgctaagtctggcaactttatccctgaggcccttttaggagttgcctgagttcagaaatattttctgataatactaagtgattaattgccatttttcactgtgttgacatttgcactgttggtgcagcagcattgaggagtagaactacttgtatcttagcaagaatcaaggcagaggcaataaattactagtagatgtcacaataaaaaaatgtttaatgccatttgaacttaagaacttcctttatgaagagataaaaattattaattttgttaacccttgaccctgagtacgcacctttttagtattctgtgtgacaaaatgggaagcacacaaaaagtgtgtctgccccatgcccaagtgtgatgaacaatcttgtgtaattgttcaagttggactgagctaggccacttttttcaaagacaatatttatttgaaaggaatgacaactatggttatttagaagaaaacagttgatagtgtttattgccaatgaaaaaaattaaaactttcaagcaaaaattgaaattacggaaaactttgtcatcgtgagcatgatggcttctcagtacttaaaatctcttctgattaaatggatggcaacattcacaaatgtgagggccacacgcagcagctcatgcctgtcatcccagtgctttgggaggctgcggtgggagaantgcttgaagccaggggtttgagaccncctggacaatatagcaagacc

SEQ ID NO: 319733 - DNA, 292 bp, Homo Sapiens
ttttttaaaaacgtgtctaaattagatggtaccacatgtaaagggtgaaccctactgttaatattaggcatgtggtttttgctatttttaggaaacacataattatgtaggatttgaagatattattgattctcttcaagataatgttgctgatattaagaaacaggctgaaattgctcacttatatattgcatctcttcctgacccccaggaagctactgcttgtttagaactaaagtttaatcaaattaaagctgaattagctaaaaccaaaggagaattaatcaaaacc

SEQ ID NO: 319734 - DNA, 842 bp, Homo Sapiens
  misc_feature (338)..(338): n is a, c, g, or t
  misc_feature (731)..(781): n is a, c, g, or t
aaaattaaaggatacgttgagaatctagtgactgaatgtttgtaacttgatcttcataatctgttatcatctgtttagagtgaggtttgaagatagtactcctgaatgttcttctgcaagataccttttcctttttagaaaattgtatgcagattactttaatatggcttttgtgccattttcaagaactgacaaatagcaataatgatagttgaatgtaaatggtgtattttatacttaagaatttctttaaaagagactgtattatatagataatcatgttactgagtgcttgggaaattatttgtgcatgattttctttattttgccagaatttnggatttaacaaaaaggtagatgatttcattgaagggccattggtttggaaggtgaatagagatataactattggtaggtctgatattgtcttttagttttggggagagtggcaaaagggaaggaataggaaagtttcctatgacaaagggaagaggagagaaccattctctcagcagtttgcagtgctacctcgtgttatttgtacatttgtagatctgcttgtgttatttcattatatgtaagatgtgttaaatattcatttaggaatgtagtggagaactgatttagtcctatttccatcattcttatagtctagtgagtctttgtatgctttgtaagctttctttagaccagtacatcttaaactgtctgtgatgaggaaccgtttttgnnnnnnnnnnnnnnnnnnnnnnnnnnnnnnnnnnnnnnnnnnnnnnnnnnntagtcacagatgcagtcatggtgcactgctgcctcgaactcctgggcttaagggatcctcc

SEQ ID NO: 319735 - DNA, 718 bp, Homo Sapiens
cagtttcctgttggatagaactgtgtattcatctgcaacttgataaccaatatctccatggttaggccagatcgcatatatgatgtgacttgaaagcgacgaggcttctgcaatacacacccaaaaatcaaggtcattatttcatcctcacacctagtctaccaacttcctatttgaaatcaatactctccaacctaagaggctgtttgctacacaaatagtcaagtattgcagtacaatggtcttgtggggaaaaaaagcttctacgttggtggttaaaactgccactttttctagctggacctctctgaatctcagaaagggttggcacaacagattgattcataagacagtcacaacagactcaacagactgagcctctgaaggtctgggccaaggtcagagggcaacatacagctgagttctctgcaactgtgtttcccagctccctgatgtgctcctggggcttttcaggattatagcaactgtatttaaagtcgctgtacctagttatcatcaacaggcagattagcttttgaaagcatgtacattagctctggatatcaccaaactatgttgtaaacagcatcaagaaaatagaaaaggatggtatgttttactcatcagcctttcccaattcattcctgaagaaagagggaaagagtgagtggtctaaaacatgcttgcttttagagagctgactttggggggcagcggc

SEQ ID NO: 319736 - DNA, 726 bp, Homo Sapiens
  misc_feature (67)..(135): n is a, c, g, or t
  misc_feature (183)..(223): n is a, c, g, or t
  misc_feature (587)..(666): n is a, c, g, or t
tgtcgcccaggctagagtgcgtggcacaatgaaggcacactgcagctttgacctcctgggctcaggnnnnnnnnnnnnnnnnnnnnnnnnnnnnnnnnnnnnnnnnnnnnnnnnnnnnnnnnnnnnnnnnnnnnnttgtatagacagggtttcaccatattgcccttacactcctggactcannnnnnnnnnnnnnnnnnnnnnnnnnnnnnnnnnnnnnnnnatgagctaccacacccagcctgtatggctgttgtgaataatatgctgttatgaacatgggcacactaaacaccattcaacttaaaaaaataatcaaagccttaagaactgaaccaaaatggcttaggtgaaaataaaataccaaactctgctctaagaaaaggaaagaacattcactgaattataccttcagcaataagcacttaatggaacttgtttcatttaaaatgcaccacaatcctgtaaattgataatcatcataccccaattttatagatgagcatggtattaggcggacctttttcaaaaggtcatacagctagtgacgaatatttccaaatttttcataacatttctttttttgnnnnnnnnnnnnnnnnnnnnnnnnnnnnnnnnnnnnnnnnnnnnnnnnnnnnnnnnnnnnnnnnnnnnnnnnnnnnnnnnacgccattctctgtctcagcctcctagtagctgggactacaggcacccaccaccatgccc

SEQ ID NO: 319737 - DNA, 872 bp, Homo Sapiens
  misc_feature (82)..(82): n is a, c, g, or t
  misc_feature (88)..(88): n is a, c, g, or t
  misc_feature (116)..(116): n is a, c, g, or t
  misc_feature (181)..(181): n is a, c, g, or t
ttgggcgccgcggggcccccaaaaaggaggtggtgttaaaaaaatttttttggagggccaaaggcggccccccccacttccncctcgngtcgttgtctggttcctagttctcggcntgctgtttgctggtgttgttccgactcttcttgtcgcgtcccgcgtgggtctgtgtgtgggtggnttctcccttccggggaatgggcaaaattgggttattttcccaggctgggaaaaaggtccttaaatttggtggaggtagccaaccaaatttcaactttgattgctagcaaaaaaaacaggattaatttgctttgccaatgacctttatatagttcaactgcatacaggccaccatgctatatatgaaaaaagttactaactgacctacaggttattaaattctgaaaagagttaacagtttattataatttattttatttaccaatctaagaagttcgcagccatcagcagttccagtgcaatttcaggtgcaattgggaattcaggaatctcggtggagctgttagtgtagcgaaccttgtacgtaaaatacatgcatactttcgatagcacatgtgaaggtatctctctaaaattgacctcattggtttcgttctcagcaaactgacctgggccactcaacatggcttttatcgtgcctgatgttaatgcatgttctctttttacaataaattcatggccatcagatgatatcaatttgacatacatggcatcaggtccttcacagccaccataggttttctcctctccatccattttgttcttatgaaattctactttgcttccccaggaactttagtagtttcctggtgaggcgaggacgcagagtgtgtcgctcacttccgtctccc

SEQ ID NO: 319738 - DNA, 991 bp, Homo Sapiens
  misc_feature (301)..(301): n is a, c, g, or t
acacttaaagaatactgcagtttatcaaaagacataagaaatttcaactcatacttggagagttataaaaatcaatgttttggctaagttataaacatgtttataatgcaattatttgcataactctagtaatgctaatggcggctataagattaggtttctaaaaaaccactaaaaacataaaaatacttagcctcattatttccctgtagaacgtattgatttacacctaaatttcagtatttactatatcatcattgctgattttaagtcacattcaaaggataaggcaaaaccaccntacgaattggcatatttgtttatttctcagtttgtgaaaatgtccttaatttgttgatgtagcaaacaaatttcaactttgattgctatgcaaaaaaacaagataatctgctttgcaatgaactttatatagttcaactgcatacaggcaacatgctatatatgaaaaagttactaactgaactacaggtattaaatactgaaaagagttaacagtttattataatttattttatttaacaatctaagaagttcgcagccatcagcagttccagtgcaatttcaggtgcaattgggaattcaggaatctcggtggagctgttagtgtagcgaaccttgtacgtaaaatacatgcatactttcgatagcacatgtgaaggtatctctctaaaattgacctcattggtttcgttctcagcaaactgacctgggccactcaacatggcttttatcgtgcctgatgttaatgcatgttctctttttacaataaattcatggccatcagatgatatcaatttgacatacatggcatcaggtccttcacagccaccataggttttctcctctccatccattttgttcttatgaaattctactttgcttccccaggaactttagtagtttctcgtcagtcccgcagccaccgcagccgggtccccgcgtactgccacagcccctatcccagggccgc

SEQ ID NO: 319739 - DNA, 852 bp, Homo Sapiens
gagatggagtagactgagcccgtgtcctcctgccttgtgatccactctgtcaccttagtaggggggctctggtgtgggatccccccagaggcgacaggaggtgagagctttgctgcagttacagaaggcagtgtgggtatggggatgcttggatcgctgggtggggtcaccgggtcactttcaatgatggaatgcaccctgaacctggcttgaggctcctcatccaccggtgctggctggggaggtgggggaaggtctgggggcacagatgctttggttggagtcctttcctcaacactgatttcttgggacgaattctctgtggagggaatcttgcttaggtcagaagtacatgactgaggaggagtggaatggggtttctcactctgcttttcttcctgtggggcttcggggtgctgtactgttgtcccctcatttgcagcaggactctcaccttgagcttggtcggattcagggacatggctctctacaggagccaccactttcttgtttgtgtttcgcttgcggcgtgatcgggttgttttctggcgccctttgtctttccgaacaagagtgacttccacttctttagaccctttggcttctggcactgagtgtgaggtttcactgctatttcctctggcttccttggtatctgttgggccggctgaggggtcaggagcattgactggaggcctagaagattctgtagcagcctcagtttccaggatgccagatacagcctcatctgtctccattccttcctcagaaggctgcagcgcctgtgcacctgcggggggttgcagatctgtctgggattctccaggataaggtggaggtgctgggaagttt

SEQ ID NO: 319740 - DNA, 962 bp, Homo Sapiens
  misc_feature (73)..(73): n is a, c, g, or t
ataactttaaaactactatattatacaatagtaaagcagcagagtatcttacttttatataattatataaaancttatttttatattgttacattgtgaatcacattacaatttagtctccttttcaatagaaagattttctaaggacatgatttggagccgtccacatttatcagatgccttttcattaattttttccatttttgcaattcttgatccaaactgcatggcccgtttgggcagaagagcagaggctgtaagaccaagttccacagctgcaaggcgtaaaagtaatttttcaccaattcctcggggtaaagtcaagtttgctttttcccaaatcggcagagaatttagaaaggagacaacattttcatccaggaaaggaaatcttgcttcttttccatgatcaccaataactctgtcatcacgaccaagatttctagaagaaattcgacccagttccatcattatttccttattcaatccttccagcccatgcgactgaaagcggacacgatgacgagaataacctgcaagttgctcatctgcaccaattccagtgagaactacctttgcattgctctgataggatttcactccttcctgggccactaaccaaccaattcctctagaagcaaaccagactgcacagccaatgctatcatccaaaactgtatccaatggccgaattaagtgacatattcgagttcttcttaatttctgcagttcttccatagaaacattaatttcaacaaaattccaaattcgggaagggctaacagcttgtagttcctttagtcccgcccttcctgtgattcgatctggtacactgacatgtttattaggactgtcagcagcagcagcagcaacatctttagagaattcttctgaaggtatttcacatttatttttctgtttattcccttctctgttaaaggtagttggcatggtcttttccc

SEQ ID NO: 319741 - DNA, 894 bp, Homo Sapiens
  misc_feature (312)..(312): n is a, c, g, or t
gggaaaccaccgggcgctttcccctgccctaattttgcccaggctttcctgacagccagacccttcaggaaacaggcctggggacagttcaagtcatcaccccttgcgacaaccacccaaggaaagagagcctgaacagtttaggaaagggctcgcgtctaagacatcagcgacatacagagatgtgccaaacttggtgagaattaaaattgacctttgggagagggtagggcagatgttttatgacactgtagaaaagacaggaggaacccgctgcgatggagattggggggagctggaagcaagcagccnacaggacagagttccagaactcatgcagatggggaagaggtgacagcccttccccactggcctcccccgtggaggtggagtagacagatcccgggaaaggcaggaaaagggccttgctttctttccctgtttcctaagccgtggtcaccctagcctatgaagctggaagctatattccttccaatcccaatttaccattcctgtaaacaggcccattcagggctgcctgagcaaatggggacttgccgaggcagctgcaactagacttgggctaagccgtctgggtctactcaagaattcgagtctgaagatgaccaagcttgagttattcaactgagagtgaggtgtcaaggcggaagcgactgtccccagggaagggctgtgagatggatgggcgtgagtcagcttttccaaaactcaagtacctgggacaggacaactcgctagcagctcagtcacctccgtggcggacacagataaggatgttaagaccagaaaaccagagactagggccccgtcctcagccctcacagcacggacgcgtgggtcgacgatatcccggaattccggaccggtaccagc

SEQ ID NO: 319742 - DNA, 833 bp, Homo Sapiens
  misc_feature (110)..(110): n is a, c, g, or t
ctccagccgaagctccgcccgcaccccccaccacccaacttcagctcgtcataactcacaggccgggtcccagggtgcccaggaatgccactgaggctggcagagtcctnaaaagggagtggcaggtgctgctccacaaggacggttgttccaccctcaatgagggctgcagggcaactgctgactgtctggcagccagaggacagggacaggcagccaccctcttgccatgaccacaccgtgggtctccctcaatgtggctcccgaggggccgttgaacacgagtgttgagaactgctgagaaaatcacaccgaaagacgaactacccacagatgccagtcaccactccagggtgacgagaaagagaacacacaggcggcagcgtgacaaaatgagtcccagcatgctacatctggtttcgggttttattttagaatttataaaattccagtgtcatccatattcatgagcctttacacatgtttgcatataatctccaaattccaaagttaaggccaagggatggattgtagctatggaaacagatgatatggaagacatccaacaaggaggaaaagcacacgcacgcctcacccctgcctcatctctgcccagggctgtcctgacagcacagacgcttcagggagacaggcctggggacagtcatgtcatcacccttgcaacaaccacccaaagggaaaagagagcgctggaacagtttagggaaagggctcgcgtctaaggacatcaagcgacatacagagatgtgccaaaacttgggtgaggattttaaaatttgacctttggggagagggtaggggcagggtgtttt

SEQ ID NO: 319743 - DNA, 634 bp, Homo Sapiens
  misc_feature (96)..(96): n is a, c, g, or t
ttcagactcgaattcttgagtagacccagacggcttagccaagtctagttgcagctgcctcggaagtccccatttgctcaggcagccctgaatggnctgtttacaggaatggtaaattgggattggaaggaatatagcttccagcttcataggctagggtgaccacggcttaggaaacagtgaaagaaagcaaggcccttttcctgcctttcccgggttctgtctactccacctccacgggggaggccagtggggaagggctgtcacctcttccccatctgcatgagttctggaactctgtcctgttggctgcttgcttccagctccccccaatctccatcgcagcgggttcctcctgtcttttctacagtgtcataaaacatcctgcccctaccctcttccaaaggtcaattttaattctcaccaagttttgcacatctctgtatgtcgcttgatgtcttagacgcgagccctttcctaaactgttcagcgctctcttttcctttgggtggttgttgcaagggtgatgacatgactgtccccagggtgtgtctccctgaagcgtctgtggtgttcagggacagcccggggcagtaggatgagggcaggggttaggcgtgagtgtggttttcct

SEQ ID NO: 319744 - DNA, 982 bp, Homo Sapiens
  misc_feature (366)..(393): n is a, c, g, or t
  misc_feature (507)..(533): n is a, c, g, or t
aaatcttaaggatgctattgaagggttttttgataaagtagccaacagcaccaaaaaataacagaatggatttcctaatgaaatcaggcacaggtctccctcatgtgacccctccaaggcaggcagtcttttccgtcttcctcgctcgcttttcttctttcctggaacagatgcatagtgatgtgctggtggagagcccactcgctcccgtctcctcgttccacctatggttaggaaacaacgtccgccttcagctgccacaaccgcccagagaaacaaaacgggggtgccccggcttcccagatcacaagctcatctggcacacggcagaagacgacagccaaagcaaagccatttcaagtttcnnnnnnnnnnnnnnnnnnnnnnnnnnnnctcctatcccttctaaaaaatctgctcacatgactgatggtttttaaatttgttctccaaacttcaccctcttcaaaaatgggttaaaaagcctttttccccccaacagttacnnnnnnnnnnnnnnnnnnnnnnnnnnnggcttttgtcagccatggggcaatacaaattaatacagcccctccggggtttttaaaacagtgactatacggcagtttccaaaatctgactgcagtatctaggttttctaagtacaaaaaaaagttcaacagtttaatgctaaaacaaaattagttctctaaaaccagaagaaaatcttctttagagctagtgcaaagacagcttgaatcctacagcaagtactccaaactagaatataataattacaaaaaaatatatataaatcgaccacgggcgttggcatcttcatgatgagctcgaagcacttttggatgaactggaggctgacagacgggaggggggcacgtccactgtcgctctcttgcggggacctctttttggtgtgggtttactgagacagttctcaatgctgccgtttttaccagacactttgccgcagatctgattg

SEQ ID NO: 319745 - DNA, 745 bp, Homo Sapiens
  misc_feature (463)..(506): n is a, c, g, or t
  misc_feature (524)..(574): n is a, c, g, or t
atgggctcttccagagacgtgaactggaaaaggctctgcagtgtctgggattcgctcagtgctgcaggggagggcaggtgtgaggggaatggccctggagggtgatggggctggggcatccgatgcagctttatagttctgtaattaccacttttaaactttttattacgaaaaatgtcaaggaccctgggaattacggtgaggtaggcaggataatggcccccaagatgcccgttttgtgacccccagaccttgtgagtgcctcacatggggagattgtcctaggtcatcttgcaggcccagggcagccccatgggcctttaaagcttgagagcctttcctgctgagtctgagagatgccagaagcaggagaggttagaacccgaggagggccgcacctgcgctgctggccttagaggagggccgaggagtgtggtggcccctaagcagctgggactggggnnnnnnnnnnnnnnnnnnnnnnnnnnnnnnnnnnnnnnnnnnnncccatgatggaggaaagnnnnnnnnnnnnnnnnnnnnnnnnnnnnnnnnnnnnnnnnnnnnnnnnnnncctgaggttttgtgtagtcaccatagaaaactcacacacataagaactctgtactgattcaacaatagaacatgtcacacacgaactggaaactgattctgtgggcgacaagagtctatagtaaacgttatgacagattctttgaatgcgctaatctcagactggactaaa

SEQ ID NO: 319746 - DNA, 472 bp, Homo Sapiens
ttctgcaagctgctttattttttattttcatttacattagaaaataatctctcccttgcttgattttacaagggtaagggtggtcacatgactgacagagacaaccatggtgacacagctcttttcagctgttcatcaccagcaacctggatttcctatgcccagaacagcaatgcactgaactcaagtacaaattaaatttaatcccaactttagtccagtctgagattagcgcattcaaagaatctgtcataacgtttactatagactcttgtcgcccacagaatcagtttccagttcgtgtgtgacatgttctattgttgaatcagtacagagttcttatgtgtgtgagttttctatggtgactacacaaaacctcaggcttacaattgtggaggtcagaggtcaaggtgctggcagggcaggatccttcctttcctccatcatgggggctgctggcagaattcagttt

SEQ ID NO: 319747 - DNA, 1512 bp, Homo Sapiens
  misc_feature (1438)..(1438): n is a, c, g, or t
  misc_feature (1451)..(1451): n is a, c, g, or t
  misc_feature (1456)..(1456): n is a, c, g, or t
  misc_feature (1486)..(1486): n is a, c, g, or t
gtggggacacattggctgataaacgggagcctggaatatgcatggcgtgtcttgttacccttatggaaggagcctttgagatcttcctccagtcagaggaataccaaagccccggagatgaagaaattcaactgtaatcactggtgccacctaagtccagtcacgacagatagaaggcccaccctggagttttcagtgccataagccaaaatttcctcttttttgcttaaaccagcttgaggcaggattctgagatctgtaactgaaagagtactgactttgacttgtcagtcaagcagcctgacttgactttgcataagctgagaccgaagccctctgtaatttctgagaattgtctttactaaaataagaaacctttttctcttccctcactgtttcatctctgaattgaatgtaggtatgtctataatatcattattttaaaaagtaggaaatcaggcccaatactcactggtccacttccggccgtgaggttctgcagagctcctaaggatgcttcttgtgtgtagttgcggacacttttggcgatcaaggacagatacatccttataacaatggaatgccacagccactccacgcccttggggttgctcttttcctccggcatcggcacgtcctggtattgctcttttactttcctgcttcgactgccaaaacatccaatacttttgttgttgtcagtctggatattccggttttgaatatagatattctgggaatatttctctgggagctctgcctccagctggtaggagaggttatgaagaatgcacacacaattctccgtggccttgtcatctggctggtaatctgcaatggttcctctgacataatggaccagtgagtcaatgagtccgtcacatcttctcatcgcttttctcccatcagcgccagcagaactcatgtttcttaggcatccagtgacgttgtagaatatgtcaaaatcgagcaaaccatttgcttttgggtagtctccttcaggccacccagaaaaggggatgatgatattctccgtcagcgtaagcaatgcttctgttatcatgagattcttgagtttgtcattagatgacaaattccacagcaaacctgttatttgttttttagtctccaagtctctggtttgcttcagcacctggagcagccgaggtaccccatttagttcagccacctccaatttgttgtcattgtcttcaaatactaagtttctcaaggccccacacacagctcgctgaacgtcttcattctgaacttttaggagctgcagaagcttgaggatgccacgaagctggttaaccctcttccgagcttcagatttctggaagcactcgtgctgtatgaaagtagctgcagcagaaatcctggatggcagcatgtggtctgcctcgagcatactcactgctcgcttcagagtcatctncatgtctgcattncccanctgggagtcaagtgaaagtgcttcttttangtgagcaagattccaactttcccctg

SEQ ID NO: 319748 - DNA, 533 bp, Homo Sapiens
gcccattgcaaagaacacatgatttattcaagacaactcgtcatcaacagcactgactcaaggaacaaaacagatgaaaaaactaaagcaaacgttctgaccctctggagtgagacccgctgaattcatacagctcaatctgtaagtgtccaagatccagggggcaggttctcaagcaggaagcctcaggcactctggctctgtggggacctcccttgggcatctgcttgagaatctggggaagggacattatcagggcaggtcctttctgcaggcggtgtcctgctgggagctcagcctaaccaaggcctggtccctgtgctcttgaccttcatctcaaggtcaaggagagggcacttgacccaactctgccagcgaggcaaagtaatggtcgattcaagtagtgtggttccaggagggaaggtagggggcagacaagagtgagtgcactaaagagtcctgggcagtgtctgctgggtcccaggcagtggcccaagcttatgaaggggttggagaaggggctgaaccaccag

SEQ ID NO: 319749 - DNA, 815 bp, Homo Sapiens
  misc_feature (62)..(74): n is a, c, g, or t
  misc_feature (101)..(115): n is a, c, g, or t
  misc_feature (130)..(295): n is a, c, g, or t
  misc_feature (302)..(504): n is a, c, g, or t
ggcccgggtgtttcttttgagaaaaaaagttttgccccgggtttcttgttctcctgtggggnnnnnnnnnnnnnaaagaaaggtttttaaaaatttttttnnnnnnnnnnnnnnncgccaaaatgtggcnnnnnnnnnnnnnnnnnnnnnnnnnnnnnnnnnnnnnnnnnnnnnnnnnnnnnnnnnnnnnnnnnnnnnnnnnnnnnnnnnnnnnnnnnnnnnnnnnnnnnnnnnnnnnnnnnnnnnnnnnnnnnnnnnnnnnnnnnnnnnnnnnnnnnnnnnnnnnnnnnnnnnngcagacnnnnnnnnnnnnnnnnnnnnnnnnnnnnnnnnnnnnnnnnnnnnnnnnnnnnnnnnnnnnnnnnnnnnnnnnnnnnnnnnnnnnnnnnnnnnnnnnnnnnnnnnnnnnnnnnnnnnnnnnnnnnnnnnnnnnnnnnnnnnnnnnnnnnnnnnnnnnnnnnnnnnnnnnnnnnnnnnnnnnnnnnnnnnnnnnnnnnnnnnnnngaacaccttgggttgcgctcgacgaggaaatgcaactttggggtcaatcgtcttggaatctaactcatggtggggctgacctaatactttatctacacttgctgggtctgcgaacgtgacgaaaccgaagcctctggagcgtttcgtagtgggatctctcatgaccatacattctctaatttctccaaatttgctaaaatagtctctaaggctatctggtgaggtctgccagctcagtccaccgataaacattttaccggggtcgtgctgggagtcgttggcgctgcccgaggtgccttggctcccatttg

SEQ ID NO: 319750 - DNA, 871 bp, Homo Sapiens
  misc_feature (562)..(571): n is a, c, g, or t
tttttaactgtccgcaagttaaaaagatttattgctattccaggcttcaaatgagcccagaactcagggctggtgtgtgtttcagaagttgttatgatgtaacagggtggtagaaaaatccaggcagtttgatgtcgaggccaccctctcttccttggacccctgctccaaaagcagctgctggtgaggctctttcccatctgcctcattcacccaacaggactccaagactgaggcaggcagccttgtgatccccacagctcacaggtgagaggctgctcatacctctcctagcactggaagagccttgtccttgggaccggacactatggctttggccctgtggagggagaaacggtgccacaggagttgtcttaagaggacaaggcatgcacggtctgagatcagaggttgtgacgtggccacccatgagccagtccgtttgggacacatcacactgcacagctttttaaaaaaataattagctgccaatcttttaaaatggtaagatttcatatacaaatctggatttttggcttctctaggagtaaacattgaaacnnnnnnnnnngagacagagtctcactctgtcaccaggctggagtattgccagtatctggcagttgtcttcacagactggctatgcactctccaactgactccagtccttgccacccttaattatatttccaactggagaccaggcctcagcagccttgtatcaatgggcacatgtgctgtgactttctgtgtaagaaatatttacattgtaatagcatctttaatcaaaaaggaaaaatcggctgggtgtagtggctcatgcctgtaatccagcgcttgcaaggccaaggtggacggatcacgaggtccc

SEQ ID NO: 319751 - DNA, 864 bp, Homo Sapiens
  misc_feature (512)..(512): n is a, c, g, or t
atttatactctgtggacgtttattaaggctctggcaacactgtggagctggcctgtgtccccgagaagaagagtcagtcacaggggggtctccatctgatccagcagtttgaagcttctcattgttgtccttatccagggcaggaaacttgagaccctgggtgaagacttctggaggaacccctgacgactttccataggagacgatgccgtgggccacattgttacacagcagggggcctccggaatcccccttgaaggcagccttccagttcccgccggtcccccacacaaatctgccttcggggggtcgtagggaacccgaagatgcggaggcacttgccttatccctctgcactctcagctgcacctctcggagtgtatctgttcccctcctcatgctgaccctgccccagccggccacagtgcacagcgtcccgggtctcagtccctcctgggctctaggcagagccactgggttcacgtttcgattccgtctgaactcttctgctncagctgcaaataaacatgatgtcaattctggatggtccgctgaattatattgagggtggcggaatggctctgcgcgcagtgatgtgttgctgggtgttttcccgtctctggatattgtgggcgcccagggtgacatttatattgcttccccagcaatgagctgctgtcagcacaaagtcttctcgcaccaggaaccctccacatctgctctgacctgctggactctggatctgaagatacgccatgtaggggcgggagtggggcctgctctcccggcctccgatgatctcccctgcctcagccccagtgggtaggagaaaggccagcagaagcaggagtggctgcatctttc

SEQ ID NO: 319752 - DNA, 748 bp, Homo Sapiens
  misc_feature (13)..(13): n is a, c, g, or t
  misc_feature (33)..(33): n is a, c, g, or t
  misc_feature (620)..(628): n is a, c, g, or t
ggcagagtgctcnttaaatatcaatattaggtnatgtcattgcacttgatagtattcagatcttttatggcctttaatgattgtgttaagtttttctatcaattgctttagaaaggagtgttaaaatctctcacataattgtagatttttgtttctcctttgagttttcctcaatttttgcttcatgggttttaaagctgttttattagttgtatgcatatttatgattgttatgtctttctgataaatggaaccctttctcattataaaatgtcatttttaactataatattttgttggcttgaaatgtacctttatgatgtcagtatagccaattcttccctttaatggttatattttgcatagtataactttctcattcttttaatttcagcacataggttactgtatatttaaagcgtatatattcggatcctgttgtttataatccattctgacaatttcttccttttcattgcagtgttaatccattgaattgtaacataattataatatgattgggtttaggtgtaccatattatcatttgttttctgttcatcctgtttttcgtttctctgcctctctttttcttccttccttttggattaattaactggcnnnnnnnnnaatctaaaagttttactcttctatcctctagacccacagtttctgatggtaattcagtggaactcatttcattattcacttaaacgtaatgtgtcagttttgtccggctttccttttttc

SEQ ID NO: 319753 - DNA, 595 bp, Homo Sapiens
ctgttgctttatttgacatctaaaagtgaaaaggatgctgtgagcagagagatcagattaaagcgatttcttcatgtatttttttcttctccacttcctggagaagagcccattggaagagtggaaccagtgggtaatgcacctttgttggcattagttcacaagatgaacaactgcctcagccagatggaacaatttccagtcaaagtacatgatttccctagtggaaatgggacaggaggcagcttttctctcaacagaggatcacaggctttaaaatttttcaacacacatcaattaaaatgccagttacaaaggcatccagactgtgcaaatgtgaagcagtggaagggtggacctgtcaagattgaccctctggctttggtacaagccatcgagagataccttgtagttagagggtatggaagagtaagagaagatgatgaagacagcgatgacgatggatcagatgaggaaatagatgagtctctggctgctcagttcctaaattcaggaaatgtaagacacaggctgcagttttatattggagaacatttgctgccgtataacatgactgtgtatcaggcagtacggc

SEQ ID NO: 319754 - DNA, 739 bp, Homo Sapiens
  misc_feature (24)..(24): n is a, c, g, or t
  misc_feature (46)..(46): n is a, c, g, or t
ggacatagtagtctccccactttnatttttgccaccttacaatttnatccacagagcagctagagtagtctataaattctttttaaaatacgtaaaatcactcactgcttagacactacataatctagtccttggctgcttctctgaccctgtcttataccagtctgcatttactacagtccatctatactggcctctttgaactgttcttcagatatgataagcttgtccttgctaaaagctctaactgttatttctgcttggaatgctcttctcgtctactcttcctatgcctagcattttcttaatgtttaggtctcacctgagatgtcactttcactgtagtactagtagttgatgttactactgattcgttggcagtattcctgaaatagaatataggataaatgaggacatgtttattttgttcacagctgtgtccacaaaatctaaacagtgcctgtagtactgtaggagctcattaagtagtcggctgattgatttttgtacctaatggttctattaacaatattgacccccaaatgtattttcttcataaccttctcctctgaactccagtctgtatatttaactgtctacctgacatttccacttctaagcttaaaagctcctccaattgaacctgtgatctctttaaatctgggactccaggatttcctgccacagtgaatggatttaccttttatctatctctgtaagctagaaagttgagagtctt

SEQ ID NO: 319755 - DNA, 663 bp, Homo Sapiens
ccagtcaggaaaggaaaatcaatgttttctttaatgctgagaatttttgttaatatttctgacatttcataaaacatcttttgttgacattctacaaatgatagcatccaataatgtcccgatactttcttcttgtgaagagagtttatatatctttttgacttctgtaatattcattatttcaggaagatttttcagagaaacctgatgaccttctacttgagatattaggtattcttgatttatttgtttttctccctcttcaatgtaaacaattagaattgaagtgtcatttgctgagataccaaattttttcaaagcctctgaaatattgttatttggggaaaggttgaaaataatttcagtagatagagttcttgtcttcatttttcccagtttgtagaggtgaactgctttgtttgctgccacaagtatctgaaatggatcaacaatcactgtaggatttatcagtgatccatcgatggtgccttccatggcctttcttctcaagtctcccgcattttttacatctttaaataacagaagggttaccctgcattcgggaaataggtccagctgatgtgttaactgcatttcacagataagcaggattcatccggcccccagtgcgtctcggaagagctcccgctccgaaacaacccc

SEQ ID NO: 319756 - DNA, 595 bp, Homo Sapiens
  misc_feature (536)..(536): n is a, c, g, or t
ggaaaatcaatgttttctttaatgctgagaatttttgttaatatttctgacatttcataaaacatcttttgttgacattctacaaatgatagcatccaataatgtcccgatactttcttcttgtgaagagagtttatatatctttttgacttctgtaatattcattatttcaggaagatttttcagagaaacctgatgaccgttctacttgagatattaggtattcttgatttatttgtttttgctccctcttcaatgtaaacaattagaattgaagtgtcatttgctgagataccaaatttttgtcaaagcctgcgtgaaatattgttatttggggaaaggttgaaaataatttcagtagatagagttcttgtcttcatttttcgccagtttgtagaggtgaactgctttgtttagctgccacaagtatctgaaatggatcaacaatcgctgcattcgggaaataggtccagctgatgtgttaactgcatttcacagataagcaggattcatctcggcccccagtgcgtctcggngaggtcccgctccgaaacaaagctcacaacttccggaagcgatggccaatccccgtctt

SEQ ID NO: 319757 - DNA, 2433 bp, Homo Sapiens
  misc_feature (30)..(30): n is a, c, g, or t
  misc_feature (222)..(222): n is a, c, g, or t
  misc_feature (254)..(266): n is a, c, g, or t
cgggcggcgtgagcgagcgcacgagatgtnggtatatgtatgttgggcttgttggctcaggcgtaaagaggatgaaggtgaattcttgagtcaggcgcccggagtcacgtgattagtgtttgattggggggtaggaatctcaacaccatagatgtgtgggggttgcctgtgttgtgcttgttgctttgttcgtgtcgctgtcgtgtggttggtcttccgtgnggggaatatgaagttttattcttcaaaatttnnnnnnnnnnnnnccaaaccccacacacccaagggactaagatgatgttatttcacagcacttgcttgcctcagtctttacgaagaacacaattccaaactaatggacaagttcctccctgtgctctaggtcattcaaaggaggcaagctcctttgtcaaattcaggagctccatcagctgatcaggagcccagatgccagggtggattttctcagtgggatctagtattgctagaagagccttccttacatggcagaaacaggcacatgggcctcttcccttagaatgcatctgtctcacatgcttggggactgctgtgcaggaacacctggtgtggcctggcgaggcagcgtatacatggcccccaaaaactggtctgcaattcttcccgcttctcgcagcccactcagcagagcaccatgcactgtggctgggtagttacggatcgtatgttctcccgcaaagaagagtcgtggaatcggctgtggggcacctggaatcgaggggccaggagtgattggctgagccattaaatcatagtcatttccagatgatcctgcagcaacataggaataagagccccgagcccagggatcagcacgccaacgagacaccacagtttctttgggctgaggtactgcactgctaccaaaaatccctttgagaatggccaggcatcggccaacaatcacatcgtcacttatgttttccatgataccagcagcttctcctgccactagtgccaacagtattggagctttatagaggttccagaagaggaagagctcaacccctgctggcagtcgtactgccaacatgcccgaaacaaattgacacttggatcccagaacccccgatcaaaccccaacgccaccttgttaaggttgccaaatcccatcctttggactgcagatgttttccactcagggagaggtggcacaaactgaacggctggtggctgctgcttcagcacacccaggggaagggtacagagaactgcgtcgcatttataaataaaggtttgactcgtggagcgggtattcacagctatcacttcacatcctgaagccgtgtagcgaacctgtcgcactgctgtattcagtttaatgtctaggccttctgctaaagccacaggcacacacgagtagccattccttactgtcaggtggctgccagtgaactcaaagtcatcatcctgatcccagtgcttaagggagagagttgagagaggtgtggcattagcaaattcaagatttgcaaaatgccaatcaagtatttgtctgtctcttgatgagagatatacatcacttgggggattcgcttccaactcctgaagtttttcttctagctttccttgtgtttcagctaattcatcatattccttgcatagggcggtcagatccctgtgtttgcttttcactaagaactcggcagtaatatctctgggtggctttacttcagatgcttctttgtattgctgatggagttctttaattttctctttcaaatttaccatcttattaagaagttctttcaattcttcctgagttttcactatcttcttccaatgttcaatctgctcatctttgacatgcttctcttgtaactgaatgacaacttccaatgcctggccaagggacacaggcttattattgaggacattgaagtctagttgatgactaaggtaagatgtagcttctagcaaccggttaaactcttgctctaccatttcatctttctctttaggaacagcttgtccgttggcttcataaagtgggcatttttgcttgatcttggccagttccatatttacttgtttgctgaccacagccataggattccctccaagacctgttaccaccatggctccaagatcagctacatagtttcctttgcgaaatgtggcaactcgtccacccacacgatccctggcttccaaaagtgtgacatccattccaaaactttgtaactgtcgagctgctgccaagcctgagaccccagagcctataataattacctttcctgtctttttagttggtaggggttttatcctcttatagatgccgaagttgataagaccatgacgctctaaataacctgtgaactcggtggacaagcacagtatcactgttataaggcgacgcgtgggtcgacgatatcccgaaattccggccgtaca

SEQ ID NO: 319758 - DNA, 456 bp, Homo Sapiens
  misc_feature (391)..(391): n is a, c, g, or t
  misc_feature (404)..(404): n is a, c, g, or t
  misc_feature (420)..(420): n is a, c, g, or t
tgaatagtaatttggggggtcagcctttaaaaaggtcaacagcaatttaagtacttagcaatttaagtacaagaataaaggtatatgtgcagcctgccaattttctctttttcccctaaaatagccgattccacgactcttctttgcgggagaacatacgatccgtaactacccagccacagtgcatggtgctctgctgagtgggctgcgagaagcgggtaagaattgcagaccagtttttgggggccatgtatacgctgcctcgccaggccacaccaggtgttcctgcacagcagttccccaaggcatgtgagacagatgcattctaaggggaaggaggcccatgtgcctgtttctggccatgttaagggaaggctctttttaggcaatnattaggatcccantggggaaaatccaccnggggcatctgggggttcctgattcagcttgatgggg

SEQ ID NO: 319759 - DNA, 680 bp, Homo Sapiens
ggcgggggaagaggtggagaaggggcgccccctatctggacccacttggagggagacagcggtttgtttgtgtgttgatggtgggggaaatggcctgaaagattgagggtgtagacccacagctagagagagtgacaggcagacagaggggatggactcacagagcatacggacagcaggatgggatggatggcagaaaaaggtgcagagaggagacagagagagagtaggagaactgaagttacaaagaaagcaggcatgagaaacagcacaggaacagacagaccacagaagggacagaaagacagatgggcgggaggaggggatgctaggggatcttggaagacaggcagagacagggagaaagggacacacaggcagactcagaaacaaacaggtgggtagggataggctcgtggaaacacctgcagaaaggcaacaggcaattgggctcagtcatagacaggagacacaggctggccaagaggtgggggacagagccagacagctccccaaacagagggtaggaccagacacaccagctcagagagatgaaggggcagagagagtggttgaggcagagagactcctggagggacaggagaaaagaggcagagagaggcagattcaggcagagaagcctggggacagcaggggaacaggtgcaggggtagtagcca

SEQ ID NO: 319760 - DNA, 1710 bp, Homo Sapiens
  misc_feature (381)..(382): n is a, c, g, or t
  misc_feature (384)..(463): n is a, c, g, or t
  misc_feature (466)..(470): n is a, c, g, or t
gttttttgaaggggctttccccatttcgcggcccaaaatgttttttaaaggaaattcccacccacgttctttcgcaatagaagggccacagggcggggggggttaaatataatatatggagagtctcgcttggggactccccgtggaatagatcttcaggaaagggccctccagaaatccccctttgggaattgttttaaaaaccccttgggtttcccccccgggggtttttttattgggggggaatccagcccctagttatgggcccggtttttccttgggaacccggtatggccccagttccctttccttattgggcccccgcggcccaaagaaaggtttagaaaagttttttgagggccggaggcggccgaacaaggnntnnnnnnnnnnnnnnnnnnnnnnnnnnnnnnnnnnnnnnnnnnnnnnnnnnnnnnnnnnnnnnnnnnnnnnnnnnnnnnnnttnnnnnttttcagtaattgtcaacatctagaatttaatgtcagtttgcagactgttaaggattattcttctatttcaggaacagctaattttcctcttgaagcattttctctatttccttatcccagttttcatctcgtttttcagattctgtcaccacttcatattcttgaagttcctgctgcagttctttttcccaatctgcagaatcctcttccagtacggctgtctcctcttgctttttgtcaagcactagttgctccatttctttccttagatcttcctgatttaggttacaggcatcgaaggcatcactgacaaactcagaaacacctgggctagtagaaatttcttcctcatcctcttgagttttaagctgagatttgattacaacgggtggcgttttgggccgtactgcctctgccagcggcaaatcttgctctctgccattgctcttctcctccttccctgcggcctgctgttgggcagccagggccgtgagctgggctgactgcttaatcagggagacgcggtaaaagtagttcctccagaacacttcttccttcacaagtttaggaacgagggcaaatctcatcttgcttagcagctcatcctcctggagcatgaccagggccacggggtacatctgatcaaagtcgaaattaaattgcacgccagccggagggtcacgaaggaaattcctcttgtcagctgataaggccaaaatttgttgttgaattgtttcttcatcgttagtgtcaacccatgggggcacagctgcttctgacttctttgtatgttgctcttcaacaaattttttctgttccttctgaaaatctcctataattgtcttgtcaatgatgccatctatttttccttcttctacggatttctttattgtttgtgctgtttcagcaactgattcagttatcttttttgtggcagcagatgcaaagttaaataaatagttgccgaagtctttggcctggtggaggagctcctggtctcccgcttgctgcagctcctcctccgcagactcagccaccgtctcggacggctgctcgggtggagcatctccattgggctgcccaccgcctgccaccggctgctgcaagcccaaccaactgctcaagccccggaacatcccgctcgcgggccgccgccgcggtcccgatccccagagaccgcagcgagcactggttgcctttgactccactctgcgcttcgtgccgaattcgccacccagc

SEQ ID NO: 319761 - DNA, 1024 bp, Homo Sapiens
tattagtaaacgccacgggccgtgtcatatcgagaagcgagcatgcggatatattgctcacatcggaaatcttttgtgctcacgccccactggttgtgtattatccgactcagggcctagttgctggcctgtctcttgtaatccccccctggtcgaacatcatggccctgcaggcaaatccaatgggacttgcgtgaaccagcagtcgaaatgggcaattctcctggcaatgtccgtgcagtctggcccatgaacaccacaccggggtttgaggcccacctttggccccttaattcagcttcggccccttcagtccaccttccactttaggaaggtaaacatccacatcgcccttcactttgggtcctttcaggtttaagtcaatatcaggcatggagatcttgggggctttgatgttcatctctggcatcttgaacttggggccctttcaagtttcgcctctggtccttcgatgttcacatcagggccttcaatgtccactttgggtcctgagacatcaatgtcagccttgggcaggttcacatccccatctgggccctctcctttgaagccaggcatgctgaactttggcattttcactttgggcatttttaggtgccagtctgggccttgaacgtccacatctggggcattaatgtccactttggggtccttgatgtcaacttcggggcccttgaggtcgccttccactttgggcagagaaatgtccatgtcgcccttcacctttggacctttcagattcaggtcaacttcaggcatagagatcttcggtgccttgaggtgtaagtcaggcattttaaatttggggcccttcagtttcccttctggaccatgaatgtcaatatcaggagtgtcaatgcccactttagggcctttgacatccactttgggacctttcagatctccctccagtttaggaacggaaatgtccatatctccttttatcgacgcgtggtcgacaatatcccgaaattccggaccggtaccagcctggccatgtttt

SEQ ID NO: 319762 - DNA, 2654 bp, Homo Sapiens
  misc_feature (103)..(103): n is a, c, g, or t
  misc_feature (133)..(133): n is a, c, g, or t
  misc_feature (135)..(135): n is a, c, g, or t
  misc_feature (232)..(232): n is a, c, g, or t
  misc_feature (283)..(283): n is a, c, g, or t
  misc_feature (295)..(295): n is a, c, g, or t
  misc_feature (442)..(442): n is a, c, g, or t
  misc_feature (559)..(567): n is a, c, g, or t
  misc_feature (671)..(691): n is a, c, g, or t
cgaggtagtgtatactctggtatgtgggtcgagaagactgctggagtggtgtcgatatggtactgctataaacacgcgcagtacgcagtgtggcgacgtacanaggagaggagagcggagctggtgatatacnanacatcgttttccgccttgaatcatcatagcggagagtgaggagagacagagatgagccggcgccgtcaaaagcgtgtcatagaggagaacaccagtntgtggggcggttggagcatcacaacacatggaggtggtttaggggttgagngcgcgagaacangagggcggtctcaatctgtgttgatcatggtgtaaatatgataggtggcgtctggaggaaagaaacagagaaagagcggcgccgctggcgagaagtgaagttgctgtatctctctgtgtaatcgcgccaaaatggttgtctccagancgtcccaatgttagatcttgtaggggcgcggcgtggcgctgtgttactatgggaatataaatagcggctgggagcctaattagcgttgcttgaggtgggtgggcggggtatataccnnnnnnnnnagcatattgggggagttatattgataacacttggcttccgtacagatggcggttcggacccggggataaaggcaaaaggcagatttcaggagtgggcgggggtnnnnnnnnnnnnnnnnnnnnngtgtgggaggtaagtaaaacatatttatgatattttgttcccttttagagaaatgatttcgtttacagatgtatttgtgtgcgggtattaagacattgatatttaagttgaacagagcattttatttgtcagcaattctatgcgtacaaattaaacatgagatgaatagagactttattgagaaagcaagagaaaattcctatcaaccccaaggaggactcaaagtgaggctggaagaggacttagaagagtatgaaagtactctaagattttatctaagttgccttttctgggtgggaaagtttaaccttagtgactaaggacatcacatatgaagaatgtttaagttggaggtggcaacgtgaattgcaaacagggcctgcttcagtgactgtgtgcctgtagtcccagctactcgggagtctgtgtgaggccaggggtgccagcgcaccagctagatgctctgtaacttctaggccccattttcccctctgaaaataagagggttggatcaaacgatctctggggccttagcatctcaaatcctgtggatcctcctacttaccccttagagagccttactgggaggtcagtcattaatgatgtggcccagttatttggcaagtggtaagagcctatttcccataaataatactaagaaccaactcaagtcaaaccttaatgccattgttattgtgaattaggattaagtagtaattttcaaaattcacattaacttgattttaaaatcagttttgtgagtcatttaccacaagctaaatgtgtacactatgataaaaacaaccattgtattcctgtttttctaaacagtcctaatttctaacactgtatatatccttcgacattaatgaactttgttttcttttactccagtaataaagtaggcacagatctgtccacaacaaacttgccctctcatgccttgcctctcaccatgctctgctccaggtcagcccccttttgggctgtttgttttgtcaaaaacctaatctgcttcttgctttttcttggtaatatatatttagggaagatgttgctttgcccacacacgaagcaaagtaaataaagacccacaaatgttcaaattctaagccacttaatagcgttttgtacattaaaaatgacaagggttattatacaagtagccttttaaaaaattctcacacagaacagctttgtatttagacttaaagctgttgctactttgctagtgacgtttgtgttaacagtcagtgctctaggccattgattgattgattgtcagaatcagaagtgactacacaagagcattagccagacttttcagtgagaacaggtaacaggctggcaccagcacttggtacagcacgtggacaggacgacggaacccagagttctctgtctctccttcacagcagatggactcttctataggtggctgttaatttacacaaagttatattccagaatcaggaagcgcccgtgtcgccaacacttgaaggagaactatgttccagttttggtgttgaacttctcacgaaatacctactaccaaaaattgtgacaccttattagacacttccaaagtaccccccaaaagctgtttaaaagaccattccattttttcctacacaaagtgcatactaaaatttcacaataatcatcttcagatgtacattttatttagtacatttcacagttttcagtattcagtccctcatgaacattttatagtcatctcttcggccctgttgtgaaatatgtgattccagttcaattcagagtgtatgattccgcttttcacgctgatcaagtaaatttatggtgtctcttttctgatcttcaacattaaaaacatctatgtttctgtcattccctgccagggctgcttgcttgtctgtctcagattctgcttcattttcatccatgtagtagtcatcttaatcctctcagtttctgaatt

SEQ ID NO: 319763 - DNA, 577 bp, Homo Sapiens
  misc_feature (293)..(331): n is a, c, g, or t
tttttaaaggggaacagaacattttatttctcagcaattctatgcgtacaaattaaacatgagatgaatagatactttattgagaaagcaagagaaaattcctatcatcaaccccaaggaggactcaaagtgaggctggaagaggacttagaagagtatgaaagtactctaagattttatctaagttgccttttctgggtgggaaagtttaaccttagtgactaaggacatcacatatgaagaatgtttaagttggaggtggcaacgtgaattgcaaacagggcctgcttcannnnnnnnnnnnnnnnnnnnnnnnnnnnnnnnnnnnnnntgtgaggccaggggtgccagcgcaccagctagatgctctgtaacttctaggccccattttcccctctgaaaataagagggttggatcaaacgatctctggggccttagcatctcaaatcctgtggatcctcctacttaccccttagagagccttactgggaagtcagtcattaatgatgtggccagttatttgcaagtggtaagagcctatttaccataaataatactaagaaccaactcaagtca

SEQ ID NO: 319764 - DNA, 429 bp, Homo Sapiens
  misc_feature (284)..(322): n is a, c, g, or t
aagttgaacagaacattttatttctcagcaattctatgcgtacaaattaaacatgagatgaatagagactttattgagaaagcaagagaaaattcctatcaaccccaaggaggactcaaagtgaggctggaagaggacttagaagagtatgaaagtactctaagattttatctaagttgccttttctgggtgggaaagtttaaccttagtgactaaggacatcacatatgaagaatgtttaagttggaggtggcaacgtgaattgcaaacagggcctgcttcannnnnnnnnnnnnnnnnnnnnnnnnnnnnnnnnnnnnnntgtgaggccaggggtgccagcgcaccagctagatgctctgtaacttctaggccccattttcccctctgaaaataagagggttggatcaaacgatctctggggcctta

SEQ ID NO: 319765 - DNA, 468 bp, Homo Sapiens
  misc_feature (294)..(332): n is a, c, g, or t
tttttttaagttgaacagaacattttatttctcagcaattctatgcgtacaaattaaacatgagatgaatagagactttattgagaaagcaagagaaaattcctatcatcaaccccaaggaggactcaaagtgaggctggaagaggacttagaagagtatgaaagtactctaagattttatctaagttgccttttctgggtgggaaagtttaaccttagtgactaaggacatcacatatgaagaatgtttaagttggaggtggcaacgtgaattgcaaacagggcctgcttcannnnnnnnnnnnnnnnnnnnnnnnnnnnnnnnnnnnnnntgtgaggccaggggtgccagcgcaccagctagatgctctgtaacttctaggccccattttcccctctgaaaataagagggttggatcaaacgatctctggggccttagcatctcaaatcctgtggatcctcctact

SEQ ID NO: 319766 - DNA, 701 bp, Homo Sapiens
gtgatttttggcatattattgttgaccgatcccccatttctggcttgcctgcttagggcagtcaagcttagcccctctagtggaggacaatggatgagcaatcacaaaagcagggctcagaatggccagaactgtttgaaatggagttcttattcctggggttggtatttcagctgagcactgaaaataatatcagcctcctgggagctattaaaaactctggagtgaccaagtgtccctatgagcccagagtggctacactgaacccttctccgcttcttctctcacccggaaaggaagaagttggaaatgccaagttctgagagaggacttaaagccttaaagctggtttgaggtcaggtcactgtgacccaggccagctgctcactaaattcaccaggcttcctcccttcctgtcagggccaacagggctaaccccagggacagaatctaaagccacagtgagcacatacatacacattcagcagacacaggtggatttttatgctggaaaatcggaaatgccagtttgcagactaagactgaaaaatctctagtttttaaagccacacactgctaggcaagtgactaaggtaacaatacaagctcttggtattatccttttctgtggagtttagactcctatcttaagtggtatctgcttattggactggggtgcaggaatgggatttggttttccc

SEQ ID NO: 319767 - DNA, 1003 bp, Homo Sapiens
gtgtgatgtcagcgcgggcggtgggttcacttgttgtcgctgttctgggcctctctttattgagggcactgggcccaggtcttccttcagggccccacagcgcccataaaacccaagggagaatagaagagaccccctgatacacgcacactcgagggggcgcctccccatccccctcccccaacacacaggacagaagcccctctgggccggcaggggaaggcccagcctcaatccttcttgctcccgtgccgctgactgtgaaacttgtggtgcacaaccctcagggtggtgaagaaattgccgaggaaaatggaggaggaagggaaagccgcacataagcacctgccactccttgcactgagggtcctgggccaggttgaacaacgtcagcgcgttaaaaagctgccagaagtgtccaaagaaaagaaaaggcagcaggaaggtgaggccccgccacatccaggactggaagccctccacagtgaggtccatggtgtgccgctcgcccagcgcccgcaggcggtagaggcagccgctctggtagtagtactggagaaactgcacgaagctctggtacatggaaaaggagaggaattggttccggaatttctggtacatgagaccgtcgggccacgtcagcatgactcccgacaggaaggtggacacgtagtgatggaacacccaccagcctttgatccgggagccgttgttgatgaggatgctctcccggatggtcagggtgcagtagtaccagaccagcaggaagttgaaggcagcatctgtcaccctggagttgagcaggaagcggcaagtgaaggagatgaggatgaggatgatggtgaggtagagcttgaacttctcatactcgtccttgtaggcaaacttagcctgcttgctcaggagcgtgacgttgacgttccccagaaccaggctcaggtacaatccattcttcttaggcaaataggcctaccatgtcaaagaaaaggccttggcgcgaatt

SEQ ID NO: 319768 - DNA, 1517 bp, Homo Sapiens
  misc_feature (42)..(50): n is a, c, g, or t
  misc_feature (346)..(346): n is a, c, g, or t
ccctcttttgggggactccgcccaattttcccccttttttcnnnnnnnnngttggttgcgggaaaccagttatggcccggggcccatttcattcctccttttttccgccccccccacaaaagaagcctcggaggggttcttttttctttggcagtgtcgtaagttaatcctcggtttaggttgttcctattccgggccttcttttttattgagggccactgggcccaggtcttcctttccgggcccccagcgccccataaaacccaagggagaatagaagagcccccctgatacacgcacactcgaggggcgcttcccatcccctcccacaacacacaggacaganagcccctctgggccggcaggggaaggcccagcctcaaatctttcttgctcccgtgccgctgactgtgaaacttgtggtgcacaaccctcagggtggtgaagaaattgccgaggaaaaggaggaggaagggaaagccgcacataagcacctgccactccttgcactgagggtcctgggccaggttgaacaacgtcagcgcgttaaaaagctggccaggaagtgtccaaagaaaaagaaaaaggcagcaggaaggtgaggccccgcccacatcccaggactggaagccctccacagtgaggtccatggtgtgccgctcgcccagcgcccgcaggcggtagaggcagccgctctggtagtagtactggagaaactgcacgaagctctggtacatggaaaaggagaggaattggttccggaatttctggtacatgagaccgtcgggccacgtcagcatgactcccgacaggaaggtggacacgtagtgatggaacacccaccagcctttgatccgggagccgttgttgatgaggatgctctcccggatggtcagggtgcagtagtaccagaccagcaggaagttgaaggcagcatctgtcaccctggagttgagcaggaagcggcaagtgaaggagatgaggatgaggatgatggtgaggtagagcttgaacttctcatactcgtccttgtaggcaaacttagcctgcttgctcaggagcgtgacgttgacgttccccagaaccaggctcaggtacaatccattcttcttaggcaaataggcctccatgtcaaagaagaggccttggcgctctttcatctggttctccagctcctgtgcggccccctcggcctctgctgggagggagggtttgcatttcttcagggcgagggccagctcctggagccgcttcttctgccgcgtgatggagctggtgcaattgttctgaagtttggtcagctcctccagcttcaggcggtagagccgatgggtctcctggatgttctggaagtcctgctgtagatcctcccagtcccgcaggcagtcgcccagcgggcccgggggcgggggctgcatggctgcagcgccagtagccagtagtggaggacggcgcagcaaccccggcccacccgaggctcccctcgtgccgaattcgccacccaggcctcgctacct

SEQ ID NO: 319769 - DNA, 698 bp, Homo Sapiens
tcggacttaagagaaacggccggcgtggaaagagccaggcccacattctttgatggttaacctgtattcctggggacaggacaagcagggcagaagccagcagacaagaaactcaagctcaagggcaagaaataatactaatcattagaatgtgtgtgtttatcttaagttactcacattctgtcatttaattctcatgaaaaccccatgcagtaggtctttacatcccattttatagatgagggacccgagattcagagtgataatgtcatttgcctaaagccactcagctggtcagcaggtggtgaagcaggaatgtgaaccagagggtctgcctccagagttcccacttgtaactactagtttattctggctcacccactgctgactagaggcaaaggggggcaggtgtcagcttggcagcctgcacagagcagctggtacagacgtctgccctcccggcggctcttaccatcatgggctcgccacagaagatgatccagaaggacagaagcatcgcatagaagatgccctggcggatgtcaccaaacagcagcatcaggtcaggcaaacccgatggaaaaccattccactgggatattgataaaggcatggaaatcccaagggcaaagatgactctgatgggggagaaaatatcaggacagccactttaatcatctggaaggcggattttaaac

SEQ ID NO: 319770 - DNA, 909 bp, Homo Sapiens
ataccatgaagcatagaaacaggaagtagaggcagaggcagattccagccacgatgatgaaggccatggccagctctgttccaatgtctgtagtccagatactgtagaagggattcgtgagttgtacccctctctcacacatgtcaaatatgaagaggcagaaggagccaacggcaatgggtccgacttgcttccaataccctgcgatgtggttccgctcgtgctgatccatcatgtggtcgccacagaagatgatccagaaggacagaagcatcgcatagaagatgccctgtcggatgtcaccaaacagcagcatccaggtccagtcaagcccgatggaaaaccattccactgggatattgataaaggtcatggaaatcccaagggcaaagatgactttttccagaagcactgggggtcgggacatcatggtgatcctcctccaataccacaccataatgatgaagatgctgggcgtaaggaaggtcttcatggcaaaccacaccttggtgtagcctccattttggtggatccccaccaaccggatatcctttatctccccaattcccacattgattttcttcttctcattcacaggcagccggatgtttaaaaggtaaaacttatgggccacagacccaatttccatgaaaggaaggacatcacattcatagtaacggccctcatgctctggagtcttgggagatgtgaaggtgcatttgagtttccgtggtactctttcatgggccatttcagtccactcagcaaacgcgtcatcacggtaagccagggaaacgtccatggagacttctgcattttctccaatcaagcctcccaccagaaaggcgatgatttggaacacgagcagaatcccaccaacaatgcacagcttcttggtgctcatgtttt

SEQ ID NO: 319771 - DNA, 661 bp, Homo Sapiens
ccggtgtaatacccagaaaagaatctctttaatatcttgtagccgtaagactgatacaactgaaaacataaccctaaatttgattctgcaggttgcagttacaacacaagttgaagtcacagccttgccggaactcttatgtaaagtttagggcattggatctggaaggagtgggaccctgagaatcgtaaagggatatttgggtggacttgagcaaatccaagaaccctgaactgaggaagagcagtgtgagtacatggtcaggggctccatgaatattcctgcctgcaaccccagcttcacaggcaattcagccttctccacactggcccggcactggctagctgctcaccttatggctcgaggcaggacccccccgcagccttgcagctgagtgggaagttgctggaagttgtatctgtttattgcttttaaggctgtcatgagcagacataagacctcatatcacacaagcttgatgccaccaagaggacgggagctgggctgggtcctgagcccttctagcggtgtggctttggcttgtgacccccgactcagcctcagtatcatctatcaaataggcctaataatgggcatgtcccgggactgctgtgaaaacgaagtggagtaagattgcaacggggcctggtgaggtggctca

SEQ ID NO: 319772 - DNA, 434 bp, Homo Sapiens
  misc_feature (352)..(352): n is a, c, g, or t
  misc_feature (363)..(363): n is a, c, g, or t
  misc_feature (382)..(382): n is a, c, g, or t
  misc_feature (406)..(406): n is a, c, g, or t
taattaaggaacatctgtagtctacaaagagatacttgccagtgttcatttagctctgctgtactttaaataaaagatatgtgtatctttagttcaaagctggtgccttggaacggtgtcaaacatgagaagaatgttccaacagcaagatggaatcattgtcttgcagtgttgaaattagaccggtggtgggccagggcgtgacacccttcaccagggccccgttgcaatcttactccacttcgtttttcacaggcagtcccgggacatgcccattattagggcctatttggataggatggatactgagggctggagtcgggggggtcacaaggccaaagcccacacccgntaggaaggggntcagggaccccagcccagnttcccgttcctcttgggtggggcntcaagctttgttgttggatatggagggt

SEQ ID NO: 319773 - DNA, 1395 bp, Homo Sapiens
  misc_feature (1149)..(1175): n is a, c, g, or t
  misc_feature (1243)..(1243): n is a, c, g, or t
  misc_feature (1319)..(1319): n is a, c, g, or t
  misc_feature (1360)..(1360): n is a, c, g, or t
  misc_feature (1365)..(1365): n is a, c, g, or t
  misc_feature (1384)..(1384): n is a, c, g, or t
tcagtcgcattgaagagtatttaaaaacaggcatccctccaaggtccattgttctgttgagcacaagaggagaaataaagcagttaaacatttcacacttactagtacctctgggattagccaaaccagctcatctttatgacaaagggagtaccatatttttgggattcagtggaaactttaaaccatcatggactaagctatttaccagtcctgctggacagggccttggggtgcttgaacaattcatacctttgcagctggacgaatatggttgtcccagagccaccactgtccgcagaagagacctggaactgctaaagcaagcttcaaaagcacattagagactaactgtaacttaagtgctgggggaaaaaaaatgtgaactaacttatttaatttatggcattttaaaatgacactgttaacccaacggaaccattttccagtttgatacagaatggggagaaaagaaagcgtttgaaattattgcttggataccagcttcatgcaccttctagttgtacaaaatgttaaagacgttgtttgtatttgtaaggctggtgtattcagagagcatatctcttattcctcactttccacccccgtattttgtaatgaccatgagcaatgtttttactttttgtataatggggtggggtggacgtgggggcttctgagagtcagcctgaggtcctttagaggaccagctattgtagcaccttggatacttgaagtttaatgctcagttgggtcgggtggttgttgacttggtggctggcatgttcagcagtgcctggggccctgtttctgggcagcctttgaggattttctatgatattgaatgacagttttaagtggcaactcaggcccagctcatgcccttttttgcctggacatgtgctatttttattcacttatatatcaattacttgtaagggttaaactttcaaacaggaagtatattgggacaaaagggctcttggggattagatatccctttaatctgtgaccattgggcaaaaaattttcctgcagcaaaaagtctgaaggctgttgggaccaatttttgcaagctttaaatcccttaagcctccttttgactgtatatttgtgtttaaaaatgcagagctcaactgaatatttccnnnnnnnnnnnnnnnnnnnnnnnnnnnaagaagtaggttgttttcctgaaccgtaaacttgtatcattttaacttgcacaaaggaagtctgttcntggtaatgctcttgcacttgggttttttgttaatggtttggtgtggaattttaaagcttttccggtcaccctccgncaggaaaatcccagaaaggcctaatgatacccccaaaatgnatacncccaggggggaaaaaaggngcgccttccaa

SEQ ID NO: 319774 - DNA, 1003 bp, Homo Sapiens
  misc_feature (166)..(191): n is a, c, g, or t
  misc_feature (929)..(959): n is a, c, g, or t
aagggctcttggggattagatatccctttaatctgtgaccattgggcaaaaaattttcctgcagcaaaagtctgaggctgttgggaccatttttgcagctttaatccttagcctcttttgactgtatatttgtgtttaaaatgcagagctcaactgaatatttccnnnnnnnnnnnnnnnnnnnnnnnnnnaagaagtaggttgttttcctgaaccgtaaacttgtatcattttaacttgcacaaaggaagtctgttcttggtattgctcttgcacttgggttttttgttattgttttgtgtggattttttaaagcttttctgttcaccctcctgccaggaaaatcccagaaagcttaattgataccccaaaatgattacacccagggaggaaaaaaaggagcgctttctagaggtcagaatcgtggagagaatactcagaaatgaaccttctttatagagcctatgctagcgagatgagtctactcttacttaatgaaatgttaaagccaattaaaaagcatgctgtgatgcccagcttccctttccacagggtgcatgcgtctcctgctggtgaatcacatgcggcaagaggcaactggctccacagcctgggatgctgccgtaccaagaggaaagaagcagcaaaatgcctttacgttgttctaaacccccgacgcataaagtgtagaggagggatggccaagggtgggtggtagaaagtgtgttcaggctgacactggcaatgagtacagataatttcactttcctcttccaggggcaaaggctgatggcctctacctttgtatccaggagaaactgcagagcagccctgtgactttacaaaatatgctacctcaaagtgctaccgataaacctttctaattgtgaatgcccttactaagggcacatgtcttaatcaaagttagnnnnnnnnnnnnnnnnnnnnnnnnnnnnnnngtatattgatgaatgagatcttacctattaaatatattattgga

SEQ ID NO: 319775 - DNA, 546 bp, Homo Sapiens
ttcattgcacactcttcaccccagctaataattccagttaagaaactggtcccttccacttcagtaacatggggtcccccactatctccttgacatgaatctctacctccttcatggaagccagcacagaacatgttgttatagatggtgaactttgtagatcgaagacatgtggctcggtcaacaagtggaactctaaggtactgaagaactaaagctgatctccctttgtggaagactcttccccagccacttacatagccagatccaaatttgaggaagatgttcgtgtattccttgtcagcaatgcaaataggtgtaacgtagctgtttagcactaagggttcgtccagttccagaagggcaatgtcatggttgtacttattaatagctgcattgtagttgtggtgaggaataattcgaatcacatttcgcttttgctctgtatgttctgtctcctcaatattatgttcacctgcgacaactgtaattttaacaccagtttcaacacagtgggcagcagttacaatccatttttcattaacg

SEQ ID NO: 319776 - DNA, 501 bp, Homo Sapiens
  misc_feature (305)..(305): n is a, c, g, or t
aaatctttcaacattttattttttagtttctgaaatacaaatcaaaatacatttttgttacatgtcattttaacaagcttgacattcttttcaatacaggatgacacaaaataggtactttaaaacttccttttaagaaaaccatacattttatttcagagtaaacaacccatcaaaaacaaatacataggtatatgggctattgtttttcagtattttagagcacaccatccaacttaaaatgtggtccactaaaatatgtaaatatccctcctatcacaaaaataaattaaacctcatggttnaaaaaaaacagaaacgtttggcgtaggcctgagtgagcttgaaaaacaagttaggatgttttaactgtatggaggaacattacagaatccacatagaaacatctggcagaacaactagcttgttgctattggagctgttctgtttcagagagggatataaggtacatgggagggtgctgaagactcacaacagcca

SEQ ID NO: 319777 - DNA, 441 bp, Homo Sapiens
cttttttgataatgaaagttaagcatactgaatgctacttttgattgacaaactggctataatagtctaggggaaaaatccctaaacagataaagattcctaaagtaatggtggcagctgatgtttcagtgaacttttatcttgatgcgtttaaatggaagtaatgccagacctgagatttttaaggcatttttacagcttgtattgaaatgattggagacatggtttctttattagctattttgagacctgtggagttaagcaagacttttaaaaattggcaccatatacatctagttagttcctttactcttatttttttaaataaaagtagtacacatcatttccagcgttgtaaatatatttggggcttgtttttggtatggatttaaaaggaggatattaagtattcattctaattttgttatttttctagttgcc

SEQ ID NO: 319778 - DNA, 527 bp, Homo Sapiens
  misc_feature (409)..(409): n is a, c, g, or t
tttttgaggcacagaaaatctttattgccacaggaagcaagtgcattcgtcccacctcaccaacagcttgaagagtcacaaaaacgtggacatcgcacaataaagtgtaagagactcggggagaaatggtcccttggactatattggctgtaatactgaggtaaccaattgaccttgttcagtgaaaatacctctaacaaaatgaaaaaatcaactaattataacttccaattcacatatacaattcaaataaaaatatatattatttgctttaatgtatagcaagtttaatacattagtgtttacaaaataaaaactgtattctactgaaatttttcttgtgcttccaccttatcactaagcttgaaagactagaaacataagatagttaaggaaacttattatgaanttaaagatgcaatctgtgggtccacaacgaatggataaatattggaagttggaagattactgcatcttttaaaattgtggcttatgaaaatctacaaacttgactgtaagacacaatt

SEQ ID NO: 319779 - DNA, 1450 bp, Homo Sapiens
  misc_feature (197)..(197): n is a, c, g, or t
tttttaaaaattcaaagatggttttttgaggggaaaggaaattttgcaatttttttgggttttaaacaaggtttctcgaggcaaaataaggaattctgggaatcccgggggcatgcaatgtaccaagtagtactccagatggcgccaaagaataaatagccaggtctctatgataaaagaacaaagggaaagcagtntagctcgattgttgatcaccttcaccaagcgccgtcttgctagaacatatttctgagcagtggagattttatcaacaccagcaggcatcacagactgacacaactcttttatctcatctgggggaagctgctctacattttgtagcttgctgacactctgtcgatgactgtcataatagctgaagaaatcattagcactctgtttcagcaggtagatgataatgcctaaaccaggcaggcgccagtatggaaccactggagcttgggtatcttgccgcggtccatctctattaactgtttctgaaaggcctaggagtgaagagacacacagcatgctggaaggtaggggaactctgtaacatgagtgactggcaatattccattacattggcacaaatctgctgcatagccagttcaatctcatctttcttgcttactttatctccctccacattatcgtcttgaaatttaaactgacgcagtctgtcagagccaccaaagcgacttagtagtcctaagcactggcgctggaatcttccaaatatgtccctgtagctccattagagacccttcatttacatcaacgtcaagttcacttaatattccaggaagtgctgctttacttataattcctgtcagcagagccaattcctgcaaagacccagcactaacatcctgacagcgcagaattgcttgtatggtatcagaatgtgaaataagaaactgcaatacctgccctgctgcctgcaagtgctgggccatactagatgtgaggatgacctggcacagctggagagctgggaggagaatctggcggtagcgatccactggggtagggatgaacattggagggtctctcatgccaaacatgctctgcgggtccgtttctgggcgcatgtcatagacttggcattgagctagtctcacaatcacccctgatcttagcagctctaatgcaccctgctgtatctttgccactcttgtgagaaatgccattttagattcataagtataaagtgcttttaaaaggggaggctgtggggtgagtaagctctgcaaagtacggtcatcttctaccaagctgtctacgaggaccttcaagtagccactgttagaaagatacaaaagccactgctgctgtttatccacggagacaattctatcaagtagagccagggccagcatccttccaatctcatgaccatcacaagcatctcgacagacccgtacgcgtgggtcgacgatatcataca

SEQ ID NO: 319780 - DNA, 711 bp, Homo Sapiens
tgtttttttaaaaagtatttattttttactagtgaggatggaactaggggaagaagtttacagaaaagatgtccatatacaaagaaagaaatagcaaaatatttttggtcataatttagaaagaaactaatctataaaatggagacaattctccccaattcatctctctcatagaagagcataagcacgggctctcagttccttgatatcctcaagaggccacggatacgtctgacaagagcctgtatgaaactatatcgagatcgaacttttgaatataatccttcaatgtccagaagtttcttttgtagtgattctccaaaagcgttgattgcatcagcctgaagctggtctaaatcatgttggctcactatagccagcccacttctaaaatctagattggtttctgaggcgaaggaatcttgcagtcttctgcttttaaacaaggttctcgaggcaaataaggaatcttgagaatccgtgggcatgcaatggtaacaagtagtactccagatggcgccaaagaataaataggcaggtctctatgataaaagaacaaagggaaagcagtttagctcgattgttgatcaccttcaccaagcgccgtcttgctagaacatatttctgagcagtggagattttatcaacaccagcaggcatcacagactgacacaactcttttatctcatctgggggaagctgctctacatt

SEQ ID NO: 319781 - DNA, 1549 bp, Homo Sapiens
ttttcagtttaaaatgttttatttcatagctcataaaaaagtatgtatgtacaagactcaagtaaatagaaaggcagctttcaatcacaaatcagtttttcagattttactgtggaagcatatttaatgcacacatttgaatgttacacataaataattttaacgatggagtccaagttctggattttacattagatctgcatatataagacacttgtggtcaaatttcaagattggtaaagccagtttcaagctgcttatattttgagtacaggtttcactattacaaatatatgatgttaaactaacaaactcatgaccttcaaagatgtcttcgtcccacgcacacacatttgtaatttgtgtccatttgctatttcccttcttctataatcttcaaattatatagttatgcattgagttccctatgcatctcacccatctcctttatctcagccttctcatactttgccattctcttctttctggaaataaccagcacaacaattccagcaacaactgctatcaccacaaccacaataacagcaataacaccagcttttagaccctgcattgagaattcaggtgctttttcatcaacataataaattaaagtttgaccaggatccagatccagttgttccccatttactgtcaggtccattttcttagaatgaaacaaggattcacctttaacatctttttcaaaataataagccacatcagctatgtccacatcattctgagttttttgagaagaattttgaaccagatcaatagtgataacattattctcatacaaaatactcgtgataaattttggatccagttgataacgcgttgtgatctccttctgaagtgcagtccgcaaacttttactatcataaggtttttctcttgctttgtgttttagttcaatgatgatccagtaggttctcactcgctcagagcaggttatttcagtgtccttgtctgttcttctgaccccagcagtgttcacacaccagcacgtggaggtgccgttgcactgcttggccttaaagagcccgctctcatcgcagtcaggatcataaagcccatcattgttctggagggccccttcaggttttgctcttctcccaagttttgagccattcatttctgccttcatcaccaaacatttggcagccagctttgagcaaatgacagtattttgtgcaccaactgaagtacactggcattgacgattattattcacaaagcagtttacggccagcttgtagttttcacagacacattcttcctgagctgcggcaaaagtcgccgtcgccgcggcaagcagaagcccgaacgcgaggacctgcgggggcgccatgctgcgcgcgcgccgagaagaggggcgcgggaggggcccgggactcgcgggagggcgtgcgccgggagtgggacacgaggagccggccgggcagcgcgaggcctggggcacgcgggtccgcgtcgggaggacagcgacgagggggtccccggaccgcgtcgaaggtgctcgctcgccgaaggactagcgctctgt

SEQ ID NO: 319782 - DNA, 712 bp, Homo Sapiens
ggaattgccacactttttttagaatgggccagatggtaaatatttatgcttcacggtccatacagtctctgtcacaactattcagttctgctagtatagcgtgaaagcagctatacacaatacagaaatgaatgagtgtggttatgttctaataaaacttatttataaaaacaaggggaggctgggtttagcctgtgggccatagtttgtcaaccactggtgtaaaaccttagttatatatgatctgcattttcttgaactgatcattgaaaacttataaacctaacagaaaagccacataatatttagtgtcattatgcaataatcacattgcctttgtgttaatagtcaaatacttacctttggagaatacttacctttggaggaatgtataaaatttctcaggcagagtcctggatataggaaaaagtaatttatgaagtaaacttcagttgcttaatcaaactaatgatagtctaacaactgagcaagatcctcatctgagagtgcttaaaatgggatccccagagaccattaaccaatactggaactggtatctagctactgatgtcttactttgagtttatttatgcttcagaatacagttgtttgccctgtgcatgaatatacccatatttgtgtgtggatatgtgaagcttttccaaatagagctctcaaagtttttacttctaattattttgcattactttga

SEQ ID NO: 319783 - DNA, 714 bp, Homo Sapiens
ggactcaaattttggcgaatctcaaaattagatcctaagatgtgttcttatttttataacatctttattgaaattctatttataatacagaatcttgttttgaaaataacctaattaatatattaaaattccaaattcatggcatgcttaaattttaactaaattttaaagccattctgattattgagttccagttgaagttagtggaaatctgcacattctcctgtggaaggcagagaaatctaagctgtgtctgcccaatgaataatggaaaatgccatgaattacctggatgttctttttacgaggtgacaagagttggggacagaactcccattacaactgaccaagtttctcttctagatgattttttgaaagttaacattaatgcctgctttttggaaagtcagaatcagaagatagtcttggaagctgtttggaaaagacagtggagatgaggtcagttgtgttttttaagatggcaattactttggtagctgggaaagcataaagctcaaatgaaatgtatgcattcacatttagaaaagtgaattgaagtttcaagttttaaagttcattgcaattaaacttccaaagaaagttctacagtgtcctaagtgctaagtgcttattacattttattaagctttttggaatctttgtaccaaaattttaaaaaaagggagtttttgatagttgtgtgtatgtgtgtgt

SEQ ID NO: 319784 - DNA, 621 bp, Homo Sapiens
caaaagcaataccagaagtaaagggaaatatcagacaatattttattattttttcatagatgttctgccacacaaagaacttggggtgtaaggataaggcaaaagctccaatcccatttttcagttctcctaggatgcacccctcagggagcctggccagagttccgaggctcgtgagcgtcagctgttgctttattttccatcaaagccctctgagaagtgagacctcagcaattccgggagccacatagagacagacttggcaagggaccccctggttctgagccagtagctgccatctggaaattcctcttttagcctctccttagaggtgaatgtgaatgaagcctcccaggcacccgctgaatttctgaggccttgcttaaagctcagaagtggtttaggcatttggaaaatctggttcacatcataaagaacttgatttgaaatgttttctatagaaacaagtgctaagtgtaccgtattatacttgatgttggtcatttctcagtcctatttctcagttctattattttagaacctagtcagttctttaagattataactggtcctacattaaaataatgcttctcgatgtcagattttacctgtttgctgctg

SEQ ID NO: 319785 - DNA, 1395 bp, Homo Sapiens
tgaacaacggcggcaaagccgagaaggagaacaccccgagcggaggccaaccttcaggaggaggaggtccggaccctatttttcagtggccttcctctggatatcaaacctcgggagctctatctgcttttcagaccatttaagggctatgagggttctcttataaagctcacatctaaacagcctgtaggtttgtcagtttgacagtcgctcagaagcagaggctgcaaagaatgctttgaatggcatccgcttcgatcctgaaattccgcaaacactacgactagagtttgctaaggcaaacacgaagatggccaagaacaaactcgtagggactccaaaccccagtactcctctgcccaacactgtacctcagttcattgccagagagccatatgagctcacagtgcctgcactttaccccagtagccctgaagtgtgggccccgtaccctctgtacccagcggagttagcgcctgctctacctcctccgaggctacttctcagggctggaagtcccgtcagttctgctgaatactatgtcccaggtgtgtgatggcggctgcaatctgtcttgtgggtattaatgcaatcttcagtggtggctactgttctctagctgttctacaaaactggagcatgctggcttgaaaaacccttgcccagttttgatcccttcaagactttgtcacaggctctatcacacatctgtttttctcgaagaaaaaaatataattaataaaaatgttttactcttttacactgtataattgtaagaaatagcgtattatttgtgaatgcatggtctgaaatttctgtacagtttggagatattttcaaacgaaacgtaagagaagtcaacaataaaaccaagaaaagtgagtatttttataccaaacattttaagtatgctgggatggacgatcttacactggtttggatcacagtttttgttcttgacttttgaatgcttgtaattaaaaatatctatttttttcctctgaagtaagttgcatgtttgaggcatgtttccaaatattatcaaaatatcctgaattgtattgtgaatatatagaaatctgtgcctggccggagtccagggtaaattagtagcatggtgttagatgttagaaacagaactgttatttgcagtgttaggtctaggatcccagttctagtaagacagccctgcaagacaatcaaccagaagcctccaggagcttctacctatggcttattcacaactgggcaagaaaacatcattggtaagaactgctgagtgtgcccttagaaagccctagtagctccagctgtgactatatcaactgtgtgccaagtgtgactttgtacagttttatgtttccactctcctgtatgtgtagccactcgatgcct

SEQ ID NO: 319786 - DNA, 918 bp, Homo Sapiens
  misc_feature (44)..(44): n is a, c, g, or t
  misc_feature (907)..(907): n is a, c, g, or t
gataatttaatgtaatttactttaagattttcccctctcagggnctgatttcagaaaatcaaattacaaagtcatcatcacatcctagatttattacaactgacctgcaggcaaaaggatagaactattacataaacacttcgattccatgtatatatcttaaatagaggaggaattcaaacaagaatacaggataaaatattccaaagctccaagaagcagttatgttactgagctccattttttacagacaaataaggcaatatccctgcacattagctttttgataatttttatacatttttctatggtacaagagaaaaataacccgagctcacaatgtacagttccttacactattttccacagtttgtgaacactatacaccccttttgtttttaataaagatacattgtaataaactccttgccccttaagttttatagtttataataatctatgattaatacactaaaattgccttcttatgtggtcatccacacaatagaacggtcagattagctcctggacagtcagaattgcttttatctccatttgcataatggcaaagtgaccctatgctgagccagatgggaagttgacagcagagaaacagattcctcttgagtccccgggagcaatggaggatgatggcttgctgtggtcgaaggcagacatagagcaatgtctcctttcagaacagtgggaagtctaaagtttaggataccgtgggggagaagatagggaaatgatgcaagtagatcaaagagataatcacttttgaattctgcaatttacagggatgtgactttaaacagcaccattctccctttattgtttgacagtatttatgactgtcactctgagaggagacacagcaatacgtgccacgatttggttctgtaantgcatcacctg

SEQ ID NO: 319787 - DNA, 582 bp, Homo Sapiens
tcttcacataagctagatgtttttcctgtgctcctgtcagtgttgatcacactgtatggttaatggctgttttacaaatggtttccccaactaaacagtgagctcctcaaaggcaggataaagatttgactcatctttgtgttcctggtgcacaacactgtgatttccagagggaagtgcccagttaaacttaagatactgttgtggagtactcttcaactccctacagcaaggctactgcgtccacagtataagggagtcaaactagttcctccaacaagccctagggaatctactcggatccagcttgctcttggaaacactgtggtgcccagcctcccgtgagcatagccttgacaacggttgccctgtgatgccaggaggtggtggggcacgacaggagagagcagggggcaagcactaaatagatccgagtggaagtctaggctctgccactaaaccagtggaatcttggacaagtcacctcacctcctggatcctcaggacttaagtccccaaagctcctttgtagcacatgtgttcctgtgtgccagggccttagcctaaggcatctgatgtaat

SEQ ID NO: 319788 - DNA, 1510 bp, Homo Sapiens
  misc_feature (436)..(446): n is a, c, g, or t
cccttaatggcctactcacactagactatgctcttaaacaatgtacacgtgtatcactcctcagtggaatccttccctagacatctgattcccagaaacgttcttttaaaaagaggctagctgagcaatcaatgataccaaatctgtctttgttccccaagaggaagcaacaatacaaaacagctggcagcagcttcctctggaataattgacagctttgtgctgcctgactaaaatttgaaatgacaaccgctgaatgtaaaatgatgtacctacaatgagagagatttaggaatactatctgtcaatccatagatgtagaaacaaaacaaactacagaatgaaaacaaacttattttaaaccaaagaaacaaatgtatccaaaatatagtccatgatatatttgattactagtataaccacagttgaaaacttnnnnnnnnnnnttgacatttttttgtaatggtactaatggatttataaaaggtttctgtttccaagagatgttattggggtccacatattccttgacagacttcagcatcccaaagccgacatcagagatactttcctttagccattgcttccgtaacttgcccactccatggtgatgtgacaggctccctccattagcaaggatttcttctctagcagctgcctcagtttgttcaaatacggtcagtgggtcactaattcccctgtagttaaaggcaaaatagaagtagatacaagcacctgcatcgtaagtctgcgtcaccctgcatgtagaaaaaggagcaaactgaacacccttctctttgcattcccttgttattctttcttttacatttctacagagatctaccaccctgtcccaaggagcagaagtctcaaaagattctcctaatacatagtattccaaagccaagtctcgaatgtatgcaataacataggtcagcaaataacctctctgtccattatcttctccagctgccaacccaccaaattttgcagcaatatcatacacttgtttttcatgttgaagaaccttctcacgatccccctcaaacagtaatgtggctacaacttagctgaatttgggtccaaagtccgtttaaacttttgtaatatagaacttttttaatccgtccaaaaatgatgtaaaaatagaggaaacctgaggtttaagagcatgaccaaactgaaactgcttgttgtccatgaggcgaatagatgccggagcacatctctgttttgcaatttctcttaaacaggctactccttgttcaaaattagggaaagctactgagccatacttttggtattcagggactggtctgatttttattgtagcttctgttattacaccaagagttccttcagatcccatgatgaagtgatggatatcagggcctgttgacatacgaggtccttgacagcttttttctattatacctctaggtgttaccatttttatatgaacccctcgtgccgaattcgccacccaggcctcgctaccttaaaccgtagt

SEQ ID NO: 319789 - DNA, 628 bp, Homo Sapiens
gggaggatggggactgaggcacagagggcgaagcccaggcacagcagggatgtcagggccagcgaaggcaccgtcgagcagagggccaccgccaaagtggaggaacctgtctttcttgcttccttctggtacttctgtttaagccggtccatgagcaggccattccagggggcacacagcactccgaactgagtgaaggcaaaggcatttgtgtaggtgctgactcgtgccatgtccccaccggccatgttggtcagcaaggagttgagagtgccaatgaagaggtagtgccacaactgtatcacagacagccacaccaggtgccaggcaaagcgccgagagaaagcgtagctccagaaggagcggagttcctgcttctgccctgcccctggggtctcttccttcgctgaaaggaactcctttgactgtagctccctgttttcatgctcagctgtttccttctcttcctttgtggtgccattcccagggcacaggccatagctgtagttggggggcagtgggtatgggatgtgcccccggggcatcaggaggaaagtgcgtgctacatgccaggtactgcagacagagatgaagatgaaggaggccctgaggctgatgcctttttccc

SEQ ID NO: 319790 - DNA, 1839 bp, Homo Sapiens
  misc_feature (72)..(72): n is a, c, g, or t
  misc_feature (81)..(81): n is a, c, g, or t
  misc_feature (165)..(165): n is a, c, g, or t
  misc_feature (222)..(222): n is a, c, g, or t
  misc_feature (436)..(436): n is a, c, g, or t
  misc_feature (880)..(925): n is a, c, g, or t
  misc_feature (1439)..(1439): n is a, c, g, or t
  misc_feature (1558)..(1566): n is a, c, g, or t
cggtcgatttctgtgccgacgctctcatcagcgcggcggtcgtggcagcagagtctgtgccccgctgcgtantgctggcgngtcgcagtcccgtcatcaccttccacccgagcgatcgcgcgtattgctcggggtatagatgtcgcatacccgcgctcgcgggtngcggcggagggagagtcctgtggctgtaacagataagcgcgcgtgagtgcagagacnactacagggcggggtggacgacatgtggggcggcgtagcacaacacgcgtccgctggctcggcgtgtggcgcggtgtggtgctgacggcgcccacgcatactcataggatcacgcgggactacgtattacaatcaaaaccgcgtcgcaccctgcgtgcgtcagcggttgttgtctgacgtgagtagaggtcggaccacacaattggacggagcnggtgctccgacacgcgcaggggggcgacgacctggttttcatatggtggtcattgtgcgtcgcacgtagatcgtcagtagcgcaaactccgtcgaggtggtgttagtcggaacgtcgcagtggactgtgggttgttcttgtggcagtcgatcacccgcgctgcgcagaagggccggtccacattctgaaggctccccctccgcgggggcctcgcccgccggcgccacactcggggcggagtcttcatcggattggtctgttgcggcgccgcccgatcgcccggggccccgagacaaaaataaacatttgcacgcccctctgcgcttgccccccgcgggtatcccccgctacggtctcgtctaccttcccctactggggtccggcctcccaccggcgattatattggggggttttttgtggcctctacggggttctcgggggtgnnnnnnnnnnnnnnnnnnnnnnnnnnnnnnnnnnnnnnnnnnnnnnaacagacagcaaatactgtttattgcagactttccagctgactcatgtgaaaaaggcactatgaaaattaatgaatctagataatttctctaaatgatttatgttaaaatatacaacattcttacataacatctgttttatatatgtgaaataatataacatttaatgacaaaaattgtgtttccaaaaataacatttgttgaaggttaggtatctttcttttctctatgtggaatctttcacaggattaaaatatgtgtaaattaagtgcttcttattaccagaaatacttgacacagataaacacataaaatggccccacttccttttaactactcatatcaacattcagaactgaggctttcattaagcaaaatactgtaatgcacaccaatgcagactacttcctttgctagattttgagaagacatgacctctttcgcatttgtgctttctcatatataagaacacagtatacataataagcagaatataacctaaatcaaattccaangctatccagggagttgcaatcaacagagccatgacaaactgtcttgagaatgctccatagatttatatttgcatgtccaaggtatggctgtactttacagttcattcaaatgttttaannnnnnnnnaaactgttggcattaagaactttaaataaatctaaatattcttccattgagtatgtcagagaagagacttaagtaagcagaggctagcctacagtgagctatgccctgaatgacagacaccatattcacaggcaaaatcgaaactgcttagattttgaatcatggacaacattgttgctttgttgcagtgaataactccaccactatcaaaacaattcctgtttataccctgggatggggataaaataattagtctaattaaggaaacttcac

SEQ ID NO: 319791 - DNA, 1306 bp, Homo Sapiens
  misc_feature (69)..(78): n is a, c, g, or t
  misc_feature (133)..(134): n is a, c, g, or t
  misc_feature (257)..(257): n is a, c, g, or t
  misc_feature (262)..(265): n is a, c, g, or t
  misc_feature (267)..(269): n is a, c, g, or t
  misc_feature (271)..(271): n is a, c, g, or t
  misc_feature (472)..(492): n is a, c, g, or t
ccgttttacgtgcccgggttttttggtaaaaaaacggtgggcgccccgtttctttttcccttggggcgnnnnnnnnnnaaagaaaatttttatgaaaacttttcttggggccgggggcccccccaaaaagcannttcgcttaaaagggggtaggggaaaaaaaaggtcgggttgcgttagggcagggggtattaggacgtaaggtgttatggactgttaacagaggttagggccttgtggcggcggtagggtgtaanggggnnnngnnntnccatgtgtacgaaatggctaagtttattcaacatctcggatattcatctggatattgggtttgttttgtgatacaatacatattcaccttaactggtgctactgcaaagaaagctttcttgacctgcatgacgtgcctcagagcttctctccaccaattggaaccacccaaagcctagtctagaccaaagtgctctggagnnnnnnnnnnnnnnnnnnnnncagcaaccagaaaacagttgtgcccccaaaaagtactcagaagtcatatgttatttacaattgggtttgtgtgggatgggaagtagggcggatgagccagtgcttttgcaatgaagatgcaatagtcattgtcctctcccactgtctcctctttcctcaccccatggcagctttcatgacccattcccaaagggtccaccgagtcctgaactcagcttcatcaccaacattcctcgccttcagttgaattcaacactgttaagggagtagaggcaaagacttgggtcagggagagggtgggaaacacagaacaaactctctcggcacaacccaagttcagagacgaggcctcctcagatgaggaagatgatgccctcagacaccatgacctgattgtcatcctgcatcttgctcagagcagcctggatctcaactgaagagaagggctcttcgctgtcccggttgatggattctgtgaggcgattcatgccgattgactgcgcatgagcttcccggaacacatccaagagggccaccttgaatgccttcaacctggattcactcaactccactttctgggattccttggtctcctgtgagtctgccgtctttggagtgtgtacttgaggcatttcctcctctgtgtcactgaagtcataggggtcgtatgaatccccatctttggcatctggctggcgagtcttccttctcttcctcttctgctcctggtcctcttggcttttctcctcttcatcttctgtctctgattcatcctcacttcgcttcttacgtttcttctccttctccagaacct

SEQ ID NO: 319792 - DNA, 994 bp, Homo Sapiens
ttcttgggcccaacccaagttccagagacgaggctccctcagatgaggaagatgatgcccttcagacaccatgacctgatggtcatcctgcatcttgctcagagcagcctggatctcaactgaagagaagggctcttcgctgtcccggttgatggattctgtgaggcgattcatgccgattgactgcgcatgagcttccccggaacacatccaagagggccaccttgaatgccttcaacctggattcactcaactccactttctgggattccttggtctcctgtgagtctgccgtctttggagtgtgtacttgaggcatttcctcctctgtgtcactgaagtcataggggtcgtatgaatccccatctttggcatctggctggcgagtcttccttctcttcctcttctgctcctggtcctcttggcttttctcctcttcatcttctgtctctgattcatcctcacttcgcttcttacgtttcttctccttctccagaaccttcttaaagtaagcatactggaccaactccacagcttcctctgcatcctgcaggtccacagtcttgctcatgcgggccttcgcatgggctgtggccagtcgaatcagagtttccagtgttcgggctgtaactggagatgtcctggcggtgtctgagctcatgctatcctggctgcgcaggcgtgaatactcttctgcaatgtaggtggccgactcctgtgtcaggacaggcttgatgattttggccacatggatgtacttcttcatgaatgctgcactcaccatcttctcctttttcttcttggtcccatgtagaaggttgtcatgcttctcataaatctgggtgtcctgctgatcttcctggctaaagttgggatcatctgtggccaggatatccacagcactacccaagggcatagcatcgccatcctgctccccaggtgctctgtaacggtgcatcctcgtgccgaattcgccacccaggcctcgctacca

SEQ ID NO: 319793 - DNA, 515 bp, Homo Sapiens
atccgggggagctgtcaggaagccaggttaggatgaagcaagacaagaaacgatattatttttagggctggggcagccccagtcaagacagtcagccacagcctgataactctccctgcatgcgcaagcccaccgcttgcaacctggaggaagctcctgtcagcaatgggctctaatgacatgtcagaaaacagaacagacagcttaagagaccttcactactacttccctgctttcacagcaggtgtcctggtggtacaaaccccaggtatgaagctgcaaggagggacccagttccaggacaccaagaacacccagctactcagcaatctccttccaccgtggacctcggcacatggacacagcacaggcacccgactgattccgccaaggcctgcaggagtgttgtgtctggtccaacccagagtgtcaacaagcatgtctttcccaacattgttacaaagtgcaaggatagagtgtcccaagtgtgcggctcctttcacctaccttgtctc

SEQ ID NO: 319794 - DNA, 563 bp, Homo Sapiens
caaggggtgtgtctcaggccatcgagtcagcatcacctgtgtgcctagtaacaattactaggctggccccagacctagaaactagtgtatctgggggcgggcctgggcctgcactgacatcaatttttattgactaatttttgaaaatcacttgtatgaaagcattcgagtctagatagtagccttactgattagagtgataaaaatagctatgcatgtttgaaaatcaagataagcttaaaaatcaagatatgcttcaataagtccatttattttacaatttaatgtaaatctagaatatctaactatttatacaaacttaactttaaaaatagccacttgctattttacatacaaaacattcaaaagaaaattcttcatttagagtgactgaggcttcacattccagcccagagaatggcagcgaggagggtggcggcgggaagcagaggccttgggtggtccgtgctggccccagtccctcagcccaccctctccagcactgggaatatatttatgcttatttttctttttcaaataaaacttctactaaaacatgtttc

SEQ ID NO: 319795 - DNA, 1016 bp, Homo Sapiens
ggtgcttttttaccttatgtagagatcttattacaaagtgattttctacattaaaaagagactgaaataaattgtatagttacttaactaatgaagacatttcagaactctgggatgattttaatcttgaagtagtaggtggtatagtcataaaaccattcatccccttcttgattgtatcttaattttctggctttaaggtgacatctgagaggtaatgcattcttttttatattgaaatcataaactatcacccgctgcttctctgagttacttttaattttgccttgtggttatggtttggcgtttccttctgtttggttttcagagccccatgtctatatagtcctgagtgcaagtaattactatacttgtaaatgaagatcagtatttctgcctagatctgataaaaaaattttcttgtcttagttataaaaattcaaagaaatgtgttacaaagatacttagtatagctcctcagccataacctgagacttgggatgaaatttaaaccagatacgatttactttgcagatcataaggctttttatactcttgttatcaaaatggcttatttttcaggcactaaggattgttaagagaaaagcttttcaacgaaggattgcctttcttctcccacactgttcttgattttctctctctttcaggcctcaacaggcactgtattcattgcccatgttccaaattatcaaattcaagtgaatttatttgtgtggttctttacttatataaaaaaagataactttaaggatgtgccagtacatttccaactgctagcacaaccagtattttgtaattaaacaaatcgctgtatggtatggtcttctacacatttatgtctatagatatctatcgatcatctttctattctgtttcatgactgaataatgtaaaaccagtgttggcaattggtatcatcaatgatactcattttttaataaccaaaggcaggggaaaatcattttacttattaataaatattttatgatgtgaaa

SEQ ID NO: 319796 - DNA, 1028 bp, Homo Sapiens
  misc_feature (938)..(956): n is a, c, g, or t
gggcccgtgacctgcctgggcgcggggaactgaaagccggaaggggcaagacgggttcagttcgtcatggggctgtttggaaagacccaggagaagccgcccaaagaactggtcaatgagtgttcattgaagataagaaaggaaatgagagttgttgacaggcaaataagggatatccaaagagaggaagaaaaagtgaaacgatctgtgaaagatgctgccaagaagggccagaaggatgtctgcatagttctggccaaggagatgatcaggtcaaggaaggctgtgagcaagctgtatgcatccaaagcacacatgaactcagtgctcatggggatgaagaaccagctcgcggtcttgcgagtggctggttccctgcagaagagcacagaagtgatgaaggccatgcaaagtcttgtgaagattccagagattcaggccaccatgagggagttgtccaaagaaatgatgaaggctgggatcatagaggagatgttagaggacatttttgaaagcatggacgatcaggaagaaatggaggaagaagcagaaatggaaattgacagaattctctttgaaattacagcaggggccttgggcaaagcacccagtaaagtgactgatgcccttccagagccagaacctccaggagcgatggctgcctcagaggatgaggaggaggaggaagaggctctggaggccatgcagtcccggctggccacactccgcagctaggggctgcctaccccgctgggtgtgcacacactcctctcaagagctgccattttatgtgtctcttgcactacacctctgttgtgaggactaccattttggagaaggttctgtttgtctcttttcattctctgcccaggttttgggatcgcaaagggattgttcttataaaagtggcataaataaatgcatcatttttaggagtnnnnnnnnnnnnnnnnnnnccctcgtgccgaattcgccacccaggctcgggcgtgtggaggggaggtcgagtgcccccccgaggtgcgggc

SEQ ID NO: 319797 - DNA, 1033 bp, Homo Sapiens
atgaaccaccgcacccagccaagattgccattttgtatgatgagactggaaggaccccattgtttcaggattttgctacaatatacaaaaaacaatctgtgagacagtggctgggcttttttcctgcctgattagttcagtgcacatacaacttggaccagaggatctgggtttgaatcccatctctgatacttcccaaactgagctgttttccttatttgtaaagactaagatcgcgtatgtcaaagagctctgtaaactctcaacacatacaaagtactactgctgaaatgatttataaatgtatcttaagaaatgtccccagatgagtgaaatgtttgtttatgatgcatgacccacactttagtgtgctcttgggtcagctcttgactttgagaaaacaccagatagggaaggcccatgtcccacgcacaagacaaccagctcgaagcagggacaggcaatgagaggtgaaagagacctagtactacagctgtctcatctgggtgcaacttgcaatgggaaggaagggacagaagctctaaatagacccacatgcacaccccaggacataatgcagccaccagccaacaggacaagcagcacaattccccagcatcctcttggttaaatagataaaagaatggctgccataccatgtctgtgaaagccggggagcagcaaccacagagcagaagtcacttctgctgagcttccaaatcccatatgcctggccatagcaactctttccacacccagcaaatgaagcaatctggggcagccgacaccttgaaagtttactgcacagggcaatctacaatggggccaagtgctaaagcaaaaatttattaaaattcatttatatagtgttttatagacaaaagtagagtcttcgacattcaggcaatcacctatattttcagaagtgcttcatgagcagatggatttctttcccctccccacaataagatatatctgtctatactcctaaaaatgatgcatttatttatgccacttttataagaacaatccc

SEQ ID NO: 319798 - DNA, 1104 bp, Homo Sapiens
aaagagcgaggcctgggtggcgaattcggcacgaggggggctttgagcgagcctccccgcaccctcccataggaccccaggacagactgcgtcctcgctgacccgccctaggctgaagaaacacttaaattctggaaatagcgactcagtatcatggccagcagccttaatgaagatccagaaggaagcagaatcacttatgtgaaaggagacctttttgcatgcccgaaaacagactctttagcccactgtatcagtgaggattgtcgcatgggcgctgggatagctgtcctctttaagaagaaatttggaggggtgcaagaacttttaaatcaacaaaagaaatctggagaagtggctgttctgaagagagatgggcgatatatatattacttgattacaaagaaaagggcttcgcacaagccaacttatgaaaacttacagaagagtttagaggcaatgaagtctcattgtctgaagaatggagtcactgacctctccatgcccaggattggatgtggtcttgatcgtctgcaatgggaaaatgtatctgcgatgatcgaggaggtatttgaggcaacagacatcaaaattactgtgtacacactctgaaccagtgaacattttggatgtttccgtgttctcctgtgtcatctctactgggccataggaccgggcaaacctaccttaaaataggcagaggaaagtttcatgagaagtagtgtgttttggttgctgtattcaagtatttggattatgactggtggaggagggcttgcttaagataatgtgggttgtgttttttttggggaaaagtgaggggttaggtgggtttgataataaggcagggaaaaccagatttgtcgggaactatgaccttttttctccagtatgctaccctggatttggtttggctgggcccctaggggggaaggcattgggttctaccttctcctgcctttttaagaagaatttttcggggagggatggtcctcttcccacctagtttgggcattttttttgccccgttgggcccactaactctggggggtaaccttttgggtcacaagaattcctccctcgggcgagaagttttcagttttg

SEQ ID NO: 319799 - DNA, 796 bp, Homo Sapiens
gagttgaatactataatctttattattttgaaaaccacagcaaaggcacttcagaatctccaggtacccagtctcagttgccgttcagtggggacaagagtggtgctgagggcatggtcacacccttctgtgctgcatgcagaggggtgcaaggccagggcagctgacctggtcacccaccaggggagcccacgcctcttataacacagtgtccttgggtcaggaatttgtagtttattttgttattaagatggcgagagaatttttcgtccatttagagcctaacatttttagatgaatgttaatggcatctcggttgggatggattcgtgttcgtttctcagctgctgaaggatgtgtgttctaaaacaaaagggctcccagccagctttccggctgtgcccgggagactctgtgaccagcttgggaagctcctgcagggaggaaggattgatccacaagtccccaagcccttcatgctgaggcatctgtctgcgtccatggccgaggttgagtgaggagtcctggagactctggcttcatggtctttgctcttgttcttctgtgcctcaggggtcgctgcccaccaggctcagcagggcgttcttgtagtcaccgatggtgtcttccatgatcatgctgctgagggtcttgccgtacatcttcttgaagtgacatttgataagatttaagtcaatctcgctccttgaaacgatgtttcttatcagggtcccatcacgcgtccctgctcccttcatggcatagtagagtctctctgcaaagtagctgtggaggt

SEQ ID NO: 319800 - DNA, 1888 bp, Homo Sapiens
  misc_feature (19)..(19): n is a, c, g, or t
  misc_feature (272)..(339): n is a, c, g, or t
  misc_feature (1214)..(1214): n is a, c, g, or t
tcagctgacctgggtcagncccccagggggagcccacgcttctaataaacacagtgtccttgggtcaggaatttgtagtttattttgttattaagatggcgagagaatttttcgtccatttagagcctaacatttttagatgaatgttaatggcatctcggtttgggatggattcgtgttcgtttctcagctgctgaaggatgtgtgttctaaaacaaaagggctcccagccagctctccggctgcatgatagagaagtgttttgtaagacnnnnnnnnnnnnnnnnnnnnnnnnnnnnnnnnnnnnnnnnnnnnnnnnnnnnnnnnnnnnnnnnnnnntggggtctgtataacctgtgcccaggagactctgtgaccagcttgggaagctcctgcagggaggaaggaatgatccacaagtccccaagcccttcatgctgaggcatctgtctggctggaagaaacactaaaggttggcattgtgctcaacactgggaaatgacctggaggaaagttgggaagaggagtccaggccggttccaccctctgggtcagaaacccggctggaaagcactggaaatagggaaatagaagaccgaaaggctgggacccccctcacacccaacctgcgtccatggccgaggttgagtgaggagtcctggagactctggcttcatggtctttgctcttgttcttctgtgcctcaggggtcgctgcccaccaggctcagcagggcgttcttgtagtcaccgctggtgtcttccatgatcatgctgctgagggtcttgccgtacatcttcttgaagtgacatttgataagatttaagtcaatctcgctccttgaaacgatgtttcttatcagggtcccatcacgcgtccctgctcccttcatggatagtagagtctctctgcaaagtagctgtggaggttttgggtgcatttcaccacagtgagcatggcctcctccagtgagccatgggtctcactcttgatgctgtcctcaatgctcttgttggcaattttctcatactcttcaaacactctcagcaggtgagtggcactgcgcgtgcacaggatggtgatgaatttcatctcatcagtcccacgaatcttctcgcctgccgcataacagatcctgtggggtcttggagggcccagttcctgggttcacaaaagctgctcacatcatccttgctgccctgcaggaggcacanccaggatcctctccaggtagccacttgtgtctgcttggatgtcttcctccaggctggacccatagtcttcctcatacgccttcattatctcccgcagctggttcttggtccgagaggccaggatctcaatgatgacaccctccttggttcctaagcccttcatggcgtcatgcagctccttggcttcgtatctgtatggcgggtacataagggccacaatgagcctctcaaacttgccactgagctcagacttcaaggtctcagtgaggtccttgccgaactgagccttgaaggacttggcgatctgctgccgctgcgtgttgcttctcttggtgagcacatcgatgatagcctgctcgttggtcccgatccccttcatggctttgtagagggtctctgcatcagggtctgggttgaagtgggagctgctcttcactgtgacaccctcctgttcaatccaggatttccaccaggccatctctttcacctcgggggcacctttcccagggagatgaagagacacaggttggcctctgctgggactccacacgtctggctcctgcagctgaggagtgagcaggccgctcacttgggtgtgggggtgcaagcccgccccagggcagcgccacacctgcctgccgtcccctcgcccccgggctctgcctggctttttt

SEQ ID NO: 319801 - DNA, 471 bp, Homo Sapiens
gatgaggaagtcatttaggaaatgttcaaataaccaatatgtggaaatggacacagggatcttctgaagttgctttgaatcaaaaggcaggcagtgctggttcctctgcctgtgtccccaccactccccagctctgtcatgcaggcctgtcctccccaaccccagctggacgtgcctcccaggcctgctgtggttctgacacacatgatcccagggcaaggcaccacttcctcacatgaatgaggagcagcaagtcataaccactcccttgggtatacaatttgctgtgtagtgaagtgggaaccaggctcaggctgctggtcccaacctcagagccccaccgcatcccagtagggatgcagcacgccccagagggctcatgtgggccccagatggcaatgccaccattgttgatgtgactccagagccagttattatgaagagcaagctcaccacagaggagtggaactg

SEQ ID NO: 319802 - DNA, 443 bp, Homo Sapiens
  misc_feature (27)..(27): n is a, c, g, or t
  misc_feature (118)..(118): n is a, c, g, or t
  misc_feature (276)..(276): n is a, c, g, or t
  misc_feature (417)..(417): n is a, c, g, or t
ctgcctccctcaattccatgttaaggnaattggttccctttgccctgggaatcctgtgtgttcagaaacccacaaccaggccctgggaggcaacgtcccagctggggttggggaaggnacaggcctgccatgaacagagctggggagtggtggggacacaggccagaggaaccagcactgcctgccttttgaattcaaagcaacttcagaagatccctgtgtccatttccacatattggttatttgaacatttcctaaatgacttcctcatcccanctgaaggcaaagagaccattcactaccatctggaggctcagttagcagttccaagtggctggcacattgcacctgagtcctgcagttcctcaggctggcctcaaattcccgagaagccctaagcagagccatttcccagantcgcaggcttcctggctgctcgaggg

SEQ ID NO: 319803 - DNA, 1803 bp, Homo Sapiens
  misc_feature (12)..(12): n is a, c, g, or t
  misc_feature (40)..(40): n is a, c, g, or t
  misc_feature (124)..(124): n is a, c, g, or t
  misc_feature (1425)..(1448): n is a, c, g, or t
ccataacacttncccctcatctgtccaccttccaccttgnagaaaataatctctcccacagtattctgaagatgaaattcatttttctgcacaggatctttgataaaaatcccccagcctgccnacgtcagatggtgccagcaatagatgctttttggagccccgctgaatactgcagttcttgcaggacacatttttactgtcccaatggtcagcggctccacaagtaagacagaggtcagggtcacactctcggacagccagggtagcacgggcactgcttggtgttgcactgtgctttgcagcggcatcccgggaaagcggttttgacactctggaactacattgacaaaacttttcaccaaaaattttgtgctatcacacaagggcacgaactgtcacaaggctgccgtggatgaatcacagggttgatagttgtaaacatggttagaggagccgtcctttttcaagctgtatctttctgcagtgtgcagcccacaaccggtgtttcctcttctttttccttggaggagtatccacatcctcagcgggagctggagctatgatgctagattctttgactctaaactcatacacctgtctacatgttttggtcccaattaacctagcaatggcacagaaattgtcatagtaagtgccaatgaggactctaaacattgaggcttcagcaccactccactccacattctcaggaggttcaatatttggcttcatctttattggtgtttgacaccgagaatttgcttcagaggagctcgaagtttcatctttcttctcttcttcttctttatcattgttctctccccccgtttcagtccctgcttccctatcactgtctgtatcctttgattccagcacattaatggtgggggtgctgggcctgctactgttattgggaagccgtcctcttctgcggcctcctggacgttttggtggggtctttatccgctcagcggtgagagcagcagcaaactcctttgctccctccaaatgctggtaacactgtggtccacaaggtttgttgtctagagctgtttctgtgttcttccgcttataagtgttgggtgttgcatgaaaaggatgtaggaagcagtcatatttaaaacatcgcctacagaaaagcgtatgaaaggagtgtaagctttgctctctctgaacagatttagcatttggtccatctatgttgggggtacattcaggaggaagtgcgcctgggagctgctgttcggtgagttctttatatttttcctttagttcttctgctgtgcccttatctggaaacattgaggaaatggcttcaaaaattttatcagaaggaaatttccgaggtgggcggctttctttatcatctcggtgatcctccagatctttctgcttttcttctctttcttcaggatcgtctcnnnnnnnnnnnnnnnnnnnnnnnntatattgaccaagggcattcaccaactccacaaaaatttcatcatttataaacccacattctctatccccgtgtactttcccatcataattttttattagttcttcaatgaaagtaccatcctgatctaaaacttcatctcccatataaggaatgttatgtaaaacagtttcatcttccaccataaaattctgctgtaggggagaccaagaatacattatgggtactgaagcaactgcattcagagtctttaatgggatgacttgtgtcgggaaatgtggaaaggcttcatcttaactgtggtggagctccgtgtcccgaccgacttgaccctgcttcctgggcacctatacatg

SEQ ID NO: 319804 - DNA, 895 bp, Homo Sapiens
  misc_feature (294)..(294): n is a, c, g, or t
  misc_feature (305)..(305): n is a, c, g, or t
  misc_feature (310)..(310): n is a, c, g, or t
  misc_feature (437)..(438): n is a, c, g, or t
ccttttccccctaattggggttccccgggaaggcctaagcccccttttggggaagcccccggttaaaaaccggaaatggccccccaccccctttttgggtatcgcgaccagaaaaatattggccccccggggttcccggggagggtcaaagaaaacgggttgtttcccccttggatcccgttacttgggggcccttccggtttcccctttgtaatgccggaccacggtgggttcccgtggtcatttgccggcgtggtggccgaacagcccgtgggcgccgtcccccgttggccngcagcagcagnttccngcactcggggtagcgctccaggagcagtggtgcctccagccggctcacttcaggaaagcacgagggtgtctccagtgcacgcgcgccctcctctttggccaagacttcagacatcatgtatagtgcnncaggaagcagggtcaagtcggtcgggacacggagctccaccaccgttaagatgaagcctttccacatttcccgacactccaaggtctaccttgaacttgatctcctgatcccggagaatcaggctgaagtgggtgccagggtcacgtgagcttccccagggaatctcatctgtgagtttctcaaatgctcccaagttgagcttctccacgtgctggaagtcccgattgctattgtagaaataaatggtgagaccctgcaggcctgcccagaacttcttgtaatcccggtcacagggccccttcttctctagaaagctctcatagtagtgtgaaggcaggacacccttaggcttggggacacggggtggcctcagggcagaggccatgacggagccagggtcttccgcctggcctctccttccagtgggtgccccagctgggccgggaagctgagaaa

SEQ ID NO: 319805 - DNA, 708 bp, Homo Sapiens
tgggggcagtccctttccacaggtccttgagctccagcacagaacacacttgttctattccgtgaagtatggctcagctgtatttccaacggattcatctttcttgccgatgctacctttttagaggattatacagggagtattcaaggtaagctaaagtaaaactatggaaaaacagctcattaatacattctgagtgttcacagaactgtaggcagtgacacatttttgtcattaattcttgacaatcacatacaccgtaaacctacaggaattccaagaactagaggtctgaggactctgaatcttctgcaagttacatatgatttaagagaaaaagaatcaaccctgtataccttagaaatgaggttacagtattgacttcaagaatataaggctcctactgagtctaaaaagacttcatttcagttcttttggaatgcaaccctgcagtttaagaataatgggagcacaacttccacaggtaacttctacatttattttataccaaaaaagttatgtgcaacaaataaacattcttacatatttacatttggttttatttaccagttagcaaaacagtgccttaaatctctgataaagagtatttctatctagattaaaggggaaacctgcccagtgaactccattttaaatgactgtttactctggagcttaaagcactagtaagaaatatttctgatggaa

SEQ ID NO: 319806 - DNA, 1048 bp, Homo Sapiens
aggcatcatggcagtttaatagtgaggtatttaattgcatttttataaaaaacattgcaaaacaaagtgacaatagggacctaaattctttggacttacggtagagatgcttgaggatcctaatattctacttctgccaacatgtcaggtaggaagctcacaatgttccccataagccattacaaactggctaaggaaaatcagtcatgactaagtccttgtctgcatcacgctcctgcccctccacacactgtctgagcgtgcacttttctttcgaaggctaatttatgaggcattctgcctgagtcagggctattgctaagtgggaaggtttgatgaacctcccagtagaaaatgcaaggcctgcaaaaatgcgaacagcttgatttactatgacttataatcaaggcaaactatacaataagaggttgtattttcatcagatctgcaaaaggtcaaagcttacagcaaaagacaaaaggaagaggtatatatcttagagacaagctcacagcacctttaagtggggagatctcatggccaaaccggtgactcaccgtgtgttgttttccagacgtgggcagatggcagctctgctgaccccacaacccacctacacgatcttcagcatttcaggatcaccggagcttgtttaaagtgagtctacactgctgaatttcccatcatccccctcgggagcagccctgggcaaatggctgcactgacagctgtgactcaggcactggttcccagagatctagaacccaggccagcaccgaggcctagacagctgtgactcaggtgctggttcccagaggtctagaacccaggccagtcactcaccactgatttatggaatggaccatatacgtatttatcaaccaagttcccaaacttagggtgcccaatgtccctcaccttgaagttagcaagagaaccacaactttgcttctctgtagacagatctcccaactttcccatctgttcctcacacacattcatttaaaaacagctgagagagctgggtgtggaaccttacctcgtgccg

SEQ ID NO: 319807 - DNA, 551 bp, Homo Sapiens
  misc_feature (300)..(322): n is a, c, g, or t
catgttttattataatcttatacagtctacataaatttgaacttgtatttatttgggttcagttataacatagcataataaaaatcaaagcactggtcctttgaaataaagcaggcaatcaccattcaataaacacacttgatttattttgtataaaagggttaagtttacaactaaacttttataaaaagtttagcatgaataagtacatcattacacttttgaattcagaggtagacatctctgccactatacaagagaactctaattaaagagttcacaaggtttcactcaaatagnnnnnnnnnnnnnnnnnnnnnnncacagcattcagtaggcttgtgtcaaaaaggtaatttctgaccaaaagacttcatttaagtgactgaatactggatccttctggtattcacgctccacctttgaaaaaaggcaaagtctgcttagattgggcaattccttgtgattttaacgttttcgctccccatggtgggaatagtatataaagaaaaccttccaactgcagaaagggcatttaaaagtctttttca

SEQ ID NO: 319808 - DNA, 377 bp, Homo Sapiens
  misc_feature (216)..(216): n is a, c, g, or t
  misc_feature (309)..(331): n is a, c, g, or t
gcttcagacatgttttattataatcttatacagtctacataaatttgaacttgtatttatttgggttcagttataacatagcataataaaaatcaaagcactggtcctctgaaataaagcaggcaatcaccattcaataaacacacttgatttattttgtataaaagggttaagtttacaactaaacttttataaaaagtttagcatgaataagtnacatcattacacttttgaatgcagaaatagacatctctgccactatacaagaaaactctaattaaagagttcacaaggtttcactcaaatagnnnnnnnnnnnnnnnnnnnnnnncacagcattcagtaggcttgtgtcaaaaaggtaatttctgaccccc

SEQ ID NO: 319809 - DNA, 1211 bp, Homo Sapiens
  misc_feature (216)..(225): n is a, c, g, or t
gtgtgtgctgttcatcaagggaacgtgtgacttccacacatgctggacaccagagatgaggcccaagctggtgaagggcccacatggaggtaaggatcacaggcttgattgggagggaaagacaagtggaaaatggcaagaagaggaggaactgggagaagcaaaacaaggcgaagataaatttaataattttctttaaataaatttgttatgctnnnnnnnnnncctctagtcattttatagagacttctttttgccttagggattctttatagttcctctccatgtaaacatattgggtaatacttgtggttctgaaataaaatgcaagcaggggggtgtacacaaaaactttaccactgaatcaagggaccagctgtgcagacattatgtaacagtaatattctatagttctgaacatggcacttgtgaatcaataattttagaatattttagaaaggacatttaaaaaaatcacataggaaacaaagttaaaatttagaaaaaagtagaatattttatcccatcttctaagcacctcaagcctaaacaaaacacacagaatgaaattttaatgatgcctgttaagcctatttgaaaacaaattctatctggcccccataaacggatgttcaggtgttcaggcaatcaactccttggttctccaatctgaaatgttcaaaggaaggaggtagaacttgggcaagtttaaagcatgtagctctgttgaatcacttctaaccaccccgcccccagctgatgaccaatttttacactgaccacagctgaaaatgtaaatgcaaataaaaagcttgagatgttattggacgaggtgtattaaaataaaatcaaaaatagaaatattaggtatatacacaacagcataagtgaaacacatcatgtgatacagaagtttccattcaaagcttacaggagaaaaatttagtgaacagaaccgcttgaacctcctgccaccgtggcttattagagccttgtagtcacttatgttccttcatatccttgggtataaatagtctcatacacatgctacacaatttagaaaagattgctgaatcataaaaatagccccgaatgtggcactttagctttctagagtacaactaaaattaatacttgatctttaacataatgttcaaatatttgaagcaacaaaggaaactcttatgttttagaaggccctataaggttct

SEQ ID NO: 319810 - DNA, 1618 bp, Homo Sapiens
  misc_feature (1046)..(1046): n is a, c, g, or t
  misc_feature (1048)..(1086): n is a, c, g, or t
  misc_feature (1115)..(1183): n is a, c, g, or t
  misc_feature (1240)..(1303): n is a, c, g, or t
  misc_feature (1464)..(1509): n is a, c, g, or t
gcttgtggcatcagaaaatactagaagatttttttagttaaattagttagaacatttatgaatgaatataataaatattttttcagaataaaatatggaccctttgtgtttactaatagataaagccagatataattttttgtttttaaggccacaaaatatggcctttgttaaagaacactaaagttagaaatctaaagttagagcaactttttaatggctatttcctattattgtaagtgttaaaacccctgcagaattcttgataaggtgctatttatactatatttcttattataagataactgtctttagtcttcttagtactagtctttttagtactaaatcaatcagcaaacatcatcatttcaccccaaaattttgtcacagaaaaggcgtatcaaatgaaaaataatttcagagatctttctttcaagatattttttcctgataaaatacattgtcttgaagtaaatacattgtcaaaacctaattgcaattctgttaaatctaagtaatttttagacagtgtttcaccgtattatttaggatgtgaaatgccatttctttcactgattacaccatatacaggaaacaggtaaaacagtgaaaactttattgtgctggttgatgccaacttggttgaaaagctctctgcagaagaagtgatctagactgacagaagtgttgctaattacaagttgtgttctcatgacgtaattagaaagtaacttctcaaagtacaacttttatgaaaaaaataagctgttaaaaaaaggaaatcgtaggttaatttaattgggaaaatgggcaattgacagagaccattttcctaacacatatatgtgctagtactttaactttttaaaattttacttctacgttttgtaatataaaaatttctattttaagtttagaatgttatacgtaccgaaagtatgcagccaaatcgatcagatcaaaccattttacctggagtttggtactggtttttacttctctgaatctgtataagaaaaataaagacaattgaacttccaaaaaancnnnnnnnnnnnnnnnnnnnnnnnnnnnnnnnnnnnnnnntattcaccatcctcaaaccaccaacccannnnnnnnnnnnnnnnnnnnnnnnnnnnnnnnnnnnnnnnnnnnnnnnnnnnnnnnnnnnnnnnnnnnnccacttcacccaattttacacacccctctactttcttaccccgtccgtcccttcccnnnnnnnnnnnnnnnnnnnnnnnnnnnnnnnnnnnnnnnnnnnnnnnnnnnnnnnnnnnnnnnnctccgtcgactcgtactcccccattccaccccctaaaatcgccttcccggccttatcgctccacccacccccatatacgcctttcttccccgatcctcccctccctaagttctttcataaaaggcccaccaccctaccgctttgttccgcccctatccatnnnnnnnnnnnnnnnnnnnnnnnnnnnnnnnnnnnnnnnnnnnnnnaacatcctacgatctccatttcgtactacaataccacactcccccactacccgtcatatccccactctcactcccttatgtatcacccctcctatatctcccttcaccc

SEQ ID NO: 319811 - DNA, 848 bp, Homo Sapiens
ttagattttatgaacaacttttattaacagaaatcaaacttattgtccaaagtgacaatatatcaaagaaatacataccaaaacctgctgccattatagttgttaacatttttattgcatatttacaatgtgtggaacattataaggatttacagtagaagccaaatttcccagcccttaaaattttaataggaaaaatcgaataaaccatacatatttttgaaaatgagcattagaaacacacagatgattataattctatagactaatacaggtgaatgctgtatgtaatagaacagctgggagaggtaaaagagtggataagagagtcatcagagtgtgaaaaaactacagctgggtggtattgaataaagagacaatattgaaaatatttttaaacgctaaaatgtcccgtaaaagcatagctatcccctatgcaaaactgtgaggtagaatttttcccaccccgttttctgctcttctggccaccatttgggggacttccctgtccaggtgactctctctcacatagctgtacctggggcttactagccatacatgctttccactaccccctcaacctcatcacagaaataaccttttctgttcaatgatcagtcttactttacctactgaaaacgggtggtgaaagttagtaacataaacaaaccagtgctgtttcttctagctaacatatcaccatggttgggctttaacctttcaaggagtgaaatattgctaaagtttcaggcataggaaccccttgaggagctgtctggggcagacaggtctttgctttcctcagatagttccaattgtcatccttgaccatgaacaatgccattgtt

SEQ ID NO: 319812 - DNA, 337 bp, Homo Sapiens
tgttgttttgttacaggaacgtaagatcagggctgtcaccatttcactagatttttacatccccttttttggcattaattgctatctttagctggttttcacccagggggataatcaccacatctattttcttatcatagtacttgattaaaaactgagtaaggcaaatgcaatatgaaaatccttcaacattaatttgaaccatctaccaccactcaacatctccaaaattgtatccccaaattactcatgtctactcgtcccttaattatacctagtcattccattttttattaatatcctattttatcccattttagaacccagagttccctaa

SEQ ID NO: 319813 - DNA, 526 bp, Homo Sapiens
atttttggtaaaatgtgatgaagatggatttcacaaatagccaaaaaagaagaaaactcccttctgatcttgtattttgaaagattgatgtttgcattttacttcagtaaacaattgctaaagacatcacactagaaacatatgcaatgtttttattacatacttctactggacatcacagaattctttgggttctttgtaatttaatgaataggtttgaaaacttatgaccaatacttgttataacttagaggactttgttttattccaaataaggaatgaatttgcatttaaaatcttaatgaatgttttcaaaactgaatagataacatagtactttaactaaagtctccaagttatgtattataatattacatagtagtatgcttaggctttactatgtattagccttttgttggactgtgtatgtattttaccatatgggttttaatgataatggtgtatgactgctttacatgagtccttatgcatccagatgttataataaagtggaagtggtttcttt

SEQ ID NO: 319814 - DNA, 1010 bp, Homo Sapiens
  misc_feature (70)..(70): n is a, c, g, or t
  misc_feature (76)..(76): n is a, c, g, or t
  misc_feature (384)..(384): n is a, c, g, or t
  misc_feature (387)..(387): n is a, c, g, or t
  misc_feature (390)..(390): n is a, c, g, or t
  misc_feature (548)..(567): n is a, c, g, or t
  misc_feature (656)..(690): n is a, c, g, or t
ggttgtttgttttcggaaccgggggggcaaaaaggatgtttttgttcccgtggtcaccatttgggggttnccgggntgggtttggaaggccattcgattgggcggaggcacccatttcttttttcccaagagcccatgcagagaggcgggcatgcatggggccaggtgaagcccacgatggcagggggagcccaggggtgacagagtcctccgttggggacaggggacagcaaaggctgacagggacaggagctccttgggggtggggaacagctcttttaccggggtggactggagagggcgggttagcagcctcccattcaagtttaaaaggtgccgagagaaagagcttgggctttagtggagcaaggggatcttaatccntcntcntccagcctgagccccacctcgtgagggagttggagacatttggaaatcagaaacgcacagtggtgggtgggggagtgggcagacagacagacagacgagagagcattagcatagagaatccattacgaaaaagcaattaatttttccaaggaggttcnnnnnnnnnnnnnnnnnnnngttgtctgtttgtttcctttaaaaaaataacaataatactaccactaacccgacagctgactggtttatacagtactacacgccaggtnnnnnnnnnnnnnnnnnnnnnnnnnnnnnnnnnnncggtcaaagacttcataaataagaggcgggtcccagacccgcaatttgtcaacatgtcttaaataggtgcattatttaaatcttatgtacaacaagaatcactttgcatagcaatggtgaggacacaggacgggtgcagtgatgtgactgggtcttcttgtcccaagggcggggggcgagttcgcagctcagctcggagcctctaggaagaaagcatccttcgtccggcccgcaatggtggcatcggagttgacttttcccacacgacggcatcaaacacaaaggcaaagaaaatcccctcgtgccgaattcgccaccca

SEQ ID NO: 319815 - DNA, 852 bp, Homo Sapiens
  misc_feature (90)..(99): n is a, c, g, or t
  misc_feature (101)..(114): n is a, c, g, or t
  misc_feature (118)..(118): n is a, c, g, or t
  misc_feature (141)..(141): n is a, c, g, or t
ttggaccaagttccacttaccctacgggggcccgggcccccaaacgaaaggtttaggaaagcttttgaagggccagggcggccgacaagnnnnnnnnnntnnnnnnnnnnnnnnttgntaggccatcactcttattatttntttgaaccctccccttctccacctcccaatactggaagcttacccatcaggcagaattcttaatctgcctcaaaatctacaggtccaagctctgcgaataccaagtgctcaaggcaactgcgacccttcagaaaactaaataccaacaacgaatggtgttactgtgtaaaaagtttctactgctgaatagtaagaagcaatgtaaattttttaatacaaacaatcccatagtatttattgccatcttgtagtaacacgagggtaatcaaaacaatatgaataaatgttcacattggacaaaggacatctaaaaacaaactgtatccttctcaacaatttctcacttcattgatcatttctagttggagacactttgtagcagagtaatattatctccttttagcatgatccgacccagttgttttcttgactttgttttagaatgaatctcttctgcatcatctaatacaaggttcatatactcatcaaaaccaatgatacagccttctatccgcatattcacttgctcatagagccacacctgaatccgcgatctattttgtaagtatctgaagatgaggttgatgggctgcaccataaccttctgcactttctgaccctggccacggtacgccatggtggaatttcacaaagagcacacccgcacgctgcctctgagagcaacttccggaataaagaaccggaagcctc

SEQ ID NO: 319816 - DNA, 700 bp, Homo Sapiens
  misc_feature (47)..(47): n is a, c, g, or t
tttccttcccaaggccttttggccatatttctccatgtttccccttncaccccattcatgcccagcccacccccttatcccttttttctagccaggggcccaggatggggaacagccaggcagcccttttgggcctttgggattgtgatgataaagccaagccctaggggccagggttttggggagcagagagagcccaagaagttgacccacgtgtgatttccagcccttcccccctgggacttgacttcccaggtcaaggagtccgtctcattctggctggtcgagtgaccagaggcctgtgtgaatgtgtgcacctgcttttcctgcctggaatgttttctggctcagctgcagcaacatctgtgagcccagtgtgtgccctgtgtccctgggctcgctccaagtgcttttatttacatgcagggcccaacatgatgatggtgtgaagggcaggaaacagtcctctgaaggagtggggaggtgggcagtctgcccccgccaggtaccatcgcctcctgccagcttccttagaccaggcagggctgccatggtgctagctgcaagtccatcagtattgaccgtctcgctccatcttggtcctccggagtcccaagtttccttttcatcaaatctacagtcaccagctgaacaggccaagaggacaaatgatgtttctaattcctagctgagttttctt

SEQ ID NO: 319817 - DNA, 442 bp, Homo Sapiens
ccacaacatcccctttttattgatattaatcacagttatgaggtcttgtccatcagaaagcacaatttgcattatgtagaactacatacaaagacataaaaataaaacatacatacaccaaccaccacaccagttaatctcaaccaatcaaacttttttttgtgtcttcaattttgatcatcagtgcttcggaagaacgtacatagacccagcccacggttggcctttggggtctgatagcattcacagagcaggagattcacccttgaaaccaaaaaaatgtgtaaactctgaaagcagacactgacaatgcaatgcctgcatacctgactcctgggctgccttccttctcaccaaagcccactgaaagtctcacgtgtgcctttaaccaatgaagatggcaggccttatctgtgtttgaagtggacaggtcattgctacc

SEQ ID NO: 319818 - DNA, 1011 bp, Homo Sapiens
agaatgttctcttatgtaaagaaatttttgcacagctctctcgggaagctgttcaaattaaatcacaagtccctcacattgtggtgaaaaaccagattatctctcagccctttccgagcttgcagttatctatttctttgtgccattcctcaaatgataagaaatcccaaaaatttgctactgagaagcaatgtccggaggaccacctttatgtcctagagcataatttgcatctactgattagagagtttcataagcagagcttgagttgcatcatgattgctcatccggctagtgcgccttttgggctcaagagaatgagactttcgggtcctcatgcttttgataagcatgaaattaattcatgtacagtccaggtgaagggcattctggaaaaaataattaacacaagcaaagcgatatttttctaaggagtagagctgctgcacaccagtatgagcgagcttagcaagccgaattgaggatcctcagatacaaggctcattggtcaaatatctagatgatgtttatgaatctagtgtgaaagttttaagtcagcatcacaaggctatgaacaaatatgcaagtccattcaactgcaattgaatattggagttgagcagattcgagttgtacatagagatggaagagtaattacactgtcttatcaggagcaggagctacaggattttcttctgtctcagatgtcacagcaccaggtacatgcagttcagcaactcgccaaggttatgggctggcaagtactgagcttcagtaatcatgtgggacttggacctatagagagcattggtaatgcatctgccatcacggtggcctccccaagtggtgactatgctatttcagttcgtaatggacctgaaagtggcagcaagattatggttcagtttcctcgtaaccaatgtaaagaccttccaaaaagtgatgttttacaagataacaaatggagtcatcttcgtgggccattcaaagaagttcaatggaataaaatgg

SEQ ID NO: 319819 - DNA, 665 bp, Homo Sapiens
  misc_feature (37)..(38): n is a, c, g, or t
  misc_feature (67)..(68): n is a, c, g, or t
  misc_feature (71)..(76): n is a, c, g, or t
  misc_feature (171)..(371): n is a, c, g, or t
cgggaagagggcggggccccggaaaccatgttttttnntgttcgttgtgcttcttttctggcgcccnnctnnnnnngggaggaccaggagttttccattttcgggccacccaagggcttgggagtgccagtgggcgcgaatcttcagcttcggctgaaaccctcccccctnnnnnnnnnnnnnnnnnnnnnnnnnnnnnnnnnnnnnnnnnnnnnnnnnnnnnnnnnnnnnnnnnnnnnnnnnnnnnnnnnnnnnnnnnnnnnnnnnnnnnnnnnnnnnnnnnnnnnnnnnnnnnnnnnnnnnnnnnnnnnnnnnnnnnnnnnnnnnnnnnnnnnnnnnnnnnnnnnnnnnnnnnnnnnnnnnnnnnnnnnccaaactgactcttgaccaaagaatctgatttggcaaaccaaatcttagtgcagtgttcgctcctcgtccccttacccagaacatgattcagatcctaacataaacacaaaaacaggtcagggaaccaaaacactgtggtcttgtctattatacaaaatattgagataatgttcacgattcattctgttttcagcaattgtgacaattttgaagcttctctcgaagcttcgaaacacttcatttcctactaaataccaaaacgtgtcagacaggcatcaccagtgggaacttgg

SEQ ID NO: 319820 - DNA, 735 bp, Homo Sapiens
  misc_feature (579)..(579): n is a, c, g, or t
  misc_feature (588)..(588): n is a, c, g, or t
  misc_feature (616)..(616): n is a, c, g, or t
  misc_feature (627)..(627): n is a, c, g, or t
  misc_feature (695)..(695): n is a, c, g, or t
cgctccacccacacaaccgtaccacctaatgcaacacatccaatgccagctacactgactaacagtgcctcaggactaggattactttctgaccagcaacgacaaatatttattcatcaacagcagtttcagcagttgttaaattctcaacagctcacaccagaacaacatcaagcttttttgtatcagttaatgcaacatcaccaccagcagcaccaccaacttgaacttcagcagctgcagatccctggaccaacacaaatacccataaacaaccttcttgcaggtacacaggcacccccacttcacacagctaccaccaacccatttctcaccatccatggagataatgcaagtcagaaagtagcaagacttagtgataaaactgggcctgtagctcaagagaaaagttgacacctgagaaacatctagaaattgcctatcctgctgttctagcacttcatctggctgcctttgcagtccttttactacagctatgaagaaacgcaacaagaaactcaatgcacaacaaaggattaattgctgcaaggacattcttgtaaggctttgattagtttncttgttgcnttgttgcactgaaatggaattcccatgnccctacccctnaccccagttttttgaacatggaaagaaaatttaataacttttttaaagtgacataattttacatggcnatatgtttatcaactcaagaattttaatattagttggtac

SEQ ID NO: 319821 - DNA, 995 bp, Homo Sapiens
  misc_feature (19)..(19): n is a, c, g, or t
  misc_feature (687)..(700): n is a, c, g, or t
tgctttagggctttttttnaatgtttcctcactgttttgacaatatcatgaaaaaaatcagtttagaatctggaactggcctggacgggattcgagggcagctggcgggggctgcatagctgcatgaggttcctcccccaccatgggacctaagctattggaaacaggagcaccaacagggcaccgaacctggaactaagttagtgtctagagtcaggcaagagaggagagtcaggcaagagaggaggggccgggccacagtcgccatggggacgcccctggctgtggttggttctgtgtctccccctccccccactggctacatggagacagggaggtgggtcaggctgttcccaggacagaaaaataaccggcagtcaacctcagggctcatacccgagcttctgctcaatcccctcggggacagttacaggactcagagagaaacgtgaatttcagaaaaacaaatcatttttcacataagtgttccaaatattgcgtggggcatattaatgctagaaaattatcttttgtttacctgaaatttgcgtttaactcagcactctgttttgcttttgctaaatctggccaacctggcctcaaaagtcggtggggggaggcctgagaaaagaaagggaagtagtcagtactgagggtattgaggggagggagggaataactcagccnnnnnnnnnnnnnnggctttccccccataggaatgatatagttatttaaaaataaaaatcgttctccaaaaatattctgcactggccttcctcagttgttaatagctatgggaggtgcgtagggaaaacacacacaccagacacccaccccatgtcattctaaataaagttgggaagcactaaagttgagctggtgtctttgccacggatgtccccagactccagtccgctaatcgccaccagactccagtccgctaatcgccaccggacgcgtgggtcgacgatatcccggaattccggaccgtacca

SEQ ID NO: 319822 - DNA, 568 bp, Homo Sapiens
  misc_feature (379)..(379): n is a, c, g, or t
  misc_feature (391)..(391): n is a, c, g, or t
  misc_feature (458)..(458): n is a, c, g, or t
  misc_feature (478)..(478): n is a, c, g, or t
  misc_feature (523)..(523): n is a, c, g, or t
  misc_feature (529)..(529): n is a, c, g, or t
  misc_feature (543)..(543): n is a, c, g, or t
attcggcacaggagcaccacagggctggctttgtgccctaacccctgggatgcagcctgcctttccataaagtcacctaggtgaggataggcgcgggagcctcggcatgacaccatggagatcggggccctcttcccagtgggttcactccttttcacacctgctgggtccctcctcacccagcaggcctggtccacctctcattgcaagccccaagcactgagccagcaggtgccagggagccacccgccccccatcgcttctgcacacctcagactcaccccatcaccttcggcatcaaagcactggctctgcgttctggacccctgattccagggcaggcccccttccgcagaggaaaagggttgggggagaagcntcttgcagttcnggggaagatgtgggggtgctggggtgaggagggcatcagcccccacaagttatgttttttgttgttntttaaggataggcagttttnatttttggaaaaagttggaaaaagggtttttcccggggttgttcnttttgncccagttgaggatngggaggggacgtttaggaggaaatt

SEQ ID NO: 319823 - DNA, 728 bp, Homo Sapiens
  misc_feature (273)..(312): n is a, c, g, or t
  misc_feature (456)..(456): n is a, c, g, or t
atatgaaaattcatttatttagtgaaaccttacattaaagcgtcccaacacaaagcagattcgaacataacaactggtgattggctcatctcacaggctcacatcatcagtgtgttaactaacatacaataggactgtacccttttacaggattgagtgttttggatcccactcacacactaaaaccctgccataaagttgtatcaattagggctgttcaaatgtgaaactgtattggaaaatgggaaactttatctccttatatatgtatannnnnnnnnnnnnnnnnnnnnnnnnnnnnnnnnnnnnnnncaaaactccatctcaaaaaatatacatatttattaggacagaaaagcaaaaccttaccataattccataactatgattattggaattacaaagtaaatgaacacttcaattgtctaatagcagtgatttgtcattaaggtctcngggtcattaatacatttaaaatctaacaaagtttggaaagatagtatcattaaattatcttaaaacactacattagttcattattatccctgcagacaaggataaagatggttggtaacactataggtggctaaaacaaagtaaaaggatcaaaatggcagaattctttactctgatcatatcatttgattaatcacacttttatctatcacatttttagtttgggaaataggtttggcctatccatataggattccaccttaatggcacat

SEQ ID NO: 319824 - DNA, 409 bp, Homo Sapiens
  misc_feature (399)..(399): n is a, c, g, or t
tttcagttcagtatatgaaaattcatttatttagtgaaaccctacattaaagcgtcccaacacaaagcagattcgaacataacaactggtgattggctcatctcacaggctcacatcatcagtgtgttaactaacatacaataggactgtacccttttacaggattgagtgttttggatcccactcacacactaaaaccctgccataaagttgtatcaattagggctgttcaaatgtgaaactgtattggaaaatggggaaactttatctccttatatatgtatattttttgagatgggcgttttgctcttttgcccgggctgggagtgaagtgggcacgatcccggggtcactgcaacctctgcctcccgggtttgaggcaattctcccgcctcaggncttcccaagt

SEQ ID NO: 319825 - DNA, 993 bp, Homo Sapiens
  misc_feature (866)..(924): n is a, c, g, or t
ggggtgatcctgggtgcccaggggtttctattgttcctcccagatttccccttcttggttccgatgccccacagttctcgccagttggtagcccatgatgataacctccttaaaagtggagggatttgtactagcttcatgttggtctgagcgggggcattgcattctgggcagtttgtgctgaactggagcacttcatttctgagatcttcctcttctggcttctctgctggtgcttcttcttgaagcccccagcatctcttcctgctgtcgggtccggttgtagtgtgtgatcaccagggcatcatctttctgaggagcatgtgggttttccacaaaactgttccctgagggatcatcaatgatcagagtgaaaggggaggctacttgctttagctccttcagtttgacaatgaactcatcaattctttcagctgtagcatctttgtttgcccttcgtgcaggctggtcctgctccaggccagagatagcacgggtgatcaatccttcaacagtggtcagagctcctttctggctaaaggcaggaatttcaaaatctagctcaggaatccttgtggcagcagagtcagtcttcaccacttctctgttcatgtcctccagagccctgacagacaaagtgtagcgcactccctggtcctggatcctgcctgccgactggatctccgtgttgttccagccacagtgctcgcaggaaaaggagctcactattatttctctgaagaagggaatcttggtgagcaggaggcgcgtcatgccattgcagtaacagttcatgcatagcgactcgatctcggtgggctgctgctcctcgtcctcggcgctgatgggccggaacaggtgatcannnnnnnnnnnnnnnnnnnnnnnnnnnnnnnnnnnnnnnnnnnnnnnnnnnnnnnnnnncccagccccgctggccgccatggccaccacgccctcgtgccgagtcagccacccaggcctcgctaccta

SEQ ID NO: 319826 - DNA, 1116 bp, Homo Sapiens
  misc_feature (140)..(148): n is a, c, g, or t
  misc_feature (230)..(242): n is a, c, g, or t
  misc_feature (371)..(379): n is a, c, g, or t
  misc_feature (511)..(628): n is a, c, g, or t
cgcgccccgggcggggcgcgactaattatttttatgccgccacaacacgggggccccacaacatggtttttagggtggcccccgctggggggagagtgtaaaagggggtgcttattatacacgcccccgtgttggaggannnnnnnnntctcccacgtgtggcggcggaaaaatagggtataaaaggagggtggcgccccccgttctctccgggcaaaaatgtggtccannnnnnnnnnnnncggatattttgtatttcccggcctcccccctggcgcccctcgtgtttgtaggccccgggaatgggtcccggaaaccccccttcggggtttttttaaaaactctggtggtgcgcccgggggctttttttnnnnnnnnnagaaccagcccccttgtgttggccggggtttttgggggaacccttaaagccatgttctgttcccttttggggcccggccccccaaaaaaagggttttaaaagttttttgagggccggggggcccgccaaaannnnnnnnnnnnnnnnnnnnnnnnnnnnnnnnnnnnnnnnnnnnnnnnnnnnnnnnnnnnnnnnnnnnnnnnnnnnnnnnnnnnnnnnnnnnnnnnnnnnnnnnnnnnnnnnnnnnnnaacagtggtaaacagtttttattcaggcaatgaaacatggaaaaaatatattagtaatcattataataatttgtgagtataacttttacaaatagttacttgacatataaaaagggaaattactgtgcatataaaatttatgtagatgaatattccacacaacacaatcctgatagcagtagtcaacgcagcactcatccctccagatgaggggctcctcacacacttcatggcacccgtgggaacacagtggaagcagatgtgcaatgaacatttacttggcacattagtataatgggtatctattgggcaaacacacacttgctaacagcaatactgaaaagtttactgctacctctggagatttaaaagaaatgcctggatcctatcccgacgggctgagaaggaccgaggctgaaggctctggtgtgggtcacctacacgctggccctggtatctgggactgggggatgggtttgagttcaatt

SEQ ID NO: 319827 - DNA, 1528 bp, Homo Sapiens
  misc_feature (1401)..(1401): n is a, c, g, or t
  misc_feature (1480)..(1480): n is a, c, g, or t
  misc_feature (1511)..(1511): n is a, c, g, or t
agccagttaccctttcaacctacccatactttgtacaactcttacacaaatacttagatatttattagatagccctgaattcactctaattataaacagggagtgtaaactgcccccagatgttcctgggctgggtaaaagcagctggagtgaagcactcattttccataaaggtaacaaagggcagctcagtggttactcaagctcaaaagggtttttttaagagcaagcattggttaagtctgtgtatactgagttggaaagtgatttcaagcacattccttttttagtggaagtgaaagttctgaaagcccccttttaacttcctcttggtttttcattataattggtagccatctcatgaactggtctctgactgttgtctctttgtggtcatgtgattgtgagcttgctttctgacttgcatttctgactttatcctgttgttaggaagatagaaactaggttttgaaagattacatgattcaagcgagggattttaaagtaaagatgtatttattctgaagaatctaaaagataacagattatttgcttatgaaagaacaatatagtctgggaatcccagaatgtcaagccaaaggtctaagaagtcatctccttcaaatactttaataaagaagtatttcgaggagatatctgtccaaaaaggtttgactggcctccagattccagttatttttaaaaagcaacttaccactaaatccttgagtctccatagagtaacagtaaagaaactgatgtaacagactctcctctcaaaggatctcctctggaagagactatcagcggcagcattctccagggaagacccatcccctagtgccagagcttgcatcctggagactaaagattgcacttttttgtagttttttgtccaaatgcaatcccatttctgtgcctcttagcatgcagttagatttggacaaacaagattcctaaggaatgactttattaactataatatggttacagctattatataaatatatattctggttatagttctaatatggagatgttgtgtgcaatgctggcctgtggtggtctgtgtaatgctttaacttgtatggaggaggccaggctcagagctgagatgtggcctgaaccttccctgtatcgatcctttaatttagaactgtcaagatgtcactttctccccctctgccttttagtggtatctgacatatactcaaaacagtaatttcctggtcacatcattaactgctaattctgtatttataaagaattttcagatggacatgtacaaatttgaactcaaaccatccccagtccagatacagggcagcgtgtaggtgaccacaccagagcctcagcctcggtccttctcagccgtcgggataggatccagggcattttctntttaaaatctcagaaggtaggcagttaaactttttcagtaatttgctgtttagcaagttgtggtgttttgccaataagntaccccattaatactaaatggtggccaagtnaaatggttccattggca

SEQ ID NO: 319828 - DNA, 1899 bp, Homo Sapiens
ataaaatttagacatcaaattttcctactaactaactttattagatgcatacttggaagcacagtcatatcacactgggaggcaatgcaatgtggttacctggtcctaggtttgaactgtcttatttcaaaagatttctgaattaatttttccctagaatttctccttcattccaaagtacaaacatactttgaagaatgaaacagattgttcccatgaatgtatgctcatactcgactagaaacgatctatgttaaatgactgtgtatatgaattatttcaagtactaccccaaataactttcttattgctctgaaagaagaaaagcaatgtaaatcactatgattattgcacaaacaaccagaattctccaacaattttaagtaatctgatcctcttcttggagaaaattgttacctaatagtttttccttatgaatgttattactactggtataaatcaaatttctataaatttcctacttaagtcttaagaactgggttcttcctttgatgttattcatgttcagaaaggaaacaacactttactcttttaggacaattcctagaatctatagtagtatcaggatatattttgctttaaaatatattttggttattttgaatacagacgttggctccaaattttcatctttgcacaatagtatgacttttcactagaacttctcaacatttgggaacttttgcaacatatgagcatcatatgtgtctaaggctgtatcatttaatgctatgagatacattgttttctccctatgccaaacaggtgaacaaacgtagttgttttttactgatactaaatgttggctacctgtgattttatagtatgcacatgtcagaaaaaggcaagacaaatggcctcttgtactgaatacttcggcaaacttattgggtcttcattttctgacagacaggatttgactcaatatttgtagagcttgcgtagaatggattacatggtagtgatgcactggtagaaatggtttttagttattgactcagaattcatctcaggatgaatcttttatgtctttttattgtaagcatatctgaatttactttataaagatggttttagaaagctttgtctaaaaatttggcctaagaatggtaacttcattttcagttgccaaggggtagaaaaataatatgtgtgtcgttatgtttatgttaacatattattaggtactatctatgaatgtatttaaatatttttcatattctgtgacaagcatttataatttgcaacaagtggagtccatttagcccagtgggaaagtcttggaactcaggttacccttgaaggatatgctggcagccatctctttgatctgtgcttaaactgtaatttatagaccagctaaatccctaacttggatctggaatgcattagttatgaccttgtaccattcccagaatttcaggggcatcgtgggtttggtctagtgattgaaaacacaagaacagagagatccagctgaaaaagagtgatcctcaatatcctatctaactggtcctcaactcaagcagagtttcttcactctggcactgtgatcatgaaacttagtagaggggattgtgtgtattttatacaaatttaatacaatgtcttacattgataaaattcttaaagagcaaaactgcattttatttctgcatccacattccaatcatattagaactaagatatttatctatgaagatataaatggtgcagagagactttcatctgtggattgcgttgtttcttagggttcctagcactgatgcctgcacaagcatgtgatatgtgaaataaaatggattcttctatagctaaatgagttccctctggggagagttctggtactgcaatcacaatgccagatggtgtttatgg

SEQ ID NO: 319829 - DNA, 1018 bp, Homo Sapiens
cccaagtgaagccggtcccctttttttcccaagcccaggaggggttttcccttgccccgcggaggaccggaaaggaggactcaatggggcccaagaccgccagggccctggactgccccacttcccgttttgggcaggaaaactaaaattgggggagggaccccccaagttttcatatgcacacaccctggtgccctctcctttgtcccggtttttccttccatggcaggggctacgtgggcaccgggcgcttgtcctggaagaagcgcttgagcgtgcagacttgcagcacagccaccagcagcagcaccgccacgttgacagctgaccagaagttgacccgctccaagttgccctcttgcaggttgcggtcacgtgcctcgaaggcccgcagtagcgtgagcatctggatgctgcgctccagccgggtccgcatggtctcaatggactccttgatgtcctccattttaacatccagcatctcctcgggctccacagcctctgcccatccttcgacctcctcgtcatcctggaggctgtcaaagatcagttcaaagaacaccagcttctcggagatggtgctgaaggagttgtcaaagcacagcttgtagtccccggcctccgttggctccaccgtgtgtaccccatcagccttgcgggactcgctgaccaacagcacgccctgagggctctccagcgtgaagtccacgtccagtccagcacctccgatcacctggtattcggtctcgaggcttgcgttggccggcgcggactggtagaaacactgcttcctccccgccggcaacaggaacgtgaactcaccgtcctggattggcgggggccccgcccctcccacctccactggtggcattagtagccacaaggccagggctagggccgcgccggccgccatcatccgggtcaccctctggtctgcaaaggggtcgcggctcctttaagcgctagccctgccccggtgctactcggcggagctcattggcagtggcttctgtatgtt

SEQ ID NO: 319830 - DNA, 1125 bp, Homo Sapiens
aaggccatcttcgggtgcatttttcccattgcccaatgtgaatagaccatccatggtttggaggttatggtacatttacagcatttctgaaaacatcaggcataaaggtcacggtgaaaattcagctgtgctttcggatcagtccattttcttatgtttttcttaatagtggacaaatcccataggcctctgcacaatgctgtggtagccaggtgctatgtcatctgtaacaggctgcaggaagacattggcatacctatgattagctgcagcttctccatacaagcatgatggctttcttccaaattttctgtgcctgaatagcttcctgatcctcactacagacagagaactgtgaagaagcagggctgctggggatggagtctgccagtgtgtgtgactgcagtgtagcattgtgtatgctgaagccatcatcactctcgctcacaggaggttcattatccatttctgacaagtagccttctccttgatcctcttccttaggctcctctaggctggccgcttcactgacaccatcttcctcctcatcctcacctggggcatcctttatctggcttccaaaaatagtccctgattcttctttcaatgagtctgacatttcaaacttgtgctgagtctctgcctctaaaggatcttcaatgggatttgagccatgtgatggagacaacatgctttcaggggatgcttctgtcttcacatttgtaagtggagtctcatcgcctttcccaatggcaacatctgcttcaacaatctctccagctgcagtacttcccagttcttcatctaagtcctgactcttgagttctggtggctccatacttgtggctggaacaactccagctactatttcggctcttgaaatgactggctctggttctgcaggttccaccttgatctctgcactgggctccctgatgtccaccagttcatgtattcccttgttttccgtttcctcaaagtccagtctctcttgcttgaccgtcatttctggtgcagggagaggtactggcttgtcccgctcctgctggataggatgctcccaggggccaggcagggactgaggatcatcattttcttcacaaaatgacagtgctggttccactg

SEQ ID NO: 319831 - DNA, 874 bp, Homo Sapiens
cttattaaaatttttatttctgtgtaaaacaaagaattcctagaggtcaaataatataccaaacttaaagcactattaagtcatgaaacaaagaagattctgaggtagaagtcaagcaatataatccacagtttcaggtattcccagcaaccatcgcatttcgcaagtaagatctattttttttaaagtctcaacttccaaaaaatcaataatccattctgtaaaatcagatgtaaaactatgaccaacagaagacacccaaacttttctcatggtaacagagtaaatgcttttactaaaagctgccaacatttctatcagtagtaaccgtaaggaggccgctggttgtaaccataatgtccatattgctggggatagtaaggttcttgtctgtgttgcgggtagttgttaccccaggatcgtccatgccactgattggatcgattgtcacttggccacccccatctgttgtccctgcctctgaactgtctgttgtcttgcaaccgattgcctctgtttctttggttcccaccagctctgctattccattcctcaacaattggaggagactcaggagggcgtttcaggtattcctgatactccttgtcattttctgtgaatctactagcaaacatctcttcaaactttggaacagcttcggcagtgtcagtcattctgaaaatcccaaaggtttgaggcagctgtactgcttaatgtttaggttgtttaaatccgccaagggctatgtcaatccagctcaggccgaaccccgccggcgagacactgagaagcccaggagaggtggcctctggtccactacaccgtggaactccagaccactccagttctccaatgtaaccgagcgccttcctct

SEQ ID NO: 319832 - DNA, 1000 bp, Homo Sapiens
  misc_feature (823)..(858): n is a, c, g, or t
aaatatcctaccagcggatggagaatcctggctgccatgtggttgatgccagcccctccagagaaaaggtcctgcagacagtattaagcctaatccagaatagttttagtgaaccgtagttactctggccaggtgccacgtctaactagattagatgttgtttgaaacatctacatccaccatttgttatgcagtgttcccaaatttctgttctacaagcatgttgtgtggcagaaaactggagaccaggcatcttaattttacttcagccatcgtaccctcttctgactgatggacccgtcatcacaaaggtccctctcatcatgttccagtgagaggccagcgattgctttcttcctggcatagtaaacattttcttggaacatatgtttcacttaatcactaccaaatatctggaagacctgtcttactcagacagcaccaggtgtacagaagcagcagacaagatcttccagatcagcagggagaccccggagcctctgcttctcctacactggcatgctgatgagatcgtgacatgcccacattggcttcttccacatctggttgcactcgtcatgatgggctcgctgcatctccctcagtcccaaattctagagccaagtgttcctgcagaggctgtctatgtgtcctggctgcccaaggacactcctgcagagccatttttgggtaaggaacacttacaaagaaggcattgatcttgtgtctgaggctcagagcccttttgataggcttctgagtcatatataaagacattcaagccaagatgctccaactgcaaatataccaaccttctctgaannnnnnnnnnnnnnnnnnnnnnnnnnnnnnnnnnnnctaaagtatggctctgaatagaatgcacattttccattgaactggatgcatttcatttagccaatccagtaatttatttatattaatctatacataatatgtttcctcagcataggagctatgattcattaattaagcggcc

SEQ ID NO: 319833 - DNA, 589 bp, Homo Sapiens
tcagtaagcactaactgcttttgatactgaagaatcaaaagcaaatggtgctaatgtaataatggtaccaattggataaaaccaaggtgtaaattgtgaaataactgctttttgaccgttattgaagtatgcagaaacaataggttgtactaaaacaatcattgttgttcctccaatagctagtaaaagtctcattataacaaaaccagcgtatgttggagaataaggtgcgataattccaaaaagcattaatccaagcgctaaaataactgcgtatttatgtgtaagttttgcaattgctcaacccacagctatagaaccaatagctctaccaattgtaattccaaagtttgttccttgactagtaatttctgatacagtagatgtagggaaataataacctaaagtaccatatccctcagctccggtttttccatttaaaccaaatgctagacctcagtcaactacaaaaagtaaatatgaaaataccagtagaaaccataaaataattcctacagaaaaagttagtggtttttcttttgtatgtttaggcactaaatattttctgatatcaatgctgcattttgtt

SEQ ID NO: 319834 - DNA, 881 bp, Homo Sapiens
  misc_feature (718)..(735): n is a, c, g, or t
ggggaccaaatccctttcggttacccccctcctttttgccggcaaattatcccccttccttcataaaaggggggcaaaaatttgttaagatgccctcttaaaaataaatattctttttttataaaaataataaaaccttcaaaataaatattctttacactaaacaatatgttgaaaaaattagaaaataaaggttgaattttactgtaactgtacaatatacatgaagtccaaagggaaatcagagtcttacaataaaggctttctgtaaggcaaaatacaatctaaaaacatactgattgattcacattcttccgaatgtacaacatattagtataatattttgtgtctgtgccatgtagtatggcacaacttgtttttcacagttgcaaatattattgtatatacaaaaatatagcacattctctctggagaaaacaatggaaaaaagtcatctgctaatttacaagttttgcaagtactattcacaaacaaaaactttgcctaggagtgtctgtgttgctttagcttatgcaatacatgggtcaccaagttctgtatctcatactttgagctccattagctgagttctaacaagcatatcagttaaaacggcacatggacaaaaagcatttcaccgcaaacagcaaagactatcccacctttctattaacagtgccaagattataactgtttagttggttgcatatgtgtattnnnnnnnnnnnnnnnnnntcctcattactgtaatattcctgattaatgatgctatgttggtttttcaaagttcctaggggggacagtgggaactttgcagcaaactgtgtttgagtttttacagcggcaaccaggcctgttaacccggtcataacacccctggc

SEQ ID NO: 319835 - DNA, 669 bp, Homo Sapiens
  misc_feature (591)..(599): n is a, c, g, or t
atatcaagagtgaagatatgttaaagattctgaaacccagtataccactagagaggattcattttgatagctatatcacttgtgtttcaggggctattttgatcttatatccaggcaatatgacaagttcctcactcattttattttaatgaatgatgtgattgacacatctggttttccagatcttagtgacaaccgaaatgaagatccgttggttttattagcatggaggtgcacaaagctctctcttctggcaattcatggttacacggtgtgggcacacaacctcattgccattgctcgtcttcggggctctgatctgaaagtgcttgaagtcaccgaagaaagcattgattttgaccaaggtgaactggccgaccaggatgtagatccagtgcataaccttattgagcaggtatccctgggcctgggtcaaccttggcatgcagtcatggacatcgaatcactcagtgtcttcactgaaccaaatcgtcatttttacagagagatgcaaagcttcagtgaagacatttagcttttttttaatgtagaattcctgtggttacatatgcaagtagggtcctattatgnnnnnnnnncagtagtgtgaattaatccttttgtgctgtgtttaatcagtattagctttatagaattatatatgtatat

SEQ ID NO: 319836 - DNA, 652 bp, Homo Sapiens
ggttgggtggatgttcatgtcttttcttaagatcttctttggctgcttcaaagcgtttggttaacctggctatcttggcctgtagttcagtgagaactgttttatgcctcttgttacattcaatcttttccactcgtgttttcaattctgccaaagtcttatcaaatacagcacactgcagcgcacacaatttttcttccagcaaccactgtataaccttttgaagtttctggttaatgtctcctttggctgtaatctttacttgaaattctgcctcatattcttcttccatatatcgacgacgtttagactgtacattgtccatgtcttctgatttagaacgttttcgtctagaaaattcatttttctcagaaggtctttcatcatcttcatgtattacttgctcttcttcctcaggtctgttgtccttttcattactttctacttctggagagcacgtttcattttgcgatataacttcagactcatctttttcacccgaaatatcctcttcatcagagaggaccagaaaggcttcttttggcaaactctcactactttcttgtttagatggtgaaccaaaagaactttccattttctcttccaaatctggatttgtctcatcgattggaaggagagatgttttagaaaa

SEQ ID NO: 319837 - DNA, 1119 bp, Homo Sapiens
ggattgaaaattattttatggaattgctacagaggagtgcttttcttctcaattgttagaagaatttatgttaaactttaaggtaagggtgtaaaaacatttttgagataaggtttttatttatgtttattattgttagagtgagttgcaatgtgggaagaaatgacattgaaattccagtttttgaatcctgtttctatttataagtgaaatttgtgatctcctatcaacctttcatgttttaccctgttaaaatggacatacatggaaccactactgatgagggacagttgtatgtttgcatcatatatgccagaaaaccttcctctgcttcctccttttgacttatttggtatgttgtatatattacataaaataacttttcaaatatagtttaataacacttagaagtgtttacttacctggaaaataattgctatgccgtacattcagagtgccccctcccctgcaaggccttgccatgattaacaagtaacttgttagtcttacagataattcatgcattaacagtttaagatttagaccatggtaatagtagttcttattctctaaggttatatcatatgtaatttaaaagtatttttaagacaagtttcctgtatacctctgaactgttttgattttgagttcatcatgatagatctgctgtttccttataaaaggcatttgttgtgtgagttaatgcaaagtagccaagtccagctatatagcagcttcagaaacatacctgaccaaaaaattcccagtaaccaggcatgatcaatttatagtggtcgtttacatctaataattatcaggacttttttcaggagtgggttataaaaacattcaagttggtctgacagtattttgttaaggatatttgtttgtatgtttattcagtatacttacataaaaattatttcgccatcagccaaaactcagtaatcatgacagctgtctgttgttttatgaagtttattttctcaagaaaatggggaataaattttggggattttgttccagctttttttaactaaagaatgcctaaaaggccacagggttttttattggccctaacctttaaagcccatgaacctttttttagaatatgaagaa

SEQ ID NO: 319838 - DNA, 940 bp, Homo Sapiens
aaaaagtgagcaaggcgaagaatgggtagtgttccagtttcaactaaattgtttggatttcgcaactgcctgccacccctactgtcactgtttcgagtatgaggctgggtggtctcgttttcaccatgcatttcagtgctgtctccttgggcctgcctgtcttgagaggaaccttccctgtgctggctcctgttgttatctgtacctaagttactcagttctgagtgcatgtctggtaaatgctggccatttctttgaagttctgactcagaatcggcctccattagagaactcagttctccaaacccagtcatgatctgccttaaaattgaccgaagagccactgatgatggctcaacaagctcattctcagaaatcctacgaagaggaactgttatggtactaacataggttcgaatacctgaccgctctaaacgagaaatggttcggcgaaagcccccactattgctttcaatagtgactgtattttctgctagccctactctggatcgagttctatttgcaatactatcccgatctctattttctccaggacggatccttctcacttgaaggtccagtgtgattgttggatgtcgtcgtacagcagttgaggatctgctggattcttctccttcttctactgttattcttgacacaagccttgaattagagaatggggtatatgcagtacctctgcgttctcgttctctatcttgctctaaaaagactcgagttctacctctcctcctaacagatcttctagtggtttgctgtactggtctactttccctttgggaattatgataaacagtgccactctgtctctgaattggtgaacggcttcgactattggaagtagatcgtaatcttattggctctaatctttggtttgtattcctcactgtaacattacttctagccccattttcccaaacat

SEQ ID NO: 319839 - DNA, 1274 bp, Homo Sapiens
  misc_feature (141)..(141): n is a, c, g, or t
ttgttccaaaaagggctaaatccttttgggggaattaggccccccatatttaccccttttccaggccccaggcccccaggaccaagggggccatggccctgcccctccaaggaaccttccaggggtaggtgggggagaccnaaaaacttccaggaacaggcatgaggggctggctctacctccaccacctctatttgaacaaaaacgattactggcttaagtcctcgtgttgtaacgcatgagccacaggaatatcttagcaagtacgcactttatcaagtttcaatttgacatgtcaaaacaaaagtttttatgttgttcatttatatttgtactcactcagatttccactcaatcaaattaaaagagaaagacataattccaagccaactgtaccataatgtttgctgtcctcgatgaaaggatagcttgttcatgtcctagaatttctccacagttccacatcttgaggccaagttcagcagtttttactgccaaaccgatgtgtaaattcggatagtgtgtagacggcgccccatcctaccttgggatccatactgatgaaatcgttcaggttcattttggaatctccagtctcaatgcagggatatggcggcggaggctctctccaattcccactggagtctttcatgtgagatcggtcagaagcaaagttcttcaaatatgaatctgcacagatcactctaaatttcctcctaaactgtgggtgaatgtcatcatcagacttaatggcatcttctacataagtgtcaaagaggcagggaaatggcaagacagtatcgagatcataaatgaagctctgtcctccacttgaaacatgaagcaaaacaacatggtaatcgtgcgcattcagaagtacatttgcatgcatgtgaatgcagaggaaaacgtctgcaaggatctgctccaaactagtaacaaaggaggcttctgggggtcagcccagatcacaggtccatctccaggtctcgcctgttgtttccagataggtatcatcttcctctcattagatatgaagacagcataacattcttctaaaggatactggtcatggtttttgatgtattcacagagcttccaaacattttcttcacagtagcagctgctgtagacgcaggcgtcccgcggggggctggccggctggtagtggacagcagcggggccattaccttccatggccggctagctgggccagggcccgggccggaggaagaccgactggaccagacgtaggaaagggcgggcttgtagtg

SEQ ID NO: 319840 - DNA, 432 bp, Homo Sapiens
  misc_feature (333)..(333): n is a, c, g, or t
tttttaattaacgttaaatcgattttatttaaagccataaataaataagccaattaacgctcaagtctgagagggctgcagtctttttaacaataccatagtccaaaaagactaatacttattgctgattcagctcacaatattacccctttccagacaacagcacattcaaatgttcaagaaaacattttatgggcaccttttatgggcatttgagattcacagagcaatgggccatggcctgcccctcaaggaacttacagtgtagctggagagacacaaaacatccagaacagacatgaggggctggctctacctccacacctctatctngaacaaaaacgattactgggttaagtcctcgtgttgtaacgcatgagccacagggatatcttagcaagtacgcactttatcaagtttcaatttgacatg

SEQ ID NO: 319841 - DNA, 1316 bp, Homo Sapiens
  misc_feature (149)..(159): n is a, c, g, or t
  misc_feature (161)..(170): n is a, c, g, or t
  misc_feature (172)..(173): n is a, c, g, or t
  misc_feature (176)..(189): n is a, c, g, or t
  misc_feature (191)..(225): n is a, c, g, or t
  misc_feature (227)..(234): n is a, c, g, or t
ggggggaatccccaacccttggtcctggcccagggttttcctggggaacaactattggccctgttccctttcctttttgggcccgccgcccccaaagaatgggtttttgaaaactttttgaggggcggaggcggccgaacatgtttttnnnnnnnnnnngnnnnnnnnnngnnaannnnnnnnnnnnnngnnnnnnnnnnnnnnnnnnnnnnnnnnnnnnnnnnngnnnnnnnncaattccattgacaactgacttgtcatctttattaatttttacaaatgcatgtctcctaatatgaaaaggttgattttcactttattgtgtgctttgcacatttacagcagcaacaggaagagcttctactgaatagattttagtcttcaaaaatgtgactgcatcttccatctctagtttgtccatctcccagttattgaccaagatcacatgaaaacccattgcattcaaatgccgcattttcatagcaaggaatcctctggggtggcttgaacccaaacaataagcagatctggaaacacatagcacagctactctttgaatatctgtagcagaagttgtatccacatcagaaagtggtagcacttgattcctgttagtgtccattctgatttcaaaatcaatatgataattgtgtggcaagtgcacatcctttgagaagtgtccttcacctcccagaaggctgctcagcacctctgccacctttgcatttgtatgtgacgatggcagctcccgcggcagctgtgggagtgacaaggctatgtccctcagatagacagtatcatcaagttttagacaagtatccaaagtatgcagcttgtaagcattcttcatgtcatctgatgtcagcagctcactgatgatgtctttttgcagaagctgattaaaaggagcccaggggaaagtaattcatcaagcaaaatgaatatactgcatccaataagttttcagaagaaatagtgtgaagataaccagtcagagcactagccataacttccacgaactgttctttgttctggcatttgtagacatgattgagagaagagtaagtatgaagaatagatagaatgtttttcatgtttagggattcaggatcctctactattctcttcataaacaggtccattaaaccaacaggtcgaaagccaaggttttcaaataaaatgaggataaaaagaacttttctgaacttccagatgtcgaaagttgcagccacataatctgcaagtcccttgaagagatccaaattatggtactggaggtctttgcaggactgcaatatgtgatcattattcttcca

SEQ ID NO: 319842 - DNA, 770 bp, Homo Sapiens
  misc_feature (38)..(38): n is a, c, g, or t
  misc_feature (360)..(360): n is a, c, g, or t
gacgggcctagatctatacatcacatcgatgcacatcngcatagcatattttctaaagtgcttctcatagagatgcttttaggacgccacagtttcactcagtagaagtggaatttgatgtctccgctagagtgttaagtatgtgatgttctgctatgagcctcaaactctaaagatgcaaagaaagagcgcccttaggtcaaccttcatctttgatgaacctcggcagagtcatttgtaccaacagcacactccaacagcaacaacccacaaatgactttccattttaaatttcctgcactcacagattcatgtcactgaggcccagcttgctattgaagtgttttcccaacatcacangccaaaccacacagcctctccatctttgatggaggcagcaaccatctttttcaggaagtccaatgggctggttgttgtataagagtttttctccctcccaaccatattgccttaagtattcccactgtgtaaagtttgttgtacttgtgctggggcctagggtcattcactaaacaaatctatcaagatcaagaacacattaattagggcacaaaaccaggaatgtcaagcaacacacagctctcctctaggttcatgtttccatcaagctcatcatctctgcctacaagctaagtactacagccacattgttaagtaacaaagaaacacaaggtggcaaaatacatgtgagagaggtccttgcttattctaattcgcgtaagagacacaattaggaggtgcatctacct

SEQ ID NO: 319843 - DNA, 860 bp, Homo Sapiens
ggggggcagcttgccccgccgccccaccggagcgcggaatctgggcgtccccaccagtgcggggagccggaaggaggagccatagcttggagtaggtttggctttggttgaaataagaatttaacctgtatgtactgctttaactcctggaagaatgacagatgacaaagatgtgcttcgagatgtgtggtttggacgaattccaacttgtttcacgctatatcaggatgagataactgaaagggaagcagaaccatactatgcattatccaattggtttgctatttgatcttcttgcatcaagttcagctcttccttggaacatcacagtacattttaagagttttccagaaaaagaccttctgcactgtccatctaaggatgcaattgaagctcattttatgtcatgtatgaaagaagctgatgctttaaaacataaaagtcaagtaatcaatgaaatgcagaaaaaagatcacaagcaactctggatgggattgcaaaatgacagatttgaccagttttgggccatcaatcggaaactcatggaatatcctgcagaagaaaatggatttcgttatatcccctttagaatatatcagacaacgactgaaagacctttcattcagaagctgtttcgtcctgtggctgcagatggacagttgcacaccctaggagatctcctcaaagaagtttgtcctttctgctattgatcctgaagatggggaaaaaaagaatcaagtgatgattcatggaattgagccaatgttggaaacacctctgcagtggctgagtgaacatctgagctacccgggatattttcttcatattagtatcatcccacagccaacagattgaaggat

SEQ ID NO: 319844 - DNA, 837 bp, Homo Sapiens
agaaagtttctctgtcatcaggcaaagaccagggtgggaacaggaaaactagaaaactggtcaagggagaacaagtcccttttcctctcaccagtgaacagcaggtgaggaaacagactctgggaggaacgctgttcaggatggcttgctgcctgcatggcatgaggctgctgtcttgtgggtgctggcagccacaatctccatttttctgaagaccaccatttatggctagatccagtagaggtccagaactttcccaacactgctggagaggaagtgtttcacagtcagaggagagagccatggggaatggaagcaggggaagaaggggtggggaggggaggagagatgagtggctctatgctaatcttagggttccttctctgcccttttgggtaccagagacagaccctaggaaaggaattctgcagacagtcttggaagcaccttctctggcacttaaggctttttcccgaatttcagagacagaaacatacccatccttgagcaactgcagtgaggcagtgtggaattctagggtgttgatagctgtgagctaccaggcctgttggacatttgcattctggcattttaattccttgtcctaagattttgactctttgccatgttcttggaactcctggatctttctggagtctgatagcggatcaaaatctcagctccattcagcaaacacagacgcttctgggggagagctaatggtcattttttcatcatggatcaattgttcaagatcaagcacctttctgatcactcttgtccacagagaaaaaaacacattactccacagttggcttctcagatttgatgtctagt

SEQ ID NO: 319845 - DNA, 424 bp, Homo Sapiens
  misc_feature (391)..(391): n is a, c, g, or t
cattagctctcccccagaagcgtctgtgtttgctgaatggagctgagattttgatccgctatcagactccagaaagatccaggagttccaagaacatggcaaagagtcaaaatcttaggacaaggaattaaaatgccagaatgcaaatgtccaacaggcctggtagctcacagctatcaacaccctagaattccacactgcctcactgcagttgctcaaggatgggtatgtttctgtctctgaaattcgggaaaaagccttaagtgccagaggaaggtgcttccaaggactgtctggcagaattcctttcctaggggtctgtcttctgggtaccccaaagggggcagaggaggggacccttaaggtttaggccttaggaggccacttcatnttttcctcccttccccaccctttctttcccctg

SEQ ID NO: 319846 - DNA, 925 bp, Homo Sapiens
  misc_feature (394)..(403): n is a, c, g, or t
  misc_feature (407)..(419): n is a, c, g, or t
ttatactaaaagaataaagatttttattaagcattgtaagttgcattcaatagccttcagatacaccacaccacaatccatcgacagtcagtcaaacccaacagcagttcattcttgcacaatccatgagttagggcaaaactcccttcaacttacagtaagatcctacttagctcttgcgggcaggggttggggaattacacctcatttctgatcactaatgtgatgaagagcatcagaagtatatgaaaacgataagaagtgattctgatttcaaagtacattgtttggaaacattaacaaaaacatcaaaatgatagaagtatacctgcttctactaaattcttgatgggaaagttctcaagaacaagcaatttgtttcctgctacagaannnnnnnnnntggnnnnnnnnnnnnnaagatcaaagggttttttttcacagaatttcatatttgctaatatgaaggcataaaacagcaacaaagaacaataatgcatacagcagtgaatacaccagggtaatgttgatattcgaaacggctagataatttttggggggctttagaataaatgcaacagaggtcaataatcacaaaattttaaggttagagcaagatcagtcaatgactaaacagagttaacatcttttataggactattactgattattagcatttttgttttgcaaatgggcacatactgttaagaatggaagaaaggacgataacatgcatattaactacacactttaaaaattatgaaccatgcagaagtttagctcaagtagtagtactaatggtctacatccgattcaaaaccacatagttcattgatcacagatgcatggtattagtcacgaaagtttcagaacacattgtgttgattttgaaaggtcatttgcatcttctatgatttcaacttta

SEQ ID NO: 319847 - DNA, 804 bp, Homo Sapiens
  misc_feature (235)..(235): n is a, c, g, or t
  misc_feature (237)..(237): n is a, c, g, or t
  misc_feature (239)..(239): n is a, c, g, or t
  misc_feature (241)..(242): n is a, c, g, or t
  misc_feature (244)..(244): n is a, c, g, or t
  misc_feature (246)..(249): n is a, c, g, or t
cacttaaatgaggctgtttttgacgttctctgccaaggatttagagctttcgttgaactaacataaaaggagtgcgagtcttagtagagatgttccgtgtgtgccgcccgtgctctgaactgcgtttccacctgctgtggtgcttgtgcagcctggcagttcattgtcatctttaataaactaaggaaataaaattctgtctttcgtcagcctgccttgactgtcaagaaatggnangngnncnannnnaaagcaggtatatctgaacattgagaaggtttctgtgttataatgtaaagcaaactggaccacacacatcaaggaaagtgaggtggagtggctgtgtctctaacttgccatgagacctcgagcggaaccacttcacttctctggggtttctgggtgcaatggtgtaactgtcactttaaaatggaggtgtcttcctctccggaacatctgacttgccttagatgcttcagttcccacttctgtgagcagctagcatctttctcttctgctcctggcccactggagctccagctttacgctgcaactctctcaacatttccccttaaatgtccccttgtcatctccaaccagtgtgtctaaaaccagcataaattccgtatttccaaaaacctaaccattagtcacccaggtttgaaaattaattgtcttcaacttcctctgtaagtggcacactgagctcatcacgcatcgtctcattcctactccctgtcatcaagttctgtggatgttttcctctaaaataaatctctcattacttttctgccactagcacac

SEQ ID NO: 319848 - DNA, 335 bp, Homo Sapiens
cccggaatagattttaacaagacctaattccatgggattatggtgggtaatttatcatgagaattaaatataaaaatgtggaggctttgagctgccgacagaggtaaggactaccgtgacgggaatagtcgatggggtaacaggcagccaatcacattaccattcctttgtgacaaagggttaatactttaacctagattaattatacattcattatggtgttttaaaacagtcaagcctaaataaatttttcataccatcaaaaagatatacatactaaaaacctgcttcagcacaaagtttttcatttgacagctcttggcctgggccataca

SEQ ID NO: 319849 - DNA, 872 bp, Homo Sapiens
  misc_feature (18)..(18): n is a, c, g, or t
  misc_feature (26)..(26): n is a, c, g, or t
  misc_feature (38)..(38): n is a, c, g, or t
  misc_feature (51)..(51): n is a, c, g, or t
  misc_feature (72)..(72): n is a, c, g, or t
  misc_feature (94)..(94): n is a, c, g, or t
  misc_feature (101)..(101): n is a, c, g, or t
  misc_feature (122)..(122): n is a, c, g, or t
caaaaaatgcccccaaancctaaacngaaaaataacangtattgaaacctntttaaatatcaaaaacaaaanacttaattttgcctaactttgnaacagtnattcccacatggacaagcagnatcgcgaatgcctcagtggctggatactgtaatattgcacttgggacattcccacccaggctttcattgagtgcagcagtgggactttttggtgaggcggcaactttttctctgttttcagtctctccttggaaagtgactaatggctctgtgatggcaaactcatgaagctgtttcaaggattccaactgtgttatttgatttcttgcttttcggagctccttaagaattacaagcaattgatgctgcacatgttgacggtcgagtttttcattttcaaagtctaaagtacatgcctgcaatctgttgttccaacagagctacccttgtttgttcttcttgctgctttagcagagatgtgtaaagaaactggacctgagataagagctcttcggatctcttcttctcttcttcaagttttcccctagcaatatcattctcttccctgagtttttgtatcttctctgttttatgcctatcatcttccagatgttgcacatctgcccttctttgtgaatacaacagctgatttaaattgtgaacttctttttgggtttcttcatattttcttcgaaattcactcagttcaaaactcagctgagttatggtttgtcgttcaacctcaagatctttttttgcacttgccaagagatcgttgtaacatttctgcttctcttcttgaagataaccttctgattcaggcttttttgtctgctgtgggagtgaatgagcagctgtttccgttttctt

SEQ ID NO: 319850 - DNA, 2110 bp, Homo Sapiens
  misc_feature (484)..(484): n is a, c, g, or t
aaacgaagcaggggaaacaaaaggctgcagaagcctttccatgtaacagaggttgagtcaaaaaagacaagatacatggatgcaggaatgtgtacaggtagaaaaagtacgcactcaccaagcgagcgcagcatttaattgaagtgaaaagtaaagaaacgctttgtagccgctcggatttccttaggggacggcaagtcaatgcttatcagcggtcctcagaagagacaattttgattaatatcagacccatctgactcagtctattaaaccctgaaggaaggatactcttcagatatagaagatatgcctttgattaatcattctaccctattgccattccaagcattaccaactatgtagcacctctagaaagagagagccttcgaattctaggaagacacacttactaaaatccccaggtgctcatgaccgcttctcagctcgccccgctgagaagaacccaagttgtgagcggggatgnggggggggtggtcaccactggagaagcaaaaacctagttacataatttacttcatggtctgcagttagggtcagtgacttacgacataattcctgcttgatgataatgaaattgacagaagcctgaaggcagagggagtgactggtcttgcgctagccactggctgactccgtaggcctgacacagtctacaccacaaccacctgagcgtattttcctttgcctaccgatgggttctgagatgcgcacgagggaggaaattgcttagtccaccatcaagagcctctgcactgtgtagctaacatgggatcgtcacacggaggtgggaggaaatcgattccattctgcctatttgcaaacttctgcccgattggcactgctcctctcacatcaatgcacttctcctgatgctcatgaccagccttcggccatactctctgtagtccacgggcttcacgtccatcacagtggccttaattcgagactcgtcgttgtaggtctccactttgaccctgactctgaatatgaaagatcggaagttggcattctggaaaacttcttcaaatgcctgttcattccttgtcttttaattccccaagataagcagcattttgtccaaggatagcttcagcggactcctggaaacaagtcacccactgattctcttgaaaatctgcaatatttactgacaggatcatgcggtacttgaaattgggaaattcggtgtcgcacttctcacagcggtacaatccattctgttgatcaatcactttcttattgcagtcctgagtcgggcaggcttggtacatgcagttctctttgcgaagatacaccactgtggccacagaactaaagtagtccggcttgtcgccttggcccaggttctcggatttgacctcatacaaggttttccagttggtgttactccctccgactccgccgctctttagatcagagatggaaacaccatctaaggcttgtccttctgcgtcaaaccatccacgaagcttataggcctctgggatgtcaggattcgcaatgatagtgcttgaagacagcacggagaggctccgtccaccgaaatcagagactcgggctcctttgatagccaacacgggctgtctagaaccatcaaatttatcagcatcttccccccacagtgtagcagtcaccaccttcccggatgtgtccatcaagtagatattcctcttggcaacttctctgttgttagacctcactgtgattttagtggcgtcttcatagctcttgcagatcccgatgatgtctacaagtgagtctttcgacttgttctcgaggtcatcaatccccgtgaaatcaaactgaaccgtaggtaaatgatggtcgtcctcacagggcatgacggaagtctcgttattgaaggtcatctcgtagtcatttttaacagctgtgaactgcttgttagcaatcttcagggtgcctttcgagaaataatacaccttgttcacttcaataagaggaaagaacttgtccacttgctcattgaaagctgtagctcggatttcaccactttcgtcaaccagttctagggagaaaagcttcccttcccctcgggagttgctccaggtacggatctgacttttgttgg

SEQ ID NO: 319851 - DNA, 488 bp, Homo Sapiens
  misc_feature (16)..(16): n is a, c, g, or t
  misc_feature (41)..(41): n is a, c, g, or t
  misc_feature (46)..(46): n is a, c, g, or t
  misc_feature (55)..(55): n is a, c, g, or t
  misc_feature (162)..(162): n is a, c, g, or t
tcctggcaatggtgtnagcctaaacagggggaacgtccaanacggnagggtgggnagggaaaaacggaatcccaatcctgcccctatttggcaaaaacttcctgccccggaattgggcaactggctccctcctcaacatccaaatgccacttcctccctganggctcaatgaacccccgtcggcccatactcctctgtagtcccacgggcttcacgtcccatcacagtggccttaattcgagactcgtcgttgtaggtctccactttgaccctgactctgaatatgaaagatcggaagttggcattctggaaaacttcttcaaatgcctgttcattcttgtcttttaattccccaagataagcagcattttgtccaaggatagcttcagcagactcctggaaacaagtcacccactgattctcttgaaaatctgcaatatttactgacaggatcatgcggtacttgaaattgggaaattcggtgtcgc

SEQ ID NO: 319852 - DNA, 510 bp, Homo Sapiens
tttcacctttccctcacggtaatagttcactatcggtgtctgattagtatttagctttaccgggtggtcccggcagattcagacagggtttcacgtgccccgccttactcaggatacatctatgagattttatgatttcgtatacaggaatatcaccttctatgttgaagctttccaacttcttctactatcataaaattttgtaactcaatgtaagatgtcctacaacccctttttacaggtttgggctctttcgctttcgctcgccactactgacgaaatcattatttattttcttttcctgttgctactaagatgtttcaattcgcaacgtgtctcgctaatttgactatggattcatcaaaatgcaactgaggtttgctcagttaggttaccccattcggaaatctccgtatcatagtttatttccaactccacgaagcttatcgcaggtaatcgcgtccttcatggactttcagacccaaggcatccaccaaatactcttactta

SEQ ID NO: 319853 - DNA, 634 bp, Homo Sapiens
ggaacttacccaaaatggcttttctgcactctgccctttggtattgtcccatgtgaattgtttaaaacttatgtgtatagtggcatgagtaggtgatttccagaaccagaactcacttttgttgtttggtcttaaaattagggaccttttcttcatctgggcttcatttccctgcaccttcccagctttctagtcatgccaagcccacatgtctcccacgtgaggggttcattggaaagcagccacagagccaccccctggctgggttcttccccagctctgcttcctccttccccaagtcctgcagctgctctctccatggcagaaccacttctccccttactggaggggaggtccactgaacaaatccaggagaggaatcattgtgttttccacagaagagaaagtacactggactttctgtgcaacctgttactacattttcacagagactcatatttgtgcagtgtaactcagttgaaacccagcaaaattaggctcccgtgtctccataaaggccaccatgatggtaacggttgtacttcaccttgcgtttggacagaagctgattgattttaaccatcatcacaccgtgtctaacattctctttcactgtgctttgatcctctgttag

SEQ ID NO: 319854 - DNA, 757 bp, Homo Sapiens
  misc_feature (725)..(725): n is a, c, g, or t
attagctttggaaaccgttccttcctttttatgtggaggaagtaaggtttcacaagacacctaagctggacatggtgatgtgccacttggatagttcccaaagcagaaagcagccaggacatcccagtaccccacttctccgtgccgtgtacttttagggaggttttcgaaagctagcttcttaccgatgattttgtctatttttctgttttatgtgaaaaccttcatttataacctgctcttctcagtgttcttctattcagcattcagtatgacttctatgcctctaattgcgactgtatggagaagaactgtttgtcattcagtgccgtgggatataatcagtcctgtaaattcatcagaatgttctgttgcctgattttttttccattgcattttaatttcattaaacatattttagttctacagtaacctaattcctcattgttaccatgagatcctaattctgtagctgtgttctgtaatcccatggggcgtgtaccatttggagacacatgaaggatacagtagacagcacggaaggcagcagcaacacacaggggtgtcctccctccccagagcccagtgtgcacacagaaccaaattcaatctcattcatcgtgagcttgcatggtaactgatccagccactcagtacctccattggataagagatttggccacagattcttctagagaaaatccaaatgtggagggtgcatttgnttctgcacccaaacaaataccttttgagattt

SEQ ID NO: 319855 - DNA, 566 bp, Homo Sapiens
agtgctgtcttccggttctccttgactagaagcagtagtggtgtttccagtagcagctgacagagggttattcaacagcccgctcaagccaaacacgttgggcaggcccgccattcctggcagcatcaggggcagcacagcagcagggttcttcgcatcgcctccggcggtggcagctgttgccagtcctggagggaagcccatgaggcctgccagctggagcgactggagattctggagattctgaaggctcgtcaggtccattccagcaaacaggctgttcaccagcaaagggttgatccctgacgtggaggccacagcagcggcggccgcggctgctctggcgatctcacttttgggccttcttcctcttctgctcgctccctctccccgcactacaggcccagtgagaaggcggtcaaacatcgactcaggaacaaaaccagactgcttaactatatcagtccagtctggagcaactgcaaattcaggattttcttccagccacctgggtagatccttcattggaggcgccatagctccacccatctgggtagaggcatttg

SEQ ID NO: 319856 - DNA, 890 bp, Homo Sapiens
  misc_feature (115)..(123): n is a, c, g, or t
ttatatctcacttttagagaagtgcagtcccaggcagaccatgcttctcaatatattaaaaatattaaataaaccccaaccagtttcatacttttctaatagtcaagctggctgnnnnnnnnnggactggagaaagaacaggcagttgtaaaatggggatcagtcttcacaaacacactacttaaaaatcttgctatttccttatccctttgacagcatctctacaatctcacctttaaagctggaaataacacattgctaacttagagacaacatcgggtgcaacatgcatatgtcaactgcccactcaaccaactgcaaccctgaggatttttctggcccagtagaaagaggaaacacgaagataatctctgctgtagagctgcttctccagtttacgacttcatgtgttttcaggatgtttcttggacatgcatgtgtgacagtcacttcatggttctacttcccataagcagatctctcctccattctgtctgtcatcacaagaaagccactgtcatccgtccaaaggttttccaaggtaaaccaaagtcacttctgtgttgccatatacagcagaaactgctgggtataagcagacctttggaagtcctctaaaagcaacccccaggaactcatatccacgttcaaaagctaaagggtgtgttccatgtcccccacgactcgaattctttctcctatctgatattttggtgagtagttaaactgtggaaaactgccattgacttctccattatgtagtagattattgtccaccagattccagccccagctctggtcatcactgcccagcaatgccacataaccttggcactgcatgggggcccgttttgtggcaattccaatcactgccacagtgcccagagggc

SEQ ID NO: 319857 - DNA, 1341 bp, Homo Sapiens
gaggtggactcccgaaaaattgaccaggaagggaaaatcccagatgaaactttggagaaattgaagagcctagggctttttgggctgcaagtcccagaagaatatggtggcctgggcttctccaacaccatgtactcacgactaggggagatcatcagcatggatgggtccatcactgtgaccctggcagcgcaccaggctattggcctcaaggggatcatcttggctggcactgaggagcagaaagccaaatacttgcctaaactggcgtccggggagcacattgcagccttctgcctcacggagccagccagtgggagcgatgcagcctcaatccggagcagagccacactaagtgaagacaagaagcactacatcctcaatggctccaaggtctggattactaatggaggactggccaatatttttactgtgtttgcaaagactgaggtcgttgattctgatggatcagtgaaagacaaaatcacagcattcatagtagaaagagactttggtggagtcactaatgggaaacccgaagataaacttaggcattcggggctccaacacttgtgaagtccattttgaaaacaccaagatacctgtggaaaacatccttggagaggtcggagatgggtttaaggtggccatgaacatcctcaacagcggccggttcagccatgggcagcgtcgtggctgggctggtcaagagattgattgaaatgactgctgaagtacgcctgcacaaggaaacagtttaacaagaggctcagtgaatttggattgattcaggagaaatttgcactgatggctcagaaggcttacgtcatggagagtatgacctacctcacagcagggatgctggaccaacctggctttcccgactgctccatcgaggcagccatggttattgtgttcagctccgaggccgcctggcagtgtgtgagtgaggcgctgcagatcctcgggggcttgggctacacaagggactatccgtacgagcgcatactgcgtgacacccgcatcctcctcatcttcgagggaaccaatgagattctccggatgtacatcgccctgacgggtctgcagcatgccggccgcatcctgactaccaggatccatgagcttaaacaggccaaagtgagcacagtcatggataccgttggccggaggcttcgggactccctgggccgaactgtggacctggggctgacaggcaaccatggagttgtgcaccccagtcttgcggacagtgccaacaagttttgagggagacacctactggcttcggccgggacccgtgggagacactggctggctcccgctttgggcagaaccatc

SEQ ID NO: 319858 - DNA, 1105 bp, Homo Sapiens
  misc_feature (502)..(503): n is a, c, g, or t
ccaagaggcgagtttattgggggaggggctggtcaagtcatcagtgcaacactgcatccccgctcagggcaggtcagtccagtgtgtgggccgcgggggtcacaggcatagcagcaggagggggagtgagctacccccacgggcccacccccagcccagtccaggggtgggagggagggggtgaccctgttcgaggtcctcaggcatctgtggctgagccgggcgctcctggggcagacagcgtcgttgccggagaatcgacttctcctcctccatctcggaggcagtgctggggcttgcgccctcgggggaccccccttcatccctcgagcagtcgggtccggcgtcctcctcatactctgtcagacaatctgactcctctccgtcagcacagccatcagagacatagctcgtggggggctcaatccgggacacaatctctgccaagtcagtgaagccagagcttgggaaggcaagcacgtctgcacggcggctctcattnnaaggtctgtagaccgccggtctgtgagcattttctcaatgacgttgccacggctccagcctccaaacaccgccttcccgtactggtagcccacatcatagatctggtcgaacttcccaaagtccatggtcttgaagcagtcgatgggcgggcgcaggtactcgcagtaggagctggacttgacaacctctagctgccgcacacaggacacgtaggccaggcgggactggatttcagccatgtctggaacctttaccttgtcagcccagggattcagccgcttccacagcagccaccagccggacaggctgtccccgtaggtgctgaggtccgtctcatcctggctccccacgtcaatggcgatgaccgttttggcacccatgctgcgggcgatgtccgctggcagattgttgatgtagccgccatccatgagtaggtgcccgtccttggggtcgcacagcgggggcaggtagcccgacagcgtcatgctggcgcgcacgtaccgccacagggagccatctttgtggactcgcatggctgaggcggtgatatctgtggtcacgttgaagtaaggcagccacaggtcctcaatctgcttatcct

SEQ ID NO: 319859 - DNA, 818 bp, Homo Sapiens
cttcgtataaattatagctttattttttaaaaagattttataagtctgtcacaacctcaaacacatataggtgaattatttattcctctcttccatcagatgaggcttatcgtgtcaaatcctctgaaaaatataagtaaaaattatttttcacaaatatatatcccctatattactcaacttagttctgaaattttctccttataaatactttaacacagctgctagtggaaggactgtgttgtgcagctgcacatagctataattttataagtctgctttacttttgctagctccctggttcagctccaaggtccaaatcttataaatggttaactgggctgccagaaaagcccactgaatgcatcctgtagtgctctgtgacaagcaagagaagaagtatagcctccagcaaggtcctgtggtgaggcagctctgacatggtttaaatacccaagtcttcctagcatctcaagctcaggaacatgtggtccatatgtctctatctgcagtggctggtattcatacagagcttcttcaagcttgtgaataggtgccagtgaaatatgttgacccattttgatgcctgtggaaaacgtcactggttttacaggtttgggtttctcaagttgcatttctaattgggtagatctatctttatgctgagccaaaagcagagcaacagggagatcagaactctccagctcatctaaaaaagcctgcttattcttcctttttagaatctgctgcagttgttcttctttttgtataaataatcttctttgttcattttcctgtcgttccacttctaaagcttc

SEQ ID NO: 319860 - DNA, 829 bp, Homo Sapiens
  misc_feature (62)..(62): n is a, c, g, or t
  misc_feature (68)..(68): n is a, c, g, or t
  misc_feature (75)..(75): n is a, c, g, or t
  misc_feature (110)..(110): n is a, c, g, or t
  misc_feature (121)..(121): n is a, c, g, or t
  misc_feature (291)..(291): n is a, c, g, or t
ccatttttgatggccctgtggaaaaacgttccactgggtttttaccgggttggggtttctcnaagttngcatttnttaattgggtagatctatctttatgctgagccaanaagcagagcanccagggagatccagaactcttccagctcatctaaaaaaagcctgcttattcttcctttttagaatctgctgcagttgttcttctttttgtataaataatcttctttgttcattttcctgtcgttccacttctaaagcttcttccagttcttcctgttctcgagtcagctntaatttatttttctgaataacatctttgttttccttttgggtatatcttcattttcctttttggtgttgtccaaatcccacattgttggtcaaagttgaaaacaatttcttccacttcttccaagaaatcattgtattctcttagactaggaaaatcttcttcccttttattgtatatctttagcacttttttcctgatctcaacctccttgtcaacagtgggatcttcaaagagttgtaccctgaagttgctctttctgagtggagtaccacactcagggcagtttccagctcctctcacaaacagtaaatctacacaactttcacagagagtgtgtccgcacacattcaccatcagcttcaaggaggggttccgatatttggtggtcttacaccgagggcaaccctgatcgtccatggcggtttccctcctacagactctcgcaggcgcctgtttcagccagagccacctacaagccccctcagacgcgaccaagcaggttcctaccaacaggcgcttggcagagacggtcccccc

SEQ ID NO: 319861 - DNA, 436 bp, Homo Sapiens
  misc_feature (293)..(293): n is a, c, g, or t
gtgagagctatcgtaactggcctgcagtcccaaattcttaccgacatgactactttagttctgtttgattttggccaaattatgctcccatgctgtttcttactcatttagatacttccatttctaatatttacctcccagcacttctccattaccgatggggtcacctcctgataaacccgtaatttgcacattacaatggggtttaccaggggagtagccccatcataaggtagaggtgcattctgaatgtatactgcttttccaccaaaaatcccacatcaaaccaccanaaagtcggggactgtctgtattttaaatgctaaattttggaacgctgtatggttgcaaaatagacttaggtgtcctggtatgcaatttttcattataacactatcacataccaggagagttcaatgagatagtggaaataagt

SEQ ID NO: 319862 - DNA, 954 bp, Homo Sapiens
  misc_feature (67)..(125): n is a, c, g, or t
cctaccccttcccttgcctttctttcccactttccgtcccaattccatttccttctccctttgttcnnnnnnnnnnnnnnnnnnnnnnnnnnnnnnnnnnnnnnnnnnnnnnnnnnnnnnnnnnntcctccattctctttacccatctacctatggtgcccctcccaagcccctctgttatttctcccctgctcactccttctgccgttgtctccttcagtttcagcttccggggtggggaggcaagaaagggtcctcagcccagggagcacttgttggtgttcttcttgtcacaagttttcaggtcagtactgggaggcttgttgccgtttcctgatctccggcctcctgacttgagcaagatgtcccgggccagggaactaaaagcttcatccacattcatactggatttagcactagtttcgaaaaatcggattccatgctctcgagccaacttatcggcctgctccttctgcaccttcctcttggcctccatgtcacatttgttccccagcaagaggcgctccaccccagccgaggcattctccttgatgcttttcatccagttctgaatattctcgaaagatttctcatccgtgatgtcgtatactaggataatgcccatggctccacggtagtaggcagtagttattgtcttgaaccgctcttggccagccgtgtcccagacttgtagtttgatcttcttcccctctatatccacagtgcggatcttgaaatcaattccgatggtggagatgtaagtgttgttgaagttgtcctctgcaaagcgaatgatcagacaagtcttgcccacccccgagtccccgatcagcagcaacttgaagaggtggtcgtaggctttggccatggcggacaccgggggagccgggggaggggtggggagcgcccggcactggtaggcgggactggacggtcggcaaacagagcggcacg

SEQ ID NO: 319863 - DNA, 843 bp, Homo Sapiens
  misc_feature (103)..(103): n is a, c, g, or t
  misc_feature (188)..(331): n is a, c, g, or t
gcaaatggtggcctttaataccaagaaagaccatgacaagtgacagaacaggagcaaattccctagtgtagtgccgagctagccttttgcaggacccctaaanaccttgatctagtaacagaataaatcagtgtatttccatttatgtttgccctgaaaacccaggtaaggtctgaagcctgaggcannnnnnnnnnnnnnnnnnnnnnnnnnnnnnnnnnnnnnnnnnnnnnnnnnnnnnnnnnnnnnnnnnnnnnnnnnnnnnnnnnnnnnnnnnnnnnnnnnnnnnnnnnnnnnnnnnnnnnnnnnnnnnnnnnnnnnnnnnnnnnnnttaccatctacctatgtgaccctccaagcccctctgctatttctcccctgctcactccctctgccgttgtctccctcaggttcagcttccggggtggggaggcaagaaagggtcctcagcccagggagcacttgttggtgttcttcttgtcacaagttttcaggtcagtactgggaggcttgttgccgtttcctgatctccggcctcctgacttgagcaagatgtcccgggccagggaactaaaagcctcatccacattcatactggatttagcactagtttcgaaaaatcggattccatgctctcgagccaacttatcggcctgctccttctgcaccttcctcttggcctccatgtcacatttgttccccagcaagaggcgctccaccccagccgaggcattctccttgatgcttttcatccagttctgaatattctcgaaagatttctcatccgtgatgtcgtatactaggataatgcccatggctccctcgtgccgaattcgccaccca

SEQ ID NO: 319864 - DNA, 556 bp, Homo Sapiens
  misc_feature (31)..(31): n is a, c, g, or t
  misc_feature (47)..(47): n is a, c, g, or t
  misc_feature (52)..(52): n is a, c, g, or t
  misc_feature (97)..(97): n is a, c, g, or t
  misc_feature (488)..(497): n is a, c, g, or t
ttgggaaacaacagcctgaaaatatcccccnaaggtgatgtggaaancaagnagcaaatgacttgccagatacactggacaactcagtgtacttacncccctcgccaggtctcatcaaaatccccaaaagtccttaggagtaacacagattgtactggcattaagtgacaaaatgtgcagcctgtatttgactgaggaggaaaggaaatggcaccctaggcagcagcgctagggtcagcaaggagaccggcctagggtctcagtaaagcagaactgtttcaaatgggactagaccggggcatgtgcttccggtgaatcctcttgaaacctaaagtaaatgggaaggccgccctaacagttgtactgacataaagggagacccttcttaatattctggcagctgacttccttcactgaacaactattatcaaaaggcgagaggcataaagtgcacactgtagaataagaagagactgaattatgatggnnnnnnnnnntcgtaacttccccaaagaggtgtggacagtgtacctagcctcacaaaggtccttaatac

SEQ ID NO: 319865 - DNA, 974 bp, Homo Sapiens
  misc_feature (46)..(46): n is a, c, g, or t
  misc_feature (76)..(76): n is a, c, g, or t
  misc_feature (79)..(80): n is a, c, g, or t
  misc_feature (97)..(97): n is a, c, g, or t
  misc_feature (105)..(105): n is a, c, g, or t
  misc_feature (112)..(112): n is a, c, g, or t
  misc_feature (140)..(140): n is a, c, g, or t
  misc_feature (143)..(144): n is a, c, g, or t
  misc_feature (147)..(147): n is a, c, g, or t
  misc_feature (151)..(151): n is a, c, g, or t
  misc_feature (155)..(155): n is a, c, g, or t
tttcggacagtgtttcccggcatccctggtccacttggtacttggncgtgggcctctggtgctgctccagcagctnctnncaggtggtcggccccgnttcaccgncagctcnatgttgtgtccgagggctgctcagggcntcnntcnttcntcangagggctgtcttcaccctcccggtgcacctcctccagctccagctgctggcggggcctgcagcgtggccagctcggccttggcctgccgcgtctcctcctcagaggctgccagccggtcctcgaactcctggcggatcacctgggccaggttgctgcgctcgctagaaagctgctcgttcactgcctgcgcatcctccagcgcccgctccttctgccgcacaaggccctgcagacgcagattctcgccctcggcctccccaagctggcccttcagctccgagcaccgctcctgaagcttccgctccgactgctccagctcggagagctcggcctcgtacttgtcccgtaagcgcttgatgcggctctcggcagccttctcactctcctccttggccagcgccatgtcggcctccagccggtgaatgaccagctcaatctccttgtcccggcctttccggatttcttccctcagctcctgttcccggttcagcagccacgcctcctccttcctggtgcggccggcctcccacgcctgcctctccagctccagctgctgcttcagggtattcagctccatctggtgccggcgctcctgctcctccctgcccttctcaaactcagccctcagggctcgggtcagtgcagagctgttctcctccagctgctgcctcagctcttccagctctgcccgctgcctggctgcctgctggcccagccgctccctctcctcagccacctcactgtacagccgctgccgttgctgctgcagcgcccactgctcctgctcccaggtgctgctggaaccgctgccgagcacg

SEQ ID NO: 319866 - DNA, 561 bp, Homo Sapiens
gcaccttgtataaaggaattcctttcatttttatttgataagccaaaaatgcaaatctgatttaaattcaagacaaagttttaaaaatcattctcaacactacagaaaaaaagccagtaactatacaaatactcactataaagcgatgaagtccatagtacaatagtatatctgctaatgtaaagttataccctgtaaggtagactttatcttcaagatatgaattaagatccttcaacagtgtgtggatgtcatttttactggagtgcccatctacttgagtgaccctgtattctaaccactgctgaacgattgctttttcttctgcagtactccccagcaaatattctttgttggcttgcttgactagatgagctgctatagtagtcaatcctgttagacttggaccattgtttgtctgaagaactggaatctgtcgctcgccctgagcactgtatttattccccttactcagtcccagggacttctccagtagcgacaactctgcggccgccgccatcttccggccgtagctcctggcagacgcgagacctgcagccc

SEQ ID NO: 319867 - DNA, 871 bp, Homo Sapiens
tagattaagcccgatttgcaacttttattgaaataaatgtcatctactaaaaacaaggttaatttataactggatctcaacttgtttaatagcaaattgaattttgacataaaaattgccaaaacttcaggtaaagaacaaataaaacattcagacacaagtttacacttcaaaaattctatcaacttcaacaaataatgaatgactgtatattaatttacattagtcctgtggtctagagtacattttccatttaaaacatttttaatagatcttctgtatggcatggacagcttctagtgggaattagtatatagtctgttcttgatgaagacaacactagacagatgttgcctgatgcctggataatgctgaatgtgacaaaaccagcgagacacattaagatatttctccttttcttgaactgtcaggtcaactataaagcgatgaagtccatagtacaatagtatatctgctaatgtaaagttataccctgtaaggtagactttatcttcaagatatgaattaagatccttcaacagtgtgtggatgtcatttttactggagtgcccatctacttgagtgaccctgtattctaaccactgctgaacgattgctttttcttctgcagtactccccagcaaatattctttgttggcttgcttgactagatgagctgctatagtagtcaatcctgttagacttggaccattgtttgtctgaagaactggaatctgtcgctcgccctgagcactgtatttattccccttactcagtcccagggacttctccagtagcgacaactctgcggccgccgccatcttccggccgtagctcctggcagacgcgagacctgcagaacaagaacccc

SEQ ID NO: 319868 - DNA, 742 bp, Homo Sapiens
tttttttgaacgatttctaaactttatggaaaaagccaatgacaatcaattagccaaaaacgagacgccaaatcccatctcactccagcgccatgccctcttctcaaacgctcgccggctctaggacctctccaccagcacagttctcaggagtcctgctggtctcccagtgctgttctaagggtccacatgaaggcaggtcaggcgggactccccgggcaagcacttctgtacgcggaaagcacgaggcgcaggagccatggagagccggtcctttggagacaggaatacttaagaggattggcaaaccggagaaacgctgggagaggtgccccgcactgcggtggtaaggcagagtctcagttctcctcgggcttgtcggctggcggtccacaaggctgaagcatcttttccatcaagttgaagcggactcgcgctttgctctcattctccgcaatggcgaagtagttgagaaggtcgaagtggcccatgtaggagcagtacgagtcgcggtgttggttcaccagccactcccacttggtggtgtcggcgtggcccgtgccgatgtacttggactgcaggtgctccagctggctatggatggtgtagcggtcagtcatctcgccgctttccccttcgctctcaggtcagaggacgcaggtaacaactcgccgctctagcgttttacaggagagtgaagccaccgcgcggaagctccaggtccgcgccgtcgcagaagccc

SEQ ID NO: 319869 - DNA, 576 bp, Homo Sapiens
  misc_feature (493)..(493): n is a, c, g, or t
  misc_feature (503)..(503): n is a, c, g, or t
  misc_feature (541)..(541): n is a, c, g, or t
gctagagcgacgagttgttacctgcgtcctctgacctgagagcgaaggggaaagcggcgagatgactgaccgctacaccatccatagccagctggagcacctgcagtccaagtacatcggcacgggccacgcgacaccaccaagtgggagtggctggtgaaccaacaccgcgactcgtactgctcctacatgggccacttcgaccttctcaactacttcgccattgcggagaatgagagcaaagcgcgagtccgctttcaacttgatgggaaaagatgcttcagccttgtggaccgccagccgacaagcccgaggagaactgagactctgccttaccaccgcagtggggggcaccttttcccagcgttttttccggttttgccaatcctctttaagtatttcctgttttccaaagggacccgggttttccattgggttcctggcggcttcgttgctttttccgcgttacagaaagttgctttgccccgggggnagttcccggncttgaacttggcctttcaatgttgggaacctttaggancaggaatttggggaggaccaggaagggatttcttg

SEQ ID NO: 319870 - DNA, 1037 bp, Homo Sapiens
  misc_feature (121)..(460): n is a, c, g, or t
gggcactcaggagtagatactcagtgcctttgctgacatgtctgtgttctacaaacaccttctctccattatttttctgtttttaagttcccttagagcctacagtgcagtagtgtagatnnnnnnnnnnnnnnnnnnnnnnnnnnnnnnnnnnnnnnnnnnnnnnnnnnnnnnnnnnnnnnnnnnnnnnnnnnnnnnnnnnnnnnnnnnnnnnnnnnnnnnnnnnnnnnnnnnnnnnnnnnnnnnnnnnnnnnnnnnnnnnnnnnnnnnnnnnnnnnnnnnnnnnnnnnnnnnnnnnnnnnnnnnnnnnnnnnnnnnnnnnnnnnnnnnnnnnnnnnnnnnnnnnnnnnnnnnnnnnnnnnnnnnnnnnnnnnnnnnnnnnnnnnnnnnnnnnnnnnnnnnnnnnnnnnnnnnnnnnnnnnnnnnnnnnnnnnnnnnnnnnnnnnnnnnnnnnnnnnnngtatagataacagaccattagcattttctcctttatatgaaacatttattatttgatttatttgtgtctattttgctctgtggcttggacccagaaacacttgtataataggtgaaatgaacaaagaatgagctgccagaacatctgagagctgtaaagtttaaattatttgggacccaaagaagcctagttctgaccgttgtttcagttcacacaaaattttgtctgaaaagccaacttttttctttcccttttaaattatgctgaacatttagggccagtatgtgtaactgacatgctgggacagttgtactcacttttgctggcctgtaggactgtgacatagggagaacactaagtgtgtcctccgggcctcgggtctcagtcctggagctatctacagtatgttaccagcgagtaagaataatagcttctacttgcttttccctacagagttcaggagttttaaaacgtcatcttagtctcattatgaccttcacatgggctatgacaataatttcctgtagtcagcagatgtctgaaggaagatattttttaactgaatcttgacaccaaa

SEQ ID NO: 319871 - DNA, 552 bp, Homo Sapiens
  misc_feature (350)..(482): n is a, c, g, or t
cagcaatggtggtattgatgcttttaagttcagtttaatcagtagtacaatgttatgtatttgccactgaaaccatttagaaccatgcataatcagacagtttagcatgagggtttccatctaggatatggaaattactttagattgctaattttgagttggaaggcgtgagaatttgaataattttgtaaatagtattggaatatttaagataactgagattcacgattttgtacctttaatttatttgatatgcgttagtaagtcttgctttggtttttggcttttggttggagtgctgtggtcagcagaatgccacccttccccaacaaaagaggttcattccttannnnnnnnnnnnnnnnnnnnnnnnnnnnnnnnnnnnnnnnnnnnnnnnnnnnnnnnnnnnnnnnnnnnnnnnnnnnnnnnnnnnnnnnnnnnnnnnnnnnnnnnnnnnnnnnnnnnnnnnnnnnnnnnnnnnnggacaacctttcctgtctgcagggaaccagagaaatggttcgtgacacagactgaacctgctagctctga

SEQ ID NO: 319872 - DNA, 573 bp, Homo Sapiens
acgcatttcaaatgtcaaccaggaaggcacaccactgtattagttttatactgccgctgtaaaatttaccacaaacttagtgacttaacacaaatttattgcaattctgtaggctggaagtctgactatgggtctcactggactagaatcaaggctggcaggctgccttccttcctggaggttctaggggagactctgtctcctgctccttcaggctgctggcagaatccacatcctttcggtggcagggcaaggtccccactttcttgctgactgtaaactaaggccacttccagcttgtagaggctgcctacattccttggctcttggccccctcctccatcttcagagctagcaggttcagtctgtgtcacgaaccatttctctggttccctgcagacaggaaaggttgtccctaaggacttcatgagattaggttggggcccagccagatgaattacatggattaatcttccctcctcaaggttttttaatatttaaacacatctggcagggacacatttttgccatgttaaacttaacattcactggtttccggggatttaagggatg

SEQ ID NO: 319873 - DNA, 702 bp, Homo Sapiens
  misc_feature (527)..(574): n is a, c, g, or t
cccagtcacgtttccttttagtaccagtcctcaagccatccaacttgtctagctttgcctcagatgtgtccatctcccatttgcttttcggaatgtaacccagttcgctttcctcttcctctgcatctttcttttcttctttctgttcttcgatatttgcatcaaaatcttccatctctacctcttcaatagcagcatcttgcagcaaagaacgaatatctagacgcatcatgtgacgaggtgcagtttcccagtgatcagccatcttatttatttctttaagctttcttccatgaatatttctcttgccacaagtctggttatctgcactcatttcagccaaatatacctcaaatcccttggtttttgctgcactccaaaactggtcaaaatgcctaactctgtcattgatggcatccaggatgatgaagggaaaaaagccatcatccagagtctttttgaaagttttgaacatgctggtgcggtaagtctcctccatctcagcttcatattcatattccattacnnnnnnnnnnnnnnnnnnnnnnnnnnnnnnnnnnnnnnnnnnnnnnnncacttcagtgatgaagtaatcatccaggcttagaactctggggcaggtcctccaaattctacctccttatctcgaataagttttgcaacatgtgtctttccactgccaggtatcctctcattataaca

SEQ ID NO: 319874 - DNA, 862 bp, Homo Sapiens
cgggggacaccacccatgccggttcaacaatgctgttttgacatcctccccagggcgttccgcaggcatggtccacagaactgtccttcgcacatcacagcataccctgggttccgacacactgtcttggtgtcgatgggtcttttgtcgacactgatggcacgtgttacccagaactttatcatagattttatctcgaacagttatggcaacattttctaagtcctcttcggtgatatcctccactggccgaaaagaagatatacggtgacgtcgtctgtactcccggcatttccccccaattgtcttccttcttcggaagctgtaaaactgcttccgcaaatttagcggctgagacagtgaagttctctagagcaaacttctcaggaggccgcgcactccgggttgggttcatacgccgcgtgatctgtccctccgagaaggcccgcctcactgtcttcttcctagaagctgaggttggggttcgtactgggaagaaatctggcatcgagttcaattccgccaataactgggcaagcatggctttgttctccttgatgttcatggtccttttcagcaaagcatctgaactctcctggctctcatcccgagagtcatcctcagactcagaggtagaatcttccctttgtatcacctgtctacagtctttctttctttcaagaattgtttttttctcattctgtaagcgtgcgctagaaaacaactgctcggaagaactgtttttatctggtttgttggccagcttcttggtggggaactgaaaggctactcgaagaccaatactacttcttctagacctgcttcttctaggggtagccttatcttcttcttcatcttcctc

SEQ ID NO: 319875 - DNA, 737 bp, Homo Sapiens
  misc_feature (211)..(211): n is a, c, g, or t
tttttttcttttaaaaatgtaatactgtttatttaacttcaaaaacatttcagcattctaaacatacaaaaaaaataacagaacgttgcgaatcgtgtttaagtacaggaggttcttgaactttcattgatgcagtgactctttgctttgctgacaatgaagagttctatagtttgtttaaaaacaaacagtttaaaaactaccgcacttnaaataaaaaaatattctcatgccagctgacccccctttgtccacagctaagatggcagcagaatgctatgtcactatatacagaaacaagacaacctgaagctaaatggatgccccctgcagagtcaacaggtccagcctcacagtgcacgccctgagctacagcctctcccaaaaggcatcttccccacagcctcaacgccgagcaaggagcatcaagggtttgtctcggttgttttgttctttttacacactatagatatatacagttgaaaactcaggatttctagccaataaccatagttaccaccaccttacaaataaaaagaaaatgccagaaacatctttaaatgccttgtcacaccaacagcaaagtgcacagagtgaggagaacacgagagtgccttttcattttaaaaatgtttggaaatatgtacaactttgatacagtttcagggtgctccagacacccatggccacttcatgtaaaccactgacatttctagagcactttgagagactacaat

SEQ ID NO: 319876 - DNA, 953 bp, Homo Sapiens
cctgttatcagcatttttattcagtttagtctatgctagaatataaatacatgacagtatgtcttttcttgtcaagggtagccttttacataactaaaatttgtggctagcagtttatataacaaaagaaaagctaaatctgtaaattatcagaaaagaaccaaggatataggaaaataatacatttatataaattacaaaggacagttacaatgaaactccattagtttcctctcaacccaattttacaaaataaagtgaacatgtattattctgtgagttgttaagagtacataaacactgtgggcccattcaaaagacagtggtcaaagacaaaatgttatcttcatgttatacactgttcttagttctttactggagttgagcttcctttcatagtcttctttaggtggtggtaatttggcaagattttcatcaagaaatccagctgtagtgtctggggctgcggtcgctcagtctgcacccgacgaaggcagtctgcaccatagatcaccgtattctcagggatgacttcaaatgtatttaggttgcaacaagccccaatgatgcagccacttgtcaatattacatttctgcctacatatgcttttgattcaatgacattattatctcccatcttcatggcttgggaataacagccaacttcaaacacattattggtgccaatgatcataggttttggttctggatcttcagtgtcaggagtgatattatctgggtaagcatttatgataagggcctgttcttctattaggttcccttcgccaatcactattggcccggcttccgcaataattcttgctttagggtggatcactgtccgaggtccgatagttacatctcctctgatttcactttctacacatacaactgctccaggagcaatcttcacactcttttgagtcttctccgccatggtacggccccaatgg

SEQ ID NO: 319877 - DNA, 340 bp, Homo Sapiens
gttggttgcccgccccgcttttaaaaggttttaaaaatagtttatggaaaaaataaatatagtgtatgaatgatctaagtatgagaaatagcaaggacaaaatagcaaatatttttgtaggggagaaggaatctgaatgtgtatggaatattaaggagaataagaaattaatttaacaggggctgtggcggggggtgggagaacatgaggaaaaatagctaatacatgctggacttaataccgaggtgatgtgttgataggtgcagcaaaccaccgaggcacacgtttccctatgtaacaaacctgcatatcctgcacatggatcctggaacttaaaatt

SEQ ID NO: 319878 - DNA, 737 bp, Homo Sapiens
aagaggaggcgcgagaatggaggtggaggccgtctgtggtggcgcgggcgaggtggaggcccaggactctgaccctgcccctgccttcagcaaggcccccggcagcgccggccactacgaactgccgtgggttgaaaaatataggccagtaaagctgaatgaaattgtcgggaatgaagacaccgtgagcaggctagaggtctttgcaagggaaggaaatgtgcccaacatcatcattgcgggccctccaggaaccggcaagaccacaagcattctgtgcttggcccgggccctgctgggcccagcactcaaagatgccatgttggaactcaatgcttcaaatgacaggggcattgacgttgtgaggaataaaattaaaatgtttgctcaacaaaaagtcactcttcccaaaggccgacataagatcatcattctggatgaagcagacagcatgaccgacggagcccagcaagccttgaggagaaccatggaaatctactctaaaaccactcgcttcgcccttgcttgtaatgcttcggataagatcatcgagcccattcagtcccgctgtgcagtcctccggtacacaaagctgaccgacgcccagatcctcaccaggctgatgaatgttatcgagaaggagagggtaccctacactgatgacggcctagaagccatcatcttcacggcccagggagacatgaggcaggcgctgaacaacctgcagtccaccttct

SEQ ID NO: 319879 - DNA, 1183 bp, Homo Sapiens
aggcgttcttggttccattccaaggggggggacgccgggttccccgtgaaggtgcaaattaaagggggttccagggcccttgccccagttcaagcagcagtggggtaagggggttcaaagccccaaggcactttccttctcaaatggagaaaaggggggaggggctaggcccactcaatttcctgggaaggggaagctgtgtccctccccagaagctggggacaggcacagttttgggaagaggacatgttggggaagaggatggtcacgtgatcacgaaagcatcaggggtcagaggtcacgttcccagcaggctccagtgaaatcaaaccagtaaaagcaaaagcccagggaggggaaagaggggcggcccgggaagcctggctgcagggggagagctgggtcccagtgtgggacagccccagcccagggccccgtcaccagttcatgatgcagttacggttcagagtcatgaagtaaacttggctgctgcccccagagcggactgaggcaaaaaacaccttgtcattccgctcacacaggaacttgagcctctgagctcgtttgtgcatgaagaccccgtcgaggtggcccgtctccacagagcggatctcaatggctttctcaccccagcccattatctggttggagcagatgtaggccacagaagtaggcatctccccccactgcagcaccacatccttaatgatgcgcccgtacgtgttgacgtagacaccctcgtcctcgtagcacagcagcatctccatgccgtcggtgttggggaggaagatgatggcatggggcgtgatctggctctggatgtgcacagggatgtagatgtcatagctgttccccgagtcgacatccacagcatggaagccagcactggagccatagatgaccttgagccgctgcccctcctctactgtcaggtcgaccagcagagggcggtgggggaggtcggcaaaggacttgaaggccatgaatttgtggtagggtttgggggcccaggcatacacctccacggagctcttgagggcgatgaccaggaacttaatccgctcgtatttcacaacacggtagtgcccgcagccctccatgtcccccacggtggtccagccctgcttcttctccacttctgggtcattgtgcagaatcttgttccggagccaggacaggtaat

SEQ ID NO: 319880 - DNA, 1111 bp, Homo Sapiens
  misc_feature (748)..(757): n is a, c, g, or t
ctcagagtttactggcactcactacatcccaaacgcagagctggagatccggtatccagaagatctggagtttgtctatgaaacggtgcagaatatttacagtgcaaagaaagagaacatagatgagtaaagtctagagaggacattgcacctttgctgctgctgctatcttccaagagaacgggactccggaagaagacgtctccacggagccctcgggacctgctgcaccaggaaagccactccaccagtagtgctggttgcctcctactaagtttaaataccgtgtgctcttccccagctgcaaagacaatgttgctctccgcctacactagtgaattaatctgaaaggcactgtgtcagtggcatggcttgtatgcttgtcctgtggtgacagtttgtgacattctgtcttcatgaggtctcacagtcgacgctcctgtaatcattctttgtattcactccattcccctgtctgtctgcatttgtctcagaacatttccttggctggacagatggggttatgcatttgcaataatttccttctgatttctctgtggaacgtgttcggtcccgagtgaggactgtgtgtctttttaccctgaagttagttgcatattcagaggtaaagttgtgtgctatcttggcagcatcttagagatggagacattaacaagctaatggtaattagaatcatttgaatttatttttttctaatatgtgaaacacagatttcaagtgtttatcnnnnnnnnnnaaatttaaatgggaatataacacaggttttcccttccatattcctctcttgagtttatgcacatctctataaatcattagttttctattttattacataaaattcttttagaaaatgcaaatagtgaactttgtgaatggatttttccatactcatctacaattcctccattttaaatgactacttttattttttaatttaaaaaatctacttcagtatcatgagtaggtcttacatcagtgatgggttctttttgtagtgagacatacaaatctgatgttaatgtttgctcttagaagtcatactccatggtcttcaaagaccaaaaaatgaggttttgcttttgtaatcagg

SEQ ID NO: 319881 - DNA, 514 bp, Homo Sapiens
  misc_feature (291)..(291): n is a, c, g, or t
gatgttttacattgccatcacctcttcctgagaaaaaggtgtgtcccccaccccaacccctaggagccagcagactatctttctgaggggccacaagcacactcccacgtggagaacaagggcagtggatgaagggaacggggatttttcaaactaatgttttccctcaaacaggcctcccggcgccgttagacttgaagcaatgacatctattaaaatggggaccccagctgggggttaagaatgttgtttaagaatgatgacgatatcttgaaaagaaattcttggctnggggatggggtagggggaaagggaaaaaaaataaattattttgactttcccattggcaatgcttgctacgcttaatctgattgcatctcagggacctgtagcaacatctccaattgtacagtgtaagccaaagtcaaatgtggggtatatgaagaaattcagagcatcagccagttctccagaaccagccccttgccactgtaaagtgaaaggctcctgtagg

SEQ ID NO: 319882 - DNA, 1366 bp, Homo Sapiens
acatatgacaagtactggcggcttcttgatccagcaacattagcaatttattgtatctagaaaatgaatctctggatgcagagtttacagaaatcggcatccacagaaaagtcagggaggacttaacatgggctatgccacttaaggagaacagaatttgccaaagaaaatgatgtttcgagttttgttgtgcctgatgatgtaaataaagggatggtcagcattcaattcatccttgtgctgcaggatccgtgctcctggcacctctatggaatccccaccatcttcagttatttctaagcacactttgtggataacatttgatagggccactcccttggtctctgacattccagagaaatcagatgtgtcttcactgaagatatgtttcagccctagattttccagacaagccttgggatcaatcatcttttccaccttaaattttggaatggagagtttgaccttggcattggccatggtgctgggattagtccactgtgacagtgactctgagttgagttgtttttcaatcttctccaagcctgtggactcatcctccacatccttgggtagtaggatgaacatgctgagatgcttattttgaaaaggaagctctatgatcttacaattgatactgtcaatgtttcccatacagaacgtggcctccatgttcatcatctgcactggtttggtgtctgtcttgttgactctgaaaggacattcttttgtttctgattcaggaaatttcttcatccacttgccaacaaagtaggcagcattaaccacaaggattttggtctggtcgttcacactgttgtcagctaaaatgttctcaaagtggccatctgtgagatccttaattgagttgttgatctgacctttcgtttcttccaatttatctttgaagtcaacagtttccaattcctttgcatagggtctcttcgtagagctgatgaactctgtagaaagattcagagatttgtctacgtagagccgcttgattagtttcagtgagtaaaaggaactaagtttgtttacatccgatgttactgtttgaaatccaaagggtacatctttgacattttcaaaatgaagaacctgtccaatttcatttgcagtgtcacctttagcacccacttgagcaagtgacagagaggtggagagacagattggagagaagaggacattgcccagtggctccttttcacatagttgtttgaacagatcaacggcaaaagccgaatttgctagttgcagggcatccattgcgggcctggagtcacagttatcctggaaaatgcgtggaaaaggaacaggcaagcgaggagcacaaagacctggatgtggagggcgcctcgtgccg

SEQ ID NO: 319883 - DNA, 1776 bp, Homo Sapiens
  misc_feature (170)..(170): n is a, c, g, or t
  misc_feature (1440)..(1459): n is a, c, g, or t
  misc_feature (1506)..(1528): n is a, c, g, or t
cagctgttagggaagcagccaataaggcacccccagaccacgactttctatgataagccaggcctcctcatccaagtacatcctggatcctctttctctctggtttccagggtactcaggaactaggccatttggcagaaaactgtagcaaaaaagcaatccttggctgnactctggcaaagtctgaatgggctaaaagccaaaaggaaaagctgggttatctgaatgacagccttcagatcctgactaacactttggaaaaacttctcgtttcttattcataatagaataagatctccagcagttacatgtgtgtgaagattatctgaggagctctgttagcccctaaaccaaatgcagggtttgaggccaatgccctttggttagacagaaccacactgcccagatggctagagaccacccagataactcaatccatcattaagttattgtaagcagcaaactgtaagcagaagtggatgatgaagatggaaaaaaaatataagatagggcctgtccctggcaaaactaagaacctgaatttcagacctctctgaaataggtacgactaccactgctggtgcaaggaccaatcagcgacctattgaagtgcctggaaatgagatggattgctgcttaactgtgtctctttcattggtcttggtatcagtgggcacacacgattgtttcaccaccagggggcaatctctcaccaggagcccattcaagcatggccactgccccatttgtcatctcgtgtgtgcccaagtaatcaaatgaatgcaaccatccacagtaattacaattagggtcatttaactatttaattgctttttgagattattgctgaaattaggaagggagcattgaaatgggaagggggaggttagagaagacagagatttaaaagaagcaagtaccattttccaagtataaaactcgtaatattaaaagtgacatagcagtatattcacatgactacttaagtctaatgcagaaacaagacagtacagtttttgcagaggccgatgtgacatctgcatgcgacatgatactattaagtgtctctacccacctctgctacagagtagctgctatatgcacacatacacaaaaatacacaatgaaaagcctacaaaagtgttaagtcaaactaaggctcttaattgtaaattaaagtggctacagtaggtccctttgaaaaacaccatctcccctggcaccaatgttgtcacagcacagaggaagcgagtggctcggggtctggttctggggagacgctctacaggggcacatgcttctccatcttggcagctggcaagccacagtggtgtctgctgggtggctctgggttcctggacctcattcaacataatgcacttaccaaacagctctgaccacagctactctcaaagaggtgcctgccaggtctccctgtgnnnnnnnnnnnnnnnnnnnntacccactcttggaacccacaatgcactgctgggcaaacaggaaaannnnnnnnnnnnnnnnnnnnnnntaaatgccacaccagccctgaatggcgtggccagctagtcacagttgttgggtcagtagtacagtgctcaagaacaattcagactaacatgccaaggagcctgaggaaaagtctggtagtcatggctctcccagccagcattcccagtgggggaaactagaagacaccagcctggagaggctgaatattcaggagtccctgagatggggaatggaacagaggaaagtgtcttttgactcatcttaagt

SEQ ID NO: 319884 - DNA, 414 bp, Homo Sapiens
ggtatgaaattgtctttctccattgcagaaataagctagggaaacactaacccaaaaactttctgtagagctgttcctttggaggcagcatcacttattggcagtaaagactcagtataaaagcaccagcatccctacttgggtgatggggattaattttatagcattccattttcctagtgccacatgtgaaattggattttgatgatcttaatctatattctacccttataataaaagatcaaaagatatatctcctatgaacagattggagataggagatgacaagttgggaggatgtctttattctaatgtgaaggtagggaaaatgtggataacattactggggtgagggaagcattgttctttaattggagttctcattcttattctccagtactgacttgtggggaa

SEQ ID NO: 319885 - DNA, 874 bp, Homo Sapiens
cggtccggaattaccgggatatcgtcgaacccacgcgtacgtttttctttaattactttaatataaaagacagcagtttcacatttcacatatttgaaaaacatttcaaaaccctctaataagtatttaatgaaaataaatttatcgaagagaaacaatgaccacaaaattaatactaccaaatcattactgagactttttgcattacaatatttggagagtaggtgaagaaaatatagaacagaacatgaacattttaaaatgatattccacccaagctttatctttttgctaaatcttgtggacactagaatatatattcaagatgtttggtaaagatattcagcaagccatacttcaaagatgttaaaacagccctccaccaataatatggcattgcaaacccttctatcccatcccttttcagttaaaagagagaatattaacagagatttagtaatagtgaccaaaataagaaatcagtatagtcaagaaagatatgtaattattcaacatcatttggtacggatagatcaatgcaactcactaagtggacaacattgtgaggggagtgggtaacatgattcagagtcctgtgggtaaattcatatgcaataatcttattccaatcaatctgtaaagtaaaagcactacatccacattaacattataacatcttacagtaatataaaagccaaatcattgttggtacgtcattttctttaaagtgaacaatttaagaaaacttcacaagagtctgcactttggaaagatacgatcagagtacacagtagagacaaaacagggcatcttcattgtaattttttttcggacgcgtgggtcgacgatatcccgaacactccggaccgtaccc

SEQ ID NO: 319886 - DNA, 634 bp, Homo Sapiens
  misc_feature (38)..(38): n is a, c, g, or t
  misc_feature (47)..(47): n is a, c, g, or t
  misc_feature (56)..(56): n is a, c, g, or t
  misc_feature (62)..(62): n is a, c, g, or t
  misc_feature (74)..(74): n is a, c, g, or t
  misc_feature (80)..(80): n is a, c, g, or t
  misc_feature (120)..(120): n is a, c, g, or t
ctctggcaacaatccggggctccccccttcaacccttnccaacccanggaagtggnaagcangcggggggaagnaagcangatgctgggtggcccatgtttcttgtaacagcctgccagnaactgtaagtcatataaatctcttttccttataaattatcccagcttcaagtatccatttaaaccaataagaaacaaactaaaacaattgccctaagttgaaattccaccctcagggtcgtcttctaagatgcaatttaaattatcttctctacagcaattcaggacaacaaactagcataccccatgttcctcaaatatatcttctccagagctcatgccagaccccttgtccagacttcctgggtggtctcctctctactcatctaacaccctggcatatagttggaaggccccctgggctgtcacttctagccctgtgctcagcagaaagccatcttacccttcccgatggactattttctgtttttagctactgccttacagcacggttgtctttaaagtggttgttacaatagatacaaaatgtatttaagataaaaggtataactatgcagcaaacactagtggacctaccatccagcttaaggaagttaccattacctttgaaagtc

SEQ ID NO: 319887 - DNA, 825 bp, Homo Sapiens
  misc_feature (162)..(162): n is a, c, g, or t
  misc_feature (258)..(258): n is a, c, g, or t
  misc_feature (643)..(643): n is a, c, g, or t
ccagatgaagtccaagcagtctcctggtccctgaggtccccatgggttgccagtggcagttcagggacagaggctggaaggattgaaaatggagaggaataaagggctggggctggtctggtgcagggcagaagagggaatccgagaagcataaaacatggnagaaaaagatgagaaggaagtggaaagaagagagtggatatcaacaatggccttaggctcctttcatgcacctgttttatttaacaaaacgtttanggcctatcctgcactgggactcctctagttacgccaggaaaggttgtcaggggagtctgtgatggggaaaagagaggccccattctgggtttggctcttctgagtcatcggctgtggaagtgactgagaagtgagtttctgggtgtttcatccctggggtgagagcaagtccattggattaggagacagcagggacattgtgcctggagatagaggccttgtcatggcaatgacaactgactgctgtcttaattcaaacgagcaagcagttgccatggaaaccatgttacttgtatggtcccggatcccggtgatccgccctcctagatcatatctgacactacgtctcagctgtcagcctccacctctccccagccatccattntagggggactgagaggtggagacaggaagggcagcttgtcctggtgagcagtggcagttgtggggagatgtcttccacatccctgggtttggtgcaggcagatggcaagtcattctgttatgtgaagggcacagccagaggccccatgacaaactctctatgtgacaaggggcctcgtgccg

SEQ ID NO: 319888 - DNA, 404 bp, Homo Sapiens
  misc_feature (280)..(280): n is a, c, g, or t
  misc_feature (388)..(388): n is a, c, g, or t
gaataacttgccatctgcctgcaccaaacccagggatgtggaagacatctccccacaactgccactgctcaccaggacaagctgcccttcctgtctccacctctcagtccccctagaatggatggctggggagaggtggaggctgacagctgagacgtagtgtcagatatgatctaggagggcggatcaccgggatccgggaccatacaagtaacatggtttccatgggcaactgcttgcttcgtttgaattaagacagcagtcagttgtcattgccatngacaaggcctctattctccaggggacaatgttccctggttgtcttcctaattccaatgggactttgctcttcaccccaggggatggaaacacccaggaaattcatttnttcagttcattttccc

SEQ ID NO: 319889 - DNA, 842 bp, Homo Sapiens
  misc_feature (86)..(86): n is a, c, g, or t
  misc_feature (110)..(110): n is a, c, g, or t
  misc_feature (115)..(115): n is a, c, g, or t
ggtcctgttaaaataagtaaacaaaatttcccggaccccattaaggttatgaggaaattaagtccacaaggagtgcaaaaaaagtnccttggaagaaaaagtagtcccanctaancatttaccaatattagggaaacactttacaaagtttccattactatgaagatgatttcttctttgttcaaattttgcacaaatgaagaatttttctttactgcaggaaacaaactgtaagtaacagtgcatttttaggcataaataagtatttatgtctgattccagtatggtcaggttaatacataaatactttagaaacacagaagttcacattagtgaaaaaatccaagtttctcacgtaaccattcttcagttaggtcttcggtatttcttatttcaaataccttggttagttcagctgtctggactagcttattcttacttccagcatacatcatctgttgttcaggcttacatccaacaggactggagaaaataaagcacagaggatatgaaactcttccatcatcatgttgatatttataactatacacaatgaagcgaggttgtcgttcaggtagttcatctttaagttcatctggtgaaatgccctcaagctcctcatccagtaccaccaggcgtttatccttgtcaatcttcattataatagcagcgttgttcgcttctttgcgaaaacgaaactttctcagcttttccactaatcttcggcaacatcacaaacaaccaaagactcactcattttccttccggccgtcagcggcctgtcgcctacactcgggcgcctttaagaatggcacggcggccgcctcccttcctgccccccc

SEQ ID NO: 319890 - DNA, 478 bp, Homo Sapiens
  misc_feature (410)..(410): n is a, c, g, or t
  misc_feature (422)..(422): n is a, c, g, or t
attcctgcagatccagaagcaggtggcattggtagggtggtcaacggagccttcatggtgctgaaagggcatcgatctattgttaaccaagtccgatttaatccccacacctacatgatctgctcttctggtgtagaaaagattatcaagatctggagcccatacaagcagccaggatgtactggagacctcgacggtcggattgaggacgattcccgctgcctctatacccatgaagagtacatcagccttgtgctgaacagtgggagtggcctgtcgcatgactacgccaaccagtcggtccaggaagacccccggatgatggccttctttgactcactggtacgccgagagattcgagggctgggagctctgactcaggacagtggacctcagttgagagtactatnccttccaactgncacgctggggtcagcgagcgctcaggctacactgactcagagtcttcggcctcatt

SEQ ID NO: 319891 - DNA, 997 bp, Homo Sapiens
  misc_feature (27)..(27): n is a, c, g, or t
  misc_feature (66)..(66): n is a, c, g, or t
ctaaaaattggacaaaaatggctgccnactgcctgggttttttgtaaaaaaagctgctgcccaccnattacctgcaagaaaaccttctcataggggctacgatcggtactgctagggggcacatagcgcccatgggtgtggtaggtggggtactcgctcataggatggtaggtatcccgggctggaaagatgtccagctgcccgtagttctttcggcggcactgacagacagccaaggcaatgagatagacaatggccagcgcaaccagaacacagaccagcaccagcagcgcgatgccccagcctggcaccccagccccagactgggcagagaaaggaaatggcacatcactcacgctgacgtctgagatcgtcaggttatatcgagaggctgcttccgttttatactgattgaactgtgtctccacgtcgtggacattgatggtaccttctcggaaggccagagtcaattgtaccaccacagatcctggcctgaacttaatattggagaggcccagaaaacccccttgtttataaatctgcaaaaacatttcagaaatgtctctctgcagctcttggtagtagtcggtgctgggatcttccagagaggaattaaactggaggtttgaaatgtgaaaagacaggaaaaagaaagagaccccagtagacaactggggagaagtgctgtgattggaggaggtgagaggaggtaccgtgctatggtgagtgctactggcatcagtcttggtgctatggctggcaagggtggtaggagtatcagagtggtggctgggaattgagaatggagtgctcttgctggctggggttgtggtagccctggcagaggtgccgttgtgcaccagagtagaagctgagcctgatgcagagcctgaggccgaggtgacattgtggactggaggggcggtggagcccaaggcgggcctgttgtccggggccgaggtgacaccatgggctgggggggcggtggagcggcggc

SEQ ID NO: 319892 - DNA, 737 bp, Homo Sapiens
atctttctagaatgttatttattaaaaatagattctctatccttcccctcacccctgcgagcaaagtggcctttcccaacatcttttcccaaatggatgaaacaggtcttgaggacgcagatgtggcattctacataaactacaggatcaggcttttctgggacagtgggtctgctggagccaagagtggaacagcacaagacaacatcagcaaaccctggcgcacctaaccgcgggctgccatggatgccgggacggactggagttcctcctgctccaggtacaagtccacaaagagagacccagcggcccagcagcagcctcctgggcaccaccagaaagcgatgtacttaagggcctcaggcggtcgagaggcaacgtggcttccacatgtgtgggaatgagactaaaaagctggctcaaagcaaaatatgaacttataggaaaggagggccctggactgggcaggaagagagagactcgtggcaattctagagatggcagtgcccagccatcaagttctaaagagacccatttgggagtgactctgcctttagccaggttgagctcacagacacacaggcccagaggccgaattcgcggccagcttccaggtgtgccggggcctctcgttgcttttaacagtccagccagagagggttcagttagtgagagtatcttcccatgatcaaacacagatgcccgagtttctcttcactatttcttccgcttcagtt

SEQ ID NO: 319893 - DNA, 2907 bp, Homo Sapiens
  misc_feature (366)..(366): n is a, c, g, or t
  misc_feature (1359)..(1372): n is a, c, g, or t
  misc_feature (2157)..(2157): n is a, c, g, or t
acgaccctcggctgtttacccccacggattttaccacagaaggcctaccatcccgtttgcgttaatggggcaaccccataatggccccagggatctaacaccccaaccatgttccaaccccccatccatagccggattctcgtcacgaacttatcgcctttaagccacatcttaggtgtcatggccctcacaattgcaccagctattgcttggttacgcagataatagcccattcccagtgatacaccaaaaccaaaaccagctggagtcacaaggaagccttttaatacctgacctcttctgggccagctgaacttgtcggccaggcagaaaataaaccagctctccacaagagtcctctctaancttctccatgggcaaggtccggagttcttgatagcaaaaaaagtgatggagaatggaggagagtaggtattcattgaagtgggcagggcataatctgtgctgtaggttcttgctgatcacagaccaggggctgaccacatcatataccacatagattctattaagatggacttaacgcttttctttggacacctgtgcttcaggcccttaaggagaacttgccagcaagggtgagcagtgctcacacctaatgatgaacttatctcggtgcctcatcttccatatacctcatgttaagtctcttattgaagactcctaatctagtgcctcgagagaagcaggccaacagaggcctgatgtctgacattgactctttggaagattaaacttccctcacagattttgataatgactttggaaatgatgactgaaatatttccctctgctttcttcctacctttgggcaacgtcccggagtgtaaatctagctgatattgcaaggttttgctttatttgatgaaccagcctatattaatgacataacttcccagggtacacagaatctaatactaacggtgcaataatttattggtataatttctacctccaaaggtaagtaacacaaatgtttcaggattacagtatatattatcaaactagtgtctttgcattaaaaacaaattatagctcagagatagagcttgctgtgatgtttagtttctgaaatgcattaaatttatccttcagtcttagaagaccgtgtgtctcaaattggcatgtcttgcactttctgcagctcaattctgtaaacataaagtgtttaattcctagacattctaaaacaaaacaggtttattgcatcatttagctaattcccaaagaagagaataacacattttaaaccataagcctgtttgaccatgctaaaaccttttttgagctattcaggatcattacaaccccatattcttttgtgtatactgtgcaaatgcnnnnnnnnnnnnnnccaaaacaataaacaggaaaaacataaacactgtgctacgaaagaacagataccacctttcagaagagcctttcagaaattaggtaaatgctgagaagcccctgagcttgggattttgttaagcagttgccaggggacactctcagtaaagaaatggtgagtgatccggaagcttgaaagccgtgtcacaatgttgtaggctgcccggcacttctggatcgcatgtagcaatcattacagttcaggagaccatttcgaatcctaacatccgtcccactcactgcatctccaagctggcctttacaaattccacacctgaaacactggatgtgaaaatagagattgagggtctcgatgatcattgcggctcctttacccaaaggaagcccacaggaagagcacagcttctttccacttatagacttccgccatttcactgggagactcgatctgatggttaatgcttttatccagcgggagggtttttggcttcacatcttctgaactgtgcgttggatttgatgtctgctgattctgggatggatcctgagcaagctgtgggtttgttccacagtgtggggccccagcctcggtatccagctgatggtcttcatggactccttttgatacagggttcccagaatgagccaaggccccttcagttaggctgcccttctcctccagtcgatcactttccctagtcttcagcaaaataagtcactgtccatctccctggaaatgatttcttccatcttctgtcttgtttttcatcttgaccagtttcnccaggtctatcttattcattgtccacactgccttcagtcatggaggaagaggtagacagctggtcagcggaacttgaagaaccagtaaatggaaccacagtgtcttcaattatcttacgctcctcctcatagtatctgcgttcttcctcttccacttccttttgggccttttcccactcttctttcagcttgtcctgctccttctggtatctctcctggagcaaacgttcctgttcctgttgccatttttcctgtcgcctgcgctcctcttctgggtcccatgcccagaacttaaaaggtgtcgtaacaggtgacttctcactgcttggagaatccacttgagaattgagatttggcaaatgtagttggttggcttcaggcattttgtccagaaatggaaatgtcagcgttgcttcgggttctggagattttggctttaccaccttttgtgacagcaccaactccacctttccactcatttcattttcctggtttccttctggtctttttcttccgacacatcattcttcagctgggggctggagggaaattccacaaaggccacggtcgggctgcatcgagtcacagttgttgtaaaatgctgtggttctgcaatggagttacatccagaaacgtacagaaggaaaagaaaatcaaatatctataggaccatttattctgcaatgccatgaagtacattcagtccatatcccgtcctggcaatataagctgaatgacagtgtgctcaga

SEQ ID NO: 319894 - DNA, 916 bp, Homo Sapiens
  misc_feature (204)..(212): n is a, c, g, or t
gggctctagctgggggccgcgttcggggtgtcagaagctcccgcgcttcggggaaaaattttggggccccttttttataagtaaagaagggttttttcccaaaaagcaaaggtaggtttcttttccccaaaaagccggaaaagcctttttattccccggcgggaagggggtggaaggggggctctcagtttggcccaaccccannnnnnnnntagcccttaggcggggtttcggatttttttgggagaattgataagaagcttccatcggttgcccctcgcatcttcccaccgaagcctttttccaagcagggcttttttggaggctcttgtgcaggaaggggttcattcagcacccgcagggagacacgcttgcagtggtcccagcttggccttcacgccacaacagcctgtcagtggacgtgtcgtagattgtgtagccgctcatgtcctctttcagtgcctggaagtcgtgcttcaggtcatgacccaccaccagcttgcctttcaggagctgcaggatctctagcctggccacggcaaatggtgtggcccccaccatgtgctgaggggtgaccccgctgacccgggttctgtaatcggtgatctctccctcaggccggatgaacttgtcgtacagcacagcaccgtggacgttcacgaggctgcaacgagccaggccactctcccggtggggccccagccccaccatctcgcagtccatggccaccacctcacggctcccagccatgttccttggggaccctcagagatgctgcctgcctctgcgccctcagctcacgtctgcctctctgctgccactgctcagctactgcagctgctctcagcggtgactcatctctaactccaagccggcatcggcatcccgaccctgtttcagtttctagtttgttatc

SEQ ID NO: 319895 - DNA, 443 bp, Homo Sapiens
  misc_feature (54)..(54): n is a, c, g, or t
  misc_feature (372)..(372): n is a, c, g, or t
  misc_feature (386)..(386): n is a, c, g, or t
accccattagcacatacatagattacctataatttcacctaatgtaatctaccntccctactgaggattgaggttttaacgtttgttttttcttccccccactttcttgatcagtgattctcaaccatgtaggaattaatgaaaccaattctgtatcaccactgcaaccaagacagcaataccaagtgatatgtatttttcaaactaatgtcattttgttctctatactgtaaaaaacgagaagatgcagtcctcaacttagaactcaatactaggaagggtcaagttgtcaaaaaatgtctttcaacagtaggaaagtttgctttcaaattaaaaaacaaagcacgtattgcaaacatcgtgtaatgatanaattacaggggganatatattcagaatgaccccatggcattcacgccataccagaattttgcctgtaacaa

SEQ ID NO: 319896 - DNA, 437 bp, Homo Sapiens
ttttacaaattcttctttattgcagacagttcaggcacaggtacatggaagaagccgtattgcagattttacacaaggtggtttgaggcagcaggcacctacctcttccccacccccacttccccaaatacacatcagcctagagatcattcccactgaaatctcctgagcatgctgtcctctcaaacagcacaccatccagccctgtgcccaatgtcaccaggcaatctgtgggatctgaggaggtccttagcctccacccgtagtgggacaggggaagggtatccttttacatgtcagatttagctgtggtgtccttaccaatcctaaaacccttaacagggcactgacccaaatcttgggtttggttctagcctatggttgctacattgccactaggtttataccatccagaagtctgtgggacaaggggctag

SEQ ID NO: 319897 - DNA, 447 bp, Homo Sapiens
  misc_feature (48)..(48): n is a, c, g, or t
  misc_feature (101)..(101): n is a, c, g, or t
aaaaatgtggaattttgggacgtgaaatctgttgggtttggttttccnagtagcctaattctccttcgcaagcctttgaacctaacacctctttggccccnagctgctttctgcacttgcagaccctcctgcaagctcaccctgtactaccgccgggggatgccgtgatcaaggagcatccttcctgtggctggcagaagaggccattcactgcccattcgaaatctcaggcctcctctgaactctgtaggaccctgtgccagtccaaggggggccggggtctcagctctgttccacagtgcacacgcctgacccaccctgtgcccttcttggccccaagactctccctcggctactctatcaggaatggttttgaagaatgcaaagcaggacaggctcacaaacctcagaaacctaaactatatagcagcggcggtggtggagcgg

SEQ ID NO: 319898 - DNA, 642 bp, Homo Sapiens
  misc_feature (424)..(546): n is a, c, g, or t
attcggacgaggcggtcgctatggaggagccggagatgcagctcaaggggaagaaagtcacggacaagttcactgagagcgtctacgtcctggccaacgagccatccgtggccctgtaccggctgcaggagcatgtgcgtcgctccctccccgagctggcccagcacaaggcagacatgcagcgttgggaggagcagagccagggagccatctacactgtggagtacgcctgcagcgccgtgaagaacctggtggacagcagcgtctacttccgcagcgtggagggtctgctcaaacaggccatcagcatccgggaccatatgaatgccagtgcccaggggccacagccggaagggaaccacccccgccttcctcagcttgatcctggaagagactcggggccccccagcctccgccaacccannnnnnnnnnnnnnnnnnnnnnnnnnnnnnnnnnnnnnnnnnnnnnnnnnnnnnnnnnnnnnnnnnnnnnnnnnnnnnnnnnnnnnnnnnnnnnnnnnnnnnnnnnnnnnnnnnnnnnnnnnncctttcttcatctggataaggaaggctggactgcaccttctctacaggctgagttggacattcgcagatctaccctcccaaactgcattctgcctc

SEQ ID NO: 319899 - DNA, 1274 bp, Homo Sapiens
catctacaacacatttatttgtacaatccagaaactagcaggaccaaaattagcagcaatgctgatgacatttacctggcagctttgccttctacccctaaggtcaaagtacttgagacattgcctgtgtgcctaaggaggcatcacacaaggaaattcagatttaacctaatgtatacaggtctgcgtcatgatggcaaattgaaggtgtcatgatttagctggtttctctggaacattcctttcaggagcccacacttgtcacacttcatgccccaaagggatcaggtgctctgggatgtctacctggaatacatccttgcctcctttcctaggtatgggctccagtaaccacctggggtttgaaatcacagtcaggtacttctgcttcaggttggtcagtacagcttgattttctagttccacaacctcatcgggagttaagtcttcggggcattgcaaagtttccccaatgtcaacgagtcccgctatcactcctcgaccaaacttttcccctttcctgagcaaggcctgaatctgagcaggagtcatcccgagtctctccaccagcagctcccgacaggcatcgccttcccagtccctgtgagcaatgtggacggcgatggtacagttccgctggctgctcagcagaggacgccagcgcgtctccacagtcttgattccatttaagacaaagccagcataaggctgccggaaggagaggcagccaaacttcatcttcgcaagcgccccgggcctcccgtagccttgatggtctgctgcttccgtctgtcactgatgtcgagcaccacagcaggcccaagggaaggggctaggattcggctgactcaggtccatcccatggagtctttggggcggtccggagtagggcggggacagctgctttacggccagaggaggaaacactcttccacttggtttctttaccgtctgcaagagggctgagcacacgggctccggcatcatgggccctggtacctttcagccgcggccggtctcacggcctccggaaccatggaccctgcgagtcgtgggtgtctagggccgactccggcttttcgccacaggaatgaacagtcctctgcttccccgagacccagcgaagacaccggagccaggacgatgggctcccaagcaaggagacgtgggccgctgtgagaagagggagcgcctggctagtgtccaggctgcaaggtcgttgccgctaactccgggaaaccagtggccagtgacaggtgttagcggtctataac

SEQ ID NO: 319900 - DNA, 812 bp, Homo Sapiens
  misc_feature (114)..(130): n is a, c, g, or t
  misc_feature (194)..(197): n is a, c, g, or t
  misc_feature (212)..(260): n is a, c, g, or t
cagagccccctctttgtgttcctagtggcccccgccgggtttctctctcttggggggaaacccacaacctctatgagcccccacttttctcccctttttccctttatagggggnnnnnnnnnnnnnnnnnaaaagagaaatggtttctaaaaaaacttttttcggaggggcccaagggcgggcccccccagggnnnngtttttttagtggtnnnnnnnnnnnnnnnnnnnnnnnnnnnnnnnnnnnnnnnnnnnnnnnnnttgtcatctacaacacatttatttgtacaatccagaacctagcaggaccaaaattagcagcaatgctgagacatttactggcagctttgccttctaccctaaggtcaaagtacttgagacattgcctgtgtgcctaaggaggcatcacacaaggaaagccccaccccctacttccttcatctgagcaaaggaacctgtttacatgcacagtgcttagtgggtgggactctccaaagcagtggaaattcatctttaacctaatttatacaggtctgcgtcacgatgggcaaattgaagggtgccatgatttagctgggtttctctgggaacattcctttcagggagcccacacttgtcacacttcatgccccaaagggatcaggtgctctgggatgtctacctggaatacatccttgcctcctttcctaggtatgggctccagtaaccacctggggtttgaaatcacagtcaggtacttctgcttcaggttggtcagtgcagcttgattttctagttccacaacctcatcgggagttaagtcttcggggcacc

SEQ ID NO: 319901 - DNA, 669 bp, Homo Sapiens
ctcgagcttggaatagcctttctgaatatactgtccgcatttctcatgttcccctgaggaagcataagatttactccaccagtccacgatttcgtcctccttttctgtcagcttagaagccagtaatggtttggtgtcttccatttcgataacgatgtcccggcatggtggggcagacagaagggaggctttgagctgtgggacgatgtcctctttccctgcataagggtcacagcgaaagcggtccaggcgctcgatggtgcactggccgacgacaggcttccgcccaaactgcctgtggtcgatgaccttgatcaccagtgggggcatgtacaattcctccttgggcaagaacactttcatgaagagaacagaacttggaaagttgggtgtcttcttaaggtttttgatcaccaccgattccaccctttctcctccacactccacaacaagactgggggatgtgatagaagccatctggaagtttttcatatttcttaagccccaagctagaatctcaatggcagtgagctggaccacaggcctgatcccctgggggaccatgtatagatttggcgccctttgagggggaagaatgggaaggttggagccatccttgcccctcagaatcagctctgcagttacaagaacatccccgcaggctttgtc

SEQ ID NO: 319902 - DNA, 1222 bp, Homo Sapiens
  misc_feature (759)..(768): n is a, c, g, or t
  misc_feature (848)..(883): n is a, c, g, or t
tagattgaaatcttaactggggctaaacaaaaccctttccattggcagaatctccttttttcagggccataatgacatgatgtaaaaatttgctttaaaccattcatgcccttaaatagctagattttaaagcataataagcatattaacatttttaagcaaaagatacgttaacagtgacctttggttatccacagtagcaagagtaaagcacagatcattgaaatccatagataatcagtgaatcaactttcctaccaaacaatagattcatttacatttctttttcctccctatcctttcctgtaagcacctgtttttccatggaatggggttaatgagtaggtagaaaaggaaaaggaataatcagtaggagctgacaaccagtgaccatataagcagctgattgcctgtaattagtcaggctgaacaattagagttgaatgctgaaattaggaaccacaggtggtaatcctgagtagatgtaactcttcagcgtcatctcctgccctgagctccaggccatctctctaaccaccaaagaactcttagtacctacgggaaggaaaagctgtgtgcgacacagaggaaactccattatttgaacacatttctttggctcttgacaaatacttgcttttcctctaatcttgcaagagctatggctcttctattttccaatcacacagcttggcatgtaggaaaggttgaatgatcctctaaggactgtgttgggtcttcgtattctgtaaaacccannnnnnnnnngtggtcttacagatgtttagaaagtggcacaggttactgaattgtctacctgccagcattctgatatagcacaaaaagcnnnnnnnnnnnnnnnnnnnnnnnnnnnnnnnnnnnnctggcattgagctctagggtggatgagggtttatggtcctctgatcataagctccattctaaaaactggtcactgttagctgaaattgctttggttccccaaatgccttggaactccagacgcacccgcagggcctgaggtaggcttcatagagttctaggacttccgtgtgcgttgccaccagatcctgcccagcaatggcctttcccttctaaggtcattagattcagccaaaagcgacctcttctctagtccggtgttacgaacagaagttctgagttgtgctacaaaagtagttccatctttttggtgtaattttcatgtttttaatttgtaata

SEQ ID NO: 319903 - DNA, 557 bp, Homo Sapiens
  misc_feature (30)..(30): n is a, c, g, or t
  misc_feature (64)..(64): n is a, c, g, or t
  misc_feature (66)..(66): n is a, c, g, or t
gccttttgtcccaaccgcccaatgccgccngcccaggtcaatccccattggccaacagggaagngncaagctgcagccgcagtggccttgtcaagcagactctccgcccatcatgctgccaccgccactaccaccactgctgccaaaagaagagtagtggggagagcgggcgggagcggcgcaggctcttgttgaggggctcactgatgataccgctcttgttccgacgctcggggggtggtgtgtcatctgccactgaggctggtgcggcggcagccaccactgcactcttgtctgctgctcctgcctttgggccactgctgccactgccaccgctgccattggtgctgctgctgctactgccgccggcatcctgggagccaccgccgaggctcgacatggtggggccgaggcccagaccccactgcagagggagcctgccaactgccgagggtccacagaccaggacctggccctgctgcccacaacagagatgcctggtgggcctcgctgctcagggcaggcacatggtcaggtgtccaggtggaaatgtcttc

SEQ ID NO: 319904 - DNA, 972 bp, Homo Sapiens
  misc_feature (916)..(916): n is a, c, g, or t
taaaagaaatggatgcttttattcaacctgagttaaaaccacaatgaatcatatcagagttcatgggaatcataataaatgactagtaaaccactcacaaaatcaaagctatcaacatactaggatcacacacattaattagtgctatagttcaaaacataccctttaacttatttagcacgcaaaataatcataaaagtaatgtctataagctctaaccaaaaattttaaaaattaaaaatagcacaattctacaatcctgattttaccaagaaaataaaccttttttggcacatattatcctatggaaaatgggaaagctgagtcaggctgctctgcttttcacagcacaaataagcattcatgctatcagacttgggaaattaactcggtgacaaaaattcactggaaaatagaatccttggaaaaatggggtcaggtgccatccactgtgaggcaatgataatgtgtgtccttcgttattagcacaaagttaggcagcacactataattttagctacatgcaactctataggaacacatgtgggtaaggcctgaaagttacaagcaagagtgaaaagaactgctgtgttgggactgaggaatgatgggtgtttgtttttctttaaatgtcatttcaccttttaaaggaaaataaatcaagtaggtaggtaaaaattactgaactaaagagatactaaagatcagaagactggccaattgagaaaatcaagtttcatgattaagagtgactcaggaaggatgtcttagttatgaggggggtggtggaagacagtttatatctttgggtatttatggcaggtcagaattaaagatttaactttttcccttactctttacataaaaagctggtttatctgaaaaaagtatcaatctagacttgggcaataaagtngcacttagggcactatattattgatatctacaatgacctcctggggtgcacaaaag

SEQ ID NO: 319905 - DNA, 696 bp, Homo Sapiens
aaagaaagaagcagtacatattttccattatacacatctatcctgtacagagtccatgatagttgaacagctggaaaattccaatttgttgtgtaatggcagctaagtgtaaagtatttgcaagaactgattgtatattaagttcgactagtcatcactataattttaaacctacatacaccaatcctactattatttgtacttaaaaatgaagttatttcatctgcatttacaatctttttcccttttcgcttgaattttcattatagctagtcactttcctagggaaattcaatatgttgaagtattaaagagaagcaaatccaattttaattctatgtttaaaaatgaaaagcatctgctatcacctaacaaaatatcccccatcacctttgtaaagtgaacattaacctaaatagatgttaaatcgctctttaccccaccctcctctgcctgtctcatctctcccggcaatgcagccttttagactagtgcctcttctttctcacacgtgtgctggattgcaatttaaatgcaaataaccctgcacctcattatctaagttcgtgcagactcagtaacagttgcctgtgctgaaggctgtgaaatcaaacggaggttcatctgtattctaacacatggattacttagagtaatttcaaaagagcaattcatcactgctttgaaattaaacac

SEQ ID NO: 319906 - DNA, 595 bp, Homo Sapiens
ctccaaagtttgtatagtgtaggatttgttggtattcgtgataaaaacacctcatcctattcattttgccatgacgggcgaactccagataaaggttttgaaagtaatgagaaattattaattcatccatgttactggcttggtttgaatctaaatcgtaatgcacttgctccagaggaagcagaggagataaatgacgaatatgatattaatattatttcagataattcagccattagaaataaaacaataggtcaaataactactcatctagatcagataccgataggaaatgaaggtgccactgaatttgaacaatggtgtttagacgcactaagaatagtatttgcatcccacctaacagacatcaagtcccatccaaatggtaacgcagttcagagacgagatattataggcaccaatggtggcaaatctgatttttggaaacgagtattggaggactataaaacaagacaagttgtttttgatgctaaaaattttgaagaattaggtccatctgagtatagacaattacaatcatatttaacaggtccgtatggaaagctcggttttataattaatagagatgagagtg

SEQ ID NO: 319907 - DNA, 1317 bp, Homo Sapiens
ttttttttgctttcaatatattttattctgacgaagttacaaaagtagatacaaaatactttttttagaagtacagttaactgacttagaaaaatagataaagcccctaaggattttaaaacacaacataaatttttatgtaaagaacatttaaaaatattttagatggtaaccaaaactaacttacacaaactatttttgatgtagaatagaatgctgttctataataagaagtctgtagcacactggtaatccatttggatctacagaatacttgtttggaacagaatctgataatgagagaaaactcaaatgaatgtcagtgcagttgcttcaaaaaaattactgctaccacatgtactatcatcccccaaggccttttacagtctgaaatatcaaaattgaaagcaaaaataggatgaccaaaggactactattttacctcttttcagaactctacaatagtagaaactaaattcccttatggatctcagggggaaataatgtgcctgttgaaggggctcagtgtttggtgtccaggctggcatttttcaggtgagggtttcatactgacaggaggcaggctcctaaaacaaggcggtagcaccagcaccatgactagggctgctttaaaacaaatttctaggacttacgctctttgggcctgatttgttaatgcttatgaggtaatgatattatgtttgagaagctctacttctagtatacctcaatgctcagagagaaagccaacaatacaatcaggaaaccacaatattgacaaaacttagtactaccaccaagattgttcctcttgccttggcactactaaaaaactttgcctttgttactaaagtcatggtgaatacagattttgcatttctcatgtaagcagctatataagcctagggttcctacaagccttagatggaaaggaaaaactttgcctggaagcccctgtaaaaatcactttattccacaatcctgaagaatgaaagacaaatttggctgtcaatacaaaaactgtagtacaaggaagttcaactgtttaaaaatctgcacatcactgtacaagtgttttttgaaggcctgaaaattaaagcaccataggattaactgcataatttagcaagcactctctaccccatgactgtaatcatgtatgaagagcagagatcagacactgagaggagatggcttctgattagcaagggggaagggagtgagtgttatggaacaggcaaaccttgggcatggggagataaaagtgagaagagtcagaaagattgatttctataggccgggcacggtggctcatgc

SEQ ID NO: 319908 - DNA, 1370 bp, Homo Sapiens
  misc_feature (176)..(248): n is a, c, g, or t
  misc_feature (944)..(993): n is a, c, g, or t
cgcacacacacaaattatgtttgtgtttctccccaggggtttttcgcggggtgtcccgcgggggaattttcttcccaagaaattgggggggcgcctcttctccccagagggggggtgtgcccctcgtgaaacaccccgagaaaaaaagccccgggttttccacccccaaaaaaatnnnnnnnnnnnnnnnnnnnnnnnnnnnnnnnnnnnnnnnnnnnnnnnnnnnnnnnnnnnnnnnnnnnnnnnnngcccaggggtgtttattccccctttttttcccacaggggaaccagggggggccctataaggggggaaaacccccttcatttttcccccctccccggggtttcaaccccattgccggcccaaatttccgggggccactcaaaaaaggttaaccccctttgggcgcgatttcccctggggtcccaaccaagccgggttgttgagggttatcgccagggaattggttgccggaattttgggtaccagcttccacggtgctgctccactttttaccttgagccttcagcaggacgcagctttgccccgggagagcaacacggggttcaggtaccgcttctcggagctctgatgtgttgaagaacatatatatgctgtgtgtactctgcttgaacttgtcatagatttcgttgtgggtttccaccattagcacgcgggtgacctccttggcgtagtagtcggcctcaggctcgggctccggttctgcactctccccggccacccggtcgcgggtgctgttgtacagggcgagcacggcctcgggcagcgggccgggcggcacctccccctggctcggggggctggcgagccgcagcttggacaggatctggccgcggatggcctcgatgcgcttccgcttcaccagctccatgtcgatagtcttgcaggtggatagtcccgcggccggccggccaggcgtnnnnnnnnnnnnnnnnnnnnnnnnnnnnnnnnnnnnnnnnnnnnnnnnnncggagggcggcatgggggaggcggcgccccccggcactgccgagagcgcgaacagggctggtgtggtggggaggccccgcccctgcaggggctgggggtctcccggcaaaaggtaggagggcctcgagggaaagctgaggtcctcagggagaagggcgcagtggtggaggggaggcttggaccgggggtgtctcagtatcccacggaaataacctagatgggcgcgatctggtaccagaaggtgggtggtcttgaataggggatctgtggcaggtcggagagagatccgtctcctggaggagaaagggtctaggatgcgcgggggctcaggagacaggccggggatgaaggcctcgtgccgaattcgccacccagcc

SEQ ID NO: 319909 - DNA, 1001 bp, Homo Sapiens
  misc_feature (386)..(420): n is a, c, g, or t
ggagcgaggcctgggtggcgaattcggcacgaggccttcatccccggcctgtctcctgagcccccgcgcatcctagaccctttctcctccaggagacggatctctctccgacctgccacagatcccctattcaagaccacccaccttctggtaccagatcgcgcccatctaggttatttccgtgggatactgagacacccccggtccaagcctcccctccaccactgcgcccttctccctgaggacctcagctttccctcgaggccctcctaccttttgccgggagacccccagcccctgcaggggcggggcctccccaccacaccagccctgttcgcgctctcggcagtgccggggggcgccgcctcccccatgccgccctccgnnnnnnnnnnnnnnnnnnnnnnnnnnnnnnnnnnntggctactggtgctgacgcctggccggccggccgcgggactatccacctgcaagactatcgacatggagctggtgaagcggaagcgcatcgaggccatccgcggccagatcctgtccaagctgcggctcgccagccccccgagccagggggaggtgccgcccggcccgctgcccgaggccgtgctcgccctgtacaacagcacccgcgaccgggtgggccggggagagtgcaaaaccggagcccgagcctgaggccgactactactccaaggagggccccccccgggcctaatggggggaaaccccccaccgaaatcctatggacaaggttcaaggcggagtaccccccggccatattttttgttctttccaacaccttccgaaggcccccgaaaagggggaacctggaaccccggggtttggctcccccccgggcaaaaacttgcctcttgggttgaggggctccaaggtaaaccaggggggagcccaacgggggagacctggccaccagaaaagtccaggccacccaatgtcccggggggaaagccccctacacccacccggggtgggtggcggacccc

SEQ ID NO: 319910 - DNA, 667 bp, Homo Sapiens
ccagatctgtgaatgatagagattatgctaaattaatgctgattctttgtgtgtgtgggaaatctctgtagagcaccttttctttcttagactaagtaacccagtacaatagttgtgaactgaataattaaaactttggcttctcttaggaaaagacgacttcctagtcataggtgtcctatggggaaatttattttttttaatgtcctgttccttaatgctgcaaattatcagtatttataaagtaactggattttgcaccacttttttgttactgtgaccacgggcaggaacaatgtcttctaggactatatctatgtaaagttattagaatggtatctgttcattttagtgatatgaagatcacaactaacaactgacaaatcagagtttgccagttcaaattcagcatggctgcagctgattaagaaattgatatgattattctttgctagcctctcttactaatggaattatatactggccagtaaaatgggcctcccaattgctgtttcagcaggttttaaaccttcaggaacaccagttaggaaaatagctccagaaaatatagatatattttatttttattaaaatggcagtctacatcataattggcatttctcaagactgtctttaccagaatctgtgtgaaataaggcaatctagt

SEQ ID NO: 319911 - DNA, 788 bp, Homo Sapiens
  misc_feature (64)..(88): n is a, c, g, or t
cgcgccaaaccgaatggtcctaggaaagctcttcgaggggccgaaggcggccgaacatgttttnnnnnnnnnnnnnnnnnnnnnnnnngtccctaaatagcatgcgttcatgacgctggctcactttatttttggccccaggtcaggtctcccaaagggtttcccagcagtcacttcagagtctcctgcagagtcaccatcaagcagacctcttcctcgggaggccgtgtcgccaccccaacccttgacttctggtatcaccatctcctgtcacctgggctccagtctctgtccgatggcctcaacaggacatcaaagcatagctaccagtttgaaggtgccctcaggcttggcaggaaccacgtggacaaaagtcttgtagagcacagcacccttgggcagcctggtgatcagatccacagcctccgtgtttctgggatgaggcacgtagacctccttagtgtagcggactatcccctcttccagggcatacagacatttattcttcccaacacccacatgggcacctgggtgccagcggaaatggcgctgtgttgcaatgatgttcccagcatgaacatagtgaccttccattttcttaatgccttggcgtctgcctgatgactttccaccgaggtttttggagctaccacccgacttcttggatgcgtatctgacagcaagagctgtagccggagtggggcttagcaaggatgtaacggctgtccgggtcctcagcgccaacaccaccgacgccatgctttcgatcactcacttccggtctcccc

SEQ ID NO: 319912 - DNA, 825 bp, Homo Sapiens
aagggcttaggcaatgttttatttccataatgaattaatctccataaatgacatttttcacactggtaaatacagtttaaatgtctcaagaactttgtctcatcacccaaacaagactaccagttccttaaagcagggaatacgatccttattttacattcattttagtatatacctcacagaggtagcacagacctctgagcatttaccaacaagattaaaaaatagctagacatctaaattccaggctaggtccatagcctcacggccactcaacacatacagttataggaataacccaaacttccaacagggtttgtggaagccatcacaggacaggactagatctctcaggggcaaagtgaacaaaagccagtgttcattttgtcccccaccatagtgaaattaagagcctgacccagcctggttcttactggtctgaacctgatgggttgagactccagaaggataagaatgtctgagaatcttctgcagccccccacgctgcaaagccccataacagaccactgcatgaaatcctattcacagcagagacgtggtcaacacacacagagggagtgaggctgggaatccgagttctgactcctcgactgccaatgttatgtttcacacaacaggttagtaaggaatacagtgagcttttttaatccaatcatttgcaaattaataaggaagtaatataccaacataatattttgctgtacaagatgacaatcttaaaaagaatttgtacacatatcatgtggacatttttattcctaatttatactttgaaagatatctgacaatgtacaaagaataccc

SEQ ID NO: 319913 - DNA, 1179 bp, Homo Sapiens
ctggaagtgggaatgctggcgacagactgtgtcctctttcccaccttcatagcaggaatcacccggacccgactggctgggcttcgtgctagcgagggttctgggggtgggtcttggtgatcttgtcctatggggagtctgcagtggtctcagccacatcctatgtattttggctctggaggagcaaagctgtatcctggagttggtctgtgatttgccgacagccttgcaggctgggctcagggacaaagtcccccccaaaacccgcaggtcctcatgtccagacgctgcccagtcctgtcctgaaaacagcacgccccaggcccacagaaccccccaccctacatttgccttgggtggagctgggggtggtcctaggactgcgggtgcccttagctgaagggggtggggagaagcgtggactgggcagcctgtgggtaattggaggttcattgagaattgagtctttggaaacactaagaaaatcaaatttttaaaagttatttatggcctgggaaacaatttgcatttgtccccaaatacgcttagctgtgtgccgcttagaacgatgcgaaaccatccctctgtgtaagcccgtgccgtgtgactcgaagcctagcgccctccctgcgaagcatcagacgccacccagccctggggggaggcccacgcctgctggaccaacgcgggttctggggtgcacagcgccaggttaacgctgaagcctgccccgctgagcccaggagccgggaggcctgcgggctgacccagaatccgatcatgcacctgtctcatgccagcggctttggctggggttggtcctgaagcctgcacgcggagttcttttgttaaagatctgagggactcctcagtcctggggcgtcgccgctggagctcttcaagccctgcgtcagcgagcgtacagaaaagcggaaaacgagctggtgagttggggttggatgactttcattcaggatcggtttacgagatgctgctactgggtattgggtttcagaattgaataaacatcatagtggaacatttgagacattccatacttgttaaagagacaaggaagaagagtaaaaaaggggggggtctacgagcaatagagatagaggaaaggaataggagggcagaggaacagtggcttgtagacacgtatatggttgtgggtag

SEQ ID NO: 319914 - DNA, 938 bp, Homo Sapiens
ggattgcaaaaatttattaaaattggagacactgttttaatcttcttgtgccatgagactccatcaggcagtctacaaagaccactgggaggctgaggatcacttgagcccagaagtttgaggctgtagtaagcttcaaaggccactgcactctagcttgggtgaggcaagaccctttcaagcagtaagctgcatgcttgcttgttgtggtcattaaaaaccctgaaagcgaagccaacatattaatcagggcaaaatacaaatgtgtgatgcttgttagtagagtaacctcagaatcaaaatggaacggttttacagtgatatcattatatttcatttggcagaatcattacatcattggttacactgaaaatcatcacatgtaccaaaagctgactcacctagtttaggataacaggtctgcctgtttgaatatgaaaaataatacccatttaaaatttgccctactcaatttccttctcagtcacattttaacttttaaacagctaatcactcccatctacagattaaggtgtatatgccaccaaaaccttttgccaccttaaaaatttccttcaaagtttaaactaacctgcatttcttcaatcatgaattctgagtcctttgcttctttaaaacttgctccacacagtgtagtcaagccgactctccatacccaagcaagtcatccatggataaaaacgttaccaggagcagaaccattaagctggtccaggcaagttggactccaccatttcaacttccagctttctgtctaatgcctgtgtgccaatggcttgagttaggcttgctctttaggacttcagtagctattctcatccttccttggggacacaactgtccataaggtgctatccagagccacactgcatctgcacccagcaccatacctcacaggagtcgactcctacctcgaa

SEQ ID NO: 319915 - DNA, 832 bp, Homo Sapiens
  misc_feature (645)..(645): n is a, c, g, or t
  misc_feature (647)..(647): n is a, c, g, or t
  misc_feature (650)..(653): n is a, c, g, or t
  misc_feature (657)..(657): n is a, c, g, or t
  misc_feature (662)..(666): n is a, c, g, or t
  misc_feature (714)..(714): n is a, c, g, or t
  misc_feature (723)..(723): n is a, c, g, or t
  misc_feature (759)..(760): n is a, c, g, or t
tggctttttcgaggtaggagtcgactcctgtgaggtatggtgctgggtgcagatgcagtgtggctctggatagcaccttatggacagttgtgtccccaaggaaggatgagaatagctactgaagtcctaaagagcaagcctaactcaagccattggcacacaggcattagacagaaagctggaagttgaaatggtggagtccaacttgcctggaccagcttaatggttctgctcctggtaacgtttttatccatggatgacttgcttgggtaaggacatgaagacagttcctgtcataccttttaaaggtatggagagtcggcttgactacactgtgtggagcaagttttaaagaagcaaaggactcagaattcatgattgaagaaatgcaggcagacctgttatcctaaactagggtttttaatgaccacaacaagcaagcatgcagcttactgcttgaaagggtcttgcctcacccaagctagagtgcagtggcctttgaagcttactacagcctcaaacttctgggctcaagtgatcctcagcctcccagtggtctttgtagactgcctgatggagtctcatggcacaagaagattaaaacagtgtctccaattttaataaatttttgcaattcaaaaaaananaannnnaaanaaaannnnnaacatggtcggccgccctcggccctccagaagcctttctaagacattncggttgggncgcgccgggccccagtagggaaaggggaacatgggnncattagctggtttccctaaggagaatccctgggccatggaactagaggcgcttgggattccctcaccacaat

SEQ ID NO: 319916 - DNA, 610 bp, Homo Sapiens
ggattgcaaaaatttattaaaattggagacactgttttaatcttcttgtgccatgagactccatcaggcagtctacaaagaccactgggaggctgaggatcacttgagcccagaagtttgaggctgtagtaagcttcaaaggccactgcactctagcttgggtgaggcaagaccctttcaagcagtaagctgcatgcttgcttgttgtggtcattaaaaaccctgcatttcttcaatcatgaattctgagtcctttgcttctttaaaacttgctccacacagtgtagtcaagccgactctccatacctttaaaaggtatgacaggaactgtcttcatgtccttacccaagcaagtcatccatggataaaaacgttaccaggagcagaaccattaagctggtccaggcaagttggactccaccatttcaacttccagctttctgtctaatgcctgtgtgccaatggcttgagttaggcttgctctttaggacttcagtagctattctcatccttccttggggacacaactgtccataaggtgctatccagagccacactgcatctgcacccagcaccatacctcacaggagtcgactcctacctcgaaaag

SEQ ID NO: 319917 - DNA, 606 bp, Homo Sapiens
gggctttttttcgaggtaggagtcgactcctgtgaggtatggtgctgggtgcagatgcagtgtggctctggatagcaccttatggacagttgtgtccccaaggaaggatgagaatagctactgaagtcctaaagagcaagcctaactcaagccattggcacacaggcattagacagaaagctggaagttgaaatggtggagtccaacttgcctggaccagcttaatggttctgctcctggtaacgtttttatccatggatgacttgcttgggtatggagagtcggcttgactacactgtgtggagcaagttttaaagaagcaaaggactcagaattcatgattgaagaaatgcaggcagacctgttatcctaaactagggtttttaatgaccacaacaagcaagcatgcagcttactgcttgaaagggtcttgcctcacccaagctagagtgcagtggcctttgaagcttactacagcctcaaacttctgggctcaagtgatcctcagcctcccagtggtctttgtagactgcctgatggagtctcatggcacaagaagattaaaacagtgtctccaattttaataaatttttgcaatccaaaaaa

SEQ ID NO: 319918 - DNA, 946 bp, Homo Sapiens
cagaagagagaatcttagagtcagagggaggagtagaaggaaaaagatattaaaaaagctatgcttcaagaggacatttcatgctgtcaaaatgagactgtgaatcagaaagttctcggggaactgcaaggtgctctcaactaggggtcggttccttctcagtcatggcactgactcatctccacagggttctcacctgcgggaggaaaatggaggagttgcgcctgtcagaaactgtctgtgtgattcggggaagaatatggagtatcttagtagcattccattattacttgcccctaaatacatgatgccagccccctgcacagataacctcctgcttttatagcttgaaatatatttgatctaaaccacgatttgacatcttcagagagagagaagtagataaaagtctccattccaggttggcagtagggatcctgcagaagtggctgaaatgaaatttggcctacagagaataagttctacagtcattttgtttctgcctatttcctccagattcaaaggcagattgggtcatctcggaactcatgtctcctccaggacacagcaacaacacattttcaaggaacagcctcattatttgtaaaatctgtagagtataaaacataactgctccactgacaggaggttggatttggacttaatattgtattattctgtccttacattatggcttgataaacagaatgtgattccaattctgattccaaagtgagactctcccagatcatccatgtcttctcattctctttgtccctctagctctctctcccttctcatccccaccaagaagtggaacttgaacctgccattccctaaggtctgtgcagtgtctgtgatccagaggacaggactgtgaaagtgtccctaatatatcacaatgtatatctcttgttttctttttctctctacaacttgatccttc

SEQ ID NO: 319919 - DNA, 1034 bp, Homo Sapiens
  misc_feature (358)..(358): n is a, c, g, or t
gttttccaccatttggccccaccaaaagtgcttggcttatgttcccggaagctttaccagaattcaagtttaaggggcctttcccaaaaccccgggggccaacaggctgggggcctttcatcccccagttaagtttccctgatgagccagcagaggtcctatacttagggggtccctgtgaaaaaacacaaaactccccagttctcacatttggtcacactgaaggtttggccaaattatttccatacaagtagttctcaactggccaaacaggtggtttttctcctggaaaaagtgggatcaaagtgactttggtcctgattgttcttgcttccaagatgtgtaagaaccagatcancccaccccccaaccaaaaagcaaaacaaaatagatatagcctccagattaatagttgcagactgggattccaaatgtttaagaatcagtggggacattttccatgtcttccatggagtaattaaagtaaccaaaggcttaccccaaaatgggctcatgctcatatctcaggctgttcctccatcctgcagtttaattacaaggagcaagactgaatccatggacccttaaattctccttgtgcctctccaaagaaaagaaggaaaagaattaaagatggtgaccctgggggacgggctagtagcaggagtacagctgtgacttcacagctcgcaaggagtcgtcacactgtgcatctgaggtcaggccctcgggcagcagcgtctggcccaggatgctgtcacaggcaggaacaggttggcagaactctttcacaaaatcgtcttctgaagccagcagtaccgcgttccaggtggcagtgtccagctccccagccgtgcccccatactccttggggaggatgcttcttggaaggtttgtgtggagagagttcaagtcagacccatggaggaagaactaaaagggaatgaaatgaaaacacacatgtccttaggttaatcaggaatgcagaaatctcctccatggtacgtgctcaaataaatatctgttgaatgaag

SEQ ID NO: 319920 - DNA, 960 bp, Homo Sapiens
atttggcccagggatgctgtcccagggcaggaccaggttggcagacctctttcacaaaatggtcttttgaagccagcagtaccgcgttccaggtggcagtgtccagctccccagccgtgcccccatactcttggggaggatctttcttggaaggtttgtgtgagagagttcaagtcagacccatggaggaagaatctgtttgctattttctcctttagaaaatggttttatgatggcaaaaatgcctttaaatattcgaggttcattcaccacatggactggttttatccgaatgggggaaacccatcctgggttttcttcagacctgaatgagtttttttaaggtcaagtatatggctcggatgttttcagtaattggatagttgcttggtatccatctgtctgggcggatgcagacgacatggcagcccctggggtcagtgtggggcagcacggtgaggaacccggaagcaaggacatcttttaaggctgatggcttcaagttattgaagacttcgggccagcttcttctacagctgtggtagttgacgaggagctgcagggcccggtcgtaatcaaacttgcgggctcggaggaagcgcagcaggaaggcatcgtcgagggatgtgctcaggttggggtactccttccgcaccatgtcacgaagggcctgcacatctcgaagtctccattccggcttttcctgcagctcttcccgggctttggtgaccaggtcttctgtcagtgagcacacatagcccggaggctcaggtggtggtggcagctcattttcagagagtgaggccacagaagggctggttctcagagagtcactttcttcggacattagctaccaaggtcccggcccgactacgggcggagcgcgggtcaatcggcggcgggagcctcgtccggcagcgcacgcagaaccgacccctcgtgccgaattcgccacccagc

SEQ ID NO: 319921 - DNA, 837 bp, Homo Sapiens
  misc_feature (75)..(107): n is a, c, g, or t
  misc_feature (151)..(151): n is a, c, g, or t
  misc_feature (225)..(225): n is a, c, g, or t
accagccctatgaatgattaaaaatccaatatttttcttactaagtaggactaaccattctaatcccctactggnnnnnnnnnnnnnnnnnnnnnnnnnnnnnnnnnttttcagaaagtcagcagtggtaacaagtcagtaagtggaaganctggttcaaagtttaagaattcagtaagataaggtatataggagctgtcagatcttcttttgccccacgtatanaccatttctgacaagacagccctaaacacttagctgagagcttgactgcacaggaccacggctaagtgttggaaataaagactgagccggacttgacatacacaactccggacagatgggacccctggaatggggctgctccatcaggccacagcttccagaaagagagcatccatgatctctgaagagcctcttgggcagcttggcccctggttataactatgattcattcattaagaaatgacaaaacaccccacagatgtatttggaccaagtaagcacaataaaagagctaaatcacggcttcttctagggcaaaatattatctggggaaagattacttgcttctgataattaaatagctaagaggaaccgttagtgccttttctctgctcagaatatcagaacaggaacagactgtggatatcctccaattccctctgacaatgagggttagagagaggtgcctagcagttagaaagcagcaaagccagattgtcccaagtccctacgaagaaggaaaaaatatcatagaaaattaataagatgcaagaataagtgttacagactactagctcttttagaatttgtccagcaggtcttctagacttc

SEQ ID NO: 319922 - DNA, 1345 bp, Homo Sapiens
  misc_feature (13)..(13): n is a, c, g, or t
  misc_feature (27)..(27): n is a, c, g, or t
  misc_feature (33)..(33): n is a, c, g, or t
  misc_feature (46)..(46): n is a, c, g, or t
  misc_feature (149)..(149): n is a, c, g, or t
  misc_feature (577)..(592): n is a, c, g, or t
ccctgaaacgtgnatgaacccaatttncccaangccctcctcccancttccaaacaggaattccaggatccatcctcctccctgcctaactagggccccctgaaaccctaccccagaagcaagaaagtccaccaggaaggtaatccagnaactgaactgccaacaggccttccagtgaagaagaaagcttccaggcccagacctgaagctccttccctgccctgctttcccaaagacccagtcgcccctgtggagtgggagagaactgcccctacacggccttcctgagaggcctagcctgggagtgccgcttccagcagtttctccctgcaacaggtattcagagttggggcagaagtgggagggtgaaacatgagagagacaacgggtctgggtagcttctgatgcccagccaactagtaaactaattaaaacaatttaaactgttaagaaaatttttgtggttttattgtatcatgaggcattgaaacatctgaacaaatcaatgtctgggcggtgaggcagctgctttctccttcacttctttgggttactagagcaacttgtcagtagattnnnnnnnnnnnnnnnnggacaaccttttgcattacttaagtctttccaaggcatgcgctggtacaacacaaacttctcccgtcagatgcaactagtctagcatccaaacatcatgcacaacacctcagtggcagcagcgcactgcgcccactcccaccgcggccctgctcatttgtgcatgatatttggagcatctggaggagtgggaatagtattgggaagaggagggaggaggaaacagcgtgagtgcctagctgagaggaggtcagccaaagttgtgcagggcgagcctgaacatgtcattggtgcaaacccaagcatcgttgatgttctttaataggaacatctggtggaaccccatgatggggtcttcatccgccttaagctggcccacaaccatgctgatgatgcagctatctggagtgggctgatggtcctgcgcggtgatgctgtgctgaattttctggaacggaaggctagacaacttctccacaatggcagctttcccctggaactgttgtccttcccacgtaaggcatgacgcgtcaatgtaaattgcgcctagttgggttctatcattatcaaataactggtagtaatgttgaatgaagctggatccaatctgctcccaaattggcttgtctcccattctggagcgtcacccggcctcacggagacccgaggggctggcacgatggcggcagcggcagcggcaacccagcgcggtctgcggccgactgtcccttcccacctgccttccttcgcccgc

SEQ ID NO: 319923 - DNA, 910 bp, Homo Sapiens
  misc_feature (241)..(304): n is a, c, g, or t
actatacagctgtttgctccattatttgcataggaaatgaccacaatacaaaaataagagggaaaaagaagcaaaacagcaaccgatttctgcttttcatgtaggtgtgtttccacgtataaacattttgaagcctcttacaaaattatttacatcgtttgtcatctatttacatcttttaagagcaacttttctaacaaacaaaactataatttatcaagttatgaaaattgtcttctannnnnnnnnnnnnnnnnnnnnnnnnnnnnnnnnnnnnnnnnnnnnnnnnnnnnnnnnnnnnnnnttttcatttcaattaagaccccttttggcattttgcttatttattctgccctttggttaacagcatcagcatcacattactattttatattgcatatatgtagcatttgcttccttaagttttcaacatatcatttatatttaaaggcagacactgagtcagtattaatagattaactaaactgcactgtaatttagataaaattactgtgtctcactgtgtattacatgcaaaatccacataaattgtcatttaaccaacagtactgcacgagcgaacatctcgatatatgaaaactgcatcatcaattcaacgttttggtacttgaaactgcatcataaatgcaacattgtcatatgtgaaaacgacaccctaagtccttctttttaaaaatgacattgcgtttagcttattgtaagaggttgaacttttgtattttgtaactatctttaagctcttcagtttataattcatataaaatgccttttgtatttaaaataatcctattttaatcagtgcatgaaatttgcttttttaaagttcatttgaatgattattccttccctctaaagaaatgattttggtaatgttgagaggtaccttacc

SEQ ID NO: 319924 - DNA, 1316 bp, Homo Sapiens
  misc_feature (135)..(135): n is a, c, g, or t
  misc_feature (179)..(179): n is a, c, g, or t
  misc_feature (227)..(227): n is a, c, g, or t
  misc_feature (448)..(511): n is a, c, g, or t
  misc_feature (646)..(697): n is a, c, g, or t
  misc_feature (868)..(877): n is a, c, g, or t
  misc_feature (1162)..(1220): n is a, c, g, or t
ttggtgggtcgcgcggcatgtggggaaaattgaggggagtgcgtgaggtgtagcgagtgaaagaggtggcagcgcagagtacgaaatcagggtgatgtgtggaagtgtgtatcagacgaatatagtgcacgatanatggggtggaaacaagaagcagaatgcactgttgtagccagtgngagatgaattgagaggtggggggagtactaatcgcgagcgttgtgagnatgttataagtgcgtagggtagtggaatagacgggtgggataaaggcgggagagatgcacacatgtgcccgtatctaatgagaagcggtaaagggcaaggtaattgggagggaagattcgtggtgaggggtgaaatagagtagaaaagggagtggaagggaaggaaatagatagggcggaggagggtgtgcataggtaggcgaaagtgtgagaagaggtgnnnnnnnnnnnnnnnnnnnnnnnnnnnnnnnnnnnnnnnnnnnnnnnnnnnnnnnnnnnnnnnncggagaagtgtagacatagcagggcgatatagcgagagaaggcgcgaggggcggatcgaaaatgatgggataaggaggtaggtagggaaaggagtgtacagagcggcagcggaggatgtggcgaataagtggaannnnnnnnnnnnnnnnnnnnnnnnnnnnnnnnnnnnnnnnnnnnnnnnnnnntggagcgattgtcaacgggcgtcggatacggtggtgtcgggagatgttgacagttatggtcgggggatgggaggtaagaagtgtggtgtagagttaggagcagggtcggttcggggcggtttggttctgaaatagtaggggtgggttctggtaggcactttttattttccnnnnnnnnnnttgtcgttaatatataaacatctcattctctcaaaaaattctacaactatacagctgtttgctccattatttgcataggaaatgaccacaatacaaaaataagagggaaaaagaagcaaaacagcaaccgatttctgcttttcatgtaggtgtgtttccacgtataaacattttgaagcctcttacaaaattatttacatcgtttgtcatctatttacatcttttaagagcaacttttctaacaaacaaaactataatttatcaagttatgaaaattgtcttctnnnnnnnnnnnnnnnnnnnnnnnnnnnnnnnnnnnnnnnnnnnnnnnnnnnnnnnnnnnattaaattttcatttcaattaagaccccttttggcattttgcttatttattctgccctttggttaacagcatcagcatcacattactattttatat

SEQ ID NO: 319925 - DNA, 1245 bp, Homo Sapiens
  misc_feature (186)..(237): n is a, c, g, or t
  misc_feature (342)..(355): n is a, c, g, or t
  misc_feature (365)..(485): n is a, c, g, or t
  misc_feature (786)..(786): n is a, c, g, or t
aaggggccaaggggtggatcccccggggaattcaggttccacaacccctttgggaggggttcccattgggcggaaagtttaataaattccacccgttcccccaaaaattcccgggcggggggtaatttaaaattgagctcccttgggcccccgtggaaagatcccaaaaagcccccagaacccccnnnnnnnnnnnnnnnnnnnnnnnnnnnnnnnnnnnnnnnnnnnnnnnnnnnnaatcccaccccttttcttgtcccggttttccttggaaaaaattttgcccctttttcttttccttttggggcccggcccccaaaaaaaggtttaaaaaattttttnnnnnnnnnnnnnncccccaaggnnnnnnnnnnnnnnnnnnnnnnnnnnnnnnnnnnnnnnnnnnnnnnnnnnnnnnnnnnnnnnnnnnnnnnnnnnnnnnnnnnnnnnnnnnnnnnnnnnnnnnnnnnnnnnnnnnnnnnnnncactgtaaaactgtttgttttttttaatgacaggtcaaatatcctgaaacatacatgtattttgatagtcttctaatcccacttgagttcaaatattaaagaaacacacacaagctaagagaattcaatattgttccaaggcacttactgaatctctgactagatgaaaacaggaacaattaggatgaacaattagactgtatataatataaaaataactttttgcttacaatttacaaaattattattacaatctttgatctctggataacctggcaaagctgggctggcatggaatccnggcaaggtttaaaattcagaaactattttcctaaaactccagggcaaataatttacaaataaagtacacaaagatttagaccatgcagaaatttcttacatcttctgttaataatatttcaattgcaactttatcaaattatatacctacttgccctgtacatatacaaaataatgcatacatgataaaacagaaaaagagtagtccttaaactcaatatatcataaaggtattactatattaacatgtctacaagcagcgtgtaacagggttaagagacattaaggcaataatacttgaagtttcaaaataaaccatatgtaatactttttcctaagtgtagtataaggcaggtagatggtcccagcaaaaaatattaaggtaacaatctacactgctgttagtcccacatattaaagatggaatactataaatctggctttcagtggcacctgaatt

SEQ ID NO: 319926 - DNA, 513 bp, Homo Sapiens
gcagccataaaattctgtttaagactgtaacatggaaaaaatgtttatacgttaagtacaaaagggacataaaattgtatatacagaataacgactatgtaaacacaccaaaaatctatgcacagaaatgtctagggggaacatttaacaccaaaagattaacagtggtagcatttgggtggcaaacttgattctttctaaaattcccatattttccttaataagcagtaattataattacaacgggaaataatttctttaagtacccagtgcagtgtcactgtcaaataaacatcagtggctttggccccaattcttaaggtggcaaacgccgctgccccactccccacccatccccaatagggcttgagcacctgtagccctgctgagcacgtctgtgcagccccagccctcagcatctcttccactcgcttccagctatatcttttccctttcctcctgaattaagaaggaaagggaaaagatatagctggaagcgatctagaactagtc

SEQ ID NO: 319927 - DNA, 569 bp, Homo Sapiens
aatgctaatgagcgagttgccaggcgagacaggaacttctttccccttctctgtgtcaggatcgcagaaagtatgtcccttctctcaccatgagctggctctccagttcccagggagtggtactaacagcctaccaccccagcggcaaggaccaggccgtcgggaacagccatgcaaaggcaggggaggaagccacctcgagtcgcagatatggccagtacactatgaaccaggaaagcaccaccatcaaagttatggagaagcctccatttgatcgatcaatttcccaggattctttggatgaactatctatggaagactattggatagaactagaaaacatcaagaaatctagtgaaaacagccaagaagatcaagaggtggttgttgtcaaagagcctgatgagggagaattggaagaagagtggcttaaagaggccggtttatccaatctcttcggagagtctgctggagatccacaggaaagcattgtgtttttatcaacattgacgcggacccaggcagcagcagttcagaagcgagtagagacggtctcccagaccttgagg

SEQ ID NO: 319928 - DNA, 1864 bp, Homo Sapiens
  misc_feature (30)..(30): n is a, c, g, or t
acatattttttgttttgggggctcttgggngtttcccagagaaacgaatgcattttattttaggtaacaaaagtagagtcaagtattttttcaaagttcatatacaggcacagtctcagtgaactggcgtcagggcctcgtacagtctctgtgcagccagctccaccatttctcggagggattcatcgtcttcacttccctcttcacattctacagtccgtgtctccaagttaaggttggcagttttcccgtccactgtgacgctaagaatagagtcatcctttacacttacacagtcttctccaaatatgtcctggagcatgatctccaacctcttgctgtaaacgtgcatttctaattttttagaaaccttctgtactgcaccttttcttattttgggatttgactgaacttccaatatcacagttgttactgtatctgcatacatatcattagaagggtttgccagccattctaataccaccatgcctggttcttgtattacagtaatatttttgaacactttcagagcaggtttttcttgaatttctaattcttccacatcacctgtcaatttctgcagctggtaacagagcaaattaaagggaccagtatatggaatggcttgggtctgcttcaccgtgctcatggccaggtcagtataattggacaggtcgcaaggagaaagtatgtgataattaaagtttcttttaacaagtattcctgagacccgctggccttgttctggttttttgtctgctaaaaatccccataaccttggctagtttttctcctctgaagtttaaggtcactgcttctgtattccgaggattatgaacctctatgtgaacttcatcgttatcttcatattctcgaatcagtgctgctttcaatctggccatttcattctgttctccgtggactaaaatcacatgaggcggtttcaaagcacgaataaattcactggtttgctggtaatccgtgtgagctgagaaagaaatgtaatcaacagacattttcagtggtaacttctgtccagacatagtagtgatttcttcaggttcagacatgatgtgcttggcaagtgtcccttctacacagtatcccgctataatgacaccattcctcttatcagtacaccagctttcaaataattctctggataagccactttgcatcatgcctggggaggccattacaacactgggaccaatgtcatcaaaatgatccatgctcttgaggttactaatgtgtttgaaaacaaagggattattgatgttgatctgtttgcggattttgtcattcatggcatttacatatgtctggtacactgccatacacttcttggccaaagatgatgcatagtatattggaatgtcatgtagttctgggtgattctgccagtactcatctagaatcaagagcagctcctgagcccttccaagagcaaagacaggaatgagacccctgcctcctctgtttacaatatcgtggacagtgttacagaatcttgcttctcgctcttcacgtttctcatggatatgggtcccataagtagattcaatgataagaatatcaggcttaatattaggaatttcagctgccattaagtgcctatcttcttgtcttgagaaatcaccagtgtacaaaagcttcacgcctgcgatctcaatcatgaacatggcggctcctaggacgtgacctgcatggtaacaccaaaacttgattcccgcaacttccttaacttcatgaaagttgatagtttcaattttgtccatgctttcttccaaatctgtctcggtatacagcatgtcgtctgctgatatgttactaactttgacataatcagaaagaagccatctaa

SEQ ID NO: 319929 - DNA, 485 bp, Homo Sapiens
  misc_feature (432)..(432): n is a, c, g, or t
  misc_feature (460)..(460): n is a, c, g, or t
  misc_feature (467)..(467): n is a, c, g, or t
caaggttatgggatttttagcagacaaaaaaccagaacaaggccagcgggtctcaggaatacttgttaaaagaaactttaattatcacatactttctccttgcgacctgtccaattatactgacctggccatgagcacggtgaagcagacccaagccattccatatactggtccctttaatttgctctgttaccagctgcagaaattgacaggtgatgtggaagaattagaaattcaagaaaaacctgctctgaaagtgttcaaaaatattactgtaatacaagaaccagggcatggtgggtattaggaatgggctgggcaaacccttctaatgatatgtatggcaggatacagttaacaactgtggttattgggaagtttcagttcaaatccccaaattaaggaaaaggtggcagttacaggagggttttntaaaaaatttggaattgcacgttttacnggcaggnggtttgggggtcctggtt

SEQ ID NO: 319930 - DNA, 680 bp, Homo Sapiens
  misc_feature (41)..(41): n is a, c, g, or t
caacgtgttaccctcaacaatctttctgccttggccctacncttgcctgccactgtaggaaagcccctatctggcccatttcctgtgaaaacttgcccccttcctccaagcactccgtaactgttggtgttggccccatcaggcaataaggggatgcccgaggtctgtgcttccaaggataatagaaacacccatgtgtgtggtaagataaaggtaaggacactaaagaacagagtgtgagaggtgagttctaaataacaacagatgaagaaaggattggatccaccagcttctctgccagttgtgattttgatacaagttgtgttgctttgagctcctagcagagagctaacactacctgctgtgtattttggtcctctgtcctatactcctccaagacatttgcaaagcaccacttagatgggggactgggccatagtccatccctaagaaactgagagctcctgaatcccggatctctgtggcaagattcagggatgactgggtttccttacagaagaggagctcagctaagcaaagcctggaggacatattccataggccacaggcccttaggggcaggcccagagccatcctgagggagcaataccatctggattggtgatcttgccatcaaaaggcttcctgagcaggttcttggtgccccttggcactggccc

SEQ ID NO: 319931 - DNA, 585 bp, Homo Sapiens
  misc_feature (48)..(48): n is a, c, g, or t
  misc_feature (61)..(61): n is a, c, g, or t
  misc_feature (154)..(155): n is a, c, g, or t
gaacaatccccacaggtacctttcaaatcatcttttctctcccatttnaatccccctaacnaacagcctcaactgcagcagctcttccccaggaaatgggcttggagaagacctccctttctaaccagaggtcatagttcatctgaaagtcctnnagggaggtccacccgttggcccaggacactctgcaggcagttgtccactggcaggaagtcagggttgctgtgggcccggtcatagcgccgggcgttgaagcgttcaatgttggcacgaagggcacactcctctgcctggaagtcccaaggctgggcatcaagatcattgccgtatgcccagtcgtcgttcagccgatgccgcaccttctggtagatggcagacatggtcttcatgttgctctttcgccactgccgccccaagtatttggtgtgtaccttgagcagattcagcacatagagctgcatcatggcttgtttcacctttagggcccgattcaagatgggggatgacttgaacaccaccagcatcattgtccttgaatgcttccactttgtcagcttgttcaagatccgaagcagattgatacaa

SEQ ID NO: 319932 - DNA, 789 bp, Homo Sapiens
  misc_feature (112)..(124): n is a, c, g, or t
  misc_feature (332)..(356): n is a, c, g, or t
gccgaattaagttcttttaatagattgcatatatagatgtttagccatactcttagatcaactctttaagagcagaactttatatccaatttacatgctctagataccaccnnnnnnnnnnnnnacagtaaggtctggtattcaaatacccacttgtacactgacagctttaagaaaaacaggacacagagggagttgtcatttttagcagcaatgaaataccactaacccctttttacataccgaattcaagtcactatcagaggtgagtgcaccacaaagtcaccaggtacaaaattgctagttcatttttaaattaataacttgaaatnnnnnnnnnnnnnnnnnnnnnnnnntctttttataaacagcaaacattttgctattttatacataggctagcaggcttgtttcaatatgaaagtgctaattcatttacagatttttataatcagttatgtagtgctacaataaatgtccaataatctacataggaacaatgatgaaaatgatgaagactgaataaggctatcagatgaccttatcttatttacatataaagaatagatacccaatggtgaggaagagacagaaattggacaaatactcataggtgtaaaaattacatctacctttgagttttatactgtaaatgagacattttaaatagtcctgtagcccatgcctattttttcctcagaaaaagaaaagctgccttcatgacatcccctcgtttcagatttccacagtgtcactttgaagcttcagagtcaggatcttactttcttc

SEQ ID NO: 319933 - DNA, 832 bp, Homo Sapiens
  misc_feature (12)..(12): n is a, c, g, or t
attcggcacagngaaagccatcttccaggagccctgttttttggagctgaactgcacagattatagctgctattgtacttaaataagggagaggaaaagaaggttctcaggcacagactttctatttttctcaagccaaaccagtttaaaatgtctagcagaatgaactgtatttccatttcttcatgtctacctgccttccccccacaccctaaagttgtacttgtttctagcaaactagaaggaaaagataggaaagcctggcactactaacctcacctctcatacacctctttggaaggccccagctcttttgttcaggccttctcttctcccctagacttcacttcagcttggtatccatcattcttgagcattcttcagtagattccatctagggttcagattccagactctcagctgaagacagggagccaatttcccccaggtccctgcaggtaatccagggaccccatagggagaacaggctgactggggcattaagaatgtttgtacctctctgcttccctggcagcctggggaagggtgcagggctcagtgcgctaaaccatggtaaacatcttcaatagaactaccctagaatttagtgagtgtgagactgagatattgctcagaataaatttattccatagccatttaagattgcatgttctggaccaaccttgtccagtatgttttctgtttgagctttttcattcttttgttaagccaacaagttgagaatttggccctgctgggatccatgtagtgggcactagctgctctttggccaaagccttcataaatgattcagtctctcattatctgtcct

SEQ ID NO: 319934 - DNA, 1093 bp, Homo Sapiens
tagcgaggcctgggtggcgaattcggcacgaggcaggcacccgccaccacgcccaggaaactccaaactgtccaaggagatagttctgttgtgattacttcattgagaaatttaacttatgagccgttgaaaggaatgcaagttgctgcaaaatcagaatgaagagtgcaaaacgactaagctacaatgttttgtcattattcactctgatgtgaaaaaggcagtgaatttaatagaaaataacttcgtagagcaaaatctcaggtgtgtttttttagtgccgcagtcttggatgatgggttcctagaagctctcaacatctcttcttaattggagaaagtgttaagccccaaagtagctggagcagtacatcttcaatttttgacaagaaagcaggaacttgattactttgagtgctattcattagtttctgctttcattgagaatgcaacaaaagccaactaggctgctgctaactccttgctggacttcttctgccactgtcacaggaactgtaatctcactggacaattaactagggagtctttcatcttgagtgactgctgcacaaatgatcttcaaagcattttagccaccagaggaattctcttgaaatacccaaaatccatcagtatcttgaatcatgctggattttgaagaattcttaacaagccatgtaaagggggctctctggccttgaaatagtgatgttttttatacagaaaggagaatgcagaatggtcagactaccatgcactgttaaatttgatttcaagaaattacaggaaaaactttccaaagttccatctcacagaaattatttttacaaagaattccaagataagtttagttttatggaagacttttatgtggtttttactcactcttcatctcagacatcaacagatgattacatcacttatttagctagtaaatttattaatataaaaactcagagacattccaatatccacattgcttacaccattagtcatagattcagtgtcagctatgacaattgaaaataagctgttttgtgatttaaaggtttaaatttctctaaccaaactgcttgatccagatgcaggactgc

SEQ ID NO: 319935 - DNA, 877 bp, Homo Sapiens
  misc_feature (319)..(473): n is a, c, g, or t
cctgggtcagatttatttaagataaaaatcatgcagactcatcattcatatcataggtgaaaaatgtaaaaaccaaatggtttccactaaagccaccaagatcttttagaaatgtttgcacctttggtggtggcacaggaaaagagaagaattcagctggagtgaattctagaagtagatatcagaaatggggcatgaagaacaggggaactgggtggcatcagactcctaaagaagtgagttaattttccttcccttccattcagattcatgccacagctccatatcttgagtatgtgtaagaggtgagttccttctnnnnnnnnnnnnnnnnnnnnnnnnnnnnnnnnnnnnnnnnnnnnnnnnnnnnnnnnnnnnnnnnnnnnnnnnnnnnnnnnnnnnnnnnnnnnnnnnnnnnnnnnnnnnnnnnnnnnnnnnnnnnnnnnnnnnnnnnnnnnnnnnnnnnnnnnnnntatatataaaaagtaaaactaaagaacttcttgcctaaacctgaattaccgcaatttgctgagtgactttgagaaaaatcagactgtttagttcagtcgggatgaaaagcttgcgattgcttcccacaagaatgggcaatagtgacggctgcaaggtacttttatttgttcatgaaagaacgacaatttttcaaaatgtaattaaacataatagaatgttttaaactactgggcactgaaactggaagaaaaaggaggctttattgaacattcccctttttcagttggttcaaagttcagcactgtggttatcattggtgatgccagaaaccattagtagacttagacaattgctatggcagtttctaaaccagagctttttctatacactattttgcaactgg

SEQ ID NO: 319936 - DNA, 1317 bp, Homo Sapiens
  misc_feature (28)..(28): n is a, c, g, or t
  misc_feature (59)..(59): n is a, c, g, or t
aatagggagaaggtgctttattctgggntctgcgtaccaggctggctggggtgctggantgggaaggggaatccaaggagcaaaccaagaaggtcctagggccagcctaggcctccacggcccggccgttgatgacgcggaatgtggcggatgacgtcctggatggcttcagatgttgtgccctggcccccgatgtccggagtgtgcatattctcattgtccatggatgccaggacagccttacggatggaggtggcataggagtgcagcttgaggtggtccagcatcatgcagctggccagcagggtggccgtggggttggcgatgttcttattggcgatactcttgccggtgttcctcgtagctgtttcaaacaccgcgtacacatggccatagtttgccccagccacaaggcctgggcccccgaccagtcccgcgcagacattgttgacgatgttgccatagagattgggcatcaccatgacatcaaactgctggggccgggacaccagctgcatggtggtgttatccacaatcatgttctcgaaggtgatctgagggtagcgggctgccacctccctgcagcactggaggaaaagcccatcgcccagtttcatgatgttggccttgtgcacggccgtcactttcttgcgcccgctctcctgcgccagcttgaaggcatactcggcaatgcgcagggactttggccttggtgatgatcttcaggctctccaccactcccgccacactctcatgctccaggctgctgtactcgccctctgtgttctcccggacaatgaggatgtctatgtccttgtgccgggtcaccacgcctggaaggctcttacagtggatgacgttggcatagaggtccaggctggtgcgaaggatgttgtttcgagatttgtgcgacggtggcaggttatggttggtttcgatgttgcccttcagggccacgcggttccggcggatggccatgatggcattgcgaatgtcctcttcatcagcattggaactcacgtgcacctcttcaaagtccactggtacacatgcgtgcctgaagacggacttgacatgcagcatgagctctggcccgatgccatcccctgggatcatggtcaccgtgtgccgcccgccatacttagcggacggaggaattgtttgttctgaaaagatgttcctcgaggggacctcgtgggcgcctagaacctcccagggacggcagagaagggctggcccgagcaccgccttctcggcgctgccggcgacggtcgctaccttcagcgccatgacggaaagtgagagcctccgcacgtc

SEQ ID NO: 319937 - DNA, 348 bp, Homo Sapiens
  misc_feature (269)..(269): n is a, c, g, or t
agggagaaggtgctttattctgggatctgcgtaccaggctggctggggtgctggagtgggaaggggaatccaaggagcaaaccaagaaggtcctagggccagcctaggcctccacggcccggccttgaatgacgcggatgtggcggatgacgtcctggatggcttcagatgttgtgccctggcccccgatgtccggagtgtgcatctgtaggacacaggcaggctcggcacacaccagggccattctcattgtccatggatgccagggncagccttacggatgggaggtggcataggagttcagcttgaggtggtcccagcatcatgcagctggccagcagggtggcc

SEQ ID NO: 319938 - DNA, 710 bp, Homo Sapiens
gtcagcaggccattctctcttcccaagctcataaatttacagatacaacaaacagatgtctaaatccagaccacatcttgtgccactgtaaaagagaaggatccacacagcactgtcagcccacagactctaacaattggaacagactattgttggacatatgtgaatttgttggcatagtatagtttccccgatgtatgtgtgacttttgaaaacaatctgtttttctcaggatatcttgaattgatcacttcattgccacggtatatattctataggtgtgataggatttactgtaaagtttatttgtaaaagatgtacacagtagaaataaaacgtgatggaagaacttgagtacttcagaagtggaaacaaatttgatatttatttttataatgatataaagcttctagtaatttatgcaagttgtattgcaatggaatctaaactttttgtaaataaattctgcctggtttttatttgaacattgctggttatacaatctttgttggttgtttaacacgaattctttactaatttatatcttaaattgtaaataaaaacagactagtctacaataatatgatgtttggggcttatttttcctaaaagaatgatttggggtagagcgctagtgaataacctccaggtgatctgacctcacctttttaatgaaaacctgtgtgaaataaactctcctttctctcctg

SEQ ID NO: 319939 - DNA, 1113 bp, Homo Sapiens
ttacatataaattttaagttttatttttagaagttacacatattttaaaagaacaatttctttttattctttcattctagtaatattatcactacttagaacattaaaggaagatattttcacttatgatagttgaaatcaaaactttgtgaggccaaagcaatgaataatcttcaattcaacaagagatgctgggatacctgaggattatgtttcccgttctgtatgaaagagcacaacattcaaaactacaacaaaattcagacatgagttccttagctaatgaaagtttatgcatttggtatactctacttcatttttaatttggaaaagcacatgttaaaaataattttaatacaaaggcattataagtgtaaatttaaaaatcagactttgtatgatcagtgggaaatgtttaaaatattcagcacacactttcctcctcctggaaattctgattagaaagcccaagtttttgaacttctcatttggcaaacctcaatttaagactaaagtatcttaaacttcttcctccaccaaaaacacaaacaaagtccagttttcctcgataactagagaacagtccctgctcttaatatactgccctttttctgaaaatagttcaatttcatatttattctaatatttattgctactaatgtaaggaatgcttcttgatatccaatacattcttaaaaagtttagcatgaatcctagtatcaaacaaataatacagggagcaataaaattcatgttttctaaaataaaaagttcataaatatcattttttacaataactatatttggtcattctaagcagcacactttttaacacccctcaattaggatgagtcttagaattgatgtcagctcaccatcaactgcatggcctcaggctcctggagccatgagctactctcctgctccatgaggatccaccctccactcccagttttcccagcccttctcccagcctggttctgcacagtccctctagcctgtgtcctctcagctgaggacaagcctgaacagtccctggactgcaaactgagggcttttaaatcaggcaagcatgatggaggtcagagtgaaaaactgcgtcattatccagtt

SEQ ID NO: 319940 - DNA, 888 bp, Homo Sapiens
ttaaaatatatttgctttattatgtacacactatatttacatcacccaccctgaaaacagcaggttctggcttttccgtgaacccccagatgaatataaattggagcctctgagaacagttccttccccagagcggggagtgtgcacgtgtgtgtgtaaccttctgattccatgggacctggccagctcctctggagccacacagcacctccttgccttacaccctggctccagcttcactggtccgggggacgcctcagcctggggcagctgtgatgtaaaccagtcactccacctccatcttcctcttctgcaaagaatcgaggaagtcttgccactctgctgggtaaaagcgtttatagacgttgatcttactccgaatctgttttggggtatcttgatagtaattcttctcatcacgggccatggccttatagtcctccccgtggttctctaccatgtagcgtacatagtcaatgaggtcccgagacagagtatttcctttcttttctggaaggctggcttctgcctccaggtcattcagcacatagggcttccgtacaagctctttaggcctctcctctatgtccacctccatggccttcacctttctcttacggaggggcaccgccctgttggggtccacagccaaccccatctcggccaggttctgccgtaccgatttagcgtggtcccaggcatgtcggatgtgggagcattcgatccgcggcgctgccttccgtcgagcattccggttcagacgctttcggttgacactgtaaccaaacttctgcctccgggttttgcccttggccttgggcatcgcgctgaccaccgcaccagcagctcaaacacgctgcctctgtctctcagacctcgtgtaacccc

SEQ ID NO: 319941 - DNA, 740 bp, Homo Sapiens
  misc_feature (59)..(59): n is a, c, g, or t
cagcaggttctggttttcccgtgaacccccagatgaatataaattggagcctctgagancagtcccttccccagagcggggagtgtgcacatgtgtgtgtaacttcctgattccatgggacctggccagctcttctggagccacacagcacctccttgccttacaccctggctccagcttcactggtccgggggacgcctcagcctggggcagctgtgatgtaaaccagtcactccacctccatcttcctcttctgcaaagaatcgaggaagtcttgccactctgcttatagtcctccccgtggttctctaccatgtagcgtacatagtcaatgaggtcccgagacagagtatttcctttcttttctggaaggctggcttctgcctccaggtcattcagcacatagggcttccgtacaagctctttaggcctctcctctatgtccacctccatggccttcacctttctcttacggaggggcaccgccctgttggggtccacagccaaccccatctcggccaggttctgccgtaccgatttagcgtggtcccaggcatgtcggatgtgggagcattcgatccgcggcgctgccttccgtcgagcattccggttcagacgctttcggttgacactgtaaccaaacttctgcctccgggttttgcccttggccttgggcatcgcgctgaccaccgcaccagcagctcaaacacgctgcctctgtctctcagacctcgtgtccc

SEQ ID NO: 319942 - DNA, 709 bp, Homo Sapiens
  misc_feature (17)..(17): n is a, c, g, or t
  misc_feature (125)..(125): n is a, c, g, or t
gccccgggtccccgtancccatgtccctctctttaacagggcctttcaagtgaccctcctagaatggaactccacagtaacaggttgtgaatgtgaaaggccatgtaattccttttggaaaatgngcctttgagaaaagtaccccagggacctgaaagacccatgagattgtggaaggcaccctggacttagtcctaggagaagaccagcggctttgctagctgctcatcacagatgtagcctagttggtctgtattatccttggatgacaacggtgtcatgtgacactatctagggtactgtggctcttgtgcctgagtggaccttgaggctggggaggccagactgaggggtcattcatggaagggcaagatgtgtgaactctaaaggggatgttagcactaaagacttcccagccctggtccttggaggtactatacttgatactgtgccaagtttagcagtagcctgtaccatggatcccatcaggtgaccagattcttgcccaaagcaaagttgagagaactgaccaagttctcttcagcacttagcacctaacccagacattgcccttagggagtggggaaagtttcctgccagcccagcagcaaaagggctcagtgggagttggagtggtccaagagaaactctggcacaagtagttgagggctgtgctcttgctgcgagccttgctagtcgcagggttggg

SEQ ID NO: 319943 - DNA, 922 bp, Homo Sapiens
  misc_feature (234)..(245): n is a, c, g, or t
  misc_feature (379)..(379): n is a, c, g, or t
ctcaaaagccaggatttcctggggggccggggaagggttccccttcccaagggcccagggggtccccgggggggatttccaggaggcattcccagcgtttttggcggcggaaagggccattgaaaccctgcccatccacttttcaccagcccgtcccccggcccaaaggaggggtctgggaggaagggaagggggccccttgcgagggctctgggtgctgggggatccccgggnnnnnnnnnnnnggaggaagctgaaagccccttgctcagccggctgccctgctgggtgaacctcggccccccaccgccgggaggagctgcaccctgtgtggtctgaggcagccctgcactgggcagcggccccggccccgcgctgnaacccactaggagagcagctgcagcacctgtcggatgcgctgggccctccccggcagggggggatcagagccctcctcatccagctcccgcatcagggcttccgccttctgcaccgtcagctctcgggcccggccctgcagcccctccaggtaggccagcagggtggagaagtgctcatcgggaaccttgtcactgtcatacatgtgcagcaggagccacgtctgcctcgtcttctgaaacctccagttcttgtgcttttgggcccatctgcagaggtagtccagggccagttcggcccccgagcgcctggcaggcgggtgctgggccacaaggcctgcctcccgcagacgctgcctctcctctttcttccgttcctttttcagcttcctttccaggaccctctgctcctctggggacagctctggctctgcgtccagcccgggcctgagcacagcttcgccctctgacccggctgtcaggtcccgcgggcacggacggcgccggggcagggatgcgcccgcagtgcgcaccgcccggcccgc

SEQ ID NO: 319944 - DNA, 1357 bp, Homo Sapiens
  misc_feature (505)..(505): n is a, c, g, or t
catgcccgtgtgtctccgggagcgaagcgtggctgtttctgggcgctcttttttctcgctgctgtctgtgttccgttgttcttgtttgttgtggtttgtttcccggccagaccccgctctcttgtcggtttatttcaaatcacccacagagcgttttgcacaggtacggtgatccgactccacaagtcccaccagggctccccataaccgcgatgacgctgtgtggggtcaaaggaaaacaggccacaagccaggcccctcgatggacgcaggcaggggaccaggaatcggccacgcagggggatcggaatcagccggaaggtcaggtttgcactgcgggaggagccagcatgccccaatctctaaaatattcccggtagaaaaatagacatttccctccaaagcagattcctggggctggagggtccctccaagccaggggtccgggtgattccagagcattccacgttctgcgctgaaggcactgaacctgccatcacttgtncaccgcggtcaaccggccaaggagggtcttggaggagggaaaggggcccttgcgaggctcttggtgcttggtgatcccggcccccaccaccggaggagcttgaaagcccttgctcagccgctgccctgctggtgaacccggcccccaccgccggaggagctgcaccctgtgtggtctgaggcagccctgcactgggcagcggccccgccccgcgctgaacccactaggagagcagctgcagcacctgtcggatgcgctgggccctccccggcagggggggatcagagccctcctcatccagctcccgcatcagggcttccgccttctgcaccgtcagctctcgggcccggccctgcagcccctccaggtaggccagcagggtggagaagtgctcatcgggaaccttgtcactgtcatacatgtgcagcaggagccacgtctgcctcgtcttctgaaacctccagttcttgtgcttttgggcccatctgcagaggtagtccagggccagttcggcccccgagcgcctggcaggcgggtgctgggccacaaggcctgcctcccgcagacgctgcctctcctctttcttccgttcctttttcagcttcctttccaggaccctctgctcctctggggacagctctggctctgcgtccagcccgggcctgagcacagcttcgcccttggagccggctccttcgccacttggtgcagcctcagggcccagcagtggcccctctgctgacgccttcttcagctttttgttctttttctctgtcacttcaggaacttttctcttctgttttgccatcctgcgcccacctgcgcccaccctcgtgccggaatcgccaccca

SEQ ID NO: 319945 - DNA, 2612 bp, Homo Sapiens
  misc_feature (182)..(182): n is a, c, g, or t
  misc_feature (208)..(208): n is a, c, g, or t
  misc_feature (288)..(288): n is a, c, g, or t
  misc_feature (318)..(318): n is a, c, g, or t
  misc_feature (346)..(346): n is a, c, g, or t
  misc_feature (431)..(431): n is a, c, g, or t
  misc_feature (496)..(497): n is a, c, g, or t
  misc_feature (533)..(535): n is a, c, g, or t
  misc_feature (577)..(577): n is a, c, g, or t
  misc_feature (602)..(603): n is a, c, g, or t
  misc_feature (660)..(660): n is a, c, g, or t
  misc_feature (678)..(678): n is a, c, g, or t
  misc_feature (695)..(793): n is a, c, g, or t
  misc_feature (796)..(796): n is a, c, g, or t
  misc_feature (803)..(803): n is a, c, g, or t
  misc_feature (805)..(808): n is a, c, g, or t
  misc_feature (810)..(812): n is a, c, g, or t
  misc_feature (816)..(836): n is a, c, g, or t
  misc_feature (839)..(841): n is a, c, g, or t
  misc_feature (844)..(853): n is a, c, g, or t
  misc_feature (856)..(900): n is a, c, g, or t
  misc_feature (1434)..(1690): n is a, c, g, or t
  misc_feature (1716)..(1728): n is a, c, g, or t
  misc_feature (2070)..(2078): n is a, c, g, or t
  misc_feature (2102)..(2102): n is a, c, g, or t
agtcgcagtcgctccgctacccatcgaacgcagaatatttcagtatctcgacgtggggcatgttgttcagtagccaaaatcctcactatgtgacccgactactcttgtctatgttgtgagacaataattgttttatgatgtcacctcctccctctaccgacaccaaaccacatgtgtatggnggcgcgcgggtgtgtgtgttgtgagnactaccaatagggtggtgcgaccacaagactagcggtgcgcggcggagccgcatttggggatctatcagcttcatcgggntccgccggcctggtactctcttggcatgtncggaacggtgtattccgattcgggaagncgtgcaccggcgctgggcggtttgacgagaaacgtgacgctcgccatgacgtccgtctgtcgcgactgcttttgcaatcaacgangcgggggcgccggggaactggcggaataaaagcgggcgcggctccaagggcggtcctcctctcanntacgggcctccccgttaatggtgcttttatacacannntctccaaggaggggccgggttgggtagactggtttgctggtngccccccacgagcggtctcctcttnnttgctttgtgggttttccgcgtgcgcctggcggggcggcgcgcagttcccttggggngcttccgtgtggtgtgcnccctatttgagttgttnnnnnnnnnnnnnnnnnnnnnnnnnnnnnnnnnnnnnnnnnnnnnnnnnnnnnnnnnnnnnnnnnnnnnnnnnnnnnnnnnnnnnnnnnnnnnnnnnnnttngggtttntnnnntnnntttnnnnnnnnnnnnnnnnnnnnnttnnnttnnnnnnnnnnttnnnnnnnnnnnnnnnnnnnnnnnnnnnnnnnnnnnnnnnnnnnnnatcattcaacattttatatcagaaaagatcagctttccaacatttattccatggaatgagtgcacagcattttcatgaactacctcagggctacatcagtacaaaatagtttaaattagtaaaataaagtagtttcaaagggaaatcattgacgacttcaggataagtgccaccaccatttgggaacagaggatagaaggtagccatgtggttattccatgatgcaggaatcaggtcggcaggtggactgtcattgctgtcttgcggcagctggcctctgccttcagggtaccaccgtctccaggacacaaatgggcagcagaaaaatgtcaccttgttgatactcagcagctcatctattgggacaaaacttccatctcggccaagggaaatactctgttgagtgaccagcggggcccagcccccagccctatttatctcatcaatatggttcagggaagataaaaaagagtgttctatgggatagaaaggtgggaataagaaaaaactaagtggctgggcatggtgagtcannnnnnnnnnnnnnnnnnnnnnnnnnnnnnnnnnnnnnnnnnnnnnnnnnnnnnnnnnnnnnnnnnnnnnnnnnnnnnnnnnnnnnnnnnnnnnnnnnnnnnnnnnnnnnnnnnnnnnnnnnnnnnnnnnnnnnnnnnnnnnnnnnnnnnnnnnnnnnnnnnnnnnnnnnnnnnnnnnnnnnnnnnnnnnnnnnnnnnnnnnnnnnnnnnnnnnnnnnnnnnnnnnnnnnnnnnnnnnnnnnnnnnnnnnnnnnnnntgacaaagggagactctgcctccagnnnnnnnnnnnnnggaaaggaaaagctaagcagatgacttatgtggcaaatgaggaatcaaattctctatttgtggtctgagatgccttttcctggcccagttttctgtccaaaaggctcttttaacctccaagttatacactattaatggtaggcccatagtggggcggggtgtgatgagctggaaaagcatgatgtgcgtgtgcgtgtgcgggggtggggccatcatcagaatttgcacaggctgctgggaagagccatggctgtctgctgggaactctgctggggcaagcaagccctttgactctcctgcccatctctagaatatttctaaaatgttttaaccagcaagttnnnnnnnnntttaaccctctttatatagatacnctggacaccttttcttatggttcctccaagatgattataacttccgtctgacactatatattcctttaataacaaaatttcccagaaggctcacaaatcatggttggcagtgcagccttttcaatactggacacatcccatgctaaggccctctgcacagatcttgtttactatcactggcgatcagcccaaacttctcaccccatatatcaacccaccccgatgtgtacaccaggtactatgtgacccacctactactggctaatgatgcaacttctgagagacccttgcaccctcactgcacgtcttgccacacaggtggcttggtgtcacgtactccctggcaccatctggttcatgccaggtttagagttcatcgtgtttggcttcctggtctttgagtttaaattcctcggctgtgaccttcccatctccattccggtcctggttggtgaacatattcttcacaatcagctcagcatcaaagccaggagcgaatttccctttgcc

SEQ ID NO: 319946 - DNA, 668 bp, Homo Sapiens
gggctttgtgtttatttttaatgttcttatatgtttatttcaacagctcaagggtaaaaagccccccgtggcgtctaatggggtcacaggaaaagggaagactctgagcagtcagccaaagaaagcggatcccgcggctgttgtgaaaaggacgggttcgagtaagtataccatcggatgtcttgcattccggcttcaagtgcacttggtggagctgggcctgtctgagcctgcccacccgtgagtgccagcttggggtcagctggagagatggagcggtgggcaccgtcatccttcctcatcagccacatagaaggacagtggcgatttcaacccagcttttctgactgcttgtaaattgaagcccagaactggtttgccacctgtgggatcgactcagcattttaaaataggaggcagttgtgagtgcaggtttcttgcagctccgggtggccctgggctccaggtcaggagacctcagctcctgtccctgatctgtggttgtcaagccttgcagactctaaactcagcatctttatctgtcagacgtagacacgtggctcccgtggttggtgcggttggaatagctgaggtaatacacggacctccaagcactagagcagtacgaggagttctgaggaatggttatcctgcggtgcctgtggtcc

SEQ ID NO: 319947 - DNA, 570 bp, Homo Sapiens
  misc_feature (398)..(398): n is a, c, g, or t
  misc_feature (407)..(407): n is a, c, g, or t
gcaggaaattttgtgaaaaacgaattgtaaacacaattttagtaagtatacatttaggtgtgaattttttattgaaataaacaacagcataaagaatacaagtagccaaaatggttttgaaaacccaaattaggtcaaagttctaaattaaaaatcagcagttgtgtatccaatttacccttattctagcaatttaagttggtaacatacaaagttattctgatacaagatattaaagacacacttggttttaatcaactacctttgaagacaccaaatctaaacactactggaaacatcgttgacactacagccaaatggacttgagccaaattttctcaagcacaaatgcaaactcattaactatttctttcagtatctaagaatatctttattgnaaaaaattnaaaattaaatcagttcgccagaagcagttagaagtgtggctttgttcgtgtccaagcggattgtttaaatatatacataaagggaaatcttgccagatgtcacaaattatagcggcacccgttcagatttagggtgagtttctgatcaacctatcagtctcca

SEQ ID NO: 319948 - DNA, 1015 bp, Homo Sapiens
ttaaaataaaaatactttattgatgaagtcagacagcagctaacagtttgagaagcttgggaagaaatcactttcacatgggggatatatgcaacctagaacatatttggctaagtcataaaattaacatttttagtcatctgtaaagtgctgagacatttatttctggtgactgcctgtgttaggatttttttcttgttatccgtcccgtaagtgaaacactgaaatacacgttcagcaggatggcgctcactaagtatgcaccttgacatgatggtgtgcactcattatgcacgttctcacgcggggctggctctgcaactgcagaatagaaactgatgcgttctgcagaggaggcgtctgcacaacagacaggctggcccgaggtcacgcctcttggcctgagtcccgctcagtgacagcagccagcatggcctagcaccaggagtcattcggagcgtgcgtgctaaagcagacacagcattccacgtcaacaggggcaagaagctgcacgaaggaactaagcaagacttctctgcctatctcctctaatactaaagcacacacttttctcctgtggatagtcactctatttatacgagaagggaggaataatttggtgttgatgcttgagtccaaatgttgataggcactgagcattttggttcaaagcaaacattatttgtgaaatgctacagataatacattgactgaaacattaactgttaattttttaatagaaaaatgcaatacaaaaatattactttgttaaaatatacagtacacacattataccactttggaaaacccagctcacttctgaaagcaaatcatgctaactggactggtaggtgttacctggcttttaaaattgttaacaaattttactctgaaattcaaaaatatagaatataaataaaagtcgtgaatctgaatcaggtaaaacttttaagaattgttaataaatgcctgcactaccgaatacatatattttctcataaattcttagtctgca

SEQ ID NO: 319949 - DNA, 1198 bp, Homo Sapiens
  misc_feature (847)..(893): n is a, c, g, or t
cagtattttccttcactttaatttttattgcttctccagttcagataattcagcgcttcctctttcttcttcctcaccttgttcatggctggctgttccatcagcagaacttccagcgattgccacattcattgcataagacaaaggtagtcatgggctcatcagcactgcgtgtctgcacctggttataggtgcagttcttcttcttgcatttgctgcactggaagaggtcagtggtggtgccgccagtcttggccatctggtgctcacggatggcctcctgggtcatggcattcctcaactccctcagttcatcactggccatttcctctgccgtcatcttggctataagccctgcggagatggccccactgagcacgttccgccgcaggccggggttcctggggtccttgaggttgcttatgcggctgcgcacgcggttccggtacttcatgtccgtgctcttgagctcttggtagatatgatcttcgatttctgatgccatcttgtcacagttgactccatagtccttgtaatcatcgtccgccttcagggctgctgacagcatctccacacacttgtcccggacagagtcccctgtgagatagcagggggccaggagacacatggaagaggcaaacgtgggggtcaaggggctgctaggtgttttggggctctccgcttttgatttgctgctgtttgatctttccaccgatggtctttttggagaggaggaggcagaagacttggagtccacagagtctctcctggttttggggtcttctcgttttttccttggtggagaaaggcctgcttctggcttccagtctgaacactcaagcccttnnnnnnnnnnnnnnnnnnnnnnnnnnnnnnnnnnnnnnnnnnnnnnngggggtccaggggagtctagcagccgcttccagtttttgataaggactttggccaaggacaccacctccttgtctgagcagtgcttgcggaccccattaacagcaactccaatcctggttgtctgtagtagctggatggacatctggcagctgtgcagcttcttcagaaggtccagggccccttccgtgttcttcctggccaccatcttctccagctttttggcgatcctcagcagctcctcttcctggcccatgttggcccgcgactcccggcggggcgaggcgccacccaggcctcgctacct

SEQ ID NO: 319950 - DNA, 808 bp, Homo Sapiens
caggatccactagaggtaacaactacagacttctgaacacattttcagttggtctccgttgccatgtgggagaccaaaagtctaaccaagtgattagtagccatcccagtgatgttcttgaccataaattgagagctcagcacattcctggcaccgaattgccattcatttattacctgatatcattctcacattcacaagctttatgagctcattttacaggtgagtgatttgttcaagatcacacagctaataatggcagagctggggctttgggactctgggtctgtgtggctccagacaccaccttcttttttcatattcccccacagcctccttgggaggattgccgaggaaaccttttcaaattttgttgcctttctggttttgtagttctgctgatggaacagccagccatgaacaaggtgaggaagaagaaaagaggaagcgctgaattatcttgaactggagaagcaataaaaattaaagtgaaggaaaatactgaactctgtctgagtgggatggtatgagttagaggaagaattctcttgcaaattaataatcggtcattagaaacaattggttaatgggggagcctaattggagaatgatgctgagaatttgtattgatgaacctcttttagaaactgcagagggctgggcacggtggcttatggctgtaatctgcaaactctgggaggctgaggtgggagaatcgcttaaccccagaagtttgagtccagcccaggcaacacggcgagaccccatctctataaaaagaaaaaataaagaaactgcagcgccttag

SEQ ID NO: 319951 - DNA, 746 bp, Homo Sapiens
gaaaaggaatcacgttagaggaaaaatatttattcattatttgtcaaattgtccggggtagttggcagaaatacagtcttccacaaagaaaattcctataaggaagatttggaatctcttcttcccagcactatgctttccttctttgggatagagaatgttccagacattctcgcttccctgaaagactgaagaaagtgtagtgcatgggacccacgaaactgccctggctccagtgaaacttgggcacatgctcaggctactataggtccagaagtccttatgttaagccctggcaggcaggtgtttattaaaattctgaattttggggattttcaaaagataatattttacatacactgtatgttatagaacttcatggatcagatctggggcagcaccctataaatcaacaccttaatatgctgcaacaaaatgtagaatattcagacaaaatggatacataaagactaagtagcccataaggggtcaaaatttgctgccaaatgcgtatgccaccaacttacaaaaacacttcgttcgcagagcttttcagattgtggaatgttggataaggaattatagacctctagtagctgaaatgcaagaccccaagaggaagttcagatcttaatataaattcactttcatttttgatagctgtcccatctggtcatttggttggcactaaactggtggcaggggcttcctagctgacttgcacagggattctcacaatagccgat

SEQ ID NO: 319952 - DNA, 1553 bp, Homo Sapiens
cttggttgcagctgttttatttccagcatgttcccaacctggtgaccctccacagtccagcagtaaagagatgggtaaggggttaaatcggcccacacctccacctgtccctaaggttacctcagttgctgaaagctaaaaccttgcgcgcaagggcgaccttccccaggagggaggagagacgctggaagagcagccaagcctccaagccagggccggccgggatcagcagaggtgcaaagtcccactcagacggacccagcccttcccctcccaacactcatcctttccctgctgggggccggggctggggctgggctcagtggcccaggaggcgcagcatctcctgaggatccaccagcttctccctgggcttccccgtgccctggccccgggccacctcctcgggcatccagcttctcccagtctgagaaagagactggccggacccctcggctgctgagcagggcctggatggctgcgtagccaggcctggggccagaggggagcaacccagccttcaggtcctgcagcagcatctggccggtgaggaagctgtcagtcatggttgtggctatgacacctgtaggtcctctcttcacccagccgctgcagtagaggcctggcacatccataacccggccctccacattggggatgaccccaagcttggagtcaaagggcacgcttgggtcgacagggcggctcttatacccaatgctgctgagcaccagcccacaagggaggtcttccatgtctcccggtgggcactgcacggggtggcctcatcgaccaccctccagtctagtgactgctaggcggacacctgctgcccgccgcccatctggtgagggcagcacctgctgggggcttcggaaaaagcggaggccccaggcacgggaggccgatgcctggcgggcagcttccgccggccctggcttctctgtggccgttcgaagcagcagttccgtcagccgcttcctcgggcgggggacctccttgatcttgtcctggagacccaagaaatccacaggatccaaaatgggccgggctcccggtaactgaatcatctcccgaagctccttaatggtgaaggccacttgcaggggtccacgccggcccactagccacactgtcttcactcgactctgcctcagtacacccagggctgccttcgtgatgtccgttctctccaggtgctcaggtggggtcagtaggatgcgggccacgtccagagccacgttcccctgccccagaatcacggctgtgtcacagctcaggtctggctccagctcctggttctcaggaagcccgttgtaccagcccacgaaggcccgggcggagcacacacctggcagctcctcaccaggaatttccagggcccgatggtcctctgccccgtagctcagcaccacagcgtggtaggcctcccgcagctccggcaccgtcacgtccctgcccacctccacgttgccccagaaggcacagcggccagaatgggccgtctgggtaaatgtgttgatgaccctcgtgccgaattcgccacccaggcc

SEQ ID NO: 319953 - DNA, 1164 bp, Homo Sapiens
  misc_feature (47)..(72): n is a, c, g, or t
  misc_feature (293)..(302): n is a, c, g, or t
aggcccccccacagagggggagggtttttttcccaaggtctctcccnnnnnnnnnnnnnnnnnnnnnnnnnncttcattggacccccccttccagttttaagggactggctaggcggggacccccttgttgcccccccggcccattctggtgagggccagccacctggtggggggctttgggaaaaaacgggaggcccccgggcacgggaggccgatcctggcggggcagcttccgccggccctggcttcttctgtggccgttcgaagcagcatttccgtcagccgcttctcnnnnnnnnnnacctctttgatcttgtcctggagacctcagtattccacaggatcccatatgggcctggctccccggtacttgtatcattgtcccgatgctcctttaatggtgtaggccaccttgcatgggtccacgccggcccactagccacactgtcttcactcgactctgcctcagtacacccagggctgccttcgtgatgtccgttctctccaggtgctcaggtggggtcagtaggatgcgggccacgtccagagccacgttcccctgccccagaatcacggctgtgtcacagctcaggtctggctccagctcctggttctcaggaagcccgttgtaccagcccacgaaggcccgggcggagcacacacctggcagctcctcaccaggaatttccagggcccgatggtcctctgccccgtagctcagcaccacagcgtggtaggcctcccgcagctccggcaccgtcacgtccctgcccacctccacgttgccccagaaggcacagcggccagaatgggccgtctgggtaaatgtgttgatgacattcttcacctcggggtgatcaggcgccacaccaaagcgcaccaggccaaagggcacaggctgtttctcgtagatgtccacgtgggcctgggggtgctttagcaggtgttgggccgtgtagaagccagctgggccactgcccaccacacagatctggggggtcttctcctgtgtggagaaatggtggcagaagctcggggtgctcccggcgggaggcagccgggtccgaggccacgccgaccagccccaccagcgccagcagcgcgaagccatggctgggaacagcaacctgcaagtggatctgttcctagctactgctccgcag

SEQ ID NO: 319954 - DNA, 793 bp, Homo Sapiens
ttttaaagtactaaaattactttattacagttgatttttttaaacatttcctttgctatgatacaaaggatacttacaaacaaaatattacatatgaccttgttttcgctcttatgttctgacaacttggtaacagcttttaatgcacaatctatacaattaatacaggttatatatgaactataaggtatgctgaaccagaagaatactgacaatatactgtacaataagccttaccagttagtgctgtggaccatttataccaaaaggaaaatgcacatctgtacagtcacctttaccagctggtgctgacagagagggagaggcttcttccccaatgcaacccttgataagcctccactgtgagcgtctgtttggtccaaaaatcgagaggacaatgtgtatttaaaattagttattggtaaagtggtagaacatcacactttcgacacgatactctctcaaaaaagtatcagtcccagttttaaaagaccacaagttctttgtccactatgaaaaccctacgggctcagggggtttgggagatgagaagatgaaggctgccaaaaaaggaggcaagaaaccaagccaaaatctaggtcttgcaaaatcatcatttttcccttcaccaaagggaactagaaatgtacaaattcattgatgaacctcaatgatagcatatcagttagctgataaccctcattttatctggacccctgacttgtgggaataactaaaatacattgtggataacagataccacttttagaaaagaacctcttgcttaattacc

SEQ ID NO: 319955 - DNA, 445 bp, Homo Sapiens
  misc_feature (383)..(383): n is a, c, g, or t
  misc_feature (404)..(404): n is a, c, g, or t
  misc_feature (430)..(430): n is a, c, g, or t
aggggtccagataaaatgagggttatcagctaactgatatgctatcattgaggttcatcaatgaatttgtacatttctagttccctttggtgaagggaaaaatgatgattttgcaagacctagattttggcttggtttcttgcctccttttttggcagccttcatcttctcatctcccaaaccccctgagcccgtagtttttcatagtggacaaagaacttgtggtcttttaaaactgggactgatacttttttgagagagtatcgtgtcgaaagtgtgatgttctaccactttaccaataactaattttgaaatacacattgtcctctcgatttttgggaccaaacagacgctcacagtgggagggcttattcaaggggttngcattggggggaaggaagccncttcccgctctgttcaggcaccagcngggttaaagggtgga

SEQ ID NO: 319956 - DNA, 439 bp, Homo Sapiens
  misc_feature (22)..(22): n is a, c, g, or t
  misc_feature (180)..(180): n is a, c, g, or t
aaaaaagggaaagggcctcctncccccccaatgcaaacccctggataagccctccccactgtgaaccgtcctgtttgggtcccccaaaatcggagagggacaatgtgtattttaaaaattaagttaattgggtaaagtgggtagaaacatcaacactttcgaacacggatactctcctcnaaaaaagtatcaagtccccagttttaaaagacccacaagttctttgtcccactatgaaaaacctacgggctcagggggtttgggagatgagaagatgaaggctgccaaaaaaggaggcaagaaaccaagccaaaatctaggtcttgcaaaatcatcatttttcccttcaccaaagggaactagaaatgtacaaattcattgatgaacctcaatgatagcatatcagttagctgataaccctcattttatctggacccct

SEQ ID NO: 319957 - DNA, 1817 bp, Homo Sapiens
gattttagggtttggttccgcggttccaggaaaagccagaccaggcttttgcttttccagagctttctgggcttagtaaatttccccccctttattttgccaggggttggggggaagttttccccggccttttttccttcaactcccccataggagacggggaccatggccacaggccccaggatggaggggccacctgttttttggcccctgcctccccccagggagggcttgggggcttgccccacccaaatgggcacattacccaggattttttggccagtttttgttggactggggaagggagagaaaacccccagttcccaccagaacaaggaaaggcactggggagtacaggggaggagaaaggaggtgggaaacaggatctttcccttccccggccgccacacacacacaagcacaggttttcgttgctaaggcactgagaacaaatccagagaactcagtgaagggtgggggctctgtatccttcccagagttgtgacctaggggagtaggtctgattcccgccctgttggaagaggcagccttggttaagaatggcagaaaacctggagatggaagaagcccaattgtgcttaagaagttggggacagaggacgagattgggaactggtcaagcccagaggcgggcactggtcagcccaggctgaagggacactagggagagacaggtacatgctggactcacagagattggccccatatcctgagctgacgtttcaattctttggggaggtggcggggcagggacgggaggaaagatgaggcagaggtgaaagcacatggaacacaacaggggggactggctaaccttggcacaaaagcagcacagcaggcccggggaaagggtgggggcaggaagcagccggcctccctctgaccctccctgtcgccttggcagggcccagacatccaaatggtcacttcccaacctcttcagaggtcaggaagcggggaggggcaggggagagcggtcatcaccacagagaacttcgggggagggagggcagagcattatgacagaggctgaaatgcaagtctggtggccaacagaacgtagcttccccacttcttccctttcgctggtctctagggtctcacagccacttgccctagttctccttctctggccctggaaccaggaggaccttgcccacattcttcttctcctgcatctgtttcatggcatcagccaccttctcgaagggccagactgagtcaatgtggggcttgatgtggccctggttgtacagagccaggaggcgggccaccacaccactgaccagctccacctcaccatccaggtagcccaggtggaagccacacacagcccggttggcctgcagcagctgcagggctgtcacgctgaactgattccaccatgtccgggccagggccatcaggttccgtttggggcccgtcagcaggttggccattccataggtgacgactttgcccatgggtttcaggaggttgtagcccttggcagtatctgacccacccagagggtccatgacaatgtccactcctttaggggaaatcttcttgatctcatccacgtagtcagtcgtgtgatagtcgatgggatgtgtgaccccattctccttcagtgcctcgtgcttgctggccgaggccgttccgaacactgtcacattctccactgtacggcacagctgcacggcagccatacccacaccccctgcagccatgtgtaccaagacgctgtggccaggctgtaggttgccgaagtcaaagagcctcgtgccgaattcgccacccaggcctcgctacct

SEQ ID NO: 319958 - DNA, 2580 bp, Homo Sapiens
gacatgtggggttcttttgttctgggttgggggttcttcagggtttggctttttattgacacaaacacacaaaggcagctgtggtaatggggtggtggggtacacaaaagcagaaatcgcacttcacacatttaggcctcatttagacaatgaggaggctgagcctgtccctccacctcccattgcaatggttggggcaataaccctccctaatcctagctcagtgagtagagggagtgacctccctacccaggaagtccccattttggttgcaatggcccaggtcctgaccatcccactctgtacttccctgctccatctccccacccatgtaaacagagttttgggctgagtttgataagctgcctctctgctttgagaaggcagtagggcctcccctaactgcaaggggaatgtgcttggatttttactttggtcccagtacaagaaacagacagcactgcctttcagagctctggctagtaaatgccacacatatctgcaaggctgaggaagcttccccgcctttctcctcaaccaccatagagacgggacatggcacagaccacgatgagggcacctgtttttgcccttgcctccccaggaggcttggggctgccccacccaatggcacatacacagatttttggcagtgttgtgggactggggaggagagaaacccccagtctccaccagaacaaggaaggcactggggagtacaggggaggagaaggaggtgggaaacaggatcctccctccccgccgccacacacacacaagcacaggttttcgttgctaaggcactgagaacaaatccagagaactcagtgaagggtgggggctctgtatccttcccagagttgtgacctaggggagtaggtctgattcccgccctgttggaagaggcagccttggttaagaatggcagaaaacctggagatggaagaagcccaattgtgcttaagaagttggggacagaggacgagattgggaactggtcaagcccagaggcgggcactggtcagcccaggctgaagggacactagggagagacaggtacatgctggactcacagagattggccccatatcctgagctgacgtttcaattctttggggaggtggcggggcagggacgggaggaaagatgaggcagaggtgaaagcacatggaacacaacaggggggactggctaaccttggcacaaaagcagcacagcaggcccggggaaagggtgggggcaggaagcagccggcctccctctgaccctccctgtcgccttggcagggcccagacatccaaatggtcacttcccaacctcttcagaggtcaggaagcggggaggggcaggggagagcggtcatcaccacagagaacttcgggggagggagggcagagcattatgacagaggctgaaatgcaagtctggtggccaacagaacgtagcttcccaacttctcccttcgctggtctctagggtctcacagccacttgccctagttctccttctctggccctggaaccaggaggaccttgcccacattcttcttctcctgcatctgtttcatggcatcagccaccttctcgaagggccagactgagtcaatgtggggcttgatgtggccctggttgtacagagccaggaggcgggccaccacaccactgaccagctccacctcaccatccaggtagcccaggtggaagccacacacagcccggttggcctgcagcagctgcagagctgtcacgctgaactgattccaccatgtccgggccagggccatcaggttccgtttggggcccgtcagcaggttggccattccataggtgacgactttgcccatgggtttcaggaggttgtagcccttggcagtatctgacccacccagagggtccatgacaatgtccactcctttaggggaaatcttcttgatctcatccacgtagtcagtcgtgtgatagtcgatgggatgtgtgaccccattctccttcagtgcctcgtgcttgctggccgaggccgttccgaacactgtcacattctccactgtacggcacagctgcacggcagccatacccacaccccctgcagccatgtgtaccaagacgctgtggccaggctgtaggttgccgaagtcaaagaggaccatgtaggctgtaatgtaattgacgagcaaggcagcagcttcctcaaaggtcatggcctcaggaatcaggaaggtctggaccgagggcacagtcacctcttcctgccacatccctgaccggttcaacaccatcacccggtctcctgccttgcggtcgctgactccctcgcccactgcgatcacaacacccgcgccctccatgcccggagtgacaggcagcggcgggagacggtcgtacagcccctgcctagccatgaggtctgcgaagttgagcccgcaggcccgcagacgcagcgtcagctggccgggcccaggggccgggggcgctgccggccggctctgcagcttcaccttgtcgtagcctccaaagccggtgagcactaggcagcgcagcagtggcggcgaggcggcctcgtgccgaattcgccacccaggcc

SEQ ID NO: 319959 - DNA, 881 bp, Homo Sapiens
  misc_feature (230)..(230): n is a, c, g, or t
aggaagggaggtcgatgcttggattcccaatggtagtaaaggcaggcaacagggcgaagaaaagccagggatgaggatgactgtggtcttgaggggccttgcgcttctggtgggcccttggagtgtgacagcttggagatgataatgcaatagcagggacaggatgacaatcccaggcaggataaggcccaaccatgatgtgttgaaaactggaacacaaccaccccacnaagtcattggggtagaagcggtcacagatatatctgtcatctgcctcactgacgttggcaaagatgaagtcgggaatagtcagcaggagggcagggatccagacgccaacatagaccaccttttcagccaacagcttccttggcctctgactgttggtggcgtggacgatggccaggtagcggtccagactgatgaaggccaggatgaggacactgctgtagaggttgactgtgtagatgacatggactgccttgcataggaagttcccaaagtaccagtttgccacggcatcaactgcccagaagggaagcgtgatgacaaagaggaggtcggccactgacaggtgcagcctgtacttgtccgtcatgcttctcagtttcttctggtaacccatgaccaggatgaccaatccattgcccacaatgccagttaagaagatgatggagtagatggtgggcaggaagattttattgaaattagcattttcttcacggaaacagggttccttcatggagtcatagtcccctgagcccatttcctcggtgtagttatctgaagtgtatatactgatcccctccatggtaaccgctggttctccagatgcggtggctactggagcactcaggccctcggcgtcactttgctacctg

SEQ ID NO: 319960 - DNA, 594 bp, Homo Sapiens
  misc_feature (357)..(357): n is a, c, g, or t
tccacaaaccactgtcttcccttggcttctgcagaggcctgagtgaccgcagcacatggcttcgaggaggagacgtgggacgcggcacagcagtccgaatgggcgtcttctgcacagtcttcccagcttcccgggagcgtgtgtgttcaccaaggccgaatgcctacaagactaggtaagctgtccagcgcgacgggctcttccgaggaggagtgtccctctcccccggtgctgtgcttcagtcaattctccagcacgcgggctctcaaaccctcaagggaggcatcgggacattaggtgtcctctgggaaagcacaggtaccaccagggtccctctcagaccttgtagtaaatgtntcgccgggctctgcgggggcatctcctggacgatgtacaccgggtgcccgtagtccccgctgaccttctcgtagtgagggcagaagacgctgtccgcagtccttagcgggatgataatgtcactgggctctgagccgttgttgttgccgctgcgcttgggtgtggccagtgtgctgagcgacagcgtggtcgtgtgctgcggcgagtgcttcctgtgtctcctccggtacttcagca

SEQ ID NO: 319961 - DNA, 1004 bp, Homo Sapiens
tgtttgaaaaatagtttgtagaccattttatttaaatatatgaacaaccaatgggctactgcaatccaagtaaactcttcacattttagaacctttgtgaagtatagtaagataaagtaagactgttggtctttggcagattcctcctgccccccagacagggacatagatatacagataaatgtttatatagttaaagagcggaggcccaggtgaaaattccccaccccaagctggctccccaacccaaaaattaccattggcccctgagaacacccaaagaccaccctcccagatttcacacaatatcaattgcaggaacagtcgtgcatggcaaagtatagttctatgcatttcacagcacagaaaacccttctttcagagggcatgcaagttgccggagattacacccccaagtctggtgctcttgtgatgagcaacttactggcaaacacatctcccagtgttgtaagcaggcaaatacattgagcacattttgctgtaattccatctatttgcaatgcctgcacagtgtctgtctctggctgttaacttactcattcttgacagaactctgctttattgattgcacttttttaaaaatgccaaaggcattttcacacttgttagcttgaccgccaccactagggtataagagcaagtgttctctatgccttacttgctacagtctcctccttctttggagaggattcccgtaatggtaacggtgatgggggaggctggtgccaacgacacaaatacatttctgtggtggaaaggtacggcaaatcttctatctcacttgagaaggctttctccttgggatgggtgctgggtcccttttggggagtggagagtcttggtggggtgtccactgaagaccggggcttttctggggtttcttggctcctcaattcacgtttacaaacagtttcagataaggaaccacagggttcctctttaataggagagtgcttaggagtttttgttttgacttttgaaaa

SEQ ID NO: 319962 - DNA, 907 bp, Homo Sapiens
tattacaaacgtgtgggggtgggccccgttcagcagatggtttacaggaaaaaatagcaaatttttaactttattccatctcccaaagttgaaaaagatcagacagttactaaaataaacgatttctcaattgcattctggtggccgtgggcccggtggccgcggcgtgggcggggcgttggagttgggaggccccggctgagtgaggggctcactcagaacaggcacagtcagctgggctgagcgaggctcagagtaaggcggtgttcctcacagaagaacacatcggaaaaagctgctcctcttctgctggtccggtgtgattttgactccctggttgctcccctgggggctgttgccttccaattttttgtccatttttgctttgatatctctggcgagagtgaaaaatgcattttccacattgatgttggccttcgcgctggtctccatgaacttgattccatagtcgagggccagcttttctccccgttccttggaaacttgtctcttgtcattcacatcacacttgttcccgagtatcatcttttcgacgtctgcagaggcgtgctcctcaatgttgcgaatccagttccggatgttgtcgaaggacttctcgttggtgatgtcgtagaccagcatgatgcccattgcacccctgtagtaggccgttgtgatcgtccgaaaccgttcctgaccggctgtgtcccatatctgcagtttaattctcttgccatcgagctctatggtcctaattttaaagtcaattcctatggtggagataaaagtggagttgaaggcgtcctcggagaagcggaacaggacacaggtcttccccacccccgagtccccgatcagcagcagcttgaacaggtaatcgtaggtcttcgccatattacactctccc

SEQ ID NO: 319963 - DNA, 661 bp, Homo Sapiens
  misc_feature (51)..(51): n is a, c, g, or t
  misc_feature (70)..(70): n is a, c, g, or t
  misc_feature (331)..(331): n is a, c, g, or t
atttggaggtgagaaagctttattaaagcacacatacatgtcaggggggtnggaaacaaaagagcaagtnacagcccgggatcccaagttatgccttccattacaattgcaatccacaccaaatcaatctttgaaaacattcctccattcggttcatacatacagtagaaaccactgtgggctgcccttaatccagtgtgcttataggaaatcagttagcaggctgactctgttgaaagggatttcctctttgctatacactcctgtccacacacaactttggggtaggaaacgcttatgaggaataggaaagggtcagtttgatcaatgnggtaccagaaggatggaaacttaggctcactaggacccttctttgaaaagcctcaacacactacacccatgtaatatgtaggtcaaatttaggaaacaatagcaaaaacaggaactgaaagctcatcaagcaggaagtcagaataacagggagactctgtctacattcccttagagcccttaacagtccccagcctggagaaacactgggccaattgagataacacttggctcttctggttgacacagtgggatgtagaccatgctctgtttgataacacaccccagacgcaaacactaagacagatgggtacataggagggtatatttc

SEQ ID NO: 319964 - DNA, 1387 bp, Homo Sapiens
ttgctgggcgacttctcctccccgtcctcctccattgggcgtttcatgggcgtaatggcataggtggtgcttggtgggatctgaacggtgtagtccactgggttttcattctttggtttcttgggcatcttggaaggcagagggtccatgcctaggactttatggagctggccgaaggcagcgagccgcagtgcgtgctgcgcactctgtgtgatatcttcccgttgctgtctgtctagatgcccaatagcatcagtggcttctttttcacaagggtcataaatgccagaaccatctggcatcacgatgcccgacgccaggcactccagcactctccgcagggcctcgccagcacccatcggtctgttggccgtgccaatggatttctcacacaggagctcgagaggccagcctcggaggggaccccaggtgggcacgcgagtgcacaggtccctcaagacccggatcacaatgacacaagacttcagcccgttggctctggcctggaaccacttggcgtgtcggagggacgccaaggcagcaaggcatttctgcctgtccagaacgtccggggggtcgttgactgatagcgtttctccagctaatactttctccatttcttctctgacaacaggggatgtcaggtggatggtcagggacaatggaggctcttttgtgttttttatcacaatcgcagcatcgtcgacagattgcagtatttcgtacttgtcttctgttacagcagcaagctggatggccaggttgtcggccaccttgtccaggagggcggttgtgggcttctccttacacagcagcaccagctccagatccaagtcccccttgagtaggaggccctttgccaccaggcccacccgcatcactccccgcagggttctggtcatgtgctccgtcttctgttccccagccccttctttactgtcgtcctctgggggcacatccatgttatcggactctgcctgctcgctgctacccttttcctgctcgtctatccagtcggacacagctttgagcgcccgctccgtgtgggacaccatgttctggactgcctccagctcctcttgtgttggataaacggaagaatgctttgccatcacatggcggtcatcattcacaaaaattcgcattggacgcatttttacttcttctgtagtgtctggaaatcaaacttttgcttatcttttcaaattgtgatagagttccttggtgttatcaatacttcaactcttgtcggcgtccccttcttcggccgcagccgccgccgccgccctcctgccacagcccgccggggtctgcccccaaaagccacgcggtgcgctccgggctgctgggtccaactgcaatggcgagaagaggaggaggaggaccc

SEQ ID NO: 319965 - DNA, 2265 bp, Homo Sapiens
  misc_feature (135)..(256): n is a, c, g, or t
  misc_feature (258)..(320): n is a, c, g, or t
  misc_feature (340)..(672): n is a, c, g, or t
  misc_feature (678)..(768): n is a, c, g, or t
ccgtttcgtgcctgttcgtctgcgctttttcttctctcttttgtccgcctctgtgtcgtctgtttcttcttcttctcgtgttctctgttgtgtgcgctgttgctctgctctctgtgtcgcacgtctcagtcgtgnnnnnnnnnnnnnnnnnnnnnnnnnnnnnnnnnnnnnnnnnnnnnnnnnnnnnnnnnnnnnnnnnnnnnnnnnnnnnnnnnnnnnnnnnnnnnnnnnnnnnnnnnnnnnnnnnnnnnnnnnncnnnnnnnnnnnnnnnnnnnnnnnnnnnnnnnnnnnnnnnnnnnnnnnnnnnnnnnnnnnnnnntcattcttgtcgcgtcgtcnnnnnnnnnnnnnnnnnnnnnnnnnnnnnnnnnnnnnnnnnnnnnnnnnnnnnnnnnnnnnnnnnnnnnnnnnnnnnnnnnnnnnnnnnnnnnnnnnnnnnnnnnnnnnnnnnnnnnnnnnnnnnnnnnnnnnnnnnnnnnnnnnnnnnnnnnnnnnnnnnnnnnnnnnnnnnnnnnnnnnnnnnnnnnnnnnnnnnnnnnnnnnnnnnnnnnnnnnnnnnnnnnnnnnnnnnnnnnnnnnnnnnnnnnnnnnnnnnnnnnnnnnnnnnnnnnnnnnnnnnnnnnnnnnnnnnnnnnnnnnnnnnnnnnnnnnnnnnnnnnnnnnnnnnnnnngtcggnnnnnnnnnnnnnnnnnnnnnnnnnnnnnnnnnnnnnnnnnnnnnnnnnnnnnnnnnnnnnnnnnnnnnnnnnnnnnnnnnnnnnnnnnnnttcacttttctctcctctctctactctcattcagacagacaactctaatgtcacgatcgatacatgtgctagttgaaccgattgctggggtcgtcgtcctcgtttaattggggctgtctgctatgtattccttcgttggttctcgtgctgtcggtggtcatcgttgttgcgcgctttgttctgcttagtgcagtggcgtgcgcgcgtctcgtgtcagtgttgtcgtatggttcctttgtatatgcgctgttggtctggcttgtggactgtgttgcgcgtgccttgtttggttgtcttagccgttccctgttttctggtgtttgatcgcttcttgtcgggcctgcccttggtccattttcgttgtatgtttcagcggtgacttgtggccacacaccataaggctggcgtaagtcctgtcgttagtgagttttcgtgtgatgccactcctgtgcttttaaagcacattttaggtcctttaaaggtggttatatcgctctcctcatggcttactttgcgcacactgttcacaagagctaagctaatacaacttataaacagctcacatacacagatgtcacctgctttataggttgtaaacgatcaacttactgtatatgttttcactataatactagttccagaacatagaaagttggttaacagtacaattaacctcatgccattaaaggatactgtcaaggttgtgtcaaacaatttcacaatacataaaacaggaaatgttaatctcccccattcctttaaactttgatttatatgaataaaagaacttgagacgatttagctcaattgttaatgtttgcccaagcattatgtttgaccaggtacccatggtttaagttatgaacattgacagtgtccattatataaccacacttgaagttatttaggacttaaccattttcttatattagcctattttctacactgtttttcacatatatgcccattaacaattggaatgtctgttacatttattggtttgtgaatgtttctggtaaactgcagtatatgtgaagaccaatttccatgctggcattgcatgcatccaaatattaatgcacagaggcacagaattagagcaacaagagagcatattcaaacactagcacaccccattcccctttttattgcttgtttgcttagtacttcttaaaacaaaagacttgaattcaacgttcaactaccaaagagagtaacagcagggcacatactcagggctcgaatgaaactgtaagcactagctggagcaaaacagtagacattggtttatattaatatatgtatatatgaccttattaactaaaactcttctcaaccagggccttccaaacaaattggtaacaacatgatttatgttgaaatatacacaagaaataacagtgtgttctttgggaatttaagaactcagactatccaaatttgaattcaggtctgtaggaagtgagaagcctgtactaagcaactgtgctacatttc

SEQ ID NO: 319966 - DNA, 902 bp, Homo Sapiens
ccagtattcatgtcagaagacctttattacaaatgttacaggcgatgacttgcagggagtcaagtcactggaatcaatagttaacaagatggttgtcctttggggccacaggtgtgttgctaacctccacttttcttcctgatttgctttgctttccggggtttgaggatggtgtagtttacgtacactgtatactgatctgacatgaaggggacatagaatgcccgcagcagctttgaagatctagaagcatcaaggaatggtctataggccaagctgatccattcttctttattggatgaatattttggctcccggggtgtttctctcatggtgtccaaatccactaaataatggcatttactgatatcaatatatctggatggctcttctagattctggtcattcatgtcagtaggaacaatccgggtggccagaggtccttctgcaaaaggttttggtaactgacctctgaactctgatggaatgaactgaagctgccaattgtcaggaagaaggaagctgctgggaaatcgataccactcttttcccacacagacattcacaggtctgccttctgggacagtgtggatggttgggtctgtagcaattcggtaaaattctggatacaaatcaaggggcccgtgatatcctctgaacagtgccacagagcgagaaaatgacaagagcccaaacaggaagacagttcctaatgccagccaattcgatgtcacagtatagtgctccaggcgatatcgttgaaacacaaagtggtaacatttctggaagtacagaaaactgtgctgaagtgcagagagagccacagcgccacagagacatataagtggatacacagggaaaagaaatctctcctctttgtgaggctggatgaagaaaattat

SEQ ID NO: 319967 - DNA, 223 bp, Homo Sapiens
ggtccccaaaccagacaccccatcttcaccctctgccattttccttctccaggtcagccctggggctctggcacaagctcaggaggggagagaggccatgcaaagtgatcacactggaccctctgccctgagagcctgggcactgggaaccagatgtactgtgatttagaagaatgcggccgggtgcggtggctcacagctgtaatcccagcactctgggagg

SEQ ID NO: 319968 - DNA, 720 bp, Homo Sapiens
  misc_feature (631)..(649): n is a, c, g, or t
ttttaactttaacaaatatatatttaaagaaagaaatattattgattctatagaaaaccatttaccaactgaaaggacacgaagtctagctccggacaaaagctgttagaggcccaggctgtctgcctgcggtccttcctccggccagagtggaggccccaggctgctagcacaggtggaaggctggggcccgggggcgggtgctctgccgggggctcctccgtgcttctctcctaagttctctgcgccccaagaactcgaggttgtgccttgctctcggcggccgtgtcctcctcctggcgtggctgcgtcccagggcgcgggtgggtttggtgaatgtgggtgtgtcagcgtggcagccacgtggaagcagggcatgtagcaggccaggccacgggcttgcagctcctctgagggtgtgcctggccccctctccaggggctgtgcaggcagcccatccaccccagtggagttcccacggacgcttctgctcatggtccaaggctgtgttgtgtggtcattctcgccctcccttttcctctctcctcctgccccctccaagaagtactgactggtctcctctatcgtgtttgctgatccacagtgttgggcacaactttgacgtttcttnnnnnnnnnnnnnnnnnnntgccgaaaaccagcgattgtggtgtggggcgggtggaggcggctggcggaggtggcgtcccggcgtgcagg

SEQ ID NO: 319969 - DNA, 1016 bp, Homo Sapiens
ttgcggaagggagagttttaatgttgtgggaaaggcagccaggatgcttagggtgcgggctccagcaggggagcaccttggccctggtcttgggccagcagacgcagaagcagggagtgcagagcccggcaaacaggtgtgtagcccaggcggctcagatgcaggtaatcatacatgtcatgatggctgatggtgccatctgagtgcacaaagccagggtcggcatctaggaagtgggcccgagggtggccagccagtgccgcccgtaccagctcgttcacctgtcggttcttctcccgaagtgggttgggatgttggcctcgcggaagcaggcccagcaccacaacccgggcctggggctgtcgctcattcaccagttgcacaatggccttgatgccaccagtcacctgctctgctgtgtgtccgtggttgttggtgcccacccagaccaccacaatcttgggccggatgtgttccagctccccattctccagccgccacagtacatgctgtgtgccgtcaccaccaatgccaaagttaagtgcatgcagaggagagaagagctcgcgccagatctcgcactggtgcatgagctggaccaaggagtccccgatgaagacgacttcgggttccttatctttgctgtcagccacgaaccgatggtgcagggacatccagcgcccgtcgccctgtacgtcctgcaccggcgtgggcttgctggctgggttctcctctccactcatcttggcgccgcagctcctgcaggatgagcgagtcgggtcggcccgggagtgttccgaacggagctggctccgccacgcccactcctacccctcgcggcaacaaaggaccgtcccaacgctagcacacccgcggaggacgaaggccgatacagagcgccgcctcctctccagggacggaagccttcacttaggaggtaggtggaatcaggaaccttcgcttcccccacgacggccgcacagtgggctcgcccggcgcttcccgctcgggccgct

SEQ ID NO: 319970 - DNA, 465 bp, Homo Sapiens
gaacacatccggcccaagattgtgtgtctggggtggcaccaacaaccacggacacacagcagagcaggtgactggtgcattcaaggccattgtgcaactggtgaatgagcgacagctccaggcccgggttgtggtgctggcctcgttccgcgaggccaacatcccaacccacttcgggagaagaaccgacaggtgaacgagctggtacgggcggcactggctggccaccctcgggcccacttcctagatgccgaccctggctttgtgcactcagatggcaccatcagccatcatgacatgtatgattacctgcatctgagcgcctgggctacacacctgtttgccgggtctgcactccctgcttctgcgtctgctgcccaagaccagggccaaggtgctcccctgctggagcccgcaccctaacatcctgctgccttcccacaacattaaactctccttcctcag

SEQ ID NO: 319971 - DNA, 622 bp, Homo Sapiens
  misc_feature (515)..(515): n is a, c, g, or t
gtggagctttgtataattggtaactttaaccaacatttacgtaagtacggtctttgcagtattacacaataccgcatgagctaatatgcagtatttaggtaatgcattgaatgaagttgaaaatatgctcttaacacactgtgcattgtttttctaaaattgagaaatatctgaaatacagaatacgaatttaataaaggaagcctaccttatgtaaattatgatgttgaaaatgacagtcaaccagagtagatgaagtgtccttatgaagaattattaaatagtagctggatggatctttagatggatgaccacctgaccattccaggacaatttttggtcccattttgaggattgccatagttgcaagtccttaggatcttccttgttttaaaaaactgtcaaagtaggttaaattaaaatctaatttaaattaggttaatttatattacattgtagatcattcttttttcccccctctttcacttctaaatattttgctttctaaatactanccttctggttcacagtgaaataatttaattatcaatcagtagattgattccaagtggagaattcactgcttccctaaaatgcgtttttcttacctgtaatggtgaat

SEQ ID NO: 319972 - DNA, 915 bp, Homo Sapiens
  misc_feature (888)..(888): n is a, c, g, or t
gaagttgctttgttttgcttcgagatggctgcggggatgtatttggaacattatctggacagtattgaaaaccttccctttgaattacagagaaactttcagctcatgagggacctagaccaaagaacagaggacctgaaggctgaaattgacaagttggccactgagtatatgagtagtgcccgcagcctgagctccgaggaaaaattggcccttctcaaacagatccaggaagcctatggcaagtgcaaggaatttggtgacgacaaggtgcagcttgccatgcagacctatgagatggtggacaaacacattcggcggctggacacagacctggcccgttttgaggctgatctcaaggagaaacagattgagtcaagtgactatgacagctcttccagcaaaggcaaaaagaaaggccggactcaaaaggagaagaaagctgctcgtgctcgttccaaagggaaaaactcggatgaagaagcccccaagactgcccagaagaagttaaagctcgtgcgcacaagtcctgagtatgggatgccctcagtgacctttggcagtgtccacccctctgatgtgttggatatgcctgtggatcccaacgaacccacctattgcctttgtcaccaggtctcctatggagagatgattggctgtgacaaccctgatttttccattgagtggttccattttgcctgtgtggggctgaccaccaagcctcgggggaaatggttttgcccacgctgctcccagaacggaagaagaaatagataagggccttggattccacacagtttctttcacatcccctgactttggctagtgggcagaggaatgcctgtgctggggcccaggggttcccgggaaggaatgggattggcaaangggctggtcatcccctttctccctccc

SEQ ID NO: 319973 - DNA, 428 bp, Homo Sapiens
  misc_feature (35)..(35): n is a, c, g, or t
  misc_feature (88)..(88): n is a, c, g, or t
atgtgggaaaaaaaactgttgttggaaatcccaangcccccttatcctatttccttccttcccgttccttggggaaccaccgtgggcnaaaaacccatttcccccccgaggccttggttgtccagccccccacacaggcaaaaatggaaacccactcaaatggaaacaatccagggttgtccacagcccaatcatcctcctcccataggagaccctggtgaacaaaggcaataggtgggttccgttgggatcccacaggcatatcccaacacatcagaggggtggacactgccaaaggtcactgagggcatcccatactcaggacttgtgcgcacgagctttaacttcttctgggcagtcttgggggcttcttcatccgagtttttccctttggaacgagcacgagcagctttcttctccttttgagt

SEQ ID NO: 319974 - DNA, 897 bp, Homo Sapiens
ggaaaaaaaataaatccatagtaactaatggtctgccgattttttccttgaatttttaaactccaacaaagcattatttgcaaaaagtcctttagcccaaagtcagtgtctctgttttgatctctttgtaaaagaactctctgttcatccattctctttccctgggaccgtaaaataaggctgaaaaagtcttcatctggtactgtcggaccctttgtggtagcaggtggtggagcacatctttgatcatctaatctggatccttgacattttacaaggatgtcaaagaaatcttcatcagcctctttgttgtcattagtcatcaggtggctaagtaccgactggctgttttgtgttagacgaagccctggcaaattactgaaactagccctctggtcatccagacggcgactctgtgagctggcaagaagatctaaaaactcatccgtgttgggggataccacaggaacagatgatgtttttagcatcattttagggggagtggaagaagttgttgttgaagctgtatggcagttcttttcttgtaagcaacatctctgatcatccatcctattgctttgaaatcggcttaataagtcaaagaaccccttcatctccaatagtatctgcactgattttcctctgagaatttggaattcggtggtcaatagaattactggcatcttggagaactttagtggaggaattcggttttgtattttttccccttcagtctgttgacaaagagtagctttgcagaaggtttggcaataagaggtttttgcttagcaagaatttcactgttccagttctgtaccttttctggtgttaacttcataagttccatattttccatactatgccggcgtcccaacttggggcgtacaccctcgtgcc

SEQ ID NO: 319975 - DNA, 529 bp, Homo Sapiens
tttttaatttaaatcagtagttttattacaatacgcactgacacacaattggaaaaggaatgtcctgacattttctgagcatttcacggaaagcaaatgtaaccatccacgcagtagagtcatccacaccttttcctaacaaaaagcaaaagctttcacatgtgataactgaagaaagcaaagttttcttattcttgtctaaaaaacttcagtctcagaaaatagttattgaagtgagctgagaaggagcacatttccttcacaatgtccaaaatcctgcctctagattatccccctgaccttctaaatgacttttataatactgcagatggtattatgttcaggggctaaatgggatctacttataaggccaactactctatgtcactataattgaaaggaaagaataaattaagaaaattaagtcctgctaaaatgcacaaagacttgaagaaaatatctgggtgtattaaaagtgagatgctcttttcacgtaactcatttgaaaggttacaattaccataaaccc

SEQ ID NO: 319976 - DNA, 1537 bp, Homo Sapiens
  misc_feature (1310)..(1343): n is a, c, g, or t
ctcaaatatccaattttattttatcattctcgcattgtgggatgcaatctgcagctaggatcggaattcccaggcctatagatttttaaaccacaccacaggggtaaaccttaaaagaagtgaaacctaacactatatatatttccatttctaaatacagtatattacagaagtttaaatataccacctctgtgtacttacaactataaaaagatacaataactctaccaattataaataatgtagcatttcatattaaagacattatcgtacaatggaagaataggaaccctctaacgtatcactatcaaggttagtgtctatatctacttgagataaaatactgaaaattcagtgtatgaagccaaatcctgatttaacaagttattggtagtataagtgataagtgttagctgatgaagggaaggcaaatgtggtaatttatatctctgacaagggtgataggcccattttatacatggttttcgttatacacacactggttctgttatgggccctcattttattattgccctccccaacttaatttgcaaacttaagcactactttcccaattaggaaagtactagttagtaaccataaaagtatccgtcggataacacatttgtttttgtttttgaagctatatgggaacactttcagtttcccaagttaaaacatgaaattgcacatcatcatttggatccccaaagaggaaaagaaaaattcacaacctgccagtgaaatactcaggccacttggatgaagaccgaggtcctccatagaatccaggtgttatttactaactaatcagaaattaatatcaaaataggacttaaaaataacaaggctgtgttattacagcagtctttccagttgtgtacgctttactaatctaaattgggtaacagaactggagaaaaggaagactacacagacttatcataagctgttagtgaacgtgatagaaatgcgtaatttgttaaagtgaattacagctctgatttgtcaaatgaggaggtgaattatcctaggatttgctatgctgttgtggcgttagaagattggatctttagcagcaaaggtaacctcaacaatattttctgcttaagaaagtgccttggttaaggtagaccgtgatatcgtctttgactaagctctctgggctattgattctgtcatattccaaaggcagtattggtttgaagccgaatctcacggtcaatgtcaacatgcaatccacaaagaccctggcgcccttccacggtatgcactaaccaaaactttctcactgtgaaatcctttttttnnnnnnnnnnnnnnnnnnnnnnnnnnnnnnnnnnccttactgtgaatcctttcccaaggaatggtcccaccttcacctcggaaagaggcgtggcttgctctgtaagcaggtccaccctgaggagaccgctggtgcaagagccctgcttgcagaacacacagggggttttcccacattcttactggagtcagattcggcaaagcatttcaagcaactgctggacacttc

SEQ ID NO: 319977 - DNA, 534 bp, Homo Sapiens
  misc_feature (368)..(380): n is a, c, g, or t
gccagcggggcacacagacaggcatgcaccaccactacccgtcgcccggatacactgaactggttttgaagcctgaactgcagagatcttaatatagcaacgcaggacgtttacggccacccgccagtgacagccggtgatgtgatgacaggagggcctgggtgaaaatgtcaagacactcactctcagagaacgacgactccacttgaaattcatgtctggtgaaacgggaccaggtttttattcttctatttcaaaatgataagcatcatcacacgattttacaagttaaaatgccatttgtcactgctgcatctctgattctataacctgagatactgctgggggtaaaggagggtgttaacttnnnnnnnnnnnnngtatgaaagccactctcatcgctgtatgtgacacagcacagttggcatggaccgccacagcttcctattatgataactctcattttcttctgagcagaaactcttgaagtagtatcaggttttttcagacattatatagcaatctgtatttcac

SEQ ID NO: 319978 - DNA, 1184 bp, Homo Sapiens
  misc_feature (356)..(365): n is a, c, g, or t
tgttggggcgcgaagaaaaaacccctctcctgtaataccggtactctcttttcgtgtcccccacgcccacccaatattttcgccccagaaaacaagactgtctcttcgggaaaaatcccctttttgtcctccaaaataaaaaaccccgctcctaaaaggaggggcgtaaaatttcccggcggggtcccacccggagtctctttaaaggcccggttaccccgggctcttttagaaatttaagtgggggcccctttaacgggagggcccggacagatttttaccccccttgatccaaaaaaaagaggggtccaagaaaaccggttatgcccaggggccccttccctaccctctttttnnnnnnnnnngaccaaaagagccctgggagggttgcgtaatcgttaggcccaaaatggccgggattcattgtaccacagcaggtgttgtttctttctgtttttgaaagagagcagattctctttattgagatacgggacacagcgaagggtggagagacggaacagccccccagcctcagccctctccacgggggccggatgccagagatgggagaagggattcagtctctcgcccgggaaacccagtcccacagagggcgccggcaagggtgggacgcgacctgggtgacacggtgcagggagtctttaaatagaggaggggctggagcggggaaacgcgccggggccctagcgcaccatgtattccttgcgcttattgagccgaacttggcagaaagagaagcctccgaggaggaggtaaaggcctgcagcgatgaaacagttgtagctgacttgctcgtaaaggttgtatatgttctgggggccattctcaaaatctttctccgtgaagggaacgtcctcaatcaacacagcggaatggacattgaaaaatattccgagcattatcaacatgatcactccccaggcgctgaggacgatgccgcaggcggccagcttcggcccacagcacaggagcgacgccataaagaagggagtcggggatcgccgaggtgcaagcgggctcggaaagcggtgggagaaagcccaggatgccctcgcaggggggcagagggggcgtggccccggcctcaaccatcccatccgggggcggcaggcggaaaaggctgggctcctctcaggactttcgcgggagacggcgccgtctga

SEQ ID NO: 319979 - DNA, 958 bp, Homo Sapiens
aaatttaaagaagtcataaacagcatttattaccttggtatatcatactggtcttgttgctgttgttccttcacatttaagtggtttttcatctttcctccctcctcccacagcctggctatacagtgcatccttgaactgtcagcccacagcagcaatatgcttattctatccacatccctaacatcatgcattcacaaggtcaaagttctggtccacaaacccttccctatagaagttcaatggctgcgaaagaatttgtagtaaaccaggcctcccaggatggcgagctccagtaagatgataatggaaagcagcagcttgttggttgtcacttttctggacattgaacggagaatcttccgacttttgctcaagttttcacttgtgtttaccagtctactcttggtacgttctaactggtctcgttgttcccccagctcttctatgatttctgagccaatctggtcagtctctgtggcaatccgatgagaacgttcaatactttgggtggcccggttcaggctttcagtgccctgcagaagcattgccctttgagactgtagccgattcatatgctcattctctacagcatatatgccatatttcatgtctcctcggcctccaggtgtggctgtcaaaggtgtgcttctcacctcccgatggagtttagcaaggtccttccggtagtttcgaagcttagacatcatggggtttcggaaagacaggggtgcataacgtagctcctcctccatctctgccagcgtttcatttgcttcctgttgcttttcatcaaaatccctgatcaatttcttcttttcttcggtccccgccgtccccagcagccgctcgggcaccccttgtaggtcttcatggaggccgcggaagatctcgtgcagcttctcgaaatgctccgaggaggcctcgtgccgaattcgccacccaggcctcgctacct

SEQ ID NO: 319980 - DNA, 803 bp, Homo Sapiens
tgtcaagaaatttattaacctttataaacactattttcactcaatcattcataaaaaatgatttgtgattaaatctgtaataaaaccatataacgttcatcaatgcattcaataagaccagtttcttccatggaacataataaaccactttaaaacagcagttttcattcatgtcatataaggctgtcaaactaaaagtattccttataatgagttgttacccaagaaatccatctcacttcccgtgatgtggagcctggtgatgtgccctctaagagttgggtctgaaagaagactctgcccctttatggccaccttcccagtctctctcaaacaagtttcacaacaggaaaatatttatgagcagagaaatcaaattcaggaggaactttagattcctttttgtgtcctcctgccaataacttcataaccacaaagttgggtttggcaacctttaaaattctattaacctcatggtccgggttaggaatattttccaatatcatttttgcctgttgaaagtgcttactagctgccacatacagttcaggagactgaggaggagggctatatttattgaggtcagacatttccttgaactgtaagtagtgcactggcggcggggtcatcacactgttgaatggagcaaacctgtgttcataccgaacttgttcactatcaagctcaaacttcggtttacgtactttgccgtccatgtcaaatgctaccatggttttaaacattccagcacacatgttctgatatgcttggctcattgtgatctctcggctcaatgggcgaac

SEQ ID NO: 319981 - DNA, 1172 bp, Homo Sapiens
ccaaattaagcccgacgcagttgctaaaaatcttgctgcactgttgaatactaataatgcaacatttattggatgtttttgcattttgatgaccttcatgattcatttataagtctttgtaagtgcttaagtgaccccctcactagtgaaaataataaatgttctatatcatttattattatttgtgtattctctacatgatatatttttttaaggaagagtaactccacatgtcagaatgagtgatattatcctagggcaaagcgcaaatagggcagtttgtttctactctgcaaatatggcatgtataggaacaaaactcttttggagtggctggtcattgttttgccctcttttggtacctgagtacctttctggggttttgtaaatcgtgtgtcatttgtaagaatttcacgttaactctgcgttacttggtgttcacctgtggtatccttgactgaccataatgatttagtttgggtatgatgtgtctgctttgaaatgccttactggagtatgtcagatcctgctttaaagcattccatatatctgctgggacaataagttgcttctccttggaaatatgctctagattcagaagcaaaaccgattttgctttcaccattaaggttgcattttaatgcagttattgttttaaattagagaataaaatgtaaaaccaagggaggctttagaaccctttattgaatggcatggcaaacttttaaaactgcttttgctatttcactagaactatctttgataaaggatatagctaaaaaatgtcagcccaaactgtgtgtaattagggttgtttattaaaattttctctaaatgtcatacagaggcttaagatctgtgtatgctgttgggtcggagtgccagtcactgctttggaagtctatgttctggggctgcagaatgacaaacgtgtcatgggattaaaaccaatcaactgtgaattgtgaaattgaaactactctttcggttttattttctttagcatattgagtatagaaatctgaaacttatttaaaatttatactgcttttgttgatggctcattttggctgtgtatcctcacttatgtactgatttctgataaaggcttgacattattataacacgcattttgtgttccagtttaataaaacggtttctgagtcttgtct

SEQ ID NO: 319982 - DNA, 450 bp, Homo Sapiens
tgggggtaaaaagctctttatttgaagctccagggtggggcagggcactggcctctcaccagaggtcctcacagttcagtttccctacagctcagtgtcaggccccagccacacagtccagctgtgctccgattggcaggcgggtcagacctgcaggttgacaaaaggtgcgaagcccgccatatcctgcagcagcaccagggcctggtgcagcggcggctccacgtcgatgtccacgccgcgcttccgcaagcggctcaggctggactccgccacatggtggcagtgccgcacccgcagcgaacgcagcacggggcagtactcggccaatgtcctgacaccgtcgcttccgacgcggaggcagccggtgaggtcaaggtggtggagttctgggcagttccgagccaactcttgaaccgcggcgtcccccacgttggcgttgacggccag

SEQ ID NO: 319983 - DNA, 678 bp, Homo Sapiens
  misc_feature (38)..(38): n is a, c, g, or t
  misc_feature (173)..(173): n is a, c, g, or t
gaagtaggcagctctatagataatgatgccttggacanagtccgttgaaaccctggtagagccccctcaggccatcagacttgaagatcttgatgatacagtcgcccagaccatggaacttcacgctgtgcggccgcccttgcccacatcagcagccaacctggtcctagcanaagtccagcgggtagacaaagcaaagggaggtggccccagcggccccaccggacgccaggttaccagcaaagtagcgccagaactgcttatgccgatccacaccccctaagaagagctgcttgtacttgtccttgaaggcgaagttgagagcttgggtggggaagtaacggatcacgttggccaggttacccctccagaaggagaggaagcccctgctccttagggattctcaccacacaatcaatgatccctttgtactgcttctcagcactgatctgtttgctggcatgctggacctgcagcagcagtttgaccctctcgatgggggcgaccgcggtcttggagacggcagcggcgacgcccccggccaggaagtcctttaggaagctccaagcgtgatcacccatggtgacagctcgacgctctcagcccgcaggcagcccgttcgtgctctcgcccacgcccggcctggcaccgccgcgcagtccccgaccctgcgcgacg

SEQ ID NO: 319984 - DNA, 756 bp, Homo Sapiens
  misc_feature (147)..(147): n is a, c, g, or t
taataatttgcatatttttttattatctggatttttcttactgatagtgacccactccagagaaccatagaaaccactccctttcatatccaattcctctttctctattcgaagaagtagggtagctatagaatgttcttcagcatntagcagtgagatactgtgaattataataaaaggatccccaagttcttcattaaacataatctcccatttttcagaagcgctatttccacgttcacctgttccaatgacatacaatcttccagttccatctgacaaggtaacccaggtagaagatgagaaatggatagatgcacaaagacggttgtcacatgctgtcaaatctgtaggaagtcgaaacacctctcgtggttttcctaaggcagtgtccagcattactgttaaattcataattcttccaagggtatcaatatagtagacactgtcttgataccatgaatcacagtgcaggtaattatacattccaaaagcatgcatgtgttccagtgtatattgatcatctcgaagttttacctctgccacagctgcgtcaagctccagctggtaacaaggcagcggctcaagagagagcttgtaaccctcgaagcggggatccaacagaggtctcttcacccgtagggagcaattagccgccacctccatcgctttccagggccgcagcgtgagaattaataaagcccttgttgaaaggtccgcgcttcacgcctcgcacagagactgggaagcggcgtg

SEQ ID NO: 319985 - DNA, 837 bp, Homo Sapiens
acagttttcaaatattttactgaaaatgcatattgtacaattaatgtataatgacacaccagtgtgagaaacctccataggtatcatttccacaaatatgctatgaatatagagttcctacacaaaactatacaacttaccagatgtaattcctgttacgtaccatactcacaatcgtcttgaagaatatggagaaaaagtgctgagtgacaaaaacaggagccatgtgtgattttaataaatggaaaacacggcatttcagctcagtggtaaagcagtaaaccaatcagatgcttagctatcaagtaatcatgtgagaggaaacagaattagatccttacctcatactatatgttgtcagctaacactgtagcagtggtatatgaatcacataaattacctccaccaaaatgtattccatgtattagaaaaaaggaggtatgcctaacattgtgtcacgttccaaaggtgaattttgcaggtcaacgatatgacagttcaaggaagcatacattttattgtttcaagttgatttctaatgctcaaactatttacgtcaaaatttacagaaaataaatctctatatcaacagcttaaaataaatgacttacctaaagtccacttctgaactgcataactcctataaaggtttcagtctgtaccaattagaatgtcttcagttattagtaatagagcatcctaaatcaactggcttaaaaataagtttagtctctcacaaaagaaacagtccaaaggaggagtggctacaaggctgcttggtttggtggctcaaagacatcatccaggtctcagggtctttcagtatttctgctcagg

SEQ ID NO: 319986 - DNA, 862 bp, Homo Sapiens
  misc_feature (92)..(156): n is a, c, g, or t
ggctctctcacttagctttcaattgctgattgattgcatttagctttttactacttttttccccagagtcttggaaagagccacctaactgnnnnnnnnnnnnnnnnnnnnnnnnnnnnnnnnnnnnnnnnnnnnnnnnnnnnnnnnnnnnnnnnntattggctaagactaggccctgctcagaactcttctttccctgtgttttcctagctattgcgtgtgtatttttccataagaactttagcgtcaacttacctggttccatcgaaaagcatatgtgggtgtttttagggtgaccattaagcctgtcaatcaactcagggagaactgacatctttatgcagtcaagtctttccatccgagggtgtggctagaccgggaagcccccaaaagttacagtggggccaatatgccaacaccagggtggccattgccaaagactgagggcctggaatgaaatacacccctgttcagatgagcaagccctcctctctgccctacccagatgacaacctctccttgtatcatgcacctgagttgctctggttcccaccatctcataattactctaattctggagccattttgcggggaggcccagagtctgtgtggtgggaatggaaggtacccaactgcgacctgccacctggtcttcccaggagcatcactggcttgtgatgcccaggccagggccactctgctgctggacaacttggcagagcaggtctctgctgcccaccagaactggccctgagctcttggatatgtgtgtggcagcagccagggccaatccaagaggtggagtttggggtcctgagagttctagctttggattaccaggcagtatcgatgaggtgagtct

SEQ ID NO: 319987 - DNA, 897 bp, Homo Sapiens
caattccactgggccaaattgggaaaaaccaatttctataaagttccaggtttaactttttttaaaaccaggaaaaccttggaaaattttaaggtggccaaaccattttgtaggcactcccctaaagaaaataggaaataaaaaatgcattttatccatatgaccttgattattctgaattactgactataaaaaggctattgtgaaagatatcacactttgaaacagcaaatgaattttcaattttacatttaattataagaccacaataaaaagttgaacatgcgcatatctatgcatttcacagaagattagtaaaactgatggcaacttcagaattatttcatgaagggtacaaacagtctttaccacaattttccccatggtcttatccttcaaaataaaattccacacactatcaaactaaatcaagatttgctagtggataaaattaccataaatataccgtactctctctgaaacagctacaaacatcttgtttttgcaaaatatacaatgtttctcaatctttctgtccttatctcaatttgcaaaaatattttgaaacaatctcctttaaatgttattcttgttaatgagggcaaatcttttaaaatccacatgctagatcttgaaaacgcttgagaagaaaataaactgtgaaaggagtggttatttaaatacttcaaactgcacatgtgaaacagacccactatttaatcagaattctatgcaagttttcatccagtattatgatgtcatttaatctctgcataaattgagctgcacaaatatctatttccataaattcattcatggatactatacaaatagattcacagcagtatttggcacccacccataaaatttatttactctatcagggttgcaaagcta

SEQ ID NO: 319988 - DNA, 260 bp, Homo Sapiens
  misc_feature (34)..(34): n is a, c, g, or t
ttgatggccatttggaagtaaatttccgcagtanttcataggtgcacttaacacagactttgcttaatgaaaatgtcagttctaatagtaactgattcacttctgaacagaagtgattttaggcatatttcttaacatatatcaagcaaagtcctgttaaaagatctaaatgaagaatggagacctcagtgattaaagatattttgtttctgaccttgagcagattgcttacctgttctctagactataacccaacatgt

SEQ ID NO: 319989 - DNA, 701 bp, Homo Sapiens
  misc_feature (45)..(63): n is a, c, g, or t
  misc_feature (366)..(377): n is a, c, g, or t
atccattcttgcccaagtgtatcccctttctctccagcttaatcnnnnnnnnnnnnnnnnnnnaaagcccaggccaagggtacttttaactggaaactggggaggagggaagaacactagcagggagctaagaggcaggttgctgggtaagccatcctgctcctacctggtgcctgtatctacattgctgagtgctgtgcgccagtgcctttccttcatctgcagatggagcccatctctttccacctgggtgaggagaccctctgctactccaggggtaaaccttaaagaaggtgtcttgaagagcccaaaggacactcacgtgctaaggtgtccattttatgcatctttaaaatattttatttnnnnnnnnnnnntagccctgccctgtcttagtgccactaacggcccagttccatccattctgaatggaaaagcggagactgccagcactttccttggtcttccctttgtctcccatgatgtgttgttccctcatccctcccatccatttcactgtgtgtggatggatagcagagggtaccacgcagtccttgaggcagtcctgtgtgattccatgatcagttgtttttgtattttaactattcttccaaaccagcagatgtttggaaattaaggaaaaaattaaattctcatcaatggttgctgttatagttaaatcagtaaagatcttgagtatc

SEQ ID NO: 319990 - DNA, 479 bp, Homo Sapiens
accacccacaccaccctggagcactcagactgtgccttcatggtggacaacgaagcaatctatgacatctgccgccgcaacctagacatcgagcgcccaacctacaccaacctcaatcgcctcattagccaaattgtctcctccatcacagcttctctgcgctttgacggggccctcaatgtggacctgacagagttccagaccaacctgggtgccctaccctcgcatccacttccccctggccacctatgcaccagtcatctctgcagaaaaggcataccacgagcagctgtcggtggcagagatcaccaatgcctgctttgagcctgccaaccagatggtaaagtgtgatccccgggcacggcaagtacatggcctgctgcctgctgtaccgtggagatgtggtgcccaaggatgtcaacgctgccattgccgccatcaagaccaagcgcagcattcagtttgtggactggtgcccc

SEQ ID NO: 319991 - DNA, 1074 bp, Homo Sapiens
gcctttaaaaaattttttatcagtaattacaattttcaaaagtggagatacttggtaggcccctgctttcttggcccctaaggtccctctctctgttaaactgtagagctccttagaaccaaaaccaaaccacctttcattttaatgaaaatgaaatgcaaaaactggggctccaagcaaggaagaaacgtctacctgcagttcatctggggggttggtgggagaggtggtgggagagagtaaggctaagcgcccccagcaggcccaagttctctgtaccacacttggaggcaggtatatgggactgaaagtggatgttctcagccacaagcctgggcctggataggaaacaaaggataagactggaaggatgtcaggtagggtagacccagagcaccagctgggctcacttttcacgccctccatccattcgtcatgagtatccggatacagcaccacacggttcaactcctgagcacagcagtaacctttacacagacagcctgatttcccagaatgaattctcgtgtttacttccagatttaatgactttgactttagtagtcatctgaactatttattttactttgccagtaatatttagaccttatatatctttcattatgccatcttatcttctaatgtcaagtgaacagttgctaaactgtcttctgcatttatcacattaaaaatgtctttcttggaaaatcttcttgatatgaataaagtatcttttagagccatcatttaaagcaggtttctctccaacacgagtctgctgaggtggtgtgagctgtgaactctggctgaaggctttcccatacacactgcaatgacatggtttctgaccagtgtgagttacctgatgttgaataagggttgactttccactgaaggcgtttccacattcttgacatttatagggcttttccccagcatgcattatctgatcttcagtgggtcgtgaggtgggactgaaagcttttccatattcattacatccaaaggatttctcaccagtgtgaactgtccagcgcagaatgagatttgcaccatggttaaaggctctgccgt

SEQ ID NO: 319992 - DNA, 704 bp, Homo Sapiens
tgacagcgaagtttcatttatttgtgcaaatacaggcatgagcaagaatgttctaaacaatgtaacgatttccagcattgattacagaatttcctctgatcatttgatttggttatagatgaatttaaacttcaatttaagcttgacttttaaaactccccctctgcttcctgatgaaccagtataattcctaaaattacacctaaacaagtctgtcttgacacattggggtttgcctttagaaacatttagaatctagtatgggcaaggcggctggaacgaggtttgggatggcacaatgatttatgcttagttctgtttggaccactgatacaaaatcattgtcatttcatttttagggtttccataattgtagcaattatctctgaaacatttttgtccacacttatttggataaagttttctggagctgctgggggctccagagtctcaaactgggactgcaataattcagggggcataaaatgtccctctcttttgagtaagcgtccagagatgacctcaaacgacccgctcagatggaccaccaggagctgcatctcagcctgctttgcttcctttcccgactcctcacacttcagagctacaccatcttttccttgtgttaatatgtctctgtacgttttcttcagggctgaacaggctagaaccacacgctgtcccgaggctacatctctgtttag

SEQ ID NO: 319993 - DNA, 776 bp, Homo Sapiens
  misc_feature (265)..(274): n is a, c, g, or t
ttcgaggcgatggcgggcgtcaccgtatggggcggagtgggcagtaacgccgggtgaggaaaaccactacagaggagggcgtcccactttggcggaatttgcgtttgccggggcgccgcttccggtgttaggaccgccccgggggcggggtggttttgtgttgcgtggggggaagtccggcaggcgcacttggtccaaaggccgcgaaggtttgtccctttagggaagacaacggctatgggccccatgtttccgcttaaacctnnnnnnnnnncgcgcgcggccaaaaggaaaggggtttgggaaaagcttgttcgggaggccggagggcggccggacacggtggggtcccgggtcggcgcaaggagccgggcgatttaacttttctttttccttttccaggttcttatttttggccagaatagtaggtttcctttcaggagttttcttgttgaggactttagccatagcatgtgcccagcccatattagtcccaacacttgattctccatcattttcattttctttgtcacagggctcagcatcaccctcactgtcagcttgtattgcgtcatcatcagaataaaagtggtccttttccgatccacagcttccttcactatcagaagtgtctgtggcctcgtcttccagcaccgacgctacggctccagttaccattttcatcttcttctttggggtttttttcaggttttcttcctcactcacacgtgagtccggagcggcggctgccatttttctacgccggaagcgtcccc

SEQ ID NO: 319994 - DNA, 1015 bp, Homo Sapiens
gggctcagcttccgtcctctctgcttccttacagcacccccacctgccagagctgatcctccctaggccctgcctaaccttgagttggcccccaatccctctggctgcagaagtccccttacccccaatgagaggaggggcaggaccagatcttttgagagctgagggttgagggcattgagccaacacacagatttgtcgcctctgtccccgaagacacctgcaccctccatgcggagccaagatggggaatggaactgaggaagattataactttgtcttcaaggtggtgctgatcggcgaatcaggtgtggggaagaccaatctactctcccgattcacgcgcaatgagttcagccacgacagccgcaccaccatcggggttgagttctccacccgcactgtgatgttgggcaccgctgctgtcaaggctcagatctgggacacagctggcctggagcggtaccgagccatcacctcggcgtactatcgtggtgcagtgggggccctcctggtgtttgacctaaccaagcaccagacctatgctgtggtggagcgatggctgaaggagctctatgaccatgctgaagccacgatcgtcgtcatgctcgtgggtaacaaaagtgacctcagccaggcccgggaagtgcccactgaggaggcccgaatgttcgctgaaaacaatggactgctcttcctggagacctcagccctggactctaccaatgttgagctagcctttgagactgtcctgaaagaaatctttgcgaaggtgtccaagcagagacagaacagcatccggaccaatgccatcactctgggcagtgcccaggctggacaggagcctgggccctgggggagaaagagggcctgttgcatcagcctctgacctttggccagcaccacctgcccccacttggctttttttggtgccccttgttccccactttcaggcccccaggacctttcccttggccccttttgggtcccggatatccaaactggttcccctggc

SEQ ID NO: 319995 - DNA, 927 bp, Homo Sapiens
  misc_feature (130)..(140): n is a, c, g, or t
ggtgggaatgggggcgcggggggttaccccacaggggagagccgggcgagtgagcagggcggagaagtttggaggaaaccccagggggtcagggaggcaaggatggggcgggataagggcatacatggtnnnnnnnnnnnaagtagggggaacaatgggagcggcccccttgccccagcgtgcctcagatggtggagtaactcttgtgcggcgatccccggtagaaccggaagaagtgttgggaagcggcctggggcgcagccaggcactgctggagctcagtgtctgagtagagccccttggtgctggacatcagcagcttccgttccacgctgtccagggcaaaggtcaggactgcccgggcctccttttcttgcttggatgtaggatccagcacgagggtcccatcagagtccagggcgcaggcgaccccacagaagagagcccgcatgggcacacctgcatccaccaatgccatgcaggcggcattcagacaacaggccaggagagagccggcatcgctgacaacctgcagcaccacggtgatggaggtgcgggggtgcaacgtgcccagcaccaccgcctcgcacgtgttcctgatcagccgctcccggctcttctctgcaacaccaggcagcccaatcttcggcctcaggatcacttcgagtgtggccttgttgaaaatctctttgctgaccttcacctcggccggcccgtacacacccgccaggacagaggtgtcaccttgcaggaaggaagcagagccatctggccgcgacagcaggttctgttcgcaggcaaagtgccggaggctgcagccaggaccccgagggctggaccctgttccattttcagcacggattttggcgtcagtatgcatctcctcctccatcgcgccgagcccacgtgcggctgcagttgtcactt

SEQ ID NO: 319996 - DNA, 1187 bp, Homo Sapiens
aacgaagccattttcagtgccaaccgcctcacaggttccgatgtcaacttgttggctgaaaacctactgtccccagaggatatggttctcttccacaacctcacccagccaagaggagtgaactggtgtgagaggaccaccctgagcaatggcggctgccagttatctgtgcctccctgccccgcagatcaacccccactcgcccaagtttacctgcgcctgcccggactggcatgctgctggcccggggacatgagggagctgccttcacagagggttgaggctgcagtggccacccaggagacatccaccgtcaggctaaaggtcagctccacagccgtaaggacacagcacacaaccacccgacctgttcccgacacctcccggctgcctggggccacccctgggctcaccacggtggagatagtgacaatgtctcaccaagctctgggcgacgttgctggcagaggaaatgagaagaagcccagtagcgtgagggctctgtccattgtcctccccatcgtgctcctcgtcttcctttgcctgggggtcttccttctatggaagaactggcggcttaagaacatcaacagcatcaactttgacaaccccgtctatcagaagaccacagaggatgaggtccacatttgccacaaccaggacggctacagctacccctcgagacagatggtcagtctggaggatgacgtggcgtgaacatctgcctggagtcccgtccctgcccagaacccttcctgagacctcgccggccttgttttatttcaaagacagagaagaccaaagcattgcctgccagagctttgttttatatatttattcatctgggaggcagaacaggcttcggacagtgcccatgcgatggcttgggttgggattttggtttcttcctttcctcgtgaaggataagagaaacaggcccggggggaccaggatgacacctccatttctctccaggaagttttgagtttctctcccaccgtgacacaatcctcaaacatggaagatgaaaggggaggggatgtcaggcccagagaagcaagtggctttcaacacacaacagcagatggcaccaacgggaccccctggccctgcctcatccaccaatctctaagccaaacccctaaactcaggagtcaacgtgtttacctcttctatgcaagccttgc

SEQ ID NO: 319997 - DNA, 653 bp, Homo Sapiens
ttagtagcaacactcaagtctttgtcatccgatgcaggcaatgaatccacatgcagttcatggaaaatgctgactgcagattcatcggaacttcccacaatctgatttctcctttttaagtgtcttctttttatgttccaaaatttgttgttgaatttttgtcaaatgatgagaaatagcgtaatcttctgcatctcgtccacacatgtcttgagcgaagataatattttgcttaagaaggatattgacaatacctggtgagtcatagtatacagcaagtatgagagctgaccgtctcagcctatcaacggcattgtgcacttgctttctttttcaataaaaattccaccattttctctttcttgcaaattatagcgaataaaagtggggtattattgtcctcttaagccttgccactgagagatgatacatcagtttttcagaaaattagcagcaacagcaacatgtccctttattgtaagttgctttagttttgtttgagttttaagataaagcctatttccagggaatattttctttcatgtgttgttttacacttgtccagtgcttcaatatgtgcaccatgggaaagcagtttttctgccagtgaggtgctgtcactatacacagcataatggagagccctcgtgccg

SEQ ID NO: 319998 - DNA, 541 bp, Homo Sapiens
aaggctctggcatcctgctgtttatcttccatgcaaactttttgggtaaagaagttattgctcggctctgtggaccgtgtagtgtacaagctgtagttctgaatgataaatttcagcttcctgtttttctggacagtcattttgtttactcattcagccctgttgcaggtcccaataaactcttcataaggttgacagaagcaccctctgccaaggttaagttgctaataggtgcatacagagtgcagctgcagtgaccaaacagaagggactgggcggagttctcttcagaccgattcctatactctctttgacagcagtttggaattcttctagcacatctatgtaaagttttgtctgtaaacctcttgcagttaagcctgttgtctgttgtagtctgtaagatgcgacatagctgtgtctgtgccagtatgccggaatctcagtgcagtgtccagactgcgtatttcagtttttccacaatgtggatagtacatatgaggattatttaagaaaattaaagacttcactttcttttttc

SEQ ID NO: 319999 - DNA, 509 bp, Homo Sapiens
aattaatactttttaacgaatttaacaggtggcagaagtagggtttagcctaagtttagacaataaaagcaagacaatttgtcctgaagattttcacattcatggaacctacaattcacaatggaacctacaatgatcccgaattgcatcactgtcacagaagtgtcaagtaaaagctctgtttaatattccccaaatggaaaaccaatcttagccactggacctgttggctctcaggttccagactgaggtggaacttgatgattatttagaagtcttgtcgcataagaatttgttccttctgaaagatgtcttcttggaacactttccttaggagaagaaaagcttggagttgaaagagcagttggccgaaacaacagttcagcattaatctgttggagggaaaaatcatcaccttaaaggaactatttctagtgtgacatgcccaaaacacaagatataatcttcctcttcccccttatcccagaagacacaaaaacaattccaaa

SEQ ID NO: 320000 - DNA, 815 bp, Homo Sapiens
  misc_feature (789)..(789): n is a, c, g, or t
cctgtgtatttgcaatttttctttgtcagtgtggctttctgtcatcttcctttttctccagtgagggttctgccactgtctcaatcccttggttcctgcaaaaaaacagctaaatgtgctctcagggccagtggtgatgttctgtgttgcagccccagctcttgaaagtgacctggcccagatgagctctgcctgcttgtcatctttaggtcctgctgcccctgctgcctcagccctcaggctcctaactgctcaagccagaaggagctacaaagccaaatcatttgtcatttttctctggcagattgttttaaaatctccctcccctcttttattttaattatgccacctgtgttaatcctatagcctgcttctttgctttgtggattactgatttcaagttctataacttggggaaagttaggttgagtgaatgggaggacagacactgaatgtgtgttttggaaaaatggactctctatcttcagattattatagcttctccacctatcacctctacaacttggccttcattggagaagttttagttggcttattcctggaacaagaccacctagaggcttttagccttgtcagcctgccctcttctgaggtttggaccttgttttaaattgtgtgcatggtgggcttgagactctcttgtaatggaggtaatgggactatcactgaggggttcagcctatccaggtaggctaccgttctagtcatacccatcacttaaattctgccacagtctgcacagacggttggtcctccaggcatattgtnctattaagccaaataggtggacatca

SEQ ID NO: 320001 - DNA, 812 bp, Homo Sapiens
  misc_feature (17)..(17): n is a, c, g, or t
  misc_feature (94)..(94): n is a, c, g, or t
  misc_feature (405)..(445): n is a, c, g, or t
gaacagaactttccctnccggttttaccaatctaccactgccagggtggcaaaagggaaaaccaggtggataaaaagacagagacagttcattnatccttaggcactccagtgccctacccaccaaaggcaagacagactctggccacagagtgaagaacagctcagaaggtaaggagagagtgctaaaagctgaaggatgtcagggtcactccaaacttcaaaaaattgctgaggggtggaagggtgtcagaaatgaggctctcgtggataacaatatgccagaaggctatctgcccccgtattgcagatagattgaaagtaaggatcagaatagggtaagcttcggttataattagtatgtggaaagggctgccaagagtcatattggatggtagcatcatgnnnnnnnnnnnnnnnnnnnnnnnnnnnnnnnnnnnnnnnnntaaataaggatgtatcactagtttaacaaagggaaaaaatttgagtgtctcggaagatataattagtgctaaaataggatccgaaactatatttttatgtttatatatataatgacccgagtctataaaagaaaatgtaaataaatacacagacatttgcagaagaaaaataaagctaaaaggagcaactctaaggttaagagttgtgatctctgagtagtggattatctgtaattttttccctagaatttttacattatttttggagccataaaaattggttgttttaaaatccagtggtgctctgtactgcatctaggtcaattcaagtatatggtaacacctgcccctttctcagttatcaccc

SEQ ID NO: 320002 - DNA, 1326 bp, Homo Sapiens
ttttccgcataactcttttaataaataaagcatattcatggcttagattttaaatcacatttacagatgagggaaaacttctaggcctaaacaggtaacagtaaagcgactactgctggaaggagtggtgtgccacatgcgccttaagcctcaagagtggggactgcagggccaaacaccaaatacatcacctttaggccagacggagagtggagacccaggaagcccatgcaaccaccatctgccccctcccctagtgctgcagaaccggctggacactgtcacactttcagaagaactggaggtgggtcctgatcatattacatgaagctttccaccattgtgaacaattaggcaaggcatgagtgacagaggggcatcgctgataaatacagagcaatactggggcagtgaagaggaagctacagagacattcgtgtttcttcaaatatcagaagcttccacatcacagcaggagagctgacgacgagctccacctcctgaaggcttagtccaaaaacttcctgttggcatttgcaccaaacaaggctccccggacttctggcatcatctgctgggctatgagatccagccggctttccagggtgttggaaacctttattttacgatctccattatagatctcaactccaccagctatgtcttcaggcaggtaggactcctggtcaatttggacatcaacatcgtttttggtggcaattttgtacataggaattgccttctgcactgcagcctttaccagagggaaatcttgtttcctgcaacgaacaatcattcggggctccagcaactggtacaaaccctggagaaccagtccatccagcagcacttggtacctggttgtatcttttaccaccttgctgagtctctgttttgcttcatttagtaggtctgtgataaggtcatctcttgctctgaggactttgagtctcgcttgattcatcaaattggacatctgaattttcttctgctgctcaatctgtttctctttcttctcataatattccataatctttagtctttgggtttgcacaagccgacctttctctatgttgaactcttcttctgcctttgcatctatttcttctgctttctcattggcttcttgttcaatgaaagccatcatatgctttatctgcttttgcacgtcagcatcgctgagagccatggcgagagcaatgctaggccggtgaacagtaggctcgagtttaggtttgaaaggtgaggtgagagaaatcggcaaagggaacccctgcgcagatctcgggttcctttactttataaccgcgggttccggttcctccc

SEQ ID NO: 320003 - DNA, 1698 bp, Homo Sapiens
  misc_feature (1654)..(1654): n is a, c, g, or t
tccatggataaaatcggcatttattcagaaggcatgatgcaggaagaaactccccaagtgggagacaatggctggcccccctgcaaggagaacaaggcttcagcccttccctactcccagacctgccgggaaggctgggagcacagttcatggagggtctctggggtgggcctgggtgtctgacctgtccctctgccccacaggtgaatgtgacctgcgtcctgaggatcccgagtatcaggagagctggcagaggaagtcatgcagaggcaaagccaggagccccgacagggagatccccagtgtgtcagagatgcaggtggccgccattgcaaactcccggtgctcatcactggtctccagggcgatgttgtggaaggtgttcacgtaggctgcgcctcccaggagcccctcatacagaatgatcaggaagacgaggtagatgcttggcagaaagccgaaccacacgtctgccagcaggaacaccaggttgaggcactgcagcagggccagggcccaggtgaaacggatgcgacagcagcggagagaagagcgggaggcaaagacgccagcctggtacagcatctggtaccagcggtattgctgagcgtgactcagggaagtgttccagaaaaagaggagttcaaaaagtccctggttaatgaaatactcggcaaagtaaactacgaccaagggaacaatgtaccacagcagacccttgaacactgtccacctttcccgaagggagaggctggagctggagcctggcttcgactccggggcctcggttcttatgaggggctgccgggctgcgctctctgcttcttcttcccctccagggtcctgggcctcaggagatgtgagcaacaagaaatagctggccagcagcagggcagggatacccagcatggacagcagggtctgctgaggggagaggccggcctgggtgaggcccaggtaggacagggcccccagcagcccagctcccccagtccctgaggaccaccaggagaatcacggccctggggtagaaggcagtgagggagaggaaggtgacctccccaagggcctgatgagatgctagcgaagaccacaccacacaggctggtccccacagaatgagaaaaggcaaccaggacgaagcttccagcagcacaaatcccactgacgagaacccgggggctgtagggcagcaggtgaaggccaagaggagccaacaatttgatgacgagtgtggggaggatgtccgccaggagcacagcagccgtagagacagagttgcagtcaaatcgtgatgagctgttgtgggggatcggcgttgggcctgggtccacatggctctggtttcccgatgtcctcttgtggctaaggatgtcgtgggcggcactcagcatcaccacataagagaagttgttgcaaaggcccagcagccagaagcccaccgcgttcttccaatgcgcgccctgatggtccaacagagggagccggggctccgggacggtctcctccccctcggaatccgaaaagcgccgccgcgagcctgcacagcctcccatcgcatcaagttcaggtcccccgagggtccagggtcatagagtgtccaaagggggctcccacgggagggatgagggtctttaagagcagcagaatgttngcactatgcagaggccatcccgggaatccggaccggtccagcct

SEQ ID NO: 320004 - DNA, 1495 bp, Homo Sapiens
  misc_feature (48)..(68): n is a, c, g, or t
  misc_feature (1351)..(1351): n is a, c, g, or t
  misc_feature (1394)..(1394): n is a, c, g, or t
  misc_feature (1434)..(1434): n is a, c, g, or t
  misc_feature (1444)..(1444): n is a, c, g, or t
  misc_feature (1465)..(1465): n is a, c, g, or t
  misc_feature (1470)..(1470): n is a, c, g, or t
tgagctaccggtccggaattacgggatatcgtcgacccacgcgtccgnnnnnnnnnnnnnnnnnnnnnctcttaatattctggagtcatcattcccttcgacagcattttcctctgctttgaaagccccagaaatcagtgtggccatgatgacaactacagaaaaaccagaggcagcttctttgccaagacctttcaaagccattttaggctgttaggggcagtggaggtagaatgactccttgggtattagagtttcaaccatgaagtctctaacaatgtattttcttcacctctgctactcaagtagcatttactgtgtcttcggtttgtgctaggcccccgggtgtgaagcacagaccccttccagggtttacagtctatttgagactcctcagttcttgccactttctttaatctccaccagtcatttttcagacctttataacgttcctcaattccaacactgatttccccttttgcattctccctccttcccttccttgtagccttttgactttcattggaaattaggatgtaaatctgctcaggagacctggaggagcagaggataattagcatctcaggttaagtgtgagtaatctgagaaacaatgactaattcttgcatattttgtaacttccatgtgagggttttcagcattgatatttgtgcattttctaaacagagatgaggtggtatcttcacgtagaacattggtattcgcttgagaaaaaaagaatagttgaacctatttctctttctttacaagatgggtccaggattcctcttttctctgccataaatgattaattaaatagcttttgtgtcttacattggtagccagccagccaaggctctgtttatgcttttggggggcatatattgggttccattctcacctatccacacaacatatccgtatatatcccctctactcttacttcccccaaatttaaagaagtatgggaaatgagaggcatttcccccaccccatttctctcctcacacacagactcatattactggtaggaacttgagaactttatttccaagttgttcaaacatttaccaatcatattaatacaatgatgctatttgcaattcctgctcctaggggaggggagataagaaaccctcactctctacaggtttgggtacaagtggcaaccttgcttccatgggccgtgtagaagcatgggtgccctggcttctctggaggaagctgggggttcatgacaatggcagatgtaaagttattcttgaagtcagattgaggctggggagacagccgtagtagatgttctactttggttctgctggttctctagaaagaatatttgggttttccnggtataggaatgagattaattccctttccaggtattttataantctgggaagcaaaaccatgcctccccctagccattttacnggtatcccanttagaagggccatgaaaaggngccgngaaatccccacaacattgatgcggc

SEQ ID NO: 320005 - DNA, 458 bp, Homo Sapiens
  misc_feature (433)..(433): n is a, c, g, or t
  misc_feature (441)..(441): n is a, c, g, or t
agccagccagccaaggctctgtttatgcttttggggggcatatattgggttccattctcacctatccacacaacatatccgtatatatcccctctactcttacttcccccaaatttaaagaagtatgggaaatgagaggcatttcccccaccccatttctctcctcacacacagactcatattactgggtagggaacttgaggaactttatttccaagttgttcaaacatttaccaatcatattaatacaatgatgctatttgcaattcctgctcctagggggaggggggagataaggaaaccctcactctctacagggtttgggggtacaagtggggcaacctggctttccatgggccgtgtaggaaggcatgggtgcccgggggtttctctgagggaaggctggggggtttcatggacaatggggcaggtngttaaagnttatttccttggaaggt

SEQ ID NO: 320006 - DNA, 982 bp, Homo Sapiens
  misc_feature (102)..(102): n is a, c, g, or t
aacagaatctccagcaatgattatttccaaaatgtaaagatttgaaacataatttatacaaaactaaaaaccacaaggattcattcttgctttttccttttntaaaaaatccagacaatttgtcacaagaaagttcggcatgtgatagaagctgtagcctcagtcaccctcggaatcgctgtccctcttcatgaggacagagcgccgcactgaggacagcaacacgtcttcaatcggcttcttagggttttcctccaggtctgtcataattgctccagattcagacagtttccattccaactcatctcttgtcaggttcatgccgccaaacaccagaggaccaataaactgagccttgatatctccttccaggtaaacaaatatcgtgggcagattcctatcaggataattgggtatgcaggttgttgaaatggctttgataaatttgacatcaggaaacttcctggcaagtccactgaggtgctgatttatcagggcacagaggggaattccttgtttgtaaaggtgcaagatgacccacaagccctcgccagctttggtaacttcttgaacataatccttccctgagatctccaaaacttctccaaatttattcttcagtttagttgctttccactcagccagtctccgccgtctgtacatttcaatagcacgttcatcctcctcattaaactcgtcttcatgatcctccagctcttccaaagtcatatcttcatatgttttcaccactgactgctggaggatgcgctgctcctcttctgcctcctcttccaattctttcagactttccttggggggtaagataccctttttgcgtaagatgtcattccattcagtgtctgcgttggggtcctgcatcttgtttccagttcagttgctcaaaccagctgtgccgcagcgcccccgcccctcagctctcttttgtgcacgcgcacagcgccgccacgcctcttcccccccc

SEQ ID NO: 320007 - DNA, 968 bp, Homo Sapiens
  misc_feature (358)..(416): n is a, c, g, or t
  misc_feature (478)..(506): n is a, c, g, or t
cctctgtctctcttgttctgctgtttctccttcctttcctcggtcccttcccgctctcctctgcgtcgcccctctttccgttctccttctttctgctccttttctgctttcctttttctgcctcgctcatgttcgcggtgatttatcgcattgcatgctcagatgaggtcgagtaccatcagtcggcccagcagcgtcgtgtggtcgttccgttcgtacgcttgattttctcctgatatcactggtggctctgcttccgtacgtctgtttctcgctccctccttctctttttcgtttcgcttgtgttctgtatatggtggtgttgctgtgctgttttctttctctttgcggtgtcgtnnnnnnnnnnnnnnnnnnnnnnnnnnnnnnnnnnnnnnnnnnnnnnnnnnnnnnnnnnntgtatgttcttctggttgcttcgtcgtcttttgtggtcgtgtgttgtgtgtgtttgtgctcnnnnnnnnnnnnnnnnnnnnnnnnnnnnnctgggttgggttttttcatgggtttttgttttgtttatttcgaatactgaaaaagtcctttgggctctgtggggttccccacgctcacggctcctttctcccacactcactgcccttcttcccacagcaaatctatttcaaggacagtactttttaaaatgattaatgttgagttctcaactagctctgcagaactagaggagctgtttgcatctgtctgtgcggatggagtttcttttatctgacaccaggtctccaaccacactgaaacaaggcatttatctacagagctcaactagaaccccttttcattaggctactccacttccttcccctcatacctaccccacatcagccacgtggttaagaaggatagtcaggaatgtttttaccaactccaagccctaattcatacggacgcgtgggtcgacgatatcccgggaattccggaccggtaccgcc

SEQ ID NO: 320008 - DNA, 983 bp, Homo Sapiens
  misc_feature (357)..(357): n is a, c, g, or t
  misc_feature (366)..(366): n is a, c, g, or t
ctggaagaattaatatttattgactctactttggtattattttcagagtgagaagtaactttaagtgtattaaaatttcattcatttttgcatgaaccaaactttccctacacatcgctgtccttgactgtccagagtaaacatgtctaactctggaatgtttcatttccaataaaagtattcagcctgtcattttgggcctaagtaaaatgggataaattagcaatctgaagttaggatcctagccacagagggccatgtctcatttctggtttaagtgcacccctcatccccagcccttaccttcttctttctcttaaggattgagacaatcctcttggtgctcttggtgcaggntgcatcttnggtcacctcttacatgagggccacaaacttggtaaatgggtggcctggagatggggttgtactaggtatgtgaccttggtgattgccttgtctcagttgtagtatatggctgagtcacattcatagtacactacatacacatactgaccaaatgccaatggctaaggcttgaaattatttcaccaagacctaaactgaagattaccatcataaaataagcttctagaatccatgaataagtaggaaatcatatttaaaatttactgtaattttattaaagctcattttttaaatttaatgcagtgcagagtcattaatttctcagcagtatcaggtgctaaattgctcactcattaaactactaatttaagatagttattttaaattatagaacaggaagcaacttacgaggttgcaaccaaattatatttattttttctccattagtaactgactaaaagtgttttcttcaactctgggatttgaagattttgtggtcagtggtgatataatttcactgaagcgtgctcacagactaaaactgtgcactactcagtgatgcgtcctgaatgttttcagagacaaacctaagataatgttgcccttgtttactttca

SEQ ID NO: 320009 - DNA, 1387 bp, Homo Sapiens
  misc_feature (177)..(177): n is a, c, g, or t
tgtcccgggtgcgagcatagccggacggttacgccggggcagtgtgacagagaagcggtgagtcgattttacgagagggagcttgtcttcttgtgtattagcgcgcgtgtagtttttctaactggtcgacgatgggcgcatcgtgggcctttccccggacgcggatgaatgcagcgnccggttgttttggaggggcggtgcatcttgtagggtcgctggcgggccactccctgcaagccgcgccggcgcgtcggcgttccttggtaggtgcaccgcgccgctcccattcggggttcgcccccgcttttttacctgtttgttcaaagataacctgggtttcggagactagcatgatccctgtgggcggttcaatgcctttttgtcaagcaccggaccaaagatgcctcgagtgttgcctcgctgggccgcgatctcgttcgcgtttgtttggagtttctaatccaacagttattttattaggatgtcagccctgggtccagagtgagagatagggacaggggacagcccagcgaggctggtcgggggtcaccccaggatgttccaaccacaggggcagcatctcctccactccacatgctggccaagggcacagagctgccgtatcgcctgccaagggggtggctcaatgctgctgccctggtcctgtatgggcccggggtgccgagaacagacagcaagcctcaggcgccggtcctttgagctttcttgatttcctcagagagcgcctccttcagctctgcgtaggcctggtccaggctgtcgttaatgatgaccacatcaaacaggccgggctccttgctgctctccatgtcggcctgggcagcagccagccgcttcaccaggctctcctcggtttcagtgttgcgctgccgcagccgctgctccagcacgtgcagtgaaggcggctgcacagagatgtagatgggccgcagatcggtggccttgatgttccgcacaccctgcaggtccacgtccagcacacagatgcggttcatggcctgcacggcctgcaccgccaccttgctcgtgccatacaggttccccgagaactcggcatgctcgatgaagtcgccggctgctatgtcacgctgcatcacctccctggttacaaagtagtaatctttgccgttctcctcgccgggcctcgggttcctcgtggtatgggacacgctgaagccaaagatgccgctgtgctcctggagcagcctcttcagcagggtgctcttcccagctcccgaaggcccgctcagcaccacaggcctggggcccgacatgccgtccggtggggcccggcccagggcggccgcagccagcccggccagcgggcgccgcagcatccggagccacctcttccgcccactgaact

SEQ ID NO: 320010 - DNA, 889 bp, Homo Sapiens
ggataactcagtttcaaataaaccatcttggttactgtgcttaatttggaccaaattttatttagcttaatatggacactgacacattttggggggtatacattagacatatcagagcagtgtatttctggatcattttttaaatgacctcttctaaaacataactgtcacttacctgaaatgctgcatcctaaaattccaaaattatattgagcaatcgccaaggcctaaagccaactgacttaaaggtaatcatttcagctaagattaaatttaaagcctaagaatgtatagagctagttttaaaataatgatctcagatttttaaaaaggatataggaacctgcattgtcattctctgaattaagaactgatggtttctatcattatttagccccacctttgtattttaaaatccttcagaatacatttatgaaccaatgcgactggacttagccacacacaatggaaattcagaccttgactatttggtgtttccagttcacaaaggtgatgaagactgtcttgggagcagcttaatcccaaaatttgtacatttcttgctgctcctggcgtggaaacttaagtgagaccaccaaatacattggtcctgtccaattctactgaatgggggtggacctggcatttatctggccaaaaacaggagccagagaaatatgaatataccaaagttgtttgtttagcctccaacttaaattacattagtcaacttatagatactcatatgatcacttttctttttagatactacatcaactagattcaggagtatatcatttgcagtgcttgtattggtttaaaatgtaagattttaagatcctctaacactgtactaaaacatttcaataaaatcattctgactgcgttc

SEQ ID NO: 320011 - DNA, 866 bp, Homo Sapiens
ttttaaagagaaactttggccccggactcgggcaatccaaggggtggaggtactggcccaggaaggtggagtaggtttcaggccctggggatttcaagtgcagactgatggcctgggagggggccaaagagaccagatcctggcagcagctgaggaggtgcccaagggcactttcaggcactggggccatcagctggttctgtgggcaggggttgggggttgggatgcagggtagtttgggctggcctggaatctccctgaggccaccctgccttgtctacctagatcatccactggtcctgatcctgttcgttgccttccatgtccacctcattgacctctccatcatccggtgactcattgtagtcattcatctcgtccatgtcctgcatatcctcatcatcctctgagtcctcttcactatcctcatcatcttcatcatcctcttcttcctcgtcatcatagtgctctgaggctggcttgccaataggaaccaggttgttgtctttctccgcgatgctttggagccaggcctgatgctgctgttcctgctgctgcagctctgtctcttccacacagggtcgatccagattaaaccacagagtctcagtcacacgagggaagagtgaggggaacaaagtggacatggctcctagactggctttgagtcctggctccaccacttactagctgtttgaccttggctgagtcacttaacctctctgagcctcagtgtcttcatcgcgccgggaggctgctgccggcggcgacccggaagcgcttcacccagcctgagcggaagaacccaccagaatccgggactcaccaaacgcatgcgtccttcgtctccttttgttttccccccc

SEQ ID NO: 320012 - DNA, 1344 bp, Homo Sapiens
ttagacacccaaagaaagggaaaaaaaatttattaggtccaggaatcaaagatgacttgatagaattatgaatacatgcagaattggatggttagaaatgaaatcaatctatttaggtccagcctaaggttctgatagccaatcagtagacacaatcagagtagtagtattcttaagaaaccaggataaatctccaatgtgcatgagtttaatgaaccagatagattattgtatcgccaatatccacccttatcccattctcagtcagatgaattttcttgctcatgaggtccacattgaaaacagcatgctcagaaatgggggtcttctcggtgtactcctttcccaggacaggaactcgtcgaggccccaacagtggatcatcaaatctcatcagtttcactttggaaaggtctttaattcctcgattcattttcattaaacgcctgattatggaatcacagttatctccttgcctgatttcaattttggttgagaagtggccattggatggctggggattcaccagagaaacggacacaccaggttctattctaaaaacattaagtggtttcccaggacagcagtcttccctgattttatcttctgcttcggaggcaaacttgacttctatgtgttctagctcaagcgaattagtcagatagactatattctccataagcacagccttttcatcaaattctaattgcaaatccagaatacgaggccccatcttctccagattttccttaatcatggcaacaaatggcatgactttcttcatgtatttcttcagttctggcatactgcctagttcactagcaatgactttgttgtcaggcagttttccgttattggcctcaaagtgtttacgtagaacagacagggtggtatgttgccaaggtggatagttctttgccacatagatggtgcaatgtgagggcttctgcaggggttgtttgtcggtcttcttccctttagctggcatcatatagttcttgagtcgtagtctaaggtcatgtgttacttccataagatactgtgaggagtgtattaaaacttcattaacaggacctgccacaggccatgaagcattcataattgagtcaggctttcccaggagtgtccagatgtgctcacacaaatgtggacagaatggagcgaggagaagtgtctgaacttcaataaaccggaacacaagttctctgtgcatcccttccacagccaattcacggtacttatcttttgcggcctgaaactcaaaaaaccctgttttcaaagcttctttaaacatcatcttttcatagttttgatctgtttttcctcgtgccgaattcgccaccc

SEQ ID NO: 320013 - DNA, 941 bp, Homo Sapiens
  misc_feature (378)..(490): n is a, c, g, or t
  misc_feature (561)..(616): n is a, c, g, or t
  misc_feature (734)..(735): n is a, c, g, or t
tatttctcaattatatatatttagttttcatttctacagagaaagaggtcaacaaagttttgtgaactaaattgtataagtttcttttttaggaaaggacttcacagagaacaaggcaaagaataagtaatacaacagcaaatttccaaaaaattcaagtagaatcaaactttgactatagatttggtcaaattagtgctaaacagcctctttaacaacattattattcaactgatttatataatttgctttttagtaggtcaaatacattgttttaaatcttaattatttttggattataaaatacatgcttagtgtaacaaattcaaataatcaggaggataaagtaaaataaggggccgggcatggtggctcatnnnnnnnnnnnnnnnnnnnnnnnnnnnnnnnnnnnnnnnnnnnnnnnnnnnnnnnnnnnnnnnnnnnnnnnnnnnnnnnnnnnnnnnnnnnnnnnnnnnnnnnnnnnnnnnnnttagccaggcgtggtggcacatgcccctagttcacactacttgggaggctgagatgagaatcacctgaacnnnnnnnnnnnnnnnnnnnnnnnnnnnnnnnnnnnnnnnnnnnnnnnnnnnnnnnnagacagagcaagacactgtctcaaaaataataataaggacgtccaccacactttacctaccaaaatgcccattccccaaagatgattgctgttgaacgattagggtacctttcctganntttttttgtctaagcacatttaaaaaccaagacttttggttttgagcgatagctctgaatctcctttaggtatgaagtgtaggaaattgtatttctgcagcaaacttaggctttgcaacatcaagtgtggattcactggaaattatttgaagtaacacatagcgatcataatagccaaaaaatgttgggaaatgaaaaagggtggg

SEQ ID NO: 320014 - DNA, 1315 bp, Homo Sapiens
ccattttaaaaaaataaagtttattaaatcataatgttgtctgaatttaccccctttgtcaaaagtcaactcaaagcttccaatgtagtcagtctataattccttaatcaaagtcagcaatttatggacagcttcagcatctacagttgacctttcactagccaggcaaacttcccgaaataatcgtagggactgattcatcttctcaaattctcttgcttttctatgtcccttttgaataacttcctctgggaaattaccaagccttgctgcattaaagccatagcttttaggacaagctcccttaatgaatttatagaggaacgtaatagtctcctggctggggtcttcacattcattttctaccatgcatgccatatgtcctaggcgcacagcaacattttgagaataatcttctactaatgaatggtagtgagttgaaaataatgtacgacattttatagtctcagcaagttctttaacaactgcatttgctattgccgtcccatcaaatgttgcagtacctcttcctaattcatccacaagcaccagagaatgtgctgttgcatgcatgagtatgctggcagtttcacttaattcaacaaaaaatgtactttcacctgacattattctgtctgaggcaccaagtctagtaaacactctatcaattggtgtgagcctgcacacttcagcagggacgtaacaacccatctgggccattacagctaataagccagcctgtctcataagcgtagacttgccccccatatttggtccagtaacaagcacacaataggctttgccattttcctgctcctcttcctcacagcctattagaatgtcattaggaataaaatcatctccaaaaaaagtcttcgtaatgcaaggatggcgtgatcctttaagctctaagaaggggggggtatcttccggcaacagaattactgggcgacacataggaccatcaccccctcgactatagttagccaggcacagtaaaacatccaacactgcgatacactctacagcagactgccagtccttgtaatttttatcaaagttatagaacagtcgccgcatgcagtccttcaatgatacatccctccgttcttcagcatttatgagattagccaacttcttttcaatagttttggtccagtatcgtttacagcccttcttggtagatttcaactcgtattcttctggcaaattgcgagtggtgaaattctcaggaatttccagctggtaacggttcctaccaatcccccaatagactatggtcctacagccaattctgttgcgctgtttctctagg

SEQ ID NO: 320015 - DNA, 1187 bp, Homo Sapiens
  misc_feature (36)..(36): n is a, c, g, or t
  misc_feature (55)..(55): n is a, c, g, or t
  misc_feature (1119)..(1137): n is a, c, g, or t
ttttccctggaggtttaagaactccagggagagccnagagagactatgaccgccntacggctagagtagccacgaagagaacacttccggggcggggctatctggccctttcctttccgcgtgtagaatgtggggcgcctgtaaagttaaggttcacgattccttggccaccatttccatcactctgagacggtacctgagattgggggcgaccatggcaaaaagcaagttcgagtacgtgagggacttcgaggctgacgacacctgcctggcacactgctgggtggtagtgcggctggacggccggaatttccatcggtttgctgagaagcacaactttgcaaaacccaatgacagccgtgctctccagctgatgaccaaatgtgcgcagactgtgatggaagaactagaggatattgtgatcgcgtatggacagagtgatgagtacagctttgtgttcaagcggaaaaccaattggtttaaaagaagagccagtaagttcatgactcacgtggcctcccagtttgcctccagctatgtgttttattggcgggattactttgaggaccagccccttctgtatcccccaggctttgacggaagagtcgtggtgtatcccagcaaccagactttaaaggactacctcagctggcgacaagcagattgtcacatcaataatctttataatacagttttctgggcacttatacaacaatctggactaacacccagtacaagcccaaggggagattacaggcaactcttgcaccaaacaaaaatgagattttgttttctgaatccaccatccactcatataatgaacctgccccatgttatagaaaagggactgtggttgatatggccacaaggtgggatgaagccgatgaccaaagaaaatttaccctgcccaccctgaaatggcaaagaaaccaaaaatggccacggacccggcacccgggaaaaagtccccctgccccttgcaccttgcaaaaaccattggctgaatgcttttctgggaaagcgcacctctccccaaaaattcttacaatgaaaacacacctctacccctttctgcccctttccctttcccggtgggcgcctttaatccataggacaaannnnnnnnnnnnnnnnnnnagggggcttcctttgctcctctagagggcgttggcaacacatctccacac

SEQ ID NO: 320016 - DNA, 765 bp, Homo Sapiens
aaatactttgccctcccgaatttaaatggcttgcctctagtctaagggcttagaaaaagggcctggttatttgaactggttgtcaatcaaggtccccttcattttcgctttcttggcttccaattcagccagctcttgcagtcgcctcttgctcatgccttgcggctccagctgtttttcaatcactttggcattctgtgcatatgagtcagcaacttccctagcctcaatctcctcttcctcttcatcaatggtagacacggtgacagaactgaacttgcccatgtctttggtccgtttggtcatcatcaccttcttaggaggctcttgtttctgagtatatatgttcgttttcccaaaaccctggccaaacttgactactgctccatccacaatgaaggtaacaggagcattctttggctgggattggtagaagagcggcagtccacactttgcacatttcttcctgtactgtcgttcaatgccttcaggtctccgcagatacatagtctcctcatcttctgtgttacaaaacttatgggcatgtttggcagcatcaatcacacgggaccggtcccggggcctcatgggcaatttctctaactggcagtccagcactaggaccatctggccgcacaaacagtagtaaacatggaggggcttctcgccgtcgtcatattcctcccggtcccgagtgtcagagcagactactgaccgagacactactttcggcatggttcccaagagcaatctgaaaactctccc

SEQ ID NO: 320017 - DNA, 881 bp, Homo Sapiens
gaacataaaaattctttatttaacctaatccagccagtattgagatagtttgctatattaaaaacaagacgtttaaaaaaattacagcaaagttagcaaggcagtgactaattaagtcactaagtttaattttatattcttcacagtcatttcataatcatgtaatggtaaacaatattttcagccactttggagataagttaacttttgaaaagaatagaattctagtagtcgtcattgaattttataaaagaggtttaaaacattaaagtttccagaaataacacagtaaagaaatatgaaaataaactggaaaataaaatatacccacccatccgaaaaatctacatcatctctttcatttgtccccaatgcctttcttttacctctccatttacttttcctagagtgcaaacagattacttagcaattaagaaacaactactgctttgtaggggcgattttgagcctaagtgctgctgttcctttaatctctcagttaatcctagaaatagtcttctgagataaacattatttgcatttcaaagattaagaaaactgcagttgagagaaagtcaaatcctttagccaaaatcatacatacagttattgaaagctgaactatgatttgaacccaggtctatccaactttaagtctgcctatgctcttttgttgcttcatggtcaggcaggtcaccttcctgggaagactggcatgtggtatttctcgagctaataataataaggctctttaggtttaaaagtgttcaattcggggctagaggccactctggtcctcaggcacttgcagttccctccccgcaaccctaaaaaaaccctccctcctgccccaaaaggattagagttgttccccggccttc

SEQ ID NO: 320018 - DNA, 611 bp, Homo Sapiens
attaataattctctatttattaaaaagggtcctacagctttacagccacagcaccggacacggccctggacagcgacggcgagcccggccaggggccgctttgcaacttcaatgccaagctcacgtctggctgcgaccgtggcaggctgtggcatccccgacagcggccggtggcggaggtatgggggcgggtggcaccgctcactcgagattcacagaacatggcaagcccgcctgactggcatggcagtgaatcgtcctgtacagcttcatttcaagaaaacagttacagtagagttcaagtccgagagcaggaatgtatggtcactgaggacaaaaggcagtggcctggcccgtggcccagaccccgcttcagttctgccttctgtcaccctggcggctaggcacaggtcggggccctggatgcccgacaagtgacaggggaggggcgggccagaaggtccactggtaagcacctcggccttttccgtcaacaggtgccactgccccctgctgggccctgggccttcagcacacatggcacgtgaagatgaggtcccacaggggtgggggaagagcaggtgcagacggttggagtgcagccccgtccc

SEQ ID NO: 320019 - DNA, 991 bp, Homo Sapiens
taatattaaaaatactgatttttaatattgaaaataaaagcatttaatatctcttaaagggcatccacatctgctttatccctagcggaagagtgagggggcttcacacgtgcactcacactgtggagagagttggatttcccagacccctgagggcacctgtcagggtcatccccattggtgctgcttgaggctactggggactgtggcactggacgtggctggagcaggtggtgtcacctgagtacattctttgctagcagacagtggatgaggccccttcctcttcctcaccaagcctggggctgtggcagcctgtcttaggccagggccttgcagaaggcgctccaggcatggaagcagcgggtaaaggcgtgctgctcattgcccttgcggaccaggcgcagccggcgcggccgctcatgttccttggaccgcatgtgctggatatatacctggcaggccttcaggctcagcttgatctccacctggctagtctgggtccccacccacatgtagacctcttggccattgtctagcaacatgatgtcatcatctgccaggtcatcttggcaaaagtcggagcatttctcagtcactgcaaagtagcccttctcgttggagcaccggaagagacgtgtgtgtttcatgtactcggcatcgtcatcatagggcttctgtgccccaatgcccacccagaagaagttctcaggctcctcaccttcgttgataacctgcttgctgtaggaggtgtcaaacatggtgttcaggatgtcttctgccaacttggcttcgtcagggtctgatgcccggcccacccaggcatacacgatgccctggttgtcctcactctcaaagggaaccttgaggatgaagcagaactcggagttgaggaggctggagtcggtgttgatctggatgcaccgggtgcagagggcgctgccgttggtgcggatctggtagaggctgggctgttgggcgccctggaccg

SEQ ID NO: 320020 - DNA, 1196 bp, Homo Sapiens
agcactacaaacactttttttaatgacatcagatggtacatttatacaaattacaagctacaatatagtgaatacaaaatccatccagaaaacggttagaaaagcatcacttaacagaagtaaatcggattcaagtagctaaaggactcaagccccccattgttgatgattatacacggctttgaaatgcagcacatccaaatcctccccctagtcagggcactattcaatactacagcatattcaatgactctagtgatgtaaagattctaacacttttagcatcgacgtcaagagacatctcgtaacaggttcactatgcaaaactcaaatgagaatgtgtgaacgttctttgcaaactgtaaggtgctgtgcagatgttgttagctattgctattattactgttcagtgagattacactgaacgtggggaaaaggaagactactctgtataactgacaaatatgacttacagaacatcttaaaaggaatgcagatattactttcaaatacacatagcaacaacacaggcaaggaaagtgtggccaggagtgatgtcgaggaattcctattttaaggaatatataaaggattaagctattcatagattatgtgtaatatttatcattagattcccaaagtccctgaaaataatttatttttaaggtgaccctttccccctgaaaagggaaaaagaaatcttgtcaggttactaatgtgctgcttcagccagctcttgtaaaaattatcttaaacataggagtacagtctgaattaatagttatactaatctggtgggtgacacagagtgcttgacagcagagaaacctgccactgacctcagacaagtgacaaattctgtgtcagagttgaaccataagtttacaacttcacttgggcataaattaaacaataaacatgaacttgtctagagataagaaatacacactaggtacatctaaaatcggatttaaatcctttttatgtactttcgggtttcatctttctttgtatataccctacttgtttaactgattttagtggtctccttgggtattctaactgtatacataaaattgacatgaaaatggaaaacaaacgccaaacaagtcaattggttgtttcttttggcaaagctgatgacattttcatgatgaaaatgttccaattattaggccaggcacggtggctgatac

SEQ ID NO: 320021 - DNA, 1030 bp, Homo Sapiens
tggtcataaagtagaataacatttatttcttaaaatttttattatacatgctgtattcatggaaaaccaagatctttaaaggaactcaaattagatataaattatgttcagctctgagctggttataaatcatgtttagcatggaaacagttaaactgaagctttcttctccttataggttgccatcattttcttgatctctgcaatagctttccctggattcagacccttaggacaggtccttgtgcagttcatgatggtgtggcagcggtatagagagaatgggtcctgcagcttggccaggcgctcctctgtgaagtcatctctggagtcaatcatccagcgataggcctgcataagaactgcaggccccagatatttgtctccgttccaccagtagctggggcagctggtgctacagcaggcacagagaatgcactcgtagagcccgtccagtttctcacgctcttctatggactgcagatactgctgcttgccttcctgagattcatccttcttcttcaaataaggctcaatggatttgtactgtgcatagaagttgctcaaatcgggaacaagatcctttatcacatacatgtgtggaagagggtagatttttgagaccttattgaggttggtgtcaatccttcgggtgcaagctagagtgttgcctccattgatgttcattgcacaagagccacagatgccttctctgcatgatcttcggaaggtcaaagtagagtcaacttcattcttaatcttgattaaagcatccaataccatggggccacatttattaaggtcaacttcataagtctgcatatgaggtttgtctccagccttgtctgggtcccatcgatagatggcaaatttcttgatacggggagctgtggctgcagctgtctgggctcctcgggaggcctgcaggcaggctccgccaagggttgtggccggcaaccggcgcctcaaggagagtgcgaccaccgccgccatcctcgtgccgaattcgccacccaggcctcgctacctt

SEQ ID NO: 320022 - DNA, 821 bp, Homo Sapiens
  misc_feature (43)..(57): n is a, c, g, or t
  misc_feature (97)..(219): n is a, c, g, or t
  misc_feature (277)..(288): n is a, c, g, or t
  misc_feature (299)..(419): n is a, c, g, or t
  misc_feature (722)..(722): n is a, c, g, or t
  misc_feature (763)..(763): n is a, c, g, or t
  misc_feature (769)..(769): n is a, c, g, or t
  misc_feature (773)..(773): n is a, c, g, or t
  misc_feature (782)..(783): n is a, c, g, or t
tgggggccgaagtttttagaaattccccccctttcccgagaannnnnnnnnnnnnnntaatttaaattgaaaccccctggggccctctttgaaagannnnnnnnnnnnnnnnnnnnnnnnnnnnnnnnnnnnnnnnnnnnnnnnnnnnnnnnnnnnnnnnnnnnnnnnnnnnnnnnnnnnnnnnnnnnnnnnnnnnnnnnnnnnnnnnnnnnnnnnnnncccttttcctttccttttggggccccggccccaaaaaaaggtttttaaaaattttttnnnnnnnnnnnnggccccaaaannnnnnnnnnnnnnnnnnnnnnnnnnnnnnnnnnnnnnnnnnnnnnnnnnnnnnnnnnnnnnnnnnnnnnnnnnnnnnnnnnnnnnnnnnnnnnnnnnnnnnnnnnnnnnnnnnnnnnnnngttaataaagtagaataacatttatttcttaaaatttttattatacatgctgtattcatggaaaaccaagatctttaaaggaactcaaattagatataaattatgttcagctctgagctggttataaatcatgtttagcatggaaacagttaaactgaagctttcttctccttataggttgccatcattttcttgatctctgcaatagctttccctggattcagacccttgaaaaaagagaaaagaatcaataacaaatgataactgaaactgaaaggggaaaacccacaatcttggggtganctccttcctcagctgggttcagtgtccaaggcaaggtggantgcaantcangtccctcannaccatagggggttggggctaaggggctctcttctgtct

SEQ ID NO: 320023 - DNA, 530 bp, Homo Sapiens
  misc_feature (285)..(368): n is a, c, g, or t
gacataaaaatatatgtgtaaacaatatgctaaatgctgttattagccctctaggaatggaggcatcatctctaaccacagctcagcagcaatgtccaagctgtccacacttacaaatcaacttccccatcagaacatggtttaaaaaacaaaacattttagaattgaagagttacagagaacaatgtaagagtctgaatttcctttcctttatttcaaaaaaagtaaagaattatcccaggttcttgggcatctcaacgattttttccaaacaaatgcctcaannnnnnnnnnnnnnnnnnnnnnnnnnnnnnnnnnnnnnnnnnnnnnnnnnnnnnnnnnnnnnnnnnnnnnnnnnnnnnnnnnnncacacatcagcaaaaaaggaaagagactgggtaaagtctacctacttgcccaagaatgccacgttctacaacctgctttatgtgcagggagaagggcgtatcttttgtcaaagtggagtaaactttaaggatgagtaatttatttggaaaaaaagtatgttc

SEQ ID NO: 320024 - DNA, 676 bp, Homo Sapiens
  misc_feature (287)..(297): n is a, c, g, or t
atttattaataatagttaacatcacatagttaattaaactagttatgtattgtacataatgacaacatcttcactagactgagtgctcaaggatttgagatgattcgctattcatcacaccccgaagattgagatccactgtatttacacaaagcaaagccatgtcagcaagggactgtcaacctgattctgagaacataaacattcaaaatttattttccagtgttcctttttggaaaccaacaacacatctttaatacctacacacacacacatctctacctttnnnnnnnnnnngtgtaacttcacagatagtacctaatcttcaagcttaaaatttaagttaaaattaatctctattttgtgggcaccctttagtgaactaaaatctacatgaaaccttttggcttttgtgtagcaggaaatacccacgttttgggtcaattagtgcagatgggagcagcagaggagctacaccagacagcaaagcaagactagagcaaacgagaaggaccagcccctagcccctctgtgctcccgaggaagacctgggctgttttcacctaattacacccaactttgcttaaaagtcgtataatcagacactattctcagcacaagtttgataaatatacaaaaaccaggttcaatttcatcgtgagtttctttccattct

SEQ ID NO: 320025 - DNA, 1038 bp, Homo Sapiens
cgcgcgcgggggggcgttttattaggtagttgggggtgaggaaattcccacaaaccaatttaggtgcaagaggcacaggggattttccctaggggaaacaaggttaaggggccactgtttccccttagccttactggggcccccggggccagaacgagaggtgttagaaaactttcttgagggccgaggcgggcccgacaagggggggttttttggggacggcttgccattttgggtgaagaaaaaatgcttttattaatcacaacatgaaattaacatgacatcgtattagaattaaaccaggataaatactgctgttataaaatttacatttctcacatccattccagaggaaaatcttacatattagggctcatcttaatgttatggactgatttcagtaaaactttttaaatagtaaatagcaattaacgtattctcaaactgtgctaagtagttagaaaggcaactataaaatctataatgataacacgtggcaggattagaactgttctgttaaacattaagaaccacatctctgttttagatgttacctcagtgcacctttttcactggtaaggcaactgcttgctgtgggtgccacaatgattaccaagtttcttcttaagtaaaagacacttgtttgatcaagactcaagtgagttttctttcccaattttgttcttttgaagcagaaggaaataccttggtctttgatatatataaggaggcaaatatgaaatacagctgttataatcttctaaatcacaagggcaatgaattattcattttctttgaaaatattcagtctttgaaatatttcatttttaaaataacaaggcttctgaataatttctcaaaactagctttccattttagtacacgatttgataaacatagcacattagatagttatttagcaatttcttctaccaactacactttgccctcactaagggttagagtatgatttgaaacaatttctacatataaagcatctttaaataagttttgtgttcactgaactgagacttcttt

SEQ ID NO: 320026 - DNA, 922 bp, Homo Sapiens
  misc_feature (46)..(47): n is a, c, g, or t
  misc_feature (85)..(85): n is a, c, g, or t
  misc_feature (146)..(146): n is a, c, g, or t
  misc_feature (186)..(188): n is a, c, g, or t
  misc_feature (196)..(199): n is a, c, g, or t
  misc_feature (205)..(205): n is a, c, g, or t
  misc_feature (207)..(214): n is a, c, g, or t
atatttgggtggaggaaattcccaaagcccacttaggtccagtggnnccaagggattcttccctagggaaaaacaggctatggancccatgtttcacttttaccctaactggggcccgccgcggccaaaacgaatgggtctatganaagctttctcgaggggccgagggcgggccggacagggttnnnttttttcnnnntttttntnnnnnnnngtgtttataacaggttttactttttttcttaaaatagagatttcttactaaataccattttatttcatttcttcacagatcttctggttcttgatcatcttaattatcaagtgtcgtatatagggaacaagtattgatgttcactatgattcaaactattactgttccatagtcagtggagctttttcaatgtccagaaagaatactttcaatctttatgaacagcctaggattttgcagttgtttctgaaggctcaaattgtcctgcttcaaatttttctttgaattttaagtagtctcttcttttatcaaaatattttatccactgttggggacaacttgattcgaaagagcttcttaacttcttgcattgagaagcatcctctaagttctcatctaaacacttccagtactcatcccgggccccccagcagacctgtctttccttcatagatggggctgccattcctactgcgatgaagctctctgcccgcccacgtccggcttcctttcgatgtcgacgggaggaaactgtcacgcaggccaccaaccggcggtggagggcgcggtgccgagtcctgccactgcagggtcgccccgctggctcaagctctagaagcgtagacctccccagccgcaaaaagcaactcacgcggcgaaaccgcggactcttttgacccttccgagctaccatttactttccatccc

SEQ ID NO: 320027 - DNA, 844 bp, Homo Sapiens
ttttttttccccatactttttatttgttaatttcatcacccccctcttcttctgatgtggtccccaccacctctgacatgcacgcattggctagggcctctcacactgaggctccacgcgaagggaagatgcaaagtccagtccctccaggagctagtgatggaagtcttgggaaaggagagtcccaagttcaagaagacagctagggtagaagggagggaggtcctcaaggggtagaggacaggagtccaaggaggtggctcaggtgcggggtggcgcctcaggagagcccagaaatcttccaggcagcactgtctggaacagggctgtgcactgacggtaccggcattttcatccccaacctcagtggcccccattgccacctggggtgggatctcaggcagaggttttgtcccctctgaggctcccccacaacacgcctctgttgtatccagctttgctgtgtgaccctggtccccggtgaggtaacaccaccactgagctttatccctgcagcctgggggtcctattcacctctgggctgtctcagggtgccatctgtctctttccagctgcttccctcgccagcgctatcaatccccccattcaatttctgctgttgaaatattcagtgtttctgtatccctagttggacctgagtgaagagatgtctgaagggcatctcatgtcaagaaccagactctgatcttcctcacaagcctcagtctgccccattcaattaacgatcccctcagccacccacagttcaggccacaaagctaggggtcatcgtggttttgtctcctccctcaccctgacatccacaccatcatttatattcttc

SEQ ID NO: 320028 - DNA, 619 bp, Homo Sapiens
taatgcagtgatgtccgtcaggttgttttaggaatggcttctgcaattagaaaaatagcttgctagaatgtaaatgttctgttactggtaaatgtactgcacacattcattggacgttaaaacaagtgagtagccttttttacctgccagcagcatggctgtgtgcagccactaggctgagacaataaattaccaaaaattataatgtaccgagctgaaaatgctcagtacattatgtggcatattctggatgtgatgagaaatctcattgccatttgggacactgacatcccagaagtaatccacaactgctttgcaaaagcaaagtgactgctcagatgaacagagcagagtactcactcactatggtggcatcagctgcaaagcgaaatgaactgtcccatgatcatgttgatggttttctagatactgccaacatgttagctctttctgatgctgatgagtttcaaacacgaacagacacccttgatgtgggtttgctaagaacatagaagaacaggaagaaaagttgccaggttcacacatcccaggaaaaaagaagcataaaaagcattagcagtcagtgactgatgataatgctgcaataatgggaatgggt

SEQ ID NO: 320029 - DNA, 684 bp, Homo Sapiens
gtgtcatactcagcattttcaccaatcttctgtgatgagttttaaaaaaggcatttggagaaactggtagatgtcttcaacatatagttcaaataaattagttgtatgtgtactactgaatcctctttcaacctctcttgcattccaaataaaatcttagtgcaaacatcaaagttgctggtcactccaaaagactgctaaactcataatagaatacaagttctgaattactgtgtattaagtaggaaaacccaagaataccagttactgcaaaattcatttaggcacatttaatagtccactctaagcattttttctaagtctctcacattaatgactaaagcctgtttacagtactaaaattctatcattcaagcatcaatgattacatttcagaaaaaggaaattcatttcagtaatagcattactgctatatcctaaaaaaaggagagaaaataaagaatcataattaacaaaaccagtatccataataggatacacagggaaaaacattttaggagaaaaaaaagtgtgctttacttgccacagcaggaattatataatgtaaacaccatattggcccacaccacaaaaatccatgagaaaggttcaaatttgaacaccatatgtgcattattttcaaatctgtgtttgtgagtttatactgtatctgcttgtaccaat

SEQ ID NO: 320030 - DNA, 854 bp, Homo Sapiens
aaagaaaattgatatttttatacaagtaatttcctgagctaaatgcttcattgaaagcttcaaagtttatatgcctggtgcacagtgcttagaagtaagcaattcccaggtcatagctcaagaattgttagcaaatgacagatttctgtaagcctatatatatagtcaaatcgatttagtaagtatgttttttatgttcctcaaatcagtgataattggtttgactgtaccatggtttgatatgtagttggcaccatggtatcatatattaaaacaataatgcaattagaatttgggagaagcaaatataggtcctgtgttaaacactacacatttgaaacaagctaaccctggggagtctatggtctcttcactcaggtctcagctataattctgttatatgaggggcagtggacagttccctatgccaactcacgactcctacaggtactagtcactcatctaccagattctgcctatgtaaaatgaattgaaaaacaattttctgtaatcttttatttaagtagtgggcatttcatagcttcacaatgttccttttttgtatattacaacatttatgtgaggtaattattgctcaacagacaattagaaaaaagtccacacttgaagcctaaatttgtgctttttaagaatatttttagactatttctttttataggggctttgctgaattctaacattaaatcacagcccaaaatttgatggactaattattattttaaaatatatgaagacaataattctacatgttgtcttaagatggaaatacagttatttcatcttttattcaaggaagttttaactttaatacagctcagtaaatggcttcttct

SEQ ID NO: 320031 - DNA, 1326 bp, Homo Sapiens
acccgttctccattagtggctccgatactccgcgtccatcgtccttcagcagccttcggtgcaccatgagctccagcgagccatctctcaggctgctgccccactgggagcggtcagtcagcacagtcaggtgcatgtttccatccgtgatgtaaatccgggtgttgactggatagtagtttcctgccacgggctccgtctggttcagtttccaggtgggtcgataatcccgcctcctctccaggatctcccggccattgctgtctgtgtagaagcgtccctttgtctccagcggtgtgtcaaaacggctgatgacctccttcccccaggtgtcgcccacaggtatcggccccaccgaccactctagctccaggtgccgctgtcctgggtacaggcgaaccacctgggaacaccaagctgagaagttctggtgcacctcctgcaccaagggtgtcttcaccaggtggatctgagcccagcggctcacaggcagcggtttctgttggttgggtctgaagatgtaggcacctgaggcctggtcactttcgttgtcacctatactggcgttgtaccagaagaaggtctggcgaacaggcagcaggagttgctgattcatgttcataatctccatcaacagccctgtgtcaggatcaaacgttgcccggatgtgctcattttcgatggttaaagcaggggaccaggatcttctggggatgggctgtggtgcgcgggcctggggcttccagcgaggcacctgggctactgaataggtgctgaagcccagggcgggcagtgaggctgagaacagcagctccggagggtgcgcctggctgtctgagctgggaaatattaccacatcgctgggcactgtcctgccattggggtccttcacaacgaaaacgccttcgctgaccggcagccgtaccatccaattcaccttccgccccaggggattataaacgatgacctggaagcgcgccgccgtctggctgagcgggcagatgctgatgtttagctgttggcaaaaggtgaagtgatctttgaagcctctgagccgcgccagcgcgttgctcagaagaacctcgcaaggcccccagcctgccgcaagctggcgcgcgtagtcgttggccacgtgctggcgggaggtgccgctgacggcgtcgtgatgctggagcacagctatcgcctcattgaggggtgcactgtctccggagccatagggtcccacgttggccgccaggcccaccagcgcctccagctggttgcacacctgcaggaagttgtagctgaggcgctcgtagcgtttgagggccggccgacgggaaa

SEQ ID NO: 320032 - DNA, 1354 bp, Homo Sapiens
  misc_feature (287)..(312): n is a, c, g, or t
  misc_feature (615)..(643): n is a, c, g, or t
aaaactttcagtgttttatttttgactgcagctgtttacagaaatatagttgcgagtatacaaatgttccaatagaagcaaaatatctttttaatatttaacaagttatcacagatagctaaaaacatagatgcaaatgaaattcccccagagaacaaactgaaaatatctggtatcagtgctctgaaatcccaactatgaaagccatatacacaaaaatgtaacccttatatcattgcaggacaatggaagaaggcagttcagtggttgatcagtgtgctcaagcnnnnnnnnnnnnnnnnnnnnnnnnnntggcagaatggtagctaaaccacttgagaacaggttaatgaaattattggtactatacttaaaacattaagtaaaagaagtgaatgaaactcatttaaagttgtcaaaaaattagcaactacttggagcttatcaattaaaaggaaacaaggtaagcagacacattcattagatcaaaagaaattagatcaagttcactggaatcagtctgtaactactcaagtcacaatgacttcagtgcaggagttttttactggacacagaagtctgattccaagcccactcttcaacagctgagatttnnnnnnnnnnnnnnnnnnnnnnnnnnnnnagacgttgtcctgaggttcatcagctaaaataatataataagcaatccctacaaaatatttcaaaccaggcaaatgacttctggaagagagagaaaggaaggggagagggagggagaatatgagtaagcaagcagggtcatatggttaaacatggaattttttaaaggagttattacaagtgggagtcaaatagaactgtggtagaatgctttgggtacaggaatatgttatgcaataaagtgaggaagagaaaaagggaataagaagggaggaatgtaactagagcagctcccaacagtttgcctatgtatttgccagcaccaaaatttgtagagtaagccacttacatttccactgctagtattaaggaaagacatcagtggtgatttttataaagtgagtatacatttatttttattctgatatgtgaatttttctttcacgagttaattaactggtaatttgtaaacagtgggaagaagattagaacaattatggaggtactgaattacacaaggagattaaaatgaaatgaatcaatctacctatcttgtggttagtttatatttaccatgatgcatacacttgagaaacgagaaatgcccaaattgtataatgcattatcttgtttattatttattttagtaaataattcttgtctgaaacataagctccaaggatagctatatctatactgatagcttagttct

SEQ ID NO: 320033 - DNA, 1023 bp, Homo Sapiens
  misc_feature (254)..(284): n is a, c, g, or t
  misc_feature (304)..(339): n is a, c, g, or t
gggtcattgactgttcacggatgagtgtcatagttggacttatggtttaagggctccagattgaaaaggttctctgaacttgtgatctggtagtttttagacaagctgaatgttcccatatggttcctgtgcccgaagtttactgtttaaataaagagcagtgatatcatatgccatgactgacttgggtaaagcactcctgttaaactcaaggaaattatgtcacccccatcctgatccacaaagactgccannnnnnnnnnnnnnnnnnnnnnnnnnnnnnngtacacttgtatctgtgtgnnnnnnnnnnnnnnnnnnnnnnnnnnnnnnnnnnnngtagatacagatacatacatctcaaaaaaggcaataacgaaaacatcaaactatgcttgcattgtggcggcagaataagagagttagggtgagggggaaaatggttaagatctagttacaattttaaatgactatgatactagcttaacttttaccaaacttgcctgtaactcccctcgaaatagacagacttctgtgttaaaagaaaggggttctccttacacaaaatgctttgtgttcacatcaatctgtactattcagaacaaaaccagttctgctggcagagattgtgggttcgcagggacatttaagctttcattaaactggaaagcaatcaagtctttatgtctacaaataatacatttcatagttccacaaatttggcagagtttgtgatgacatctaggatgttttcaccaaatcgtagacataaatatggaaatcatcatcaaacttgatgaaatagacggagggcttggcttctacttgatgaatgaccatgccagtccttttcgagccatcttctttggcatattccacttgtttgcctaccaggctgtccacaacttctcctggttccctttctgctggaggtgaatcattggaatcaggcataatgcgaaggtcgccttctttgtaatcatctaagagttggtacatgtacaagaccgggtctttctcata

SEQ ID NO: 320034 - DNA, 460 bp, Homo Sapiens
cccggagatcaggtggaagtgcttttaaaacagactgatccagctgggaaggtgacgggacctctatactcaggttaagtctcgactgcacactgacaggagtatgtagaccattccatttccctgaagactcagccttgttagtatcaggactggtcggcagatgtgcaggaaaaggtggcaagaaagtgcaagttctagaagcagatgatatttccagatccacagcagcccgaaatacttctttgtgctcctcttcggtggatttcttagctttctgaacttggaagacatcacggacagagtatgacccactaggaaagtggcttgactgaactgatgggcgactgggacatgtggaagggttcagattagttgggaccaactgattcacgtgaatcccaacccctctcatatctgatatatttagtttcattgtatgaaacatgtttagcatcgc

SEQ ID NO: 320035 - DNA, 807 bp, Homo Sapiens
gataacggaagaatctaaaagttctcgccatctccgaggaccacatctagctaaattggagctgattaggcgtttacgaagtcaaggttgtaacgatgagtacaaactgggtgatccagaagaattaatgttccagtattttaaaaagtttggcgataaaccttgttgttttacagaccttaaggtgtttgttgacctcttacctgctacacagtgtacaaaatttattaatcagttacttggagttgttcctttgtcgacaccaacagaggataagctggcactgcctgctgacatcagagctctgcagcaacatttgtgtgtggtgcagctgacgaggttacttggcttgtaccacaccatggataaaaatcagaaattgagtgtggtcagagaattgatgttaaggtaccagcatggactggaatttgggaaaacctgtttgaaaacagaattgcaattttctgactattactgtctccttgctgtccatgcgcttattgatgtatggagggaaacaggtgatgagaccactgtgtggcaggccctgactttgctggaagagggattaacccatagcccttccaatgctcagttcaaattgctgcttgttcgaatctactgtatgctgggtgcatttgaaccagtggtggatctttactccagcctcgatgctaagcatatccagcatgataccattggttatcttttgacccgatatgctgaatctctaggtcagtatgctgctgcgtcccaatcctgtaacttcgcactcaggttttttcactccaacatcagaatggtaac

SEQ ID NO: 320036 - DNA, 959 bp, Homo Sapiens
tttttgagaaaaagagactttattaggcacagagggcgactggtaggcagttacaaaatggctactgggcttcctcccaagctggagagtagtaccccagggaaaggaagggcagaggagcgtgtgttttctctgccttctcccttcaaggctgcatacgaatggccccatccagccggatgacctctccattgaggaatgggttctcgatgatggcctgtacgaggtgagcatactcagcagggtcacccagtcggctagggaagggcacttggctggccaagaagttgcacactttctctgggaggctggtcagcagtggggtgccaaacagacctggggcaatggtcatcacccggatacctatgggagccagatcccgagcaatgggcagtgtcatgcccactattccccccttggaagcagagtatgcagcttgtccaacctgaccctcgaaggcagccacactggcagtgttgatgatgaccccacgttggcctccctggtctggttcattctggcccatctcaccagccaccaggcggatcacattgaaggtgcccatgagattcacatcaagaactcgctggaagtcttccaaggtatgggtctggcccttctttaagttgtacgtcttgctagccaccgcgatgcctgcacagttgacagctacatccacacggccaaactttccttttgctagagccagagctgtttgcacatccttctcagaggtcacgtcggctggggcgaaaacgcagttgtttcctaacttcttggcttgggcctccccacccgagttgggcaggtccagaagcacagcagaggctccctgccccacaagtcgctccgccgtggccaggcccaggcccgaggctcctccggttattaccgccaccaggcccttcacgctccgacacgctgctgccatcttgtcgccggccactccacgggatccc

SEQ ID NO: 320037 - DNA, 1191 bp, Homo Sapiens
cttttaaaaccttttattcaataatatatacttttaaaataataatatgtaactgccgccatgccacatactgcgcccgtccccccactgtggagtctgtggtcagctagttagcgtggtttgctggaaaaacaggcggccacgggacgagtttgaggggctcggggagcaacagtaaccaacaacattctgcatacccttcacattccccatgctttctgggtcgggaagaagtcaacaggaagccaaagggaagtgagccttttacattcggaagtgaggtttgatatacggtggtgggctgcccttcgcttggtctagttcgtgctcgccaaacctgccaccgttttgtgtctgctcacggaacgtgatctctctatacgcgttaagacgtttgatttggttcttgttctgcttatggaaaagtgggagaaccgcaacagacccgtcgctttccagtcttccatcgtgctgccgtgagaccactggaaagcacagcattgtctgcacaaggctgggactgctccttcaccacagggtagaagtatgggtgctccatggcctctttggcagtcagtctctgttgatggtcgtatcgcagaagtttgtccagaagatctagggcctcagggctgacaaggtgtctgttctcactatggataaagttttcccagcgtttccgtgaatgttgtcccaggatatcgttgaagtgtggatctaggtctatgtgatacttcttcagatacccatacagttcttctgtacccagaaccttggcaatgcgaacaagctggtcatagttgtcctgtccatggaagaatggttcccttcgaaagatcatgcttgctaacatacagcccaactccacatgtccaagctataatcatacatctgatagtccacgaggagctctggtcccttgaagtaccttgaggctacacgaacattgtactcctgagcaggatgatagaattctgccagaccccatctatcagtcgcagctttttctgttggtgatctatcatgacattgtgaggtttcacatccctgtgcatgattcccttgctgtggcagtaatccagagctttaagtagttcatacatataaaaccggatatcaagtctgtccggacgcgtggcgacgcgtgggcgacgcgtgggtcgacgatatcccaaggattccggaccgtac

SEQ ID NO: 320038 - DNA, 667 bp, Homo Sapiens
  misc_feature (639)..(639): n is a, c, g, or t
gccggggggtgggtgagaacaaccgcggggggaagcccctcatcatgtactcctgccacggccttggcggcaaccagtactttgagtacacaactcagagggaccttcgccacaacatcgcaaagcagctgtgtctacatgtcagcaagggtgctctgggccttgggagctgtcacttcactggcaagaatagccaggtccccaaggacgaggaatgggaattggcccaggatcagctcatcaggaactcaggatctggtacctgcctgacatcccaggacaaaaagccagctatggccccctgcaatcccagtgacccccatcagttgtggctctttgtctaggacccagatcatccccagagagagcccccacaagctcctcaggaaacaggattgctgatgtctgggaacctgatcaccagcttctctggggggccgtaaagatggatttctaaacccactgggtgggcaaggcagggaccttcctaatccttggcaacaacattggggcccattttctttcctttcacaccgatgggaaggaggaccattagggacatatattttaggcctaggcgtttttcctgtttctaggaaataggagggcttcccaaagttagggggaagggccagcttnggggggaaggggtttcagggggcagcca

SEQ ID NO: 320039 - DNA, 680 bp, Homo Sapiens
aggggaaggaaaaaaagtagtgtttttttggggaacagtataatgtctcagaagttcttctctcttatcctgctgatgttgagacagtggctttgtataagcttttatttatacctatttcaacatcatgaaaatttttccatcagcattttcttgcaactttaaaaatcacaagggattatttgtttataaagagatacaggatctataatttattggcaatactttattttaggaatcttcaaattgtacttaataaataaatcacaggtcaaaatgactgtaaaatcaatcaggctttctcgtaagttatttcctgaaaaccatccatgataaatacaacaaggcttggcgaaacctcattactcttggaagtcttcagaggttattatacctactgatctgtatttgtctctaagagacatttgaaacacagttacaatgtcaatttggtgtaacattacctgtagtagagctcagagtatatggcagtgcacggtcactcaagatgcatggcgtgtcatttgggtcgctttgatgggtgctcgggtagaattagccttgtagagactaatgtgttcatgctatctctgatcctgtggtgttgtataaaaatgaacagctaaaaatttacccatgacaagattaaagcaaaaataaacacaaagttgttagacttt

SEQ ID NO: 320040 - DNA, 394 bp, Homo Sapiens
ttgctttaatcttgtcatgggtaaatttttagctgttcatttttatacaacaccacaggatcagagatagcatgaacacattagtctctacaaggctaattctacccgagcacccatcaaagcgacccaaatgacacgccatgcatcttgagtgaccgtgcactgccatatactctgagctctactacaggtaatgttacaccaaattgacattgtaactgtgtttcaaatgtctcttagagacaaatacagatcagtagggtataataacctctgaaggacttccaaggaggtaatgagggtttcggccaaggccttgattggtatttatcaggggtggggttttcagggggaaataccttacggggggaaggcctaattggattttacaggt

SEQ ID NO: 320041 - DNA, 1005 bp, Homo Sapiens
ggaacaagccttctcgacgttccaccaccgggcagcttgagcttccagtcctgaagggttttgggcgccacctggctgctccttctctgcggccagaggctcccccgttcatgctcctgcagcgggtggtatgcataggtccccaatgcaggcgccggttcctctctgctctggacaggagcaaggacaggtttgctgcaatgctgatcagcaggaggaaggccagcgccagggtgagggctagccaggcggtcctggtgaaaaaggagagttctcccgccctcagggtggcttcaggtggctggagacactgctttactctggagacgctgcagttgccagtcttggggtcacagggacaatggtgctcacacttgacaaggcctctggcagcccggcccatgccagccaaggggacactcttcactgcagttggacccggtccatccggcatcacagcggcagccggtctccgtgcacagtccgtgctggctgcagttagaggggccacagtccagctcatcacagccgggacagcgccacatgttgtcctggctacaagatggcgtctatctatttttgagatgaggtattgcgatccttccacccgagcctcctgagcagctgtaaccgtaaggtgtgcaccatcacgcctgccagtgatctgacgggtaactggccaaggtcccgttgagcacaaaggtggcagagccacccccatccaggttgatggcgttgaccacgtcctgtttcagcaggaactccgccatttcccacaggttgatgccacgctgctccgtttggccgtctgcatgaaagagcaccagctgccctttccggtcgtggccaatggccgtcctggctgatatcacattcacaaatttgctaaaggaacctgtctcctgtgtctcgtcacactctgtggcttggctctcgttgatgtagatgcttccattacgaatcagccacacgaccccactcagcagctgcacaaatgggttctca

SEQ ID NO: 320042 - DNA, 893 bp, Homo Sapiens
taaaaaaaattccccttatgaactggtttggtcaatcaactacaacactttctagcagacataaggtaaaaatggcatggctcagaatcgcccagatctttcacgatctctcgaccgcctcctgtcacgctcccgtccgccgccacctccaccaccgccaccgccaccgccacgaccacggtctctagaccgagaacgacgctcccgggatcgggatcttgatctatgcttcttgcgacggcggccatacagctcccgccgcagctctctggaaatgggcttcaaatgcatgaagttgcagaagccgcctcgtgtgcattctcccatctcatactgacggcagcaggcttctctgaagtccgtcacgggtgacagctcggcgtggatcggctgtccattaaaccaacggttattcaagtcaatcacagccttttccgcatcttcctcacggcgaaacttgacgtacacgttccccaccaggtggtctcccaggttgtcacagacgttcatctcctctacttccccatacttctcctccatttctgtaaaaacctcctcaaaaaactcatcatagtgttcctgcatctccacatcgctcacggcacagcgcaaaccgtcagcagactgggaagagttttgagggttacggtaaatgttcaagagggcaatggtctggctaaacgtcggtttattgtgcaaccgagagcacctgtctccatgacgacatgctccaattttgaaataaaatgaacagttgactttgtctttctcggtgccgaagatggaggccagatactccgccatttcccacccgccgccgccgctgccgtcgacactgctgccgacgccgccgaccctgccgacgccctcgggagacgtcacccggacgcccc

SEQ ID NO: 320043 - DNA, 1718 bp, Homo Sapiens
acagcggttcttcaattggtattagaacatcacatgcatgcacaagtggtatggtagagaatgaagcggaagaagccgctggatggaggacagaggggaaattagagatgggatgatgccgtgtatcgggcagttctcagctttccacagtaagtctctgctctgtgagagaggcctgctgggcaacacttttgttctcatgactgcgaagtttggatacgacatctagaaaagccaaatcctgtacttccttgtgtagacattcagatcccataagagcacatatcaggaccatggaattatatttgatttcaggagcacttctctcatctgctagcagtctatgtaaaatctgtacaagtttagcactttctagatctttctcagcagtgcccaattctaaagctgctattaatgccaaagcaacaagagcttcattctgcattattacatgttcactagttgccatggtaactagatgcttgatgccaccactctgcacaatggttttaattacatcttttgatttactgtgtcgtataagggcagacagcagtctgtttgactcccccatcacaccagcatgatctttggcttcacaccattccaccaaacgctccactaacttaacattctttcccaattgttcagcagcttctgcttgtgcatctattaacattcttaatgttcccagaagtttgaactgaacaggaggcatttcagatttaagaaatttcaaaactgcctctgtgaccccagctgataacatctttgctttatttataactggaatggccaggtttctgagggcacttagtgctgcatgctgtactgttacatttccatcttctacatgtctgtccagtaaatccataagtttttctacaatcccattgtctaccatatgaatacaatttgcatcatttctggcaaaatttgcaattgccaatgctccagcaagctgtagctggtggttatttgatgggatccaagagagtaccctttgaaatacactaccttttcctccttcaaataacttctgcatggattcatctccaagaagtaataaaaccatgagatctgaaccagttttgagctcagtaatatcatcttctttgtcactatccactttttgctgaacaatctctagtagacactctactaggcctgcttcaaccagctgtagtttaatagcatcattttctgccaatggagcaagaacttcaaaaatcatttctctcttatcatgttctatttgtttcttgaagagttttactagctcttcagcaatgtttgtactggcaaactgttctttacttgactcaagttctgctaaattaccaaatgcaacaagacacatttctgtaagagctgcattttggcagtggatgcccagtaatttcactaaggtaggaataacacccatattgataagctgagcttgaagcgaatcattctcattgctatagttcatcagcatgccacaaaagacagtcaagagcttctcattggcgggatctgttatactgcacagtgaccttaaatggtcaattacaatctgtgcaccacctgcttggtcaactgcacttctgccctcatggctatcgtaacatatgtttcctagagccctgcccgtttgaagcagcacttcctggtctttgctatttagcagctgcaccagtggtgaaatcaatccagcatccacacatggaattccc

SEQ ID NO: 320044 - DNA, 373 bp, Homo Sapiens
  misc_feature (360)..(360): n is a, c, g, or t
aaacttctgggaacattaagaatgttaatagatgcacaagcagaagctgctgaacaattgggaaagaatgttaagttagtggagcgtttggtggaatggtgtgaagccaaagatcatgctggtgtgatgggggagtcaaacagactgctgtctgcccttatacgacacagtaaatcaaaagatgtaattaaaaccattgtgcagagtggtggcatcaagcatctagttaccatggcaactagtgaacatgtaataatgcagaatgaagctcttgttgctttgggcatttaatagccagctttaggattggggcactgctggaggaaagatcttggaaagtggcttaaacttgttaccagntttttacatagga

SEQ ID NO: 320045 - DNA, 465 bp, Homo Sapiens
  misc_feature (14)..(14): n is a, c, g, or t
  misc_feature (27)..(27): n is a, c, g, or t
  misc_feature (36)..(36): n is a, c, g, or t
  misc_feature (69)..(69): n is a, c, g, or t
  misc_feature (80)..(80): n is a, c, g, or t
atccggggaccccngggaaaataaaanttggaattnccggggagcaacttcctcctccatccggcctangcaagtcctantgtaaaaaacctgttaacaaagttttagccactttccctaaggacctttcctccagcaagtgcccccaattcctaaaagctgcctattaaatgcccaaagcaaacaaagagccttcattcctgccattattaacatgttcactagttgcccatggtaactagatgcttgatgcccaccactctgcacaatggttttaattacatcttttgatttactgtgtcgtataagggcagacagcagtctgtttgactcccccatcacaccagcatgatctttggcttcacaccattccaccaaacgctccactaacttaacattctttcccaattgttcagcagcttctgcttgtgcatctattaacattcttaatgttcccagaagttt

SEQ ID NO: 320046 - DNA, 1411 bp, Homo Sapiens
tagcatgtagctgaccagcctaccagatcttttatgcagttcgacatacaaggtgacaccaaggtaagacaaatgaagttccagtttgggtgcctccatctccctcccctggatcctgatccagtgactgccaaaaccagaaagaactggggtagggtgcttgatcatggggaacgctgttgtggttcgtccggcagatgggaaaagggaaaggtttcacttcttcacaatttgaatgacatcctcatcctccaacgtatggtctttacccactttctgaggattgtgtttcacagagagaccccagaccagagcatatttaaattctttgataagatttttgtgaatcttcatgcagaaatcctccactgtggtcctggagtaaggaagcaccactggggatgtgtaatctggtaactggcctttgggtttggtgtaaattctcactagtttcagatagtcccagatcttttccaataggtcatcaaaattccagcggtgatgggcagagatgggtacacagtgaggcaccttatagatgatatccaattcctcaatggagatttggtcaatcttatttaacacatagatacaggggatataaactctgtttccttccaccacatcaatgaggtcatcagctgtagcatcactacgtagagtcacatcggcattatgaatcttgtattcagccagaatgctcttcacagtttcagcatccagctcactctgggggcaagtggctgtgagattaatgcctcccttgtccttcttcttaaagccaatgttggggggtttgctgttcaagcgaatgccaaagccttccagctcattttcaattatcttcttatgtcccaaaggtttcaggacatccagaacaatcaagatcaagttacaggttcgggccactgcaatgacttgacgacctctacctttcccatccttggcaccttcaatgatacctgggagatccaggagctggatcttggcacctttgtatctgatgacaccaggcacagtggtcagagtagtgaattcataggctgccacctcagaatatacccctgccaggttactaagcagtgttgacttccccacagatggaaaaccaacaaatccaattcgagcatcacctgtcttggccacatcaaaaccttctcctggacctccaccaccaccaccctttggagtaatgagttctcgacgaagcttagcaagacgagccttaagcagccctaagtggtgtgctgtggccttgttcttttgagtccgagccatctctgcttctatctccgcgatcttagctaaggtgctgctcatcgtggcgagtaccctgtggcctccacactgtctcccttcacacacccgcgggcaaactgccaccgccaccaggcgctactgcagcacgcag

SEQ ID NO: 320047 - DNA, 1140 bp, Homo Sapiens
aaagcaggcttgtaccggtccggaatttcgggatatcgtcgacccacgcgtcgggaagatgacgaggtggagggggcagaggcggacctgtctggagatggtactgactatgagctgaagcctctgcccaagggcgggaaacggcagaagaaagtgccagtgcaggagattgatgatgactttttcccaagttctggggaagaagctgaagctgcttctgtaggagaaggaggaggaggaggtcggaaagtgggaagataccgagatgatggagatgaagattattataagcagcggttaagtcccaagatgcctcgaacactaagtttacatgaaataactgaccttttagagacagatgacagcatagaagcaagtgctatagtgatacaaccacctgaaaatgctacagcacctgtttctgatgaggaatcaggagatgaagaaggtggaacaataaataatctgccaggttctttgttgcacacagctgcgtatcttattcaagatggctctgatgctgagtctgactcagatgatccctcatacgcacctaaagatgactctcctgatgaagttccatctacgtttactgtgcagcaacctccaccatcaaggaggaggaaaatgacaaaaattctttgcggaatggaaaaaagccgacctaactgtagaacccgttagcaggtagagttacagcaccaccaaacgattgtgttcaccggtaatggagaactccccacaggaattcttgaactttttcttgatgacgaggtcattgaactcattgtcaagtactccaacttatatgcttgcagtaaaggtgtacatcttggcttgactagctctgaattcaaatgttttctgggaattatttttctgagtggttatgtctcagttcctagaaggcgtatgttttgggaacaaagaacagatgtgcataatgtactggttagtgctgccatgagacgtgaccggtttgaaactatattttctaatttgcatgttgctgacaatgcaaatttggatccagtggacaaattttccaaattgcgacctctcataagcaaacttaatgagagatgcatgaaatttgttccaaatgaaacatatttcagctttgatgaattcattggttcc

SEQ ID NO: 320048 - DNA, 1062 bp, Homo Sapiens
  misc_feature (161)..(176): n is a, c, g, or t
agttaacttttgtggaatatgaaaccaaaggaagaatttccatgtagataaattaagaatagggaaaaacatctacctaaaagatggttgtccctaaaaaactggaaacatctgaaatgctctatttatgttattattcctgggagcttatagcccattannnnnnnnnnnnnnnnaattcagaagactagaacagaacttaaattttacaaacttttgatcataatgcttttgcccatactgtctcgtccttagccccagtgacatgtgctgatcctcctgcctttagttctaaatggttctgaatagctttaaaagatgaataagaaaaaagatcaagctcttttgaggctagagggctcatatggagatctaaaaccctccatgttcatttccagacttggtcaggcacatacatagtaaattataatcaatcatgggaattacataaggataatgaggcccaactgaaaccaagtttcagtctgccttacctttacccgtccttgagaacagcggtccaggagaatcaggcagtctgtggcctcctgtagcagggcgctcttaacagactcaggtgtaaggtttggatcccttgctacatcacaaatcagtttcaagagggccttcagtaagaccacaagtctgcaggaaactctggaatcaggaagaaaagctatgttcatactctaaatctggatattaaaattggaagagacttcaaagactgtcaagtggaaagctatcatttcctaaattaaggaacttaggtcaaagttaaatgaaaaagacctaaaaacagaaccaaagtcagcctctagatttcttaccctcaagtctcctgttagcatactgcctatacacaacagacacaccctctgccacacttttctcttccttccagaagcttggttctacttaataagcaaacagctcctttcatgggctgagaaaggggaaaccaggatctccccaaccaagggcctatacttttatttttcaactctattaactggactatgcttggagagagccctgaatcctttaactttaatgccatct

SEQ ID NO: 320049 - DNA, 919 bp, Homo Sapiens
  misc_feature (768)..(768): n is a, c, g, or t
  misc_feature (837)..(837): n is a, c, g, or t
  misc_feature (853)..(853): n is a, c, g, or t
  misc_feature (871)..(871): n is a, c, g, or t
  misc_feature (882)..(882): n is a, c, g, or t
tccttttttctcccaaactttatttagaaatggaaggagttcaattttttcttgttctactttccctattcttatggaggtaaaaggaaagaaggaaggaaaaagcagctttcacttacaaagtttcgtgtaaaaatatctttttttcttaaataactccattcatacaaattgggatgggaagaaaatcctttcctcttgggaaagtaatacaagtcttaagttccattgtagggtgcgccttcagaaacctgctgcacttttctgatatagttcaccacttttctgtcttcacagctttggggaattttggccaggggaccctttacccgtccttgagaacagcggtccaggagaatcaggcagtctgtggcctcctgtagcagggcgctcttaacagactcaggtgtaaggtttggatcccttgctacatcacaaatcagtttcaagagggccttcagtaagaccacaagtctgcaggaaactctggaatcaggaagaaaagctatgttcatactctaaatctggatattaaaattggaagagacttcaaagactgtcaagtggaaagctatcatttcctaaattaaggaacttaggtcaaagttaaatgaaaaaggacctaaaaacaggaaccaaagacagcctctagatttcttaccctcaagtctcctgtttggcatactgcctatacacacagacacaccctctggccacactgctctcttccttccagaaggcttgggttctactgttaggcaacagctncctttcatggggctgaggaaggggggaaaccgggtttcttccccaaccaaggggccttattacttttantttttttcaacttctntttaactggaactatggnttgggagaggngcccttggaattcccttttaactttttaatggccctt

SEQ ID NO: 320050 - DNA, 630 bp, Homo Sapiens
atgggaaagcaatatattatgcagccagtctgtagaaacattcagatccctcttcctttactcaaatacagtttcaaaaggaagactcatgagaaatttcataaaatacaagtttttagatgtttatgctttgcctttctttttaaaggtgttttcctgctttgtagtctctaactctgaaatttaaaatatgtaaactaaagtggttttatttgtgcttaacccaatttaaactcaatgtaaaatgttatatatgcatcagtacagcattttcaacatattggcaacatattttaaatgaaaacactaaaacaattcttagtatgagacaaaactgtaaggaaaaagagtgttaataccatgatgcattaacataaaatatcaaacacacaaagtcataaaatgaaaatttacagttttacctgttcatatctagtgccccacagtgtgtgtcaaccaaaggtggcagtggctacatctgcctgttggactggtacaggttacaatatgtcctcttccattgcaaattaaagtccaaatagagaaatacttaggttttagaacacatcagaggtatttctgctgtatttttcaccttaaaaattgacacagagtttactaatagaggag

SEQ ID NO: 320051 - DNA, 762 bp, Homo Sapiens
ctcagccatgcactaagtatttggtctgtgccataaggttaatttcctgataatttttatctgcattaaaaaagtatttcaacacagagctatcaaaactaaaaataatatctatttatagctcatattttctactcactgttctactgcagtgtgtacaaggtttatctctggagcgccaaaagtggtacttacagtcttctgactcaatttgaccttttcttgggtactatacatagttcgtaatgacttttcatttggagcaaactttgctcagtataattaacaaaaatagtttcttagtaagtgtaatattaattttagttcagatcacttggaaattaggggaactaagggaaactgcaagggtagaagcaaagaaaagtgtatttttcaaattttaatgggaaaataaattcttgcctaagtgtaacaaaaccactgctcaatctgttatgttagaaatactttttaggttaataggagtaatcagatgataaaactacttcccctattatgacttttaaaatcatgtaactcctgcatataagcagaacacttacagtcctttaatcactcaagtatcttggtcctttcaacctactcaaaaataaatttcaggtaacaaaaacattcagaatatatccgttttcattagatagaaaactgaaaaagttgcttctagctgacatttgagagagatatacagtaggtatatatgtataaaatggaatgtcagaattgaagtaaacattgttaact

SEQ ID NO: 320052 - DNA, 770 bp, Homo Sapiens
  misc_feature (21)..(21): n is a, c, g, or t
  misc_feature (36)..(36): n is a, c, g, or t
  misc_feature (46)..(46): n is a, c, g, or t
  misc_feature (97)..(112): n is a, c, g, or t
taacagccgggcaaaacattntcccaaaatagatgnccatatcatnataatataataacacattcgtacatacatacctttattcatgtgatgtccnnnnnnnnnnnnnnnntgtacacatttattacaaaatcgtaacaaagactggacagtgttttgctcattctggaaagatgaagctcagtaataacacaaccctggaaaaccatccagagattgtggcaatatctttcttctaaacagtcagatattcttgcattaagcttggcgaaactgcctttcaaaaacagaaggggaagtaaaatgaaggaagcagacctcttgctcatctttccaaatgaaatacgagaaggatcttcacataaaaatgcacaaacatttgttattttattaccaatagtgctacaatgaacaatgcaaaatttgtggtctaattttcttgagtcttttgggggttttcttttttacattttagaaactatggtaaacttctgtcagtgtatttgcttgtctttacagactcaagtctgtctgctggcaaaaaaggaaataaatgaaaaaattcagaccctgctcaaactagagaaaaacaaattacaaatttagttgttgggcagcacataattagtaaggcaggacctcaaatggtgaccttttgcgtaagccaattgccagatcctcaaggaattaaaaccagggtgcctgagccacatcagttctgcagttatgttgagtattgtgctgagacagccataccccaagaaaaggga

SEQ ID NO: 320053 - DNA, 943 bp, Homo Sapiens
ttgtcaatagcttgggtcaaagtgaggaagttgcctgtggattttgacatcttctcagagttcaggaggagatgtccatttgctctcacagctgtaggccatttgtcactttgttccggccacatagccacatgattataaaggtaatatgaaagatgatttggaacaagatccttgccagagacgcgaagatcaacaggataccagaattcaaactcctgctttaactgatctaatttttcctttgcaatctgagtcttaggaaatggagcctccttgaagaaaacataatcccaaacttccttggtcatctgttgcggtctaatgcccagcggagactctgcctgtccatgcaagttacccccctgcaataggtgtgcaactgtgtaaaatgccatgtaaatagtggagtcagaaagtgattcaatcagccactgctcatcccaaggcaggtgagtgcctagaccataagttcttgagcaagcatgttcttgtagccaacctaaggtggcttcaaaattcctcctggtctcctcacagaatgtttccaggttcttcaagcactgagatgtctgtttcttccaattctcttctccataatccaagtaccactggtcacacagagccacaacacattcatctgacgacctggacatcacttgtttctctggttccatgtaaataagtgcatctccagcgtcaatcatctttttctgaatagtcttctttacatcttgaaccttctgtcctttaaatccatccaccaacatgataccctcataaaatccttttagatatatcttctcctttgcttctgcaagtttttcccggtcattctggctctgaattttcaactcatcacaaatggttacagcagaaagatttccaaaacctgggatttcaatgactggcaccggctcaaatggcaagaccatgtcatctc

SEQ ID NO: 320054 - DNA, 735 bp, Homo Sapiens
  misc_feature (42)..(42): n is a, c, g, or t
agaccagaatcatgagtaaatattgaatgaaggtccttttcnttgagatcctttgctggaaaaagcacagtatctgacttctgttttggttgagatccactattatctgtactgaaatcagaaacatgtacagatgcctgtatgttacatttatagtgatctacccttagttcttctaagtcattttcacttaatgtgtgttcggaaatgtcaagaatgcattcctgtttgtttttatgtagaggtagctgtgtaaaattctgtcttatgtcatcttcagctgtacttaacatggaacatttattactcattttctcattaagccctctcaattcatttgaagggtgggggatgggctctgaaataaacaggagctttttttcagtttcctgggtctctttatacaggaaattctgctccttcactgttgtatcatcttcctggcaatctttctgagaaatatgttgcaattccactttttccttttgttcagtctttttcaggacacttgcagaaacaggagaaagggatccaacactgtattttattcttttctttttaggtgtgtccttttcatattccacaaagtcaaaaactaacttagatacaatatcatcaacaacttgatactggttactctgtgcaaagtttctgtgttgctcacttagaaggtgagtttctagatcttcatatttctgcaagcaacattcacaatatccttttttcttcttctct

SEQ ID NO: 320055 - DNA, 725 bp, Homo Sapiens
gaccatccctgcaggcaggctcaagaaggaacagacccctttcggcactgactacaccaagggcatgctgctgtggcctgcacacacacacctaggaaaacgtgaatataaacagcatttatgctggccattttatctcaagaccaaaatgaagccaagtctgctaagaacaaatcaaccacccaatgttactactcatttcataacagatgcttttgtctttatgtgaactgcaaccatatacattagcactgtaattttgtgcagtcttggcaatttaaaacagtctacagtgaaatttcacgtaagacacaaaacagattaactaacatctctaaaagaaatatcacccttggtgttaattcaaatatatcatgcttcctcaaatttgctggagaaatatttataagtttatatacattaataaactgctgtgaaatttcttcagtctttgtatttactcaaacccttggagtttcttcatcttgtttaaattttttcctggatgaaggcgtgctgtagggcctggttgatgctaattcgtttagctgggtccaacatcagaatctggtccaacaagtcctttagctggtgtactttcttacgttggtcttcaggaagtctctggcacccaatcaagtcagccaacaggtccttagttggattaatggtgctcataacagtaactttctccctctctgttactttatcaacttctatgtaca

SEQ ID NO: 320056 - DNA, 499 bp, Homo Sapiens
ttccttgttcacaaaagactttattatctagtgatgcatactgagaacatacagaaatctgcatggtccacttcacatgcagtagaacaatcttcactttacaataagtgagtgtcaactgttttatgcaatagacaacactttaaagtcacattcttaaagaaaagcttcatttacaaaagaaataaaaggtaaagaagcaattaccgcttttaaaaagcagctgctttgttcaagagtggaaggtttatgcctgtattgaaagacaacatgatcacaaataatgaaaacaatgaacaaatgaaaaacacttttaccataaagcagtacactttcaaaatgacatacaaatagttaaaaatttcattacgttgtctagcctttaaatatgaggactttcagaattaggcctcaacatttgtaattagtaaatgaaaactacgcatcgtttctatgtcactaggaactatatttaacaaaatgtatataaagtctatag

SEQ ID NO: 320057 - DNA, 1305 bp, Homo Sapiens
ttttttttggatcaaaaaatgtttattctgaattctttaatttaaaaaaatcatacctatgaggtgtgctacaggaattcagatacaataagttgcatataaaacccgacctcattgctcattgtggtaaagcaaggatgatgagaaaatgcacctcaggagcaaaaacacgcttcacgggcactccgggacccaagtcccgagacatttccacgtgaccttctggaaagacacaccgcccacctgactgcacgacgggactggtccagcctcccggctcctcaggaaggagatgagtttcctacaaagtgagtggccacaaatgccaggacagcggtgtcctggagctgtggggggaccttggggaagaacacacactcatctgcacttcacacttctagccttcaactgatcaaactactgaaattgaacatgatattttggcaaaaatactacacccccattgacaggaggagggttcctggcggctcacagcagagcaggcactgccttccttccccaaggccgagaggccatgctgtgacatggcacacacaccgccccaggctgcccggtggcccagggaccatatgggtgacagttaagacatcagcctttgtgaaaagccaagcccgacgcagacctcaactgcactgtgcgtcccaatccagagacccgcggggcaggggaggatttcaaggactcagtgacactgcccggcggggacaggagaggctcccagcagccctcccggtgacctgggcatcaggggatgggtagagatgaggacaagccggagtgggcacaggaaaaaaaccagggtctctgctagaagtcacctgatcctgcgggctgtcacggtatgacataggcagatttcccatctgacatggcagctcctgtgctctgggtgacttagctccgggttaacttccatcaggcccagtcctctcctccccagcagtgagactctagaggaagcccctcgtctgggacagtccttcctgcctacccgccacagggccgacctgaggcctcgtgcttgtcctgggaggtcccgactgcacttgatgggcacgagggcaacacgaacacaagagaatgcgagctccctgaagctgccgcgtgacagtcaatttggcaaaaaaggaaaggaaaaccatcaatgcataaaaccaattaccaaagtcctcctaaggaatgtgattacaatatattagcaaattctgtggcataaacattttcaaaagcatcagcaaaagtattaaatataaaagcaatgtgtatattcccctccccaccttc

SEQ ID NO: 320058 - DNA, 1240 bp, Homo Sapiens
  misc_feature (197)..(197): n is a, c, g, or t
  misc_feature (245)..(255): n is a, c, g, or t
ggggggaggaaattccaaaggcgcctaattcagtgaccccagggattttccctggggaagaccaggctagtggagccagggttccagtttaacgttgctggggccgggcgggtccaaaaggaaatggtctaagaaagccttttttgagggccggaggcgggccgacatattaatatgggtggtgggagttggagggntttaacagcaccagctgcattgcagccttgatttattttggagtaagnnnnnnnnnnngaatggggataaactggtatataagaggaacaggaaggaggggagagaacccaacacatgaggtctgcacacacagctgtcctggttgccctcggtgcagctccgagctccagttacaaggaattccaagttctcaggatcttgaagactctggaggccagtaatccctggatcacactgcttctaccagctcagaagagaagtcctgcctaaggtcatgaaataaacctgactgctgccaccagaccgaacagaggcaaagaacaccttgtcattgcgttcacacaagaattttagtctttgagcccttttgtgcatgaacacaccatccaagtgaccagtttccacagatcggatctctatggccttctctccccagcccattgtctgattggatcgaatatatgctattgatgtaggcatctctccccactgtagaactacatccttggtgatccttccatatgtgtttacataaaccccctcatcttcatagcacaccagaagctccattccatctgtattggggaggatgatgattgcatggggtttgatgctacactggatcatagagtgtgggttctttcttacatgtgttggtagataaatgtcatagactgatcctgaatccacatcaacagcatggaatccagcacaggatccatagatcactttcaacctctggccttcctcaacagtgagatccaccagtaatggcttatgtaccaattctccaaatgacttaaaggccataaatttgtgatatggctttggtgcccacgcatagacttccacagaactcttcaaagcaatcaccagaaatttgattctttcatattttacaactttataatgtacacatccttccaaatcccctacggttgtccatccctgcttcttctcaacttctggatcattgtgaagtattttatttcttaaccaggacaaatagtagacacgtaacttatcctttttgccagatatg

SEQ ID NO: 320059 - DNA, 1694 bp, Homo Sapiens
  misc_feature (480)..(491): n is a, c, g, or t
tttgtggtgtgggaggattgtcttgcacacccccgtctcttccgtttctgctcgtgcacgtcccccggatgattttccttctcttaggcacagctagccgtttggtttttgcccgccgcctgttttccgccccgcgacgtaccctgggggtggtggtcgagggcgcgtcgccaataagaagaatgtggttccttcgtaaaaaaccacttctcctcggagggagccacggggggcgccgggcctcaccccgccacacttacttctcatcagttggcctgattccgtgtccgtctgccaaaacgggcccaccgacctcgtcatacccgctatcaccgccaagagatcttctacccgcaagacttcctcccggctgctcattggcctgttgtggcgctttttatcgtggcgatgccctgtccgccctccggcctctgtttttcccgccggcgcattgcagccttgatttattttggagtaagnnnnnnnnnnnngaatggggataaactggtatataagaggaacaggaaggaggggagagaacccaacacatgaggtctgcacacacagctgtcctggttgccctcggtgcagctccgagctccagttacaaggaattccaagttctcaggatcttgaagactctggaggccagtaatccctggatcacactgcttctaccagctcagaagagaagtcctgcctaaggtcatgaaataaacctgactgctgccaccagaccgaacagaggcaaagaacaccttgtcattgcgttcacacaagaattttagtctttgagcccttttgtgcatgaacacaccatccaagtgaccagtttccacagatcggatctctatggccttctctccccagcccattgtctgattggatcgaatatatgctactgatgtaggcatctctccccactgtagaactacatccttggtgatccttccatatgtgtttacataaaccccctcatcttcatagcacaccagaagctcccagttccatctgtattggggaggatgatgattgcatggggtttgatgctacactggatatgtgttggtagataaatgtcatagactgatcctgaatccacatcaacagcatggaatccagcacaggatccatagatcactttcaacctctggccttcctcaacagtgagatccaccagtaatggcttatgtaccaattctccaaatgacttaaaggccataaatttgtgatatggctttggtgcccacgcatagacttccacagaactcttcaaagcaatcaccagaaatttgattctttcatattttacaactttataatgtacacatccttccaaatcccctacggttgtccatccctgcttcttctcaacttctggatcattgtgaagtattttatttcttaaccaggacaaatagtagacacgtaacttatcctttttgccagatattgtcaccaagacattcaagccctcaagtacgtccatttgttgaaatcgtcttcggttgataagaggatagaccttcccttggccacttctgtccagcagcatcaggccactctctgtacccactagcaaattcactccccataaggcagcacacagaatctcagagttaaacctcttcttgtatttacgaatctccggggtgtcactccctcgtgccgaattcgccacccaggcctcgctc

SEQ ID NO: 320060 - DNA, 515 bp, Homo Sapiens
actttaaaaatggttttattgaatattaatcatttacaagtacagtgagctagacattaagccaaagcacaattgcaggttaaatataatcacaaagatgtcttaaatagaaacccaccaggcaggcaggttaagttccttgatgccctcctttggaaagaagtggagggtgagggaaaaaggacttccatttcaggtgacgagatgatgactagaggactttaacatgctgtaggtgatttcccatgaccacagctgtaggattgccagatttagaaaaaccaaacaatgagaaaaaccagcatgctcagttaaatttgaatttcagacaaataatgaatgcttttactgtaaatatatgccaaatattgcatgaaacattcttaacgtgaaattgtttctctgaaattcaaacttaactgggcatcttgtacttgatctgacaatcctacaaatagataaatacaaaaaagaaaggagagggggttgtaaccctgtccactgttgggtcacac

SEQ ID NO: 320061 - DNA, 701 bp, Homo Sapiens
tctgaaataatatttcatcttttgatttttaattttaataatattagaccaggatagatcacagttttacaaatcttagttttaaataaattatttcagtgtgctgttagtcctctacagtcattttggtttaaaaagtgactatttatttatggtagcatatcaataatttattaatgttaaaaaatactgtgtatgacattacaaaccagaacagttcctgggggagaggattctaattgattggcagttctgagagggcaagaagaatggaactttatacttcaaaaggaggttttggttttaccaggtactgcttatgtaaatcgtttatttttatttcatcaaagcctggcaagtatatgcattccaatttaccattggcaaagctttatttatttttaaggttggatgttgaattaattttgtgggaaaatgagatttgtaagtagttttctttctagataagatagcataaaccaaactttcagaagttaaggatgatgaataatattgaaatgacttgttatatattgtaagggttcccttaagtatcataattaacaatttgtggaaattgaaaaagcataaactgtgttatttgattagtaatatgttcccttaaaattcattttgaggtgtatgttatacacacagtaaatttttgttcaggaatgacttgctcattctgtgtttttaaa

SEQ ID NO: 320062 - DNA, 558 bp, Homo Sapiens
  misc_feature (340)..(340): n is a, c, g, or t
  misc_feature (526)..(526): n is a, c, g, or t
  misc_feature (538)..(538): n is a, c, g, or t
aaagataccgtgcttctccacatcctcatccttcaaggagcatattttgctcttaggatggtctttgggattcaagaatagaataataaatccaaacttggtcattcccattttgaagagatgcaagagggcccagtgaggacatccgcctccctgaaagtggtgctagacagagctgaggtcattgtatctgtgtatccacataggatttctcttaattcagcttgaattgatggggagggaggtaagagtagggtcagagttactcatcccttttcaaagaattgtgggtggaagtttgtaaaggccattcatttgattttcaaaatcaaagcgacantgctctacttccacttggccttagatctctgctataccctgccatagccttgatgccactgggcacaagccacctgccaaatacaggagtggcctctcccagcctgggcatgataggggggtctttgcccttcagatgtgttgacagcttgctcttctggaattgccacacctgttgctacacttnggatttttgtgntctggactttgcagggttat

SEQ ID NO: 320063 - DNA, 616 bp, Homo Sapiens
tggcaaagcaacttaaccttccagaaaatacagatgattggacaaaagaggatgtaaatcagtggttagaaagtcataagattgaccaaaaacacagggaaattttgactgaacaagacgtgaatggagcagtcttgaagtggttaaaaaaagaacatcttgttgatatgggcatcacacatggaccagctattcaaatagaagaactattcaaagaattgcggaaaacagccattgaagattcgattcagacatctaagatgggaaagcccagtaaaaatgctcctaaagaccaaactgtgtctcaaaaggaacgtagagaaacttcaaagcaaaaacaaaagggtaaagagaacccagatatggctaatccgtctgcaatgagtacaactgctaaaggttctaagtcactaaaagttgagctcatagaagataaaatagattatacaaaggaaaggcaaccatccatagacctgacatgtgtatcatatccatttgatgaattcagtaatccatatcgttacaagttggattttagtctacagcctgaaacaggaccaggcaatctcattgatccgatacatgaattcaaagccttcacaaatacagcaacagc

SEQ ID NO: 320064 - DNA, 1387 bp, Homo Sapiens
  misc_feature (95)..(112): n is a, c, g, or t
gcaaaccttccttttttagcttcccctgctaggtgttctttcccctccttcccgcaggtttcccggttaaaaagtacccctgggcctgggctttnnnnnnnnnnnnnnnnnngattaaggctggagagaaaggggatacacttgggcaagaatggatattttgtgctagattcatggaattttttaagtgtccaggaagttttggtttttaagcaccgggcaagagctcccctttggaaatttcagtgtggccaaatgattatcaagcattgcagcatctctgccagcctcccacccttagaaaggtggcagagtgagagtttaaatacccttggaaatgtgtttcatctcagtaatatttccactgggtatccatgacatacagtatggtctgccagggctgcaggcagagagccataagcaaagagaatccacagacccgctgaacagggactcaagccttctcctaaatctaagctttgccaaaaggttatcaacttccaggaccagcctagagaaataaatttaaattccagagagtaggctaggtgatgtaagtgactgactgaaaaaacaagtatcaataactcttaaagttttcagttagaaatttctgtaagttagcctcaagaaactccactactaaactggaaaaccatgactaggaacaggaagcggccctggggtagaagcattctaaagaattgtgacccaactgcatcaatatctgatttcatcttttattaaaagctgagagttaaagaactgtagggataactaagtccacctcaaagtccagacagaaactgccctcccaaagaaacaatgtttctttaaaacaaataccacaccttcccagatattatgggtaggtaagtgactaggttttgcagattaatctatagctgcccatgtgcatgtagtccagaaaacatgccaagaaggaagagctctgaaccagacacagaaaggcagtgtggcttcctcgctcaaggggaatgcaaagggctaagagccctggcttcaagcagctgttatcctagatgaggaaaatgcaaacagattcaatctctgggatattgctgccaacatgctaagcccttcaccagttgccttgattcgaagcagttcctctatgtatactggctaaatgatggactccggcagtgaaacccacatactcagcaggctgcattctaatgagaatgaaggaatttaactaatggtgtttgagctggaaaggtaaggtctgagagtcccagtgagctggaaacccaaaaaaagagaagaccaatccacctcaaaataaggaagaaaaacaaaattcatttaaaggtactctaaagatgagttctttacttctggaagaagaatccttttcttatag

SEQ ID NO: 320065 - DNA, 757 bp, Homo Sapiens
ttgaacatgggaataggtttaattttcatctcaagaacatttaagttgggtgaagaaattcagcttttgttgttagaatctgacaggcttcaaacacttgtgatggaggggttgttgtcatatcaaagtccacctagtaaagttttaggtgaccagtgactttgtcaattaggtctgctggtcctggcccaatccctaggacagtttgagagcctggtgcaatctgagtacgtccagcatcttgaattaaacttacagtcagtcccagcatttttgcatgggccaataatgcaatcagggtttcttcatcaggagctttgaccaccaccttgggctggccacagtattcccattgtttgagcatttcaggatttcttctttgaatctgcttgtaggctgaaacagcagcatgagagcactgggcagccactttcccttttcccatctttaagtcatttcgaaccacaagaatcatcttgtactccccgctgtctcccaagatgcttgcttcactttcagtatctgtgtgtgtcttgctcgtcttgcttttggggagcatcccaaagcatactcgaaggctccagcccaggcacatgccacaagcaactccaacagccaagccgagtgtactgggatgagccaaatattccataaccaaggatttggagggcatctacagtacctcctttcctcactcgcgccttcccttcttctgggcagcgaacacgtttctatcgcgtgagctacctcttccccc

SEQ ID NO: 320066 - DNA, 473 bp, Homo Sapiens
  misc_feature (36)..(36): n is a, c, g, or t
  misc_feature (51)..(51): n is a, c, g, or t
  misc_feature (56)..(56): n is a, c, g, or t
  misc_feature (132)..(132): n is a, c, g, or t
aaataaaactaacagtcagtccccagcatttttgcnaggggcccaataagncaatncagggtttcttccatcaggaagctttgaaccaccaaccttgggctggcccacagtaattccccattgtttgaagcnatttccaggatttccttctttgaatctgcttgttaggctgaaacagcagcatgaagagcactgggcagccactttcccttttcccatctttaagtcatttcgaaccacaagaatcatcttgtactccccgctgtctcccaagatgcttgcttcactttcagtatctgtgtgtgtcttgctcgtcttgcttttggggagcatcccaaagcatactcgaagctccagcccagcacatgccacaagcaactccaacagccaagccgagtgtactgggatgagccaaatattccataaccaaggatttggagggcatctacagtacctcctttcctcactcgcgc

SEQ ID NO: 320067 - DNA, 871 bp, Homo Sapiens
  misc_feature (646)..(646): n is a, c, g, or t
gggagtccggcccaggagagaagtggggaggcggcggtgggggcggggcggcgtccggctctgagagagctgggggaggagcgcggcggcgacggcggcggtggctctagaaggggaggtggaggatctcctttcctcttctcagacccgggagcgtccgggacgcggagcccggagctggggcgacgaggcgattgcgggggcctgggctagctgctggctaccaatattctactttctgtctctatgaatgtgactaccctggttacctcatatctgaggtcactagtgaactctgcttccaagtactcctgcaaagtacaccacaagcctgtctatattctcaagccatccgcttcagttcatatgaccacacttgcatgtcagcaacagaagagaacacacatcatacagcatttacagcagtggacaaagagaatctccctggaaaaggagacatgaatgtctgcaatgatacttcctgacaagaagttgatacaagaaaaggaaaggagattaacagctagtgagcagaatttcgaacagcaggatttcgtattttttgctttcaactgcacacttccgttgcccacttttaaatcagagatacctacactcaaaacccagacaaggcaaaaggatactntttcttgtatattttttggagatcgaagaaacgacaatgtcccgggaaacagaaaccagaaggattcatcaggattcatttttgatttgcagtccaataccgtactggcccagggaggagcttttgagaacatgaaagagaagataaatgcggtacgtgcaatagttcctaataagagcaaccatgaaattatcctggttttgcagcactttgataactgtgtgg

SEQ ID NO: 320068 - DNA, 1645 bp, Homo Sapiens
agcagatcccaaaggggaaacacaagtcattttattcagatgaggcactttcaatgtatgtgttttggggtgtgtgtatgtgtgtgcgcatggggaacagtgaggtggtgcaggataataaatactgtgagggtgaaggaacactcccccaagctggcaggagtatgtggcagcaatgtacagagcctcgggagtagagtccagggacagggaggtgggttcaaggctggcttggaggccaagggtgtcccccttagctcaagaagccaaagaaattggtggagcgggggggtgggcccatgagcatgggcatctggttcttgtgggtgatcttgattgtacagggcgtctgcatccagggttctccgtcaatttgcatgggaagggtttttgtggtgtggaaggtgatctcagagcacttggccagccgacgtccagcattcttgagcttggtatagatttggcccatctcaattgcaccctccagcccaaccacttccagtctcttgtcacttaggtctggtacacaggttttcaggatatcagggtcggtgatgactttagctgtagcacctaaggcctggttgatcccatagatatccccatggggtctcctggtatcaccccagaggttggagccaccatgcatgctagggatgtttagcactgcgatgccttctagggacaggttgctcagatccagcggtttcccacagatctcaactgtcaaagactcctccagctttttgcatgttgagaagatggattcagatgtggcaattcgaagtaccatagcttgttcttcattctgctgttgaacttctccggatatttctctcgcatgatgtggaatcgatgagcatagaggcatccacgccaatagagaagtagtttattgatgatttgaaaggggactggggtcacattttttcttcagtttgttgaggtatcacctccacagaccatcgatccatatgtaccactttactcatctctaatccttgaggatctttgccagattctgtccttcataacctcctccccatcttaggcatcgagccagatcatttccagtacccaggggcaacacagcaacaggaggcaaaactggcaagttagctttgtcaatggtctctagaatccagcctactgtgccgtctccaccacacaccgaaatccggctatcaggaacatccttgaataatcggagccctatctcaggaccatcctttaggaggttgaacacctgtcgagggtttaatatatactggaacttccagagcaccctctgcccctgcttcccgccactcttaggattgacaaagacgagaagtgggtgggtgttaggaacagggtcaatccgcagagcctcagaggtgctcaaatttaaatcatccatggtcttctggcttgttttgctatttttacgatccggtccagaggccaggacactgggatagatggaagatggaggcaggatgtgatcccggagcagcccacagtcacactcatggcccaccgcttgcaggcagtcatcgtggatctctaggtggcaccatacacaatgcagcccggtcagactgtggtagatccggatctttttctgacagcggtcgcagcgcccggactcacagcctcctcgcac

SEQ ID NO: 320069 - DNA, 545 bp, Homo Sapiens
ggtgaatgatctcagtcagcctggaaatgcacaaggtggaaaaataacataaaaaagccataagaccttgaagaacatcaatgtcaaagataaattctaaagtcccagagaaaaaagaatgggaatcgaattgacctcagactatacgtgagaaacacggagagccagaaaactgtgatgttccatcctcagagtttgaaggaaatatttgaaggctgaattttacatccagctaaactatcaaaggcatgcaaagtccatgttattcttaggccttcaaggcctcggccatttttctacagaaaagcctgattttaaaatgctcttagagacgttctccagccagaagagaaagaagccaggagggtgctctgagatattcagtcaccacagttcccaaatggcctaggaattcagagagtcagaatatcaccattactccccaatgggaacccccgacagtctcagcatggtgtgagggtgtggacggggggcctggcaggtaccaatcactcatcccgctcagtgaagacacagtgttcagc

SEQ ID NO: 320070 - DNA, 571 bp, Homo Sapiens
  misc_feature (56)..(56): n is a, c, g, or t
  misc_feature (115)..(115): n is a, c, g, or t
  misc_feature (157)..(157): n is a, c, g, or t
  misc_feature (161)..(161): n is a, c, g, or t
  misc_feature (182)..(182): n is a, c, g, or t
  misc_feature (190)..(190): n is a, c, g, or t
  misc_feature (344)..(344): n is a, c, g, or t
gcatcaacatttttattgaaatacaaaaagtgcaaacggtgaaatacatgattggngccaaggaagtcattaagtgtgaatgtgaacactggattcacacagtacaagcacccgntccctggggtacagaccagtgggggacatgagaaagaccaantagntccgaaaggctccccagtgantggggctntgagcgacacttgatacacaaaggagggcggagagcagagcagccctggccgaggctagagaccaagggactgatgaagaaccagcagcagcccaggccccagggggctggatgcactgctgatggtcttgggagagcccagcgaagttaatgncccaggcccagcctggcttgcggatggggctgggctggtcagtgaggatccccacagtacgggctctggaatcatcctgcctggccaaggtcatgggggcagggtcactgcaggtacttccctgtactccccaaggacaaggctgcaggaagagggatccccaggaaggagtgtaattctacgagacagtgggagtgagatcagccatcactggggccgaggttctt

SEQ ID NO: 320071 - DNA, 474 bp, Homo Sapiens
  misc_feature (24)..(24): n is a, c, g, or t
  misc_feature (30)..(30): n is a, c, g, or t
accaggccgcatgcaaacccgggntgcctnactcccaactgccaccggggtcttttccccgaagttatgccagctccccagaagatcaagtgtgtggaccctgagctgtaatgagcctaagtgaagtcacattacccagaaaacctgccctccccaaactgcaggagcctagacctgactggaaacccgcgcccttgtcccttgatcacaaaacccctggaactactgaataatatccgctgtttcaagattgatcagccttctacaggagacgcttccggagccccagctgtatggagtcatggttacactgaagcttcgggggtaaaaaacaagttgtgtgtcgcagcctgtcggtgaataacttctgtgacaaccgcgaagccctgtatggtgtgtttgacggagaccggaatgtggaggtgccctaccttctccagtgcactatgagtgacattttggctgaagagcaaa

SEQ ID NO: 320072 - DNA, 1074 bp, Homo Sapiens
  misc_feature (290)..(290): n is a, c, g, or t
  misc_feature (1052)..(1052): n is a, c, g, or t
ttgattttcaacaacattgaagttttacactgtgaaaggaatcaactggtcacattagacatctgtggctatttcctaaaagcgctctatgcctcttctaatgaacttgttcaacttgatgtttacccagttccaaattatctgtcctacatggatgtttcaaggaaccgcttaggaaaatgtgcctgagtggggtatgtgaaagccgaaagctaggaagttttgggatattgggccataattcaaatatgtggaacttcctgcccgcttattttgtaataggcagtctnccggaaactactggcaggacacaaccagttggcaaggctgcctgaaaggctagaaagaacctcggtggaggtcttggatgtgcaacacaaccagctccttgagctcccacctaaccttctgatgaaggctgacagcctgagattcctgaacgcctctgcgaacaaactggaaagccttcctccagccacgctttccgaagagacaaacagtatcttacaagagttgtatttgacaaataacagcctcacagacaaatgtgtgcccttgttaacgggacacccccatttgaagatccttcacatggcctataaccgacttcagagttttccagcaagtaaaatggcgaaactggaggaacttgaagaaattgatctcagtgggaataagctgaaagcatcccaacaacgatcatgaattgcaggcgcatgcacaccgtgattgctcactccaactgcatcgaggtctttcccgaagttatgcagctcccagagatcaagtgtgtggacctgagctgtaatgagctaagtgaagtcacattaccagaaaacctgcctcccaaactgcaggagctagacctgactggaaacccgcgccttgtccttgatcacaaaaccctgggaactactgaataatatccgctgtttcaagattgatccagccttctacaggagacggtttccggagccccagctgtatgggagtcatgggttacactgaagctttggggggtaaaaaacaagttgtgtgttcgtagccctgtnggtgaattaacttctgtggaca

SEQ ID NO: 320073 - DNA, 574 bp, Homo Sapiens
  misc_feature (327)..(327): n is a, c, g, or t
tcctgtaaagatggccattgcattaatggagaagaagatcccttctcaagccttggagaaaacctaactctttctgcctgtaggtttgagagaagagaattgtcatatctttatatatcctcatgaatttttcttttgtaggtacatcccaagcaaataacaatgacttaaatgttttcaggaaatggcacatatgtgctgatgatgtttgttatggactcggttggaataaaatgacattaaagagaatcaaacattaaaaataccttctttataaagatcataaggatcatttaaaagcagctgaaaggggagaaatatccattngggcaaaaaagggaaatctttttttcagaaattgaattactatttctttcactggaggatttttgatgatagaagataattgtaagtaaaggtaatagactgaggtgggcggcaaagaggacaggcttcgagtcagcctcttctggtttcaaattctggcctcaccacttaaccagcttgaccttagtcagagaggtttttttgagctaagactcatttttcttctctttaaaaccaaatcataatg

SEQ ID NO: 320074 - DNA, 1185 bp, Homo Sapiens
ctttgacataacactagcgattattttagacccaggaaaaaatgatttcataccagtcttttcttcacataagatttgtgtagcattaaaattatgggttactgaataagccatgaaggcaaaaatgtggaactctcctttgccaaaacagaaacaaacatccctgttttgactcctgtccagtttccaaaacaaaacaacaaaaacatacatacacctttgttattgcacatctttcacacaaacttgtgtatgtataatatacatatatatttttaaatatgctacacataaaaaaagactatggcactttacagaatatatgtttaacaaagatcattacaccacagatgtttgaaaactatacaaaaacccttatacaattaatgcaacattgtttgaattattagcacacaggtttaaagaatccacagaatccaaggcaaatatttctgcctcagagttcattgagaagcgcagcccatcccatcccgtcatgagactttctttaagccaatttcaggcaaaataaataagactttcctggtagtaataatggtcctatttattagaaaaataagtgtgagccaacaatctatttttaacatttctttctagcatattccttcataccccagtgttttttaaccagctgtgtggaagagcatggtttagactagcatgattttagatggtcctttcatcccaagcctggctaatggattcaaggtttaaaagtcccaacattacctttttactatttattaagtcagtgtttacgtagtttttagtggtttggggttgtgtgtgtgtgcatgcctgtgcttttgtcttctgttgcattcagattaataacataaacactatcgagtgagtttattatggccaagaagtcacactcccttgtgactgttcccaggttgatctagaggtacactgccaccttagccaaagagcaggtgatggacatgctcggaggatcctgtgagcttaggacttaacttgtaaggacactgagattgtaaacctagtgtcagaaaatggtttctctatccaagaaagaaagaaaagtgagtcttctgataagtttatggaaaaattttgtgtttttcatcaaggtttgagacttggttagaacattataaatgtacacacagagacagaagctttgtccagtggctcccc

SEQ ID NO: 320075 - DNA, 523 bp, Homo Sapiens
ctgtaaagatgttatttcaggcattggatattttttactttagaagcctgcataatgtttctggatttcatactgtaacattcaggaattcttggagaaaatgggtttattcactgaactctagtgcggtttactcactgctgcaaatactgtatattcaggacttgaaagaaatggtgaatgcctatggtggatccaaactgatccagtataagactactgaatctgctaccaaaacagttaatcagtgagtcgatgttctattttttgttttgtttcctcccctatctgtattcccaaaaattactttggggctaatttaacaagaactttaaattgtgttttaattgtaaaaatggcagggggtggaattattactctatacattcaacagagactgaatagatatgaaagctgattttttttaattaccatgcttcacaatgttaagttatatggggagcaacagcaaacaggtgctaatttgttttggatatagtataagcagtgtctgtgttttgaa

SEQ ID NO: 320076 - DNA, 1031 bp, Homo Sapiens
  misc_feature (239)..(239): n is a, c, g, or t
  misc_feature (312)..(312): n is a, c, g, or t
  misc_feature (835)..(854): n is a, c, g, or t
gcaccagcccgggttttatttgggtgccccggccacggtcggtcccccttgtttcccctcccttctttgtggggttactttttagagagtttcgtgggtctaaaatctccattttgtcccaggaaagccgttaccgttacccccggaattcctctcccttgggggttttctccaattccctaaacccgcagcccgtaattcccattataaccccctgtcagctcatttgctctcttctntaagctattaaagtccaagacgggcagagcctctatcatgtttaaccctgtaccccaaaaacctacaggggtntagtacagaatagcacagtaaatctttgttgaaagaactcttttattctacctttttgcacaccacctctcatgaaaatggttcttgacaatgccttccgtctctcatctaccaagtgtcttacctagagaaggtatttaggacttttgaataaattcaagactttgctcactagtcagaccgtaatttttagaaggaataggagcatcctgactagaagcgtgataaaacctggctatccagaaaataaagaatggctgctaactataaaagctgttggaagaaagggccttaaaatcttaaaagtctttgtattttaaccaaataccttcatagtgcaaatatgataaattcacatgcattttacttttacatactcataacaagatagtaacacagactaaagctgcagtgttttcccaagtgaatcttcattttaaccaaactcacaaagcatttatggaaattaatacatctggcaaagcaccagacttgaatcaagcagtctcaatgctacagtgtnnnnnnnnnnnnnnnnnnnnctcaagatgtagaagcagtagccatatcagcaaccattcttctagggaagggacccacatatacgatccttccccaagaactttgatgctaccccgctgaagagtttaagcacaaaacacagtgcttgtatcatataagtaaggactttcatagaggaaaactgtaatataaatgca

SEQ ID NO: 320077 - DNA, 369 bp, Homo Sapiens
acatggtgattttggttttttatggtttcttctgtcaaaattttattgtttccataataataggctctggacaaagacaatggagacaatgacaacacatttaaactcctataacaaattaatctgttacaaatttccagtggctcaacatattaaaatgcaaaacatataaagaaaaaaacaagaaatataaatattcagatttttgcagtacaatgaaatgtcttttaaaaaaagtttgttgtaattgtgtatgtaattctgacagtaattcaaaacacaaaatcacacattttccctaacttcccatgttctggatctggggactgcaatattacagaaatatgcaaaaataagtttagtgctccc

SEQ ID NO: 320078 - DNA, 804 bp, Homo Sapiens
cggccttggccctcccaaaagtgctgggattacagggcgggagcccacggcgcccagccgcggaaacattttaccagggccaataaaaggtttgaagcacccttttggggaaactttgtgaggagcacaaattccagagggccccacagcagccacagcctcctggcgtgacaccaggcacactgccggctgcacaggttgttgggcacaggcaggcacagccagtctggaagagcagcccgtcttaaatctttggtttctttccaaccaggagcaaacattggtagaaagagccagggcatatttactctttacacccagaattttcattcattattgaaccatttggcttgcacagtgctctctgataatgtggtccataaaaaccaccattaaagctgccctttcacctgatctgggtggggctaaacgaggaaacgagaagtttcctgtatgcttcaaaatataaatcaatgccaggaaattctgaaaatggatgctgcctgttaaacgtgaaatcactaagggagcttctgcaaaacccacccggcagcatgaggaacggtgtctacagcgtgctccaaacggccacggccccgctccttacagatcaaagtttaagccgcatattctcatatttcaaacaaaactgcgttacagacatcatctacgtgggcacggatacacactaaacaaggacgtagtacacaattgaggggtgccccggggagcgcggcaggaatgccttccgggaagaatcctctggtcgccggagccctcgcgctgcagaggaaaccagcgatc

SEQ ID NO: 320079 - DNA, 744 bp, Homo Sapiens
ttctcgttctgctccctgctgagctcagctgctctttcatcctggtctggtatgcactgtgctgtggcctcagtggttatggcttgagcgactgggggctgctgctgactggagctcacttctggctctgtgttaactgagggagaaagggctacctcacaggaggagacctggctgggcagatgggacaggaactcttcagaggcaacttgctcatcctgtccaggcagctgcagggcagacaaggggatactgatctgtttgttaggatgggatgtgctcacaggcatttgcatggccacctgttggttggtgccatgtgtaccagggggtcctctgtttggtgaagccagagataccctagcagtcttctggacaattggtctggagatcacagagggggatgcagacataccgtgtgggtctagctccgtgctgatggcagatgtgacatggggaatcagtttagcagaccctacacaggagggaccagcgtgagtctgaggcttgggttttgccatctgtgtcaaggacagggctggtccatctactcctcctgtcagttctgcatttgccacaatgtaataatcttcggggatttcttgtttgattttcttgatgatgacatcattgctgcattcgtcaaccatctgcgtctgggagcttgaatggagggaagatgggactaccccaggtcttttgcgagcaatgctttgaggcctttgggtttggggttcaaagtca

SEQ ID NO: 320080 - DNA, 1001 bp, Homo Sapiens
gcactgcagagtacaaatgctcggccagctatatagttattccatctaatatttgtgtcactatttataccatctaaacataaaacaagtgcttgcaggagttccactaaaatttcaaaagcatcatgcctgcctgtccactgagaatggcagatttccttcagttctttacccctttctttactgttctgaaaaagaacagaaattacgttgtcaagttctaaaagcagttgtggtgatcgatggaaaaaagaacaaacttcctcaattgttcctaatgcaacagatactcccataacaggtactgattttgccaaccacatatttaaggcacaggaagagcagagtgtgtagatagcttggggatatttctctaaaagtctagaagcaacaactttcattttggaagaaaatccactagagacaatgtaagcctggccacgacaatactccatatttaatccccacttctcagttatcatagtgtgaaatttcacagccaaaatttctgcatcggcttcataaggcaggaagcctataaattcctctcttaggttatgagattcatcaacaaacctcaccaacacaggtaggtgctcttcccctgctatgtccactacatcgtcagtgataatggaaaagaagtgtgagtctctcacttccctgagagtttcttctcgaatacagctctcacagatctctagcatctgcctctgctgtgtttttgaacaaaacaacgtgttaactgctgttgtctcaaaccgctttctcagaacctcttcaccagaatttatccgacactccagcagtgcctgaaagttatctggagtaaagagaccttctgggatttcatcagcctcatgtccatccagaggtatgttttgctttcccatcagaatcaagatttcaaatagagattttaggtattctttgttttccttctcttcaagggttagaggtaaaatgtcctcatcttgcccttcaccctcttcttcgctggg

SEQ ID NO: 320081 - DNA, 1462 bp, Homo Sapiens
  misc_feature (214)..(229): n is a, c, g, or t
  misc_feature (247)..(256): n is a, c, g, or t
aattgtggggggaggaaatacccaaaagccccgtatggttccattggccccagcggatgtcttcccttcagggaaaaccaaggtttattggccccacagtgtttgccacttttacctctaactgtgggggccccggccgccgccccaaaaccgaaactgggttttaaaaaaaagctttcttcggagggcccgaagggcggcccgacaaggttcnnnnnnnnnnnnnnnngctccttcttgcgggggnnnnnnnnnnaccatagttaagcagtttaaattttattgaccttcccagtttttaaaaaaagttaaatttaaggtcccacctctaagtttgatgtactatatacagatcgtgcagaatatgagttaaacagatacaaattagtccatgcccaaaaagatatactagggtacagaatcatcttcataaatacatataaaattcttgtgtagaagcgaactgtccaggttttctgagacacttctaagtgaatcaaggcacaaaatgtacatacaccattgtgaatacacacattctagactttgtgcctctgacatagccccaggatttagcttcatgactcttataaaactaaatgtactgaatgagattttgcttcttgggtgacaaaccccaggaactataaacatcatgtagataattactccaaaatatggagaatacaaatacgagcactttattttaaaaagcaaacacaaaagactggtgtaaatccaagtgtttaaatgcctccgttttggataatttaattaagaaccgatacaagtttgttcccagaagctaatgcatcactagtctctactgaggaaaatgagttctaaaaattaacatggttttcagtaattcaaatttcactatttatataaaaacctagagagaccaataatatccagtagcttcaaaagataagctaaagattctttgatgtaatcaactttaccaatgtttgtatgggtgtgtttaatatatacacaaggaaaatacactcactctataatttcttataaaatagcaagtaaggagtagaagtaggagatgtagaaggggaaagagaattcagaaagtccttctcttcagtaactttgacttcagaatcatcaaaaagcaaccacttcccctcatactcctttaagctttgcactacgtatgaaattttgttctcaaatccactaatattaatgcctgtttggtcactggattccttgtttctatcagattcatgggtcccagtagtatcactagtctcagaatttctattttcagcaaacgctgtactagcaaccttatcaggattagaggctttgttgtatagctcataatctgctttgctcttttgtcctccaagaagtccaatagcttctacattttttttgttcaaaactttacttggctgtgtatttccaccaactctaattgacacttcttcatcattataat

SEQ ID NO: 320082 - DNA, 615 bp, Homo Sapiens
ctggaagaaagttgtgtcaattttactcacattttaaaagtatattttgacttgtggtttaaatatgggagtaaattcagcctttcttcttttcatctcagtcataacccaaaagctacgggagaaaaagcagaagtgtaatctctgtatctgacaaaattagggagacagctggcaaccctaatgagagggctgccacaggcagaggaaaatgaagcactggtgccaggagatttccagagtgagagtgctcaaggcctgcaggtgcaagacagcactggtaaggactcttagctgaggttcgggatatacccccgaggcgcggaacccatagatataacagtggtaacagtgcgtgggcaggtaggaggtaggatgtttcctagaccatttggggtctgaggagaaacaggctggggcctcgagaaggagtcactcagacaagccatatttttagaaagtagtctactgatgggagcaacagttatggcatgctgggggaagagaagggacttttccttgtgaagagccctacagctgcccctatttactgacttgggagaagtaaagtcagaaagaacgaacagctgtggggggaaaaaattctcagttgtc

SEQ ID NO: 320083 - DNA, 792 bp, Homo Sapiens
  misc_feature (125)..(141): n is a, c, g, or t
  misc_feature (143)..(143): n is a, c, g, or t
  misc_feature (148)..(148): n is a, c, g, or t
  misc_feature (150)..(297): n is a, c, g, or t
  misc_feature (299)..(306): n is a, c, g, or t
ggggggggaaccaaacccctgttttttgtgccgggggtcttctggtggaacacagggaggccccctttttctttcttcttttggggccccccgcccccacaaaaaggtttgtaaaaaattttttnnnnnnnnnnnnnnnnncnccaanannnnnnnnnnnnnnnnnnnnnnnnnnnnnnnnnnnnnnnnnnnnnnnnnnnnnnnnnnnnnnnnnnnnnnnnnnnnnnnnnnnnnnnnnnnnnnnnnnnnnnnnnnnnnnnnnnnnnnnnnnnnnnnnnnnnnnnnnnnnnnnnnnnntnnnnnnnnaaaagaaaacactttattgttcagcaattaaaagttagccaaatatgtatttttctccataatttattgtgatgttatcaacatcaagtaaaatgctcattttcatcatttgcttctgttcatgttttcttgaacacgtcttcaattttccttccaaaatgctgcatgccacacttgaggtaacgaagcagaagtatttttaaacatgacagctaagaacattcatctacagcaacctatatgctcaatacatgccgcgtgatcctagtagttttttcacaaccttctacaagtttttggaaaacatctgttatgatgactttcatacaccttcacctcaaaggctttcttgcacctcgcagagcccagctacgggcccgcagtctccgccgccgccaccacaccggcatgactaacggctcttcgcgcttcttcctccctcgccggtcgcgcgggaaaggaagagcgacatcggaagacagcccc

SEQ ID NO: 320084 - DNA, 1229 bp, Homo Sapiens
cttaagtaatttattttaaaattataagatttacagtgccttgattatgcaaaatagcataatggaaattaaaccaaatcaataaaccaaagagaaagaaaacttaattttctctagtatccatacttaaaccatctttgtaagtatctgatgtcccaaccatgtcttatgtagaaagtataatcgtttcaaatgtttcacttgcaggtttaatttctcattttcaatttttatgaactgtaatgcaatttcaaatcctattatacctagtgtttatactgcaacagcagcaaatctcacatgtgtaatccaaatgtggaactggggcacagcttctagctgtagacagaaattatacactgcattcagtccaggagagtacattacattaaccagagcgtagagtttagtacacttattgcagggttggtatttctttccctctgatctgaatcagctgagctgctgagcagacatattactgctgtggatagtaagactgctgtgggggctgagggaaggggtatgaaggctgctggggtcccgggtatggagcctgtccaggactctggtgatacactggtggatatggcatattatactggccatacgcataaggattatagcccatgggcatgggcatttggcaatacccaggatatcctggataggtgggatagggtggtccctgcgcctgtggaggaggagctgagccaggcgtttgtgatggagctggcgcagcagtcccagcccccactggagatggagcagtagcagaaggagctcgatttgctggaagcacaggtggtggaggcctggctgggggctggggcttagtaggcggcatggttcttggcgctggagttggaggagttggtgcatgtcctcctgctggtgaggactgatacgcaggtgtaggaattgaaggagcactaggttctctggcaatgctttgttgcaagtcctttaagagttcatctctttctgtcttccgtgcaaaaactatatcactgcatttgttctggaacctgaccaggatttcagtcaactcattgtaaaactttgtgccttccttcaaattagctacaagttcaacaaagttgtcatatgcagtagctaaattcttcaaaacttcttctcttaagttagcttcattattagattgtttcattttcgaaaattcctgatgtagagacctgaatatttttaagaagtccctcctgtttctt

SEQ ID NO: 320085 - DNA, 1057 bp, Homo Sapiens
  misc_feature (19)..(19): n is a, c, g, or t
  misc_feature (163)..(163): n is a, c, g, or t
  misc_feature (202)..(202): n is a, c, g, or t
tgtgattgaacagggaggnatccagactgttgatcagttgattaaagaactgcctgaattactgcaacgaaatagagaaatcctagatgagtcattaaggttgttggatgaagaaggaagcaaccgataatgatttaagagcaaaatttaaggaacgttggcnaaaggacaccatccaatgaactgtattaagcctttaagnagcagagggaaccaacttcagaacagttttagataaagctgtgcaggcagatggacaagtgaaagaatgttaccagtctcatcgtgacaccatcgtgcttttgtgtaagccagagcctgagctgaatgctgccatcccttctgctaatccagcaaagaccatgcagggcagtgaggttgtaaatgtcttaaaatccttattgtcaaatcttgatgaagtaaagaaggaaagagagggtctggagaatgacttgaaatctgtgaattttgacatgacaagcaagtttttgacagccctggctcaagatggtgtgataaatgaagaagctctttctgttactgaactagatcgagtctatggaggtcttacaactaaagtccaagaatctctaaagacacaggagggacttcttaaaaatattcaggtctcacatcaggaattttcgaaaatgaagcaatctaataatgaagctaacttaagaaaagaagttttgaagaatttagctactgcatatgacaactttgttgaacttgtagctaattcgaaggaagacacaaagttttacaatgagttgactgaaatcctggtcaggttccagaacaaatgcagcgatatagttttggcatggaagacagaaagagatgaactcttaaagtaagtctgttttgtgtatcaaattgtacttaaagaattttcttttaaaaaatcatgtggagacttttggtgtggtcacagaaatgataaaacagttcaggtggcagatctcaggaagtgccagtaaatacaagcaatttatttgaagtggcaaataggtttcttacataaaactagagctatagaacatggaggagacag

SEQ ID NO: 320086 - DNA, 411 bp, Homo Sapiens
  misc_feature (382)..(382): n is a, c, g, or t
  misc_feature (392)..(392): n is a, c, g, or t
caatatgtattttaaggtatagctatgcttttgattttataagtgattttgtcatctttctaaaaacgagaacgcaaagactgtcaggagctgtttttattatgaagtgaattggggtctatagaaggggaggataagtaaagttggagactagaactcaacatataaccagccgataaacgttgctgttagaatcacttctgtgctctgcaaacttttattttctcccagagggaaaccaacttcagaacagttttaggataaagctgtgcagggcaggatgggacaagtgaaaggaatgttaccagtctcataggtgacaccatcgtgcttttgtgtaagccagagcctgagctgaatgctgccatcccttctgctaatnccagcaaagnccatggcagggcgtgaggt

SEQ ID NO: 320087 - DNA, 1306 bp, Homo Sapiens
  misc_feature (1135)..(1151): n is a, c, g, or t
  misc_feature (1223)..(1223): n is a, c, g, or t
  misc_feature (1280)..(1280): n is a, c, g, or t
gcttttatatataagagcagcagccgcctttgtaaagtgtgatctatgagaattggagacacttctttactgttcaccaaagaaatgggtaatctgtgctgatctccttatttttacctttttacagggtttctaggacattgtcattattcttcctccatctatctgattccattccttccacacccagctaaagttagaggagatacatatagaatctattttagattattgttaactatttgcatcaaattaagatacacaaatggccatggatgttgccttagccttaaacattactaatagtttcacatcacctcactgcacgcatcgaaggatctgatttgaatttgtaaaggcaattcttttgagagcaggattctccaggctaaatcaaaggcagctaatcctgtccctgaaggagcagctaggggaacctgaggcttgttcttgaagtgggcaagctggccaaaatattggaacacacagaaccaaaccaggtgtgttctacacctgcatgagtgaaggatttccacgtaggacacctagggaagagcccgcatgccctaggactcactccagaggaaggattgatttgcaaccagaaagggagctgaaaaccacggagctccatggctcttcattcaaaagggaaaataatgattccacgttgctttttagagttcaaatcaacatctttctggataaatctattttttaacaatctttttattatttgtaaaagatataaaaacaactcccatcagtagcaatacaaggttatacattttaaccagattttctcaggccttttttggatacctttagtagttaactctcttttgtcaaaccctcttgtaaataaccatcgcacaacatacagaaccctggggaatacagccaagggactgctcactgtggcccgtgtattcattcccacaggctgcactgaaataacctggtaaacaacaccctcctccattttgcgtctatttcttctattgtgcttctttggggataggaagagaaacataactactgttccaggtaacgtctgtatcatacagttagtgttgccagtgaaacgtttcccagatacaaagaattgtgcttttaattccatttcacaatctgnnnnnnnnnnnnnnnnngtcattgtctgaccaaaattccttctggcacatggagggccagtatagggcaacgtcacatttgtttgtttncaaatatggcagtgtgggtatttttgtttaactttggcatttaccctggagcaaagntacttcttggggatgggccggcagtt

SEQ ID NO: 320088 - DNA, 966 bp, Homo Sapiens
  misc_feature (48)..(48): n is a, c, g, or t
  misc_feature (59)..(59): n is a, c, g, or t
  misc_feature (81)..(81): n is a, c, g, or t
  misc_feature (134)..(134): n is a, c, g, or t
tactctggtcttgtaaaccagaaatggagaatcccctccccaggacanctcaggagaanagcattcccgcttcaccgtcancacccaaagctaaaattctaattaaactactccctgaattttttctcagcacncactttagctaccatgtcagtactaatcaggctagcactaatgcattagtgcttttatgtacttgtgcattactgctagtccccatggataatatggggaatcaacatggtttgttgacttccaaaggcgtatattcttcattctcattaaactatggaaaatatttttcttaatcaaacaaatgcatatcatacaacccatatctatgttctgacatcctagaactagaagatatccctgtgctgaatctacatgcaaatttcttctgatcaagaaaacctgttagccctaaatccctatagacatcagccctgaaattacccgcttgtgcagacgttctgcttcctcttgataggcagcaagttgctgtttccattgtttcacattggcagtggactccagcagggctgcagtgagtttggcattatttcctttgagggtagccagttcagcctcccaatgtttgctgattgctgaactatgtgaaaatggcaatgcattctgagttggttcagcccttggctctgagttctgtgtcacatcaggtgttctttcatcatctgtcccgttgatactttccggtgttaaaggagactgaagatccccgcctgcggattcctgtgaaggtgtactggtaagttccatcttctcttgtgatttttcctttgctagtcgagcagcttctttaaattcctgaaacttttctgcaaatttcgaaagatgatgctcagaggagaatcccaatccataaacggtgtttgcccggctatcagcccactggccaaacttctgagatgttttagtaaatgtcatgtttggggtgatggtact

SEQ ID NO: 320089 - DNA, 1829 bp, Homo Sapiens
  misc_feature (39)..(39): n is a, c, g, or t
  misc_feature (41)..(41): n is a, c, g, or t
  misc_feature (54)..(54): n is a, c, g, or t
  misc_feature (1129)..(1196): n is a, c, g, or t
  misc_feature (1368)..(1398): n is a, c, g, or t
gccctctcagaagaattaagcctttacttctaattattncncattactttgagntaaacctgaatagagtattaaatataaagttgtagattcttatgtgtttttgtattagcccagacatctgtaatgtttttgcactggtgacagacaaaatctgttttaaaatcatatccagcacaaaaactatttctggctgaatagcacagaaaagtattttaacctacctgtagagatcctcgtcatggaaaggtgccaaactgttttgaatggaaggacaagtaagagtgaggccacagttcccaccacacgagggcttttgtattgttctactttttcagccctttactttctggctgaagcatccccttggagtgccatgtataagttgggctattagagttcatggaacatagaacaaccatgaatgagtggcatgatccgtgcttaatgatcaagtgttacttatctaataatcctctagaaagaaccctgttagatcttggtttgtgataaaaatataaagacagaagacatgaggaaaaacaaaaggtttgaggaaatcaggcatatgactttatacttaacatcagatcttttctataatatcctactactttggttttcctagctccataccacacacctaaacctgtattatgaattacatattacaaagtcataaatgtgccatatggatatacagtacattctagttggaatcgtttactctgctagaatttaggtgtgagattttttgtttcccaggtatagcaggcttatgtttggtggccattaaattggtttctttaaaatgctttggtggcacttttgtaaacagattgcttctagattgttacaaaccaagcctaagacacatctgtgaatacttagatttgtagcttaatcacattctagacttgtgagttgaatgacaaagcagttgaacaaaaattatggcatttaagaatttaacatgtcttagctgtaaaaatgagaaagtgttggttggttttaaaatctggtaactccatgatgaaaagaaatttattttatacgtgttatgtctctaataaagtattcatttgataaaaaacacacaacaaaccctaaacacacaaaccaccttaannnnnnnnnnnnnnnnnnnnnnnnnnnnnnnnnnnnnnnnnnnnnnnnnnnnnnnnnnnnnnnnnnnntcaatccactcatgtcactcgtccaccctttccccctttccctttccctcaatcggattgcccatccctcacctccttttacactttccctatcccttatacagccttttcgctttggcgtcacccgcgaccctcccccatgtaaaatacttttccgattctgaactcacannnnnnnnnnnnnnnnnnnnnnnnnnnnnnntacccttcatttgctccacatcccacattcccccacccccttccccttgccgctcctctcccgtctacaccctcctatcactcttgtgtgccccgccaatagcgcgtccgctcctcgtaccgcctcccccctccccgcatatatatatttccccgcccctcccgcacacagcacagtatgtcttacaccccccacaacaccactttcttcaccgccgcgcgtatacacacacgcgtgttttcacagtccgtgtaccccttttttacacctgccacccttcatacatagcgcctccccctcccgccatatccttacatctttcattctcgcaattatcaccaaatcagccatacctttatctgcacccgcgcctattgaaactcctactactcacccagccacatgcgaccctcttatccgcttccaccgtt

SEQ ID NO: 320090 - DNA, 1066 bp, Homo Sapiens
  misc_feature (143)..(157): n is a, c, g, or t
  misc_feature (279)..(341): n is a, c, g, or t
  misc_feature (354)..(364): n is a, c, g, or t
  misc_feature (413)..(441): n is a, c, g, or t
  misc_feature (446)..(446): n is a, c, g, or t
  misc_feature (455)..(455): n is a, c, g, or t
  misc_feature (466)..(506): n is a, c, g, or t
  misc_feature (509)..(641): n is a, c, g, or t
cccgtgcgggcgaggggggtattgtccccggggcgatgccgaggggattttctccccaccccggggggagggtgtttgtgacagcggcgggggagggggtgtgatgtggtttatccaccccgcatccctgattgtaaacggcnnnnnnnnnnnnnnntgttttaaatgtggagagggggtgggtgggccgcggtctttaaaaaaccgcaggaaaaaggcgccacggggccccctccgggtttgtgttgaggaacaccctggttgcgccccggcgggcgnnnnnnnnnnnnnnnnnnnnnnnnnnnnnnnnnnnnnnnnnnnnnnnnnnnnnnnnnnnnnnntatgcccacctgnnnnnnnnnnnaaaggggggcgcgccccgcccccaagaacgagtgggtaattctcttttnnnnnnnnnnnnnnnnnnnnnnnnnnnnntgggntggtggggnggtggattttnnnnnnnnnnnnnnnnnnnnnnnnnnnnnnnnnnnnnnnnntgnnnnnnnnnnnnnnnnnnnnnnnnnnnnnnnnnnnnnnnnnnnnnnnnnnnnnnnnnnnnnnnnnnnnnnnnnnnnnnnnnnnnnnnnnnnnnnnnnnnnnnnnnnnnnnnnnnnnnnnnnnnnnnnnnnnnntatttcatacaatgttattcacacatttttcattttctaatttatacataatatacaaagaagtgaagttaacattatttcatatgaaccaataagagccaggacttagacaaactggtccagaaacaatccctatcaaaaggagacactcaagagtaaagcctaggtagttttgcccaattgttttattctgaaatgtgattttcagattttaccaaaatttcatgccaacttactaaaaggtaaaaattggggtgggcacccaaaatggcagactgtaaaatttctacaagaacaggtacttttgtagagcaggcctgaaagtattgggaagattgggttgtcagcactgggacaaatgggaatgagtatcaggaccccaagaagagggtttagtttctcaatgtagtattctctacttgtca

SEQ ID NO: 320091 - DNA, 795 bp, Homo Sapiens
agaagtgggccgcgagagtggcgcgatacacagaaccagggtgttctatagttgacagcgggtaggacaatgaatggggcgtcaacagcccaggttttgggtggagagccaaaaattccagttgtggccctttcgcgtggaattcggtaaaatttgtaaatggccctccaaaaggctttaaggcaggttcttcccattctgagctcaagggtttcctttttttggcgggtcttcagtagtcaacatcccacacttgccattgattatctgtgggcattttggacaaagcttccaacccaggtacaagcggtcttccaaatttagcactcagaaaaggggcatcatctaagtcaattacatgcaaattttttttggctaatttcttgtgtatgttaaatgggtcacaacatgacttctgtaaatcctcaaatctgtcaatgtaaatttttacatgatgaaagcaaattgtattgttcccagaaagtgtcattccagttctaagttgaagtaaaagcatatcatttgatgacaattcttgcaaagtcttaaaacctgtgtgacgagtatagtaggttttatggcactcatttgtagtacgaagctggactccaactgaacatggatccatcattcttgattctagcaaattttccctgttttattttgtctggaggtttaggtcatgggctgatcacccttagcttgagctctcctccgcccggcttcgggcaagatgcgagtccacacaggccacactcgaccgaccgcttcccagccagtccccgcgctaccccc

SEQ ID NO: 320092 - DNA, 1232 bp, Homo Sapiens
tttttttcagatgatcaaagttttatttaacattatagaacacttaaaaataaacaatatgattgcatttctgttgtgtaactttgaaaaatgttttcaagcacacataaaagcaacaagttttacccccaacaagtatgctatgcagccagtccctaactgctggggtcagcactgctctcaacagacagctggggtaggaggtaggctgctggtgtccctgcaggcaggtggcttttcctactcggaatgacgatgtcttttcttgttatggttctcaattgcccttctaagtgcttcatcctggataagatctgactttcttatatccgtgtggctacagccaatttgagggcaataggcctttttcttccgcttttgcctggactcaatcatgcgaacaatggcgtcctcttcataggtgtggccacacactttatttttcactggcttcttcatttcttcctttgtaatggggcaggtgaagttggtctgacttgggtcacaattatatcttcatccactccttctgttccgtcagcttctctgtcagcttgaagaccactttgcttctttagttctttcagctgttgtttaaactgtacaaatttttcattattttgaaagtctgcatcagaattcttgctctgtaaagccaaaaatttcttctctaccaataattttaaatctggtattttttctggacgttcttctttcacatgatttattgtagattgaacagcctttacataatggtttagttgccgatccaatgtagcaaattcaaccattgccttgtccatactatattcactactcacttcagtctgactttccacaagatccaaagcaacactagaagctgtgtccataccagagttgatacaggcttggaagtttttcaaggaggagagagcagactctacaccactgaaggagatgaaaccagttgaacctgaatttgaactggaacgtcctggcatcttgaaattagtacctgggccaccaaacacagctggactcaatatatggggaaggtaagtgtcctcagtttttggagagagattaccctcttccaaaagagtgcttgattctgtgaagaagtcaacaatagcacagtctcttaaaagcctggtagtccaaagctgtctccgtttggtggcaccccaatttcccttggcctagacccacctcctttcctcagcccccttcgcctgccgctgaaaagtccc

SEQ ID NO: 320093 - DNA, 604 bp, Homo Sapiens
  misc_feature (95)..(213): n is a, c, g, or t
  misc_feature (356)..(371): n is a, c, g, or t
gggggatccacagccccggtccgggcccgggttttcttgggaacccgtttggccctgtttcccttcctttggggggcccgcgcccaaagcatggnnnnnnnnnnnnnnnnnnnnnnnnnnnnnnnnnnnnnnnnnnnnnnnnnnnnnnnnnnnnnnnnnnnnnnnnnnnnnnnnnnnnnnnnnnnnnnnnnnnnnnnnnnnnnnnnnnnnnnnaacttttaacaaacttttattaacaaacctcgcgtagagccaactctaacccgactaacagcaaaaacagcattgctaacaagatcaaggatggaggtgcagacccaataaagaccgtctcttaaaaaaaggactgggaaaannnnnnnnnnnnnnnnctgcatgagtacttcttaaaaaactaaaactttccagtgttgcaggaaaaaatatcccaaagtgatttcagtcggttaaaaaaaacagtacttggcagtctgtgctgccttaaaaaccccaactggacataaccctaggagaaaatcaccccaccccataaagacaaaattcccttttctcctcttccttgttcaaattccactgcttattccaccaacacccaaggaatacc

SEQ ID NO: 320094 - DNA, 1155 bp, Homo Sapiens
acatgatagtgggttaggttttgtttgggttttttgcgctttatttgattaaagaatttgccttctttgtatacactggaatgttatattccctatgtattttacagggttacaaaatgtctctcattttaaatattaccccaaaagtaatctcagaaaaaaaaggttttttgaaattaaacttgacttttaaaaaatcatacggacaaacaactttcaaacaaaactggattagtaggatttcttgcctgcttaactaacatgacagacttcttgtcccaagcccttctcagaaaaacctcatgtggaaaccaagctagagataagaattcttccctgatgcagttaggggaaagggaaaggctagaaacttctttggcaagcaattccacacacagccatttatgtgtgagtgctctgcttcaagcacagtacgctctttgcagggacggccagatgttcagagtgggagtggtacttttcaaccagctaaaagtgcagaagtcatctagtcgtctgcctcttcccactgccagtgcctgcagccttgcagcaacttttaaccacccctatggactggaatattgagttaaaagccaaggctgagctggctgacgctgtagtctccattgaaaaggaaatggatgagatggaaccgagaaaccaccagtacatgatgacactcaaaagacttagggggaaagagaaggaaggatttcagagatggggacagactggtggaaaatgttgggctgactggaaggaaatggggtatacgtgagtaatatgtacatatcgaaacaatcagttgcctcctgaaatgcaaaaaatcaaatggtgaaatggagcctccttgatagtttagggccaacaggattggcaaagactccctgaacccacagccttcaaaatcataaccccatttctgttagaaaggaggggactgatgacagagagtgcagtctggaagagggaggtggtgaaactgaggaatgtgaatggattacagactgtggccattacgttttagcttaagtacccaaaatgtggagaaatgaaaatttgggtagcaacagcagcagacatgattacatgtggatgtgaaatccctaactggacagacataaccattcttttagacatcttgaagagggc

SEQ ID NO: 320095 - DNA, 956 bp, Homo Sapiens
ttttgcttctctaggtgaaggtttaaattaacttcagcatgggtaaaactattctttcccttctttttttctctcccagagttctcaccacctcctcccaggctaaatccttcatgttgcaggagacagagaatcccaggtgagacccggactttttctcctccctcccttccttttttcaccgtgttcaggataaattatcttggttttgtttctggagggaaaagggcagagaggcctgacttgaatctcaatcacatttctgcacacagtaccttggacagaagtcatgatgatggggcccatgactggcaacctgctgggagaggtggcctgcagtgtgtctggagtacatgggggacccgggagcatcttctgtgtctgtggcccctggaggcctgcatcacttggtgctatgccactatcagatccaccacaggagccatgtgctattcattccacaaggagccctttcaacagggagacatcaggcccaactggattctagccaccttggtctccagtctcctactctcaggcccatgagtgacaattcagcacaggaaatttggttctgtgagcagcatctattggcaggatgaccagcaattcttgtgtgtggtttgcaaagatcttaacggagaacaaatgttacttagtgctgcagaaggagaacaatgctaggttccacaaggtagtctgtccttttgctgtcttgtctacaccagagaacctttggttgacttgctttaatattggcttcagtcctgttcatcaggagttgctgagggggtcacttggagatccaggctcgccaagcagccactgtcttcagcaccagctaatgccctgctagtgggcaaagagggagctctgttaagcttccagcagcaggcgggcaaagcagggaggctgtaatgcaaaagtccgcagtccctacacaaacactatctgct

SEQ ID NO: 320096 - DNA, 1048 bp, Homo Sapiens
  misc_feature (238)..(238): n is a, c, g, or t
  misc_feature (388)..(388): n is a, c, g, or t
acttttccccatttatgtccaatcagaaaaagaaggcatctttgtaccagaaatctcagcaaaagccctaatattcacactgattaggcctgggtcacatgtccaccctgaccaatcactgtggccaggaggatgatacatgctaatttgcttattctatatcatggacaacacctttggggaaaagggtgggggtcagcctccccaaaatcacatggattccccaagtggaaactangagcagggagttgcttgggtggccgctaacaccaggctactcttattttagcttgctaagttgagatcagctagacctgctttcttttctcctcagtcttgcatttccctcaatacaagctgtagcctctttcctcgtttctagtctcanaaggaaggagagggaagccattctcctctagggactcttcagtctcatttagatgatagtccctttttttctacctccatattagagatggagctccttccttttcctgtttcttaatttttgtcttctcattcctgcttccctctcaccctattgccagttccaccaactagagtgaaagacttcctagccatttcattaaatctattctgtatccaccaggtggcagcatcttgtcatacgtgtcaggacttaggactgcggggtttaggttagatgtcacggaaaaagctagttctgtggtcaggcggcaccaatgagaaaggaatgcagaccctccagatgtatccttgggaaaagcagtaaaccaactaatatttattgaagacctactttgtcctctacatagggtagcttctgtcagggaatctggttcttcccaagaaacactgatttacctcttcagggcagactctcatgtgttcatttatttccaccacagcagattctaagaacattatccctatgtcatattcgatctctataacagagtcttatctaacgctgactcacttcctcgacgcatactactgagtacctatgacgccatcaccacactataccatcaaacacatcctaaaatgcccagaaccaaaaacg

SEQ ID NO: 320097 - DNA, 968 bp, Homo Sapiens
aacattaactgttttacttaatatcaaatcacttcagtacaaatgtcaaagagaagtattattgcatctagtaaacctaagacacagagacacggatatattatactccagaaattcacaatatctacctcaaaaggtgactagaagaaagaccaaagggtatttattaaaaaacatttttctttaatctggaattgtcatatgttccagagaaaagagggagaaccccaaacccacaggcctgccacctatcagctaagaggcatctgtgcagatctttatcataatactttcctcaggttatttccaaatccaatttaatggatattcaactgacactcaagagtcagctttaaaaggactatagaacctcctaccatctgaattcttcattttgatacacagacttccaagataacacaataaaaatttttaggcaatatcaaatcaaagctcactttcagtcttgatgaaggatagtccttcaggcttaactacatttcttatacgggttccaatcacattatcttttctgaagagaacattttttcagccatttcagatctggtcatgatttcctcatctgaatccactaacactggaagagctacatctgtgaatgaagagggaatattttcttctacccacttcaaatcttcatcaaagttctcagaagtggcaggcttagctgttccattggaaactgattttgaggctcttaattttattccttcggttaaattttcagaagttaccatgaattcctcaatttcatcatcagaatcatctattaagggcatgaaggcatatctctgattgtttgctgatggtctccacaaaaacatgattacaataaggataagcgaaaaaaggaagctccaaaatgcatcgtcaacccagcgttccatccaatctgattggcattttgcaattctaaatgtcttagttgtccaccccataaaatcccg

SEQ ID NO: 320098 - DNA, 1749 bp, Homo Sapiens
  misc_feature (268)..(322): n is a, c, g, or t
  misc_feature (479)..(479): n is a, c, g, or t
gccatagaatttattcgaatttgcagaagcatgacgataatgtaccacaaaagagtttgattttacaacataaagtatggtaggaagtggtcaatgtacacagtgttgtcagcaaaaaggggaggcagggcagtttcacattttttgaaaggtggtggacgacaactacacttgtccttaaagtaaaataaaagcaggagagacccagcagagaccaacctgatttgcagttagcatcagaatctaaatctagtatcacaactttaannnnnnnnnnnnnnnnnnnnnnnnnnnnnnnnnnnnnnnnnnnnnnnnnnnnnnncaaatgtacataataaaaaacacacaactcttaataatggctccatgttcagtagaagaaaatatttacctggagaaaccacagctattcaggtttgataataaaccaaccctcattggtatcattacccttagtgctccttagactcattgaagcntgaaaggcacaacttaagcaggaaacttatcatcttaaatatatattataacttctcaaatgggaaaataagtcccaaacttaatagtctgtcatcaagaaacacaaaatcatttgccttgttaataaattaacagtctgaaatgcatctttccatcctgcttcctgaccctgctggacacactaataaataccctgagaaaatcttctctttaagcttggccaaggtactccatctcctgtggggttttcagctggcactcagcacatttgtagaatgacccaggagggctccatggcaactgtgccccgagactccaggcccagccgggtcccgatggcgagagcgttgtggctcagtgaagcactggcacagaaaggctggactcgaggaatcgaggggtgaagatggagtcggctgacattttttgccttaaaaatacattaggagtcataagcgtgatgacacatggagtgtagcttcttgcaccactggatcaacagtcatcaatttcatgactcggataaggtccccaggagcctggcagaatgtacatctccctctcccttcagagccttacatataatcttctcatgacgatggcaaacagatatattttaaattacacgtaacaattatacatagtgtatatccagatccgtctgcaggcgaactctgcatcagttccacatataagcctcacgcccccaccaccctgcaatttccccgtcctcggaactgtctcacgagaccaccagcgcacagacacgaacatgcctctcacacaccccagaacgcagctgtgctggagttgggcacaaaggcccctcactccctgtcttcatggtgtgggttcttggctgccaacagaactgtcagcctttattaagaaggaagggtctgtgtaaaaatgggatgtgtaaatcagaagaggggccctggcacagagccaggcaggcttgctttagcattgagtcctgcgtcgcgcaatgcccaggaccttgcctgttaagtctgggtggggcccctatggggcatgtccacgtgcccccgaccagactcattgccctgtctccagtctccactgtgggttgggctggaggccatgccacgtgggactgcaaacaccagccagttcacaatgcctgctccgtggcaggggcacggcagggaggagctggtatcatcagcgtttccacccatctgaacaaaggtgagcgggccatgcacccttccagctgtgcacagggatgtgctgaaggtgcaggag

SEQ ID NO: 320099 - DNA, 884 bp, Homo Sapiens
  misc_feature (245)..(422): n is a, c, g, or t
aaaacctagacaaaaagaagaaccaagtataatgaaaaaaatcaagaaacatgacaataatggagactaaatccctcgatggaaagaattataatcataaatgtaagccttaaagagttaactttagatgtagacaagtcaaactgaagcactaaaaacatgttgaccttatataacacattccttagggggaaaaaaagattttttaatattggaaaaaatatggttaggcatagtggctcatnnnnnnnnnnnnnnnnnnnnnnnnnnnnnnnnnnnnnnnnnnnnnnnnnnnnnnnnnnnnnnnnnnnnnnnnnnnnnnnnnnnnnnnnnnnnnnnnnnnnnnnnnnnnnnnnnnnnnnnnnnnnnnnnnnnnnnnnnnnnnnnnnnnnnnnnnnnnnnnnnnnnnnnnnnnnnnnnnnggcttgagcctgagaaatcaaggctgcagggagctgtaattgtgccctgcactccagcctgggcaacagagtgagaccctgtctcaaaaaaacgtcggagaaggaggaaaaacaatgaagaccaatatgctactgattcacatggattcaaatacaaagtataatccattatatggcaaaaaatatgtcttcactaccaagtgttacaattaccaagaataaataatgttttgctcagagctagtgagtaaaaaaacacagcattgcacacagcattgcaacataaagtaagtgctatgttaggcctgtaagaatgctacaagagtcacctcttttggagtcaagaaaggccaacctggcgttttgaagaatccaattttgctaggttgtgaggtaggaagaaggaatggcacttataaaagagggaacatcaggctgagtgcagtggctcacgcctataat

SEQ ID NO: 320100 - DNA, 878 bp, Homo Sapiens
  misc_feature (30)..(30): n is a, c, g, or t
  misc_feature (72)..(72): n is a, c, g, or t
  misc_feature (96)..(96): n is a, c, g, or t
aaaactgagacctggaacatgggggagaanagtcgtttcccttcttggctggaaaactaagtcaacaaatgnaaacaaccctagtcctaaatcccnggataaatagttaaattacctggtttaataaaaataacatgtcccaaaatagttacttccctgggttgtgtacaatataaatttacaaaaataaaatagaaaagatgaaacagttgagcacatttttcagttctttaaccaacatcagcatttatccatagagatcagtttgaaaccatttgcgtggcaccaagaccctggcaaatctaggctcaggagagagaaccctgaagctggggtgaggtatttctgtggagccctgtggcctgtcctaggcacgctcgcctctacctggtggaagatggcctttccaggaaaccctccacaccgtcacgggctccatctgtggcaagtggctcgctgaatgcacagaggagcgagtgagcagaagggcgtctgcgggtgcctcgtcccccgtccacgtctcctggggagggagcatcacacagtgcagggcagctcgcgcattttcaacctctcccttttgtttttccttttaaagatagatttagtgaagtcttttaaaagaaagtgtattacagagaaggccattttaagatgtttagatagatagccataaaataggtgtttctgcctcaatccaagttattattaccattttgtacttgaaagtgtccaaatgacacaatataaaagaactatttcttatttcaatattaattttgctaatcaaaggttccagtttccagtgatatgaccaaccaataagatataactggtgcagagagagccatatattttacataatatttataataact

SEQ ID NO: 320101 - DNA, 1199 bp, Homo Sapiens
tgacaaacacaccatcagtgtttattggtcagctgtcccaaacgggccagccctggggctttggggctgggctccgtgagagaggtcagtcggtcagcggcccggggtggctgccctgagccccagggctggtcctggggtctgtcagtccttccccaggctttccaggtccagaaggctttgtggggtctggggctgtgtcagggtaaggaaagctgccttggtggaggaagagaagtcagagaggtcacacatgtggccttagaacctgctaagtccaacgtcagcatgtgacaggaggggaagtgaggcaagacggcagaacccaggggaaaaggtggcagggagtctgagagtgaggttgggaggaccagcatcttttaggccctgagcaagaaggaggtgaccggagtcttccaggtatccctccctcctagcttctggaagtgggagtcggggagggggctccagtcagtcaggtgtaagctccatgccatggggactctgcaggacaggcaggcttgaggagccactgtgcctggacaggttctgcaggctcccccacttggtccctgtgctggaggggaagcagagaaggggctggcagcctcatccctgcgggaccttcactgagccttcttggtcactctcttgctcttcagcatcacgtaggagatgaacagtcccacaaacaggagcagcaggaggcctgcagccagtgggatggcgacagcataggctcggggcaggaaatacttgtggatgacatgctgactgtcgatgaatggctggcatcgagggaagagctctggtgtgtcttgcttgccttgccgagcccccaagcccaaacgtcccacctcctccatctaaggggctgacccattcagaggactgggactgcatttgcttttctttaagattacggcatttgggtgtcgtggtttgtttctttccttaatttcttattggtatttaccgggcacttgctttggtgcctgctataggttggtggtggggacaagagaacagggcacaagagacctgccctaaggcacctcacagcctagcaaatggtacttgaggaatcctcgactgactcccaacctgggcctccagggcttcttcactaatattttttctctaaaggataccaagttctgcacttccagacacactgcacttcttaagcaataaccaac

SEQ ID NO: 320102 - DNA, 786 bp, Homo Sapiens
gtcagctgtcccaaacgggccagccctggggttttggggctggggctgtgtcagggtaaggaaagctgccttggtggaggaagagaagtcagagaggtcacacatgtggccttagaacctgctaagtccaacgtcagcatgtgacaggaggggaagtgaggcaagacggcagaacccaggggaaaaggtggcagggagtctgagagtgaggttgggaggacccagcatcttttaggccctgagcaagaaggaggtgaccggagtcttccaggtatccctccctcctagcttctggaagtgggagttcggggagggggcttccagtcagtcaaggtgtaagctccatgccatggggactctgcaggacaggcaggcttgaggagccactgtgcctggacaggttctgcaggctcccccacttggtccctgtgcttggaggggaagcagagaaggggctggcagccgtcgatctgcgggaccttcactgagccttcttggtcactctcttgctcttcagcatcacgtaggagatgaacagtcccacaaacaggagcagcaggagcctgcagccagtgggatggcgacagcataggctcggggcaggaaatacttgtggatgacatgctgactgtcgatgaatggcaagagaatcacccaggcggtgtagtaggtgaagatgatcaggctaacggcgacgaggccgagtcccaccacctggtctgtccccgtggccatttccccgcgcgctcagccacccgagccgcaagccacactccggttccgggt

SEQ ID NO: 320103 - DNA, 477 bp, Homo Sapiens
  misc_feature (32)..(32): n is a, c, g, or t
  misc_feature (45)..(45): n is a, c, g, or t
cccttaactttctgaaaatgggaaattcgggnaaggggccttccnaattcaattcaagttgttaagctcccaatgcccatggggaactctgcaaggaacaaggccaggctttgaaggagcccactgtgccctggacaggttctgcaggctccccccacttggtccctgtgctggaggggaagcagagaaggggctggcagccctccaatctgcgggaccttcactgagccttcttggtcactctcttggtcttcagcatcacataggagatgaacagtcccacaaacaggagcagcaggaggcctgcagccagtgggatggcgacagcataggctcggggcaggaaatacttgtggatgacatgctgactgtcgatgaatggcaagagaatcacccaggcggtgtagtaggtgaagatgatcaggctaacggcgacgaggccgagtcccaccacctggtctgtccccgtggccattt

SEQ ID NO: 320104 - DNA, 452 bp, Homo Sapiens
ttttttaacacaccatcagtgtttattggtcagctgtcccaaacgggccagccctggggctttggggctgggcctccgtgaggagaggtcagtcggtcagcggcccggggtggctgccctgagccccagggctggtcctggggtctgtcagtccttccccaggctttccaggtccagaaggctttgtggggtctggggctgtgtcagggtaaggaaagctgcccacaaacaggagcagcaggaggcctgcagccagtgggatggcgacagcataggctcggggcaggaaatacttgtggatgacatgctgactgtcgatgaatggcaagagaatcacccaggcggtgtagtaggtgaagatgatcaggctaacggcgacgaggccgagtcccaccacctggtctgtccccgtggcctggagaaaaggaggtctcagctgacgaagtgaccct

SEQ ID NO: 320105 - DNA, 667 bp, Homo Sapiens
gcagccggctttgtacaaggtggcacaaaagacgtacgcattccagttcttggaagctggcttccctcgagtctggagtgctgggtttgggagttttctattgcagtctttcaagtctgagttggaccccaggctggaggggctggttccaccacccgcccgcagccaccctgcctcgggctacacgtcggtggagaagtacagtgtgttccgcttgagttctgcgaaggaaatgggggggtgctgcaggtagtagaggaggacctggacctgcgccatgacgtcatgggaccagatgtccgtagccgaggtgaggtgtgctttgctctccacttctgagggtctcagtaacgtgggtccaaacacggtagccaggttgtgaagtgacattttgttgatgggctccttctcggcaacccttttcaagtgttccagcaggaagaggaaggtgatgaggttggggtcgggcagggagcggagcaggtgcatcatgcagttttccttggcagcagggtctgacagggcgatgccctccatgaaggctgggtagagtcggtccgtgaggagcggctcgggcagttcccggaagtacagcttgagcgtcccggcgatggcgttgatgtccatgtcactcagcatcagcaggatgtccttgttattggcatcg

SEQ ID NO: 320106 - DNA, 1809 bp, Homo Sapiens
  misc_feature (44)..(44): n is a, c, g, or t
  misc_feature (279)..(361): n is a, c, g, or t
  misc_feature (1707)..(1744): n is a, c, g, or t
gttcttgggggtggaagaaccccaccccctgtcggttgtggctnacgcgcgggggtctctgctggtgtggaggaggaccggttgtggagacgcgcggggcgggcgtgccccgcaaggaggaccccggggcgcgccgtaagaggggttgttttttgagaaaaatttttatgtagggggcggagggcgggccgggccggcattttttattatatagtgtttgggggttggtttagtggttggtactggtggtgggtttttggcgtaggtgtcgggtggtannnnnnnnnnnnnnnnnnnnnnnnnnnnnnnnnnnnnnnnnnnnnnnnnnnnnnnnnnnnnnnnnnnnnnnnnnnnnnnnnnncaggcaggccaaaaccctagtttatttcagcatcagcagtatcttagccatcaaaaaaataaactctaccaagggtgacggaagtctctacagcaaggctaagggctcgccagacggcgaacatcaggggtgcatggtgggcactgcccaggcaataagttaggaagcagcagggctggtgtcgggtgtgggccgggcttcatttctgggcaggcatgaggtcgtcgatggcctggccctgctccagccgctgctccatctcgatgagcagcttcactccgtccaccaccatctgcaccagctccacctctgagaagcccaggcggtcagcgttggagacgtcgaagaccccgcccaccgcagccgtgtccacaccgcctgtgcctcgcttctgaagtcgcagccgcttaagcacctccgagaacttctcatgcttgcccaggttgggcagcttgatatgcacacctgcccgcagcccggtgcccaggttggatgggcaggtgaggatgtagcccaggtgagggttccacatgaactcatagtccttagacttgaagagagtttcaatctgggtgaggccggtgcagaagcgggtgaacacctccttcatgttgccccccttctgcatggagatgacccgcaggtggtcctcctcgttgacccacaccaggaaggtcttattgtcattgtgccagataccgcgggcgtcgggccagtcgcgggccatgcccgaggccagcagcaggggcgacacgggcttgtcgaagaggaagtggtcgtcgatgagctgctgctgctccgcctccgtcatgctcttgagcgcgtagtatcggcccgccaggtcgccgtccaggctggacagggcttccaccgcgagcttctcgatggctcggcgctccccgcggctgcagtgcggggggaggcagaagccacggatgctgcggcccgtgcgcacccgcgagctcagcacgtagttggggtccaggtcgtcgccgccctgcaggttgtcggggttgaggtcggtcttgtgctcatcgctgggcttgtagccgccgtgccggtcctcgatgatggggtcgaagagatccttgaacacttcgtaggactcctcgtcgcccgccacgcagcccacggtcatgatgtacgggtggcccgggttgtccacgcctgtctggatgacgtcgtccagcgtgaagccgctcggcgtgctcttggcgcgcagctccgcgtacagctcgggggtcagcaccttggccatgtggttgttgtgggcgctcaggtcggggaactcgtcctcggccgggaagcgcagcttcagtgcgttgtggctgttggagaagggcatnnnnnnnnnnnnnnnnnnnnnnnnnnnnnnnnnnnnnnctccgtccgtcggcagctcccggagcgaccctcgtgcggaattcgccacccaggcctcgctcggt

SEQ ID NO: 320107 - DNA, 529 bp, Homo Sapiens
tttgtcagagcagagggtttttctatttattacaaaagttgttacacaaatacagctgaccagaaggtctaaaaacagcccagactcttccaaccctcatgcatctgtagatagaaggagagctgtggtcttgctcacacacaggggagcccttcttagaagaactgcctgtcccttggaaggttcagagtcttgggtccagcagcagagaggagcccaacctgcgtggacaaccccttgaggcagcccttggtcacagctgctctgggtgggcagcaggtttaagtttcatagttcacatgttcccaccacacaagtcaaatcaaggcatgaaaataaaagggaaaaaggggaaggctggaaaagggagcctggaagaggttgcaggtaggggaaggagacacagtgggcttccgagaagctggcaatttcttgacttggatggagttacgtagtattcactttaaaattattctttaaattgtacgtacatgttatatacttttcagtatgcatatctttaaatttt

SEQ ID NO: 320108 - DNA, 881 bp, Homo Sapiens
  misc_feature (645)..(689): n is a, c, g, or t
ggggactccgggctggagctgtcctgggggagcttgtttgcggcagcggctgctgctgccactgctgtgctgggggcccggtcgccaggcaaaaagccctcccacgtttgaggggagtcatgagccgtttcctgaatgtgttaagaagttggctggttatggtgtccatcatagccatggggaacacgctgcagagcttccgagaccacacttttctctatgaaaagctctacactggcaagccaaaccttgtgaatggcctccaagctcggacctttgggatctggacgctgctctcatcagtgattcgctgcctctgtgccattgacattcacaacaagacgctctatcacatcacactctggaccttcctccttgccctggggcatttcctctctgagttgtttgtctatggaactgcagctcccacgattggcgtcctggcacccctgatggtggcaagtttctccatcctgggtatgctggtcgggctccggtatctagaagtagaaccagtatccagacagaagaagagaaactgaggccagcattatcacctccaggactttctcgttttccaccttggccatcttcttccttcgtcgtctctcctctttaatttcttttctattccatcatctggcnnnnnnnnnnnnnnnnnnnnnnnnnnnnnnnnnnnnnnnnnnnnnaagatatgcatactgaaaaagtaaatcacatgctaccgtacaatttacagaaataattttttaaagtggaatactaacggtaacttcccatcccaaggtcaagaaaaattggccaggctttctccggaaagacccccccggggggaccccctttaccccgctaaccctgccaaacccctcctttccgcgggc

SEQ ID NO: 320109 - DNA, 346 bp, Homo Sapiens
ttttcttagctacaaagccaatttaaatggcatggtcattagtgaagataccgtttacaaagttaccacaggcccaatattctctatggctctccatccatcagaaactagaactttggtagcagttggggccaaatttgggcaagttggactttgtgatttggtaagttattaaatttcttgaatatattatagtttgactaaagcaaataggctgggaagagaatagggctagagccatgtgtttataaatgttgcgtgagactttctcgttttccaccttgggccatcttcttccttcgtcgtctctcctctttaaatttcttttctattccatcatctgccc

SEQ ID NO: 320110 - DNA, 1168 bp, Homo Sapiens
aaccaaaataagtagcgaggcctgggtggcgaattcggcacgagggaagactccagattccgagagttgcggaaacgctacgaggacctgctaaccaggctgcgggccaaccagagctgggaagattcgaacaccgacctcgtcccggcccctgcagtccggatactcacgccagaagtgcggctgggatccggcggccacctgcacctgcgtatctctcgggccgcccttcccgaggggctccccgaggcctcccgccttcaccgggctctgttccggctgtccccgacggcgtcaaggtcgtgggacgtgacacgaccgctgcggcgtcagctcagccttgcaagaccccaggcgcccgcgctgcacctgcgactgtcgccgccgccgtcgcagtcggaccaactgctggcagaatcttcgtccgcacggccccagctggagttgcacttgcggccgcaagccgccagggggcgccgcagagcgcgtgcgcgcaacggggacgactgtccgctcgggcccgggcgttgctgccgtctgcacacggtccgcgcgtcgctggaagacctgggctgggccgattgggtgctgtcgccacgggaggtgcaagtgaccatgtgcatcggcgcgtgcccgagccagttccgggcggcaaacatgcacgcgcagatcaagacgagcctgcaccgcctgaagcccgacacggtgccagcgccctgttgcgtgcccgccagctacaatcccatggtgctcattcaaaagacgacccccggggtgtcgctcccagacctatgatggccttgttagccaaagactgccactggattatgaacaagtcctggttccttcccctgtgcaccttgcccggggggagggcaacccttaactgccctgcccccggggaaagggggcttcaggggtccctgaaaacccccaaatccctgccccaacagtgggattttatataaacgcccgcgactttaacactaaaaataaatggggggaaccctcctcggggccttcccgggggttgacccgaacggaacacgtggccttttcttcacacaccttggggcgcaaaaaacaaccaattccttcaaacgcgctaagaacaaacaaaaacgcccgggaaaacacacccccctctcctccgccccttagaaccccc

SEQ ID NO: 320111 - DNA, 1068 bp, Homo Sapiens
ggtggccccggttcggggtttccaggccgggtcaaggctcgtcttaattctgcggggccaggtttcccgccccggaattggttcgggcccgcccgaatgcacagggtcacttgcccctccgctgggggacagcacccattgggcccagcccagggtgtttccagggacgcgcgggccgtgtgcagacgggcagcaacgcccgggcccgaggcggacagtcgtccccgttgcgcgcacgcgctctgcggcgccccctggcggcttgcggccgcaagtgcaactccagctggggccgtgcggacgaagattctgccagcagttggtccgactgcgacggcggcggcgacagtcgcaggtgcagcgcgggcgcctggggtcttgcaaggctgagctgacgccgcagcggtcgtgtcacgtcccacgaccttgacgccgtcggggacagccggaacagagcccggtgaaggcgggaggcctcggggagcccctcgggaagggcggcccgagagatacgcaggtgcaggtggccgccggatcccagccgcacttctggcgtgagtatccggactgcaggggccgggacgaggtcggtgttcgaatcttcccagctctggttggcccgcagcctggttagcaggtcctcgtagcgtttccgcaactctcggaatctggagtcttcggagtgcaactctgagggtcccgggaaacttgcgcggctcgcctcggccagagacagggcgcccccatgcggcagccacgagagcaccagcaacaccaggagcatctgagagccattcagcgtcctgagttcttgcccgggcatggctgtgcaggttgcggctctgagctgggactgaccagatgctgccggaccggcctttatagtccccggactttgtccgtctccgcctgctcagtcccgccctcctccccctgcctgcagagtaaacactccaatgaccacagctgggcggggtctgggggtgtatttagggggaggatctttaggtgggggcgctcctagtaaagctagggcacatttctgggcctcagcgccacccaggcctc

SEQ ID NO: 320112 - DNA, 902 bp, Homo Sapiens
  misc_feature (674)..(674): n is a, c, g, or t
  misc_feature (690)..(690): n is a, c, g, or t
ctgggtggggaattcggcacgaggcagagccgcaacctgcacagccatgcccgggcaagaactcaggacgctgaatggctctcagatgctcctggtgttgctggtgctctcgtggctgccgcatgggggcgccctgtctctggccgaggcgagccgcgcaagtttcccgggaccctcagagttgcactccgaagactccagattccgagagttgcggaaacgctacgaggacctgctaaccaggctgcgggccaaccagagctgggaagattcgaacaccgacctcgtcccggcccctgcagtccggatactcacgccagaagtgcggctgggatccggcggccacctgcacctgcgtatctctcgggccgcccttcccgaggggctccccgaggcctcccgccttcaccgggctctgttccggctgtccccgacggcgtcaaggtcgtgggacgtgacacgaccgctgcggcgtcagctcagccttgcaagaccccaggcgcccgcgctgcacctgcgactgtcgccgccgccgtcgcagtcggaccatctgctggcagaatcttcgtccgcacggccccagctggagttgcacttgcggccggaagccgccagggggcgccgcagagtgcgtgcgcgcaacggggacgactgtccgctcgggcccggggcgnttgctgccgtctgcancacggtcccgcgcggttgctgggaagacctggggctggggccgattgggggtgctgccgcccacggggaggtgcgaagtggaccatgtggcctccggggccgtggccccaacccaagtttccggggcgggaaaacaaggcccgccggcaaattcaaggacaaagccctggtcccgccctggaaaacccggaaacgggggggccaacggccca

SEQ ID NO: 320113 - DNA, 1172 bp, Homo Sapiens
agcacaggaaacctcttgggtttttatccccgggaaccccttgagaccccccatttcccacctgggggcgagggccaaatctaagagttggccctcccgccccgcgacaggggccaccagtgggaagggccccaggacttggtccatatgccggtggcaagtttttgggctaccaaagtcatcaatagggtctggaggggaccaccccgggtgtcggtcttttgaatgagccaccatgggattgtagctggcgggcacgcagcagggcgctggcaccgtgtcgggcttcaggcggtgcaggctcgtcttgatctgcgcgtgcatgtttgccgcccggaactggctcgggcacgcgccgatgcacatggtcacttgcacctcccgtggcgacagcacccaatcggcccagcccaggtcttccagcgacgcgcggaccgtgtgcagacggcagcaacgcccgggcccgagcggacagtcgtccccgttgcgcgcacgcgctctgcggcgccccctggcggcttgcggccgcaagtgcaactccagctggggccgtgcggacgaagattctgccagcagttggtccgactgcgacggcggcggcgacagtcgcaggtgcagcgcgggcgcctggggtcttgcaaggctgagctgacgccgcagcggtcgtgtcacgtcccacgaccttgacgccgtcggggacagccggaacagagcccggtgaaggcgggaggcctcggggagcccctcgggaagggcggcccgagagatacgcaggtgcaggtggccgccggatcccagccgcacttctggcgtgagtatccggactgcaggggccgggacgaggtcggtgttcgaatcttcccagctctggttggcccgcagcctggttagcaggtcctcgtagcgtttccgcaactctcggaatctggagtcttcggagtgcaactctgagggtcccgggaaacttgcgcggctcgcctcggccagagacagggcgcccccatgcggcagccacgagagcaccagcaacaccaggagcatctgagagccattcagcgtcctgagttcttgcccgggcatggctgtgcaggttgcggctctgcctcgtgccgaattcgccacccaggccaggtggtggtgttttgggtctgctgcgcgggccggtggggttt

SEQ ID NO: 320114 - DNA, 903 bp, Homo Sapiens
  misc_feature (766)..(766): n is a, c, g, or t
ttttaaccggaaagtgcatttgcttgggtgtaatcctaaagtgaaatgggacagtgccttgccagtctttgcccactgtaccataggctaaggctaagctctttgtactactgcaaacttaaaagtttttcaaatgtgggaaacgtgtgggaaggcttgttgaactttggcgcactcaggtaaacaatactctctcaattgttgatatactttaaaatattcagttgtgcctcagttccagaaattattgccaaacaggagccacagcaatttttggctacttttctgctctgcccatctgtcaccttactggttttcccttgttcaggaaggaagcagctgtttccttgccaacaggtcccttcctctccatctcccaccaaactagggcaccattgattagacaaaggtacagtgtaacttgggtttctgacagcaacaacaggactgtgaattgtttaacctctgtggttaaagctacagcttgagttgactgccttggggatgtcagttaattaaggggtgatgatttgcaagagaaaattagtggagagtcacataggtaaatcattatttaacttaggttttcctaaagttagaatagtcgaatgttcttttctttacctttacaattaagacaaaatgtttaataagaatagcaaaaatttttttatattatgcatccttatacctcacatatcttccttaactagatagtttgacagaaagaatggcatacaaagaggaaaggggaaaaatgactcanaacaagacaaaagctctgactgtttaaagttatcgcttacagagactttaacaattttgtggaatttttacaactatgagagtaaatggaactggtcaactcttgacagttgcctcaagatggagtgaaattgcatc

SEQ ID NO: 320115 - DNA, 693 bp, Homo Sapiens
  misc_feature (51)..(51): n is a, c, g, or t
  misc_feature (102)..(102): n is a, c, g, or t
ggccaagttcccaggaggaagttctccccagctccacaactccatcaaccnagcggagccctgaagccttcagggcagccttcatcatctgccacagaagtnagtccttcgaacccgcaccgcaagtgaaggatctgaacaaccaaagaagagagcctctatccagaggacctcagcaccccctagtaggcctcctccacccagagccactgcaagccccaggccctcctcagggaacataccttccagccctacagcctctggagggggttcacccaccagccctagggcctccttggggactgggactgcaagtcctaggacctccctagaggtctctcctaatccagaaccaccagagaagccagtaagaactcctgaggccaaagaaaatgaaaacatccacaatcagaaccctgaagaactttgtacttcccccaccttaatgacatctcaggttgcttcagagcctggagaggcaaagaagatggaagacaaggaaaaggataataagcttatctcagctgactcctcggagggccaagaccagcttcaagtctccatggtaccagaaaacaacaacctcacagcacctgaacctcaagaagaggtatccacaagtgaaaatccacaactctgaagagaaactaccaagactcctcctgccccaaacctcgccagagaagctcttca

SEQ ID NO: 320116 - DNA, 1534 bp, Homo Sapiens
cgggcccaagtccatgcccagcactgcagccgccatgcccatctgccgactccagagccaggatcttaaaggaagcgagtgggctggagccgggctgggtggaaatcatgccgcggaagcgagtcacagaccatgtccgcacgtggttgttcgtcggcacagacttgagatgaggtgcttctccgacagcatgatcttggtgacagggctgcggtgcacagtgaaggtctggaagagctgaggccccgagcccacagtctccggtgctgcacgatgacccgcacgccccctgagctggtgccataggcgatctcgatccagttcccactgtcactggtcttgggggtgaggtagacactgagggcggtgaccccatcctccgctgggtcccgatagagctcgctgacaaggaggtcgttgtctttcatgcgcaaggggaacttctgcacatccacgtagtaaatggagccgttgttgcagcccaggaggaggaaggagcctgccgcgtcataactggtgatgggctgcacctcctggacctgccagtgcttggtgacggcattccacaccccgatgcgccctgtgtggcttgtagcaatgagctggttcccgacgaagaacaaggcctccacaggcacccccagatgaaagacccctatctcggagccaccgccttccgcctgcagagcccatagcaggatctcgctgccggtggctgctgccaccatcttgtcatgttcacccaaagccccaccatgcacccgggctgtgagcgccagtcgttcgatgggccagtccaggcgggggctggaaaacaccagctgccagccagaggcttccttcaacctgtagcagactagaaactgggtataggccacagcgatccaattatggtgtccacacaccaggcgcaccatccccggctcctcaggttgtcctgagggtgagggaggggttttctcatccagcattcggcccagcagccctgcattgccaaggttggggggcatcgtgttgctccgtcggacaggggctggccgtcctcctagctgctgaggccccactaggctgtgccggttccgccgcttcactgggaacactggtggcggcaggtaaccattgaagaggacgtttccacaagaagatcgatccaactcctctcgaagctgcaggcgacgaaccagaggagtgagcccatagaactgggcttcatggaggaggctggaaccgtggacacccctgggatccaactctttggtgcgcaggaagttgaggatgggggcgaagactgtagggtccctgtcgatgaagattgctccggtctcatctttcagcgtcgagatgcgtccgctcagaagactggagaagaaggagtctgggatccaggtgagagtctggcgagaggtactgaatctcttgcctcccacattcagatgaatgacttccccgggaggcccccgactggggaccccctcggctgcagtagccgctgctgccatggcccccgggcgagccggctggcccgcacccactt

SEQ ID NO: 320117 - DNA, 1284 bp, Homo Sapiens
gtcaaaaaggatcaaacactttattaatctacatataccatatataaaagcaagcaaaatcaggatgttttcctcagccaccctttccacattttgtgcagttttagtgaactataaatcactgacttcttcaggccagcagtaaaaatgcctttcgtgctctgtcttatactagacggtctcacgattgctgaaagccctagtcgcaccacatctccacagtcgggatcatgagccacttggaataaagtttcttccacatctctgttttttccgggagggtccataatatgatttatctgttgctgtaaggttttgggcaatgtcatcagctgagtgaactgtccttctgggcttttatctatctgcagccagccttgctggcttttatacaccacttgaggattttcctgtagtatgctgccatagagctctcgaaagtgggctatattgggcttcacaatattccaacacttttgttttatcttctcccaaccaccatccgaaagtcacctgaataggagagaccggcaatctctacgaagaggtcttcttcagaaaagctttcggggagcatgaggaaagcagcggtcacagcactcttcagatttctatcgagggctgatctaagagtgacatcctcgttcactgagataattttcaccggtttttggagtcgtccagcaatgtataagttattccagttgaggagatcttcaatcagaacgttagtgctaataactccatatttgataagcctaccattacacatgatcaatgaattgtagtaaactccagcgccatagttattctggatggacgtgataatcttgggccctaaaacttttaggaaagagtagtgactccaatttttcttcaggttctttgaatgccatgcgacagggtcatctactgtgaacacaaagtccagcatagcattcttctggtctgaactgggccctgcctggcggtacaccccggagccgtagacgaaagccagactcagctcctcggggaagtgagacaggatcttgcggaaggtcacccacgagctctgcagcgtctgcagcgccatggggtcgaggctaacaggggacactcagcgcagcagggcgaggacaaccgggcggggaacagacaccgggtaggcggtttagggtgggaaatggaagtcggagactggatcgagggacacaaggctgagtgtggggtgggactgcaaggacacgcaaggattggggcgttgggccacgaagagcagcggcgagaagacgcagcccagat

SEQ ID NO: 320118 - DNA, 1913 bp, Homo Sapiens
  misc_feature (85)..(95): n is a, c, g, or t
  misc_feature (222)..(238): n is a, c, g, or t
  misc_feature (240)..(240): n is a, c, g, or t
  misc_feature (990)..(1016): n is a, c, g, or t
tcgcagcaagtgctgtgtttattttccaaacaattttattgaaatgttccaagagtacatgggcagcacaaatgtatgaacaggnnnnnnnnnnntcacatgtacaataattttttaaaagtgaaggttaatcttgggagataacagttcccctctccctccccctgcagatttccagcgtttccattaaggttaagtaagcctctacaaacctagcatttnnnnnnnnnnnnnnnnnanaggaatacaagatcttttgcaaataacaaaaacaaaaaatggcataaaggaaagagaaatgtcttcctgctcagatgggactcttcctaggcacctaattaggaggcgtgctgagcagtggagaaacacaacttcagagtgtaagggtatggaccatttgggtttttcatctggtaatggttcaggaagcccagagtctccagggcatcgctcttggattcccactccagcagtccagaggagctgcgctcacttttgcctgagaatactttcacagaagatggccgcttcactcccagctcatcgcagatctcaaagaagttctcctcggtcacctccagcggggcgttgaagaagtgcagcacgttgctggggtgctggatgcggttcttggctgcctgctctggggtggagaaccgattgttccgggattcactgaagtctttgtaactgcaagacccgtcttccaacccgtatgactgaccaggcatgatggctggctgcttggagacacagacattcagcttctgcccaaacatgaagttgttgttgaggtgggtaatggcccggtctacagcgtagccatcagccatctccaccatggcggcccccggcttgcttttcatgaatttcaccttctccacattgccatataagcagaagacattgaagactcggtcacagttcatcttagattgatccaagccatagaccatgagcacagggctgtcggcgtgagggccatactcnnnnnnnnnnnnnnnnnnnnnnnnnnncccatactgggggccgtagcgacttgggccccgacggtgaccccccactggtggacccatccttctcccttcgtagtgaggtggggggggcccgtagccctcatcatggtaatggctgtggtacccaccgtggggccctccatattctgcggggtgatctcccaggagagggggctgcctctggcgtttgttggggttgctgccagggtcaccttgtccactgagattggggtttgtgtagtcccaagtatcctgatcattcttgaacacattcaagcgtgtaggctttgcgtattcgatcttcagagtgcaacagccagaatagatatcagccccattgagagaggccttggcccgctgggcactttgaactgagtcaaattccaccatcgcctgaactccattcttcctgaaaatgacaattctctggacagggccacaaggattacagatagtgtaaagaacatccgtggtgatcgaataaatggggttcaggatggtaaagagaagcacactgttcacgctccgggagtcatccgagtccccagggcgggagatcttctggctggtagagtagttgacaaaagctgggtgaccagcaatgtatatttggttgtcggctgcgtagttcactgcgttgcaagcccccaacacatcttcaaactccaccagtgcttgtctctttttaggcattaccaccacatagctgatgggtccaaactcctgcaaggcctccacaaggtctgcttccaccacaccgtcaatcaggcccctgatgtggacaactggggaggcaggggttttgtgcgggtcatcgtagttctccaggcgctcccctaaccgcccacgaggccgggcgggaacactgcgcctgcgcatggagccagcgaagaaaat

SEQ ID NO: 320119 - DNA, 888 bp, Homo Sapiens
gcttctctttaccatcctgaaccccatttattcgatcaccacggatgttctttacactatctgtaatccttgtggccctgtccagagaattgtcattttcaggaagaatggagttcaggcgatggtggaatttgactcagttcaaagtgcccagcgggccaaggcctctctcaatggggctgatatctattctggctgttgcactctgaagatcgaatacgcaaagcctacacgcttgaatatgtttcaagaatgatcaggatacttgggactacacaaaccccaatctcagtggacaaggtgaccctggcagcaaccccaacaaacgccagaggcagccccctctcctgggagatcaccccgcagaatatggtgagggcagggggttcccctccgtggactcccgtggctcatgtgcccctgcccgccgcccgccgtgcaaattctcacccgtcctccctctctttccttcccaccccccaggagggccccacggtgggtaccacagccattaccatgatgagggctacgggccccccccacctcactacgaagggagaaggatgggtccaccagtggggggtcaccgcttgggggcctagtcggcctcggcccccggaatggggagctacgaactccttcacgcggcagccgtagattcgtcccgtcacgccgccagctccgcggcctccgggccgacggggttgtcatcctgtctaagaagagactccgctaccaacctcctcaatagacctctgcccgaaaaggcccgatggcgcctcaacggtcacaactctctgccaacaaaaagcctgcgatgctcccccccacagctagacatcacacagacctagccgatacacctctagtacacccgggtcaccatta

SEQ ID NO: 320120 - DNA, 331 bp, Homo Sapiens
cttgctctgtctggaaaagagaacactgactagaaactacaaggcagaggaaaaacgaaggaaggaaaaagggtcatggaacttgctgtaatctgacacaaagtacaatggccaacccaaaagcagagcggccacagaatctagaccaggatggcaacaaaatcactatttccaaccagaaatcttggacacacaaggacacccaggagtcaactttggaagcccacacctggcctctgagcccagtacctgatgggtccaaactctgcaaggcctccacaaggtctgcttccaccacaccgtcaatcaggcccctgatgtggacaactgg

SEQ ID NO: 320121 - DNA, 2383 bp, Homo Sapiens
  misc_feature (269)..(277): n is a, c, g, or t
  misc_feature (316)..(388): n is a, c, g, or t
  misc_feature (435)..(473): n is a, c, g, or t
  misc_feature (482)..(499): n is a, c, g, or t
tggcatacgcgaggggcgagcgtatttggtggcggtgttacagatgttctttgaacggtggtcgcccaactttcgggttcccatttcagagagccaggtttcggggattttgggtctggcgcgaccccagtcccttttgggaaaaagagtctggtagtttctgctcccggcaaaccaaccccccggcgggtaggggtggttttttggttgcccagcagcggatttttcgcaggaaaaaaaggatttccaagaagatcctttggatcacnnnnnnnnngcccgctcattaggcgggttaaattcccgggtactgcannnnnnnnnnnnnnnnnnnnnnnnnnnnnnnnnnnnnnnnnnnnnnnnnnnnnnnnnnnnnnnnnnnnnnnnnaccactttgtacaagaaagctgggtcaggaaacagctatgaccatgnnnnnnnnnnnnnnnnnnnnnnnnnnnnnnnnnnnnnnngcctcgagnnnnnnnnnnnnnnnnnnacattacctctgattttatttagattctaaaagttaggatacaaaaagcacataaacatctacaagtaccaaaacatttatgaccttataattttatagtgcaagaaaaaggacaaagacaggaatacaaataaattataatctaaagagttacatataaaatgtccttgattatttgttaaaatctgctagaaaagtaacaggaatgttatcaagcctttctagacattttgaacacaatctgacaccgttgcatttcctggttgtatcctcagcttaacaggcactggagacagccagcttcttcaaatggtccatgaacacctgcaggctaacatcatcagttaggatgggtgctccagtttcctgtccccaagcatacaggttattgtgtgtctgagatgggttcactttggacaaaaggaatcgagcctgactgcctccatgctccgtgttgatgtaacgtggcatcgggaagcgtgcttgcagaatttcttgagcatcatccagtggtgcctgcagaaggtgcttgaagttttcatactcgggcatgtcctggtagccagctttacgccactgggctatggtctcaccaagataaatgacaatttgaaagaaagtatccatcagcaaaattctgtcagctagaatgctgctgctatccaagagtactggctctggtggcccatgaaaggagtaagagtagagaatgggctggatcatgatgagggactgggtcaggtcctgccgggcaaaatgatgtctgtaatatgacgactcatcaggactgttgttaaacacttgaagaaatggagatcttctcagatggaacataaactgaggatatagagaaaaggaatctgataacctaaaagaagtggggtcttctttgttatactgtccaaacttttgacacagtcggatgagttgtcggtccagccaccggagcacatcgggcccctcctctgactccgctcggaacaccccaagccgtgccatcaacactgccgcagcctcctggtcaaatgctgcttctatgtgcctgagctgactctgtacatctgcccaatttcgggcgatggtggtcacgcggatgcgtctctgggtgctggagtgctgataatgcgtgacaaactggatggctcctctgcctccttgggggatcggggtgttgtgctgattgacaacttcaaaatagatgccaagtgtagatgtaggatctaggccacagattttccactgactcgtgccaccaacaccaagctcattttctgacacacacggtcctttcacattcagagatacgcatggaccaatggctcctgcaatcttcagttcccgagaggtctttacgtccaaagtagcaccaaatgccattcggaaatctccattaaaatctttagtaaagattctttggaatgtctgcttgaagagagaagtgttgaaagaatctcccattaccatgtagcctccagtaagatttgcacaacacttcatctccaaaagtccagtttgatcaagggcacaagcataaatatcaatgcagtgaccatttgcagctgttcgattagcaagcatctcatagtgcttggttgcctttttcatgaatcgtgcattatctttctcaatatcatgccaagaacgaataggaatctttaattcatctccaaccaccatgccaggcccttgggtagggggacctccagtaaacagcatgatcctggctcctgtgtttggaaaagtgccctccagcaagccaacagcaatggacaaagccacaccagtggatcgcaaaggtctcttcccctgagttactggccatgggtccctctgtagctccccaagaagatcagtgaggttcatatcaatcttgtgaacaggctg

SEQ ID NO: 320122 - DNA, 1293 bp, Homo Sapiens
cttctttaatgggaaattttacgattgaaatgatgtttcatcttatagaccacaaacaaatgtttttagacattgaaaagtggttaaagaccaactgcgcccagtcccccaagtgccattttctgagtgcagaatggagggtgacgtcttgagctgatgctgtgtccccagcatcaggttttctgttttccctcttctccctttattccttccttgtccattgccctcaaccttctttttctgtttgctctggcctggttcagtataacatatccatgaactctagtatgggcctatggacaatcatagctacaatcagactttctaagcaaatgggaatgtgatatacatataaccattagaaaccctatcatcacctcctagaggggaagtgaatttcttaatttttttagttgcaagagtcacttcttagccaactgactagagaatgcagaatgaacaggggaggaaggagctgatggcacagccttagaacagtaaccagaacacacccccatcaagtgtcacctccaggaaggcgccccacccccatccctccgttttctgggctcatatttaggtaaagctctaagactcctgagccaacttttatgtaactggctttcctaggctggggcttgaactaagtaaagaagccaaggagttcagatctagatagcagagaagtaagtctcattctaaaacattgcaactactgttagagtccaccccatgaagctgtttcagattgtgtatctttgactgaattctataagtatatattgttcagactaaaacaaatgttgctagctaggttggctgtgctgtctcagtaggacattgacagactccagctttcaccctctggagagcttggacctaagtgccacatgcattatgagacctggtccaggagctgtcctgccatggctagctcacggcttgacagcaatacttcttctccttctccgcccagcatagacttggtcacctttgtctcctttttctcccttgtgtcctcgagggccaggtggcccaggatgacctggtggcccagcagggcccctgtcacctttgggtcctggagtgcccatctctcctttttgcccagggggtccttgaatggctccataagtttggaagaagtccatgaggtccgcagtcacgttgctgtaggcagagaagaccttgctgatgccgggtggcccctgtggcccaggctggcctggtgggccctggacagtgtaggccatcccttgcagtaggccctgacgctgcatgctctctgacacc

SEQ ID NO: 320123 - DNA, 937 bp, Homo Sapiens
  misc_feature (228)..(228): n is a, c, g, or t
agaagggagtccctgccccccttccccttccccagaaggggcctgccctggccagcccagcaagcaggggtgtttggggggagccccctgttcccccccacaagggttccttttagtcccattccccaacagggggactcccgagcagccctggaagggctggggaggggttcctgccttggcaagttgggcctggccggagtagagggcaggggcccgcccctgggntgaggaacctcatagcccaggcgccgccgccgtgggagtagctgtgctcttggccggcgacgaagccccggcagcagttcggcctcacccccccaaacaccaggctctccacatccacctccagctcctcttggtctgagtctgagcgctcagaggagaggcctgaggagtccagactgtccgcccgcagccgctcccgctcggccgcccctgccagcccccggagctgctccagctgccgctgcaggctctgctgcttgctgcgcagcctctccttgagctgtcgggcccgctgctcctgatcctccagcttctggatgtgcatcctggcacggcgcagcaggctcagcgtggtgtaccgggcacagtcggcccccaggggcatctgctgcttcagccgctccaggcaccgcttcaactgggccctcctgcgcttctccagttcattgtgcactgaccgcccgctgtcctgcgcgccaggagcctgggggggtcgcttcttcctcctgtggatggggcctggactgcgatgcgggcacagggacgcataaccatgctcggcctctctctcacggcgctccaggaactcggccgcctgcagcaggacctggatgttgctggccaagggttccatgtcggcgacagctggcggcgggccggcctagggtgccggccggagcaagcggctgcagcacttttgttacaaagt

SEQ ID NO: 320124 - DNA, 1198 bp, Homo Sapiens
  misc_feature (143)..(143): n is a, c, g, or t
  misc_feature (819)..(819): n is a, c, g, or t
  misc_feature (834)..(834): n is a, c, g, or t
  misc_feature (1179)..(1179): n is a, c, g, or t
atgaaagaggcttttaatgaaaatactgtacagtttatgtgaggcaaaggcagggggccttgtccaggaagggaagaggcccaagaggcttcctgtccccttgggggcagcagagccaaatgcttgggctcgggcccaagctngcctgccctgcaggggtccagggaggtcctgatgagtcctgccccttcccttccagagggcctgcctggcagccagcagcagggtgtttggggagcacctgttcccacacaagggtccttttagtccattccaacaggtgactccgagcagccctgaaggcttggggagggctcctgcctggcaagtgggcctggcacgagtagagggcagaggccggccctgggttgaggaacatcatagccaggcgccgccgccgttgcgagtagctgtgctcctggccggcgacgaagccccgcagcagctcggcctcacccccaaacaccaggctctccacatccacctccagctcctctgcgcggggaggggtccggtcagaagacctggctcgccccgagggccacacaacccctcagcctcggggcactcaccttggtctgagtctgagcgctcagaggagaggcctgaggagtccagactgtccgcccgcagccgctcccgctcggccgcccctgccagcccccggaggctgctccagctgccgctgcaggctctgctgcttgctgcgcagcctctccttgagctgtcgggcccgctgctcctgatcctccagcttctgcggatcccaaaggagcaaggggctgggttcagcggcgtgggggcttgggctgcaccccnagcaccactccagtnacccgggccaacggccaccagggccaatgcccactccgggcaggtggcgactaaatccaggccccagagggttgcacccacatcctccagaaagccagcccctttccggccatgcacacgtcctgtcagggtgctgcctagattgggggttggggggcaccacaatctcaaaggcatttggggcctagtcaaggataaaggactggagtgctgtggcgtccaggggtgggaactgggagcagggtgcactgctgcgtgtacacctctgctcaggagccaggcatgtgctgtcatgggaaacaggcccggtgttaccaggtctccccgtttcctcgtgccgaattnctgggggttctagggccaa

SEQ ID NO: 320125 - DNA, 904 bp, Homo Sapiens
  misc_feature (325)..(325): n is a, c, g, or t
  misc_feature (331)..(331): n is a, c, g, or t
  misc_feature (336)..(337): n is a, c, g, or t
  misc_feature (342)..(355): n is a, c, g, or t
tgcctgaaaaaccagttgctggccggtggggggattcgccacctcaataggggacccccagcgggggtttccatatgatagccagtgggggacaggcagagccctcagctgtacagccagggaaattggaggctgagaagcctccagtctttgggtagggagggcctttccttcagctactcaggtccattcatcttccccatgaagacgctggctctggggctggagcgccttgtcagcggccactccatgtttagactgaggtacaaggagtggaaggcagccaggtcacctggccacagagcctccttcaactcttgacaanctggangggannccttnnnnnnnnnnnnnnaggtggaaaagggagtgctgggctctggcgcctgtctgccttccgctgctcacgtgcttgagaaaggctcatttttagcacctggcctcttttccctgcctggagggagcttaggggacagagcagggaagaaggcaggcaagggggacagggagacctggaagcagggcccaaggggatgtctgattgcttcgttctcccctctaagggtgcccaggcccagagaagggccctcagccgccgtgcagagtggagatgaagaggacgctgtcctggtcctgaagctggtagtccagctcacccagtagctcccagtcggcatcgttaatcagcaccagaattcctggccgcacgctgtctccctggatgaacaactctggccgctcttttagcaaattcttcttgatccagatgagcaggttccggatgtcccagggttcctcctgtccaggcaaagtgactcgatgtttcttaataccgtcaaacaggagctccgcaccacctccgaactccacctccactgacaagggcgcagccatgttgaggaaa

SEQ ID NO: 320126 - DNA, 812 bp, Homo Sapiens
  misc_feature (561)..(569): n is a, c, g, or t
ttttttcctcaacatggctgcgcccttgtcagtggaggtggagttcgggggtggtgcggagctcctgtttgacggtattaagaaacatcgagtcactttgcctggacaggaggaaccctgggacatccggaacctgctcatctggatcaataagcctttgctaaaagagcggccagagttgttcatccagggagacagcgtgcggccaggaattctgttgctgattaacgatgccgactgggagctactgggtgagctggactaccagcttcaggaccaggacagcgtcctcttcatctccactctgcacggcggctgagggcccttctctgggcctgtgcacccttagaggggagaacgaagcaatcagacatccccttgggccctgcttcccaggtctccctgtcccccttgcctgccttcttccctgctctgtcccctaagctccctccaggcagggaaaagaggccaggtgctaaaaatgagccttttctcaagcacgtgagcagcggaagggagacaggcgcccgagcccagcactccccttttccagcagctgtnnnnnnnnnaaggggttcccccccagtctcgccaacaggttcaagggaggctcctgaggggccgcggaacctcgcgtgggccttccgatcccttcggaacctcaatcgtaaaccctgggactgggctcctgaaaaagggggttcgctcgtccactaaccagccgtctctcctggggaaaaaaggccgccgaccctccttacaactggtaggtacgggctccttccgtccctcaaggatgtcgccggtcgctc

SEQ ID NO: 320127 - DNA, 1317 bp, Homo Sapiens
agtaaacaacctagtcttttatttgcccaaggccggctgttgcaagcactgcggccccacgacttccagacgggaaggggaggaggggcaaacactgtgcctaccaggtgctgcctgccccgtcctgcttcctgcaggagggtgggaagggagagaaaacggacattcgcgccatcaagtatctccgtagttttcagccactatagatattcagttgtggaggaggaaactgaggcacacgcatccccccaggcttctacttgctagtccaaggtttaacttactccctcccctcatctctacccccagcagaatgagctgtaacagcctggggagggtctcaggagcccatctggtggcctgtggagcggggcaggccagccagggtcaagggctaggggtggggggagcaggaggggtgtggctggaggagcagctgctggcggtggggggagtcggcactcaataggggaccccagctggggttccatactgatagcagtgggggacaggcagagccctcagctgtacagacagggaaattgaggctgagaagcctccagtctttgggtagggaggggccttccttcagctactcaggtccattcatcttccccctgaagacgctggctctggggctggagcgccttgtcagcggccactccatgtttagactgaggtacaaggagtggaaggcagccaggtcacctggccacagagcctccttcaactcttgacaaactggaggggaaccctcccctccaccacagctgctggaaaagggagtgctgggctctggcgcctgtctgccttccgctgctcacgtgcttgagaaaggctcatttttagcacctggcctcttttccctgcctggagggagcttaggggacagagcagggaagaaggcaggcaagggggacagggagacctggaagcagggcccaaggggatgtctgattgcttcgttctcccctctaagggtgcccaggcccagagaagggccctcagccgccgtgcagagtggagatgaagaggacgctgtcctggtcctgaagctggtagtccagctcacccagtagctcccagtcggcatcgttaatcagcaccagaattcctggccgcacgctgtctccctggatgaacaactctggccgctcttttagcaaattcttcttgatccagatgagcaggttccggatgtcccagggttcctcctgtccaggcaaagtgactcgatgtttcttaataccgtcaaacaggagctccgcaccacctccgaactcccctcgtgccgaattcgccacccaggcctcgcta

SEQ ID NO: 320128 - DNA, 1031 bp, Homo Sapiens
  misc_feature (105)..(118): n is a, c, g, or t
cagtgtgcaactaggacccactaaagctcagaggaaagcaatgcaagattatcagacaggcatgattgcatagaaggaaaatgtggtgtcagagttcaaactggnnnnnnnnnnnnnngttatctaaggcaaagtggtggcaaagaagttatttgttccatgtcacacaaacaagagcagaagattcatgggaacccgtacaaaagcatcttgtgtcacacagatctctccagctgcctatagggaatatacagaacagtgtcaccttcaaagaatgactgtacctgtgttcatatcctgaactgcaccaaggaatagctccatgctaaactgtcttggctaaaatacaaccagtgccatcattcctaatcagactaataaacagaatgtcttttaaggtaatgagttagatggctgtgtttaggttttgttcaggatttactttggattctcctgctttaagacccaaagaaagttatattgagtttttattgatgattctatgtgtttttaacagagtgtgataggtgaattaaacatattaaaagagttctatagcatctgttcagaaaagattatatactatacaaactattcaagtcatacaaaaccatttttcattgtctttcaaactgagaagaatcctattcagcacgcttctcctcctgaggtggttcatactgagcaagctttgctttcagttttttattttcttctacaatagcttcatacttctctttcatttcggccagttctaggcgaagcagctctatttctggattttctggagtagcagctcctaagtgatgctttaaaaaatccaaagcactgttaggtttctctggttcttcatataaggctaccaacaccttggtcagcgtgtccagcacccccgacttctccaagtacctccggaactgctcacgcttcgagtcggcggctttgtaatgggccatagtgacagcggcagcggcgtagctggcgccggagaccgcgactggcgggttgggagcagcactgctcatgcgccc

SEQ ID NO: 320129 - DNA, 564 bp, Homo Sapiens
  misc_feature (295)..(328): n is a, c, g, or t
  misc_feature (330)..(423): n is a, c, g, or t
  misc_feature (473)..(482): n is a, c, g, or t
caagccaaatacatgacataagatcaataaagaggccaaatttttagctgttttatgtacaaggagagatctgtttcattttgttttgccgtatttctagatataagttttagcatgggccaggaaggactaaaataaaagtttttaaggtactgtactttttgccatacttgactcatatactcaaaatacagagttgtcttggtgtaggaattggaaagcaagagtggaaaggaacgtaataactcgttggagtttaaaaatgagggtcttggcaagtaacactgatgtctgnnnnnnnnnnnnnnnnnnnnnnnnnnnnnnnnnngnnnnnnnnnnnnnnnnnnnnnnnnnnnnnnnnnnnnnnnnnnnnnnnnnnnnnnnnnnnnnnnnnnnnnnnnnnnnnnnnnnnnnnnnnnnnnnctttgggcggcccccccggcccccgaaaaattttttaaaccttttttttnnnnnnnnnncccaaagggaaagggaaaaggggcaaaaacctgtttccaaaagaaaacccggcacaaaaccaagggggttgggtcccccccc

SEQ ID NO: 320130 - DNA, 907 bp, Homo Sapiens
  misc_feature (764)..(764): n is a, c, g, or t
  misc_feature (849)..(849): n is a, c, g, or t
gaaaaagagactgtgtaccttgaattctacagctacctcagtccaggctgcctgctgagatcctgtctttagctcacatacattccacggtgggggacaccattagtccagacaccgctgtggagattagcattttagtttgtgtgcgcccgcctgggcttgaggcagtagtttagggaatgacaaggctagaaacctggctggctgtgagtcagagagagagaggatggacgtgggagaaagcaagcaaaagctaccctagggaagagccggtgacgtgcacaggccgagcagcacggctggttgagctgcaggctgcggcctttgcccggaacacttggtaatgccaaacaagtacgtgtggctactcattggtctatgaggacgatgacaggcttcgactctgtggtttctaaagcatataatattctcacgtacttctttcagcaaacgccaaacagtagtaattcttgtaactaccttgaaccctttgtggaaagaacctgggtgtgagtgaataaaaagtaaagagcgacgcgctatatcggccattaaatactcggggctgtccgtaacaccctgtgcttcccaattgtagcaccatgttctgtgtgaatatgcataaccagagtgaccccccccagcacccagcatgcccggctgtgcccctctgggtatgctcacatgcacatatatggacatacagtttcgtaggcagaacgtgggctgcccaggggttgcctatctggggcgagtagaccgcngggttcagcccacaggcctggcagcatcccttaggcaccccgccttgccccttcacctgtggggttacatgcagggacaagggcntggggcttgttccccagagggaactgttttggggtctttttgagggttgtggtttttt

SEQ ID NO: 320131 - DNA, 1138 bp, Homo Sapiens
agcaggatacattttactaaaaggttcattggttccaagtcacagctcataggtagagcaaagaaagggtggatggattgaaaagattagcctctgtctcggtggcaggttcccacctcgcaagcaatggaaacaaaacttttggggagttttattttgcattagggtgtgttttatgttaagcaaaacatactttagaagcaaatgaaaaaggcaattgaaaatcccagctatttcacctagatggaatagccaccctgagcagaactttgtgatgcttcattctgtggaattttgtgcttactactgtatagtgcatgtggtgtaggttactctaactggttttgtcgacgtaaacatttaaagtgttatattttttataaaaatgtttatttttaatgatatgagaaaaattttgttaggccacaaaaacactgcactgtgaacattttagaaaaggtatgtcagactgggattaatgacagcatgattttcaatgactgtaaattgcgataaggaaatgtactgattgccaatacaccccaccctcattacatcatcaggacttgaagccaagggttaacccagcaagctacaaagagggtgtgtcacactgaaactcaatagttgagtttggctgttgttgcaggaaaatgattataactaaaagctctctgatagtgcagagacttaccagaagacacaaggaattgtactgaagagctattacaatccaaatattgccgtttcataaatgtaataagtaatactaattcacagagtattgtaaatggtggatgacaaaagaaaatctgctctgtggaaagaaagaactgtctctaccagggtcaagagcatgaacgcatcaatagaaagaactcggggaaacatcccatcaacaggactacacacttgtatatacattcttgagaacactgcaatgtgaaaatcacgtttgctatttataaacttgtccttagattaatgtgtctggacagattgtgggagtaagtgattcttctaagaattagatacttgtcactgcctatacctgcagctgaactgaatggtacttcgtatgttaatagttgttctgataaatcatgcaattaaaataaagtgatgcaacatcttgtaa

SEQ ID NO: 320132 - DNA, 396 bp, Homo Sapiens
  misc_feature (16)..(16): n is a, c, g, or t
aaatattggcccgttnccataaatggtaataaggtaatccctaattccaccagagtattggtaaaatgggtggatggaccaaaaggaaaatctgcctctgtggaaagaaagaactgtcctcctccccagggtcaagagcatgaacgcatcaatagaaagaactcggggaaacatccccatcaacaggactacacacttgtatatacattcttgagaacactgcaatgtgaaaatcacgtttgctatttataaacttgtccttagattaatgtgtctggacagattgtgggagtaagtgattcttctaagaattagatacttgtcactgcctatacctgcagctgaactgaatggtcttcgtatgttaatagttgttctgataaatcatgcaattaa

SEQ ID NO: 320133 - DNA, 727 bp, Homo Sapiens
tcggcagaacacgctggtgtactacaagcttgaggggggtcggagagtgacccctcccaagggccggatcctcctggatggctgcaccatcacctgcccctgcctggagtatgaaaaccgaccgctcctcattaagctgaagactcaaacatccacggagtacttcctggaggcctgttctcgagaggagcgggatgcctgggcctttgagatcaccggggctattcatgcagggcagccggggaaggtccagcagctgcacagcctgagaaactccttcaagctgcccccgcacatcagcctgcatcgcattgtggacaagatgcacgatagcaacaccggaatccgttcaagccccaacatggagcagggaagcacctataaaaagaccttcctcggctcctccctggtggactggctcatctccaacagcttcacggccagccgtctggaggcggtgaccctggcctccatgctcatggaggagaacttcctcaggcctgtgggtgtccgaagcatgggagccattcgctctggggatctggccgagcagttcctggatgactccacagccctgtacacttttggacacaagaggaaaaactggaaggtgcgtcgctttgttctaaggaaggatccagctttcctgcattactatgacccttccaaagaagagaacaggccagtgggtgggttttctcttcgtggttcactcgtgtctgctctg

SEQ ID NO: 320134 - DNA, 686 bp, Homo Sapiens
gaacctcataagaagagagttttattcaacattatggcatggccagtgtaattgttccaacaaagggaacctactttggtgcccgaggaaatggctgtttgtgatgctggggaaaagtcaagatgctgacgcctaatggctgttctagcctttccaggtttgtaacatgaagatggggaaggaaatggcaccactgctgtttgtaatctgaggaactcttggcagcattcactctccaaagcagtacaaaacttacaaagaagtcaaaagtcttaatactcccattctccaggaactcttgtctgtgtcatctggtaggagggaggaatcctggttccctcaggtccttgtcatgttagctttttgatagcttcaatccactcggctcgctcagccttgctgctggcctgaatgtaatagtgtgtgtcatccttagtaatcactttgaagaggtttccctggacattccctttaaccccagtgggaacgccattatcttccagagcagacacgagtgaaccacgaagagaaaacccacccactggcctgttctcttctttggaagggtcatagtaatgcaggaaagctggatccttccttagaacaaagcgacgcaccttccagtttttcctcttgtgtccctgcttggccaggtagccttgtttcaccaccgtgccacttaactc

SEQ ID NO: 320135 - DNA, 875 bp, Homo Sapiens
  misc_feature (790)..(790): n is a, c, g, or t
tatagagaactcccgtaattggtcggagctctggaggcggggcttcgagcgtggctcgtgggttttccgtgaagtcgcggtgcagcggtgggcggcatgtctgtggccggtggggagattcgtggggacacggggggagaggacactgctgctcccggccggttcagcttcagcccggagcccacgctcgaggacatccgccgcctccatgctgagtttgctgcggaacgagactgggaacagttccatcagcctcggaatctcctcctggccttggttggggaagtgggggagctggcagaactctttcagtggaaaaccgatggggaacctggcccccaaggctggtcccccagggaacgggcagcccttcaagaggagcttagtgacgtcctcatctacctggtggcattagcagcccgctgccgtgtggatctgccgctagcagtgctctccaaaatggacatcaaccggcgacgctacccagcccatctggcccgcagctcttcccgcaagtatacagaattgccccatggggccatctctgaagaccaggctgtggggcctgcggacattccctgtgactccacaggccagacctcaacctagaaagatggccacaggacttgcaactcagggtggtgtctgaagagcagagagtggcctggccctggagcctttttctagtcttttcagaatagatcatgggcctgaggcctccactttctgaggtctgagggccagcagccctctagaaggtagcctccctggtggttttgttctccccatnaaaatgggtttttgggcggataaactttcctagattaattccctgggatggggcccaggggaaaggcttcttcgggtcctcaccc

SEQ ID NO: 320136 - DNA, 1067 bp, Homo Sapiens
gggcaggtactattctttttatttgatagacaaggaagctgaagtgcagaacgattaatttgagtaatgtcatttagcttgcaagtgtcaaagatggcatttgaacccagacagcctggctccaccatctggactcttacagccttcaatctctaagagggggaaggaacttacatgacatcctactgggaatttgctagaaaccagatctctctgccctgcaggcaaaaggtacaacagggaaacacgagaatgggtctcagaggcacccctggtacccccgtcatcacctgctgagacagagagcctccctggccatccaggaataatctagaagttatcgcccaaaaccattttactgggagaacaaacaccaggaggctaccttctagaggctgctgggcctcagacctcaagaagtggaggcctcaggcccatgatctattctgaaaagactagaaaaaggctccagggccaggccactctctgctcttcagacaccaccctgagttgcaagtcctgtggccatctttctaggttgaggtctggcctgtggagtcacagggaatgtccgcaggccccacagcctggtcttcagagatggccccatggggcaattctgtatacttgcgggaagagctgcgggccagatgggctgggtagcgtcgccggttgatgtccattttggagagcactgctagcggcagatccacacggcagcgggctgctaatgccaccaggtagatgaggacgtcactaagctcctcttgaagggctgcccgttccctgggggaccagccttgggggccaggttccccatcggttttccactgaaagagttctgccagctcccccacttccccaaccaaggccaggaggagattccgaggctgatggaactgttcccagtctcgttccgcagcaaactcagcatggaggcggcggctgaaataggacaaaggagtgtaagtccaagtctccgggttagagggtgatgcaggggccagaggcagctacccccgtagtatgtaatggggcctgggaccaggagattctgcaactaattc

SEQ ID NO: 320137 - DNA, 1132 bp, Homo Sapiens
  misc_feature (24)..(24): n is a, c, g, or t
  misc_feature (188)..(188): n is a, c, g, or t
  misc_feature (893)..(930): n is a, c, g, or t
taaagtgaaacaattccagaggancccactgcctcagcatgttcccatgtcggcccacttgtggaacactgaatcctccatcccaaagaggaacagaaagtttccaaacatctgaagccagttttaagtttaaaaataggatgaaggggaaataagagaacaggataagtgtcctccccaagaacagncagtggctgatgcccacatggcgcaaacaggctgacttcaatgagtgttcacgggatgtgtgataaagcccagctgagcccgggaagctcacgtgtccacaggcagacaggctcacggcatggaccaatgtttccacaactcaggatggatctttctgtccccacttagtagtcaaaataatgttttaaaatagcttcagcctttgaacataactttccagtcccttctgtgcattgaaatgttgggggtcaagtttgggggtgactgtcctggtgaggggagcctgtttcaggacttgaacacgtgcacggctcgcaccacatactgccggcagatgggacactcactcatgcgcttgccgcacttggtgcaggtaaccatgtgcccacactccagtaggacacagtcgatgacggcatccatgcagatgcgacacaggctgtcgtcttcctcatcctgcagctgcagccgctcgccataggacttttggttttcttcattctctttgtataaccggtttactttctctaccagttcccatttttcacaacagccagaatagttgacaaaattccgagccagaatttccttcagctggcgcacgctcattccttccacatcatcaaggcttgacaagtcagacagtgaagctctcactctctccttggagagcccggggttccgatcctctgcgttttcttctnnnnnnnnnnnnnnnnnnnnnnnnnnnnnnnnnnnnnnttctgtgtttgctgaagtgatttcactttgtacctgtgccggcactccagatctggatgtttggtctccatccataagctctccctgaaacgaagacatagtagcagagggggctgtatagtttgaaaaaaacgaacgtgtaaaaaagctagaagtctcggacgcgtgggtcgacgatatcccggaattccggacccgtacc

SEQ ID NO: 320138 - DNA, 764 bp, Homo Sapiens
  misc_feature (750)..(750): n is a, c, g, or t
aattaaactaattttattcctaaagttaaaatcagctagcgggtagcactgaaaatacaccttcactatacaaaacaatgtaaactgattacacattaataaggaatttagcacacacacttctaataaaagaagctagatgcagcccttgctataaaaagctatacctgaacaaaaatggacatgtggagtctaaggccctggcagtcgactagagaatgtcagttgttcccaattatgtttaaatgcagaaacagcaacaatgtggaaacttacattcatcaaatgttagcatttaaaatatacatgactaataaagtgaacattcagaggagccactgctcagcatgttccatgtcggccacttgtggacactgatctcatccaaagaggacagaagtttcaaacatctgagcagtttaagttaaaaataggatgaaggggaaataagagaacaggataagtgtcctcccaagacagcagtggctgatgcccacatggcgcaaacaggctgacttcaatgagtgttcacgggatgtgtgataaagcccagctgagcccgggaagctcacgtgtccacaggcagacaggctcacggcatggaccaatgtttccacaactcaggatggatctttctgtccccacttagtagtcaaaataatgttttaaaatagcttcagcctttgaacataactttccagtcccttctgtgcattgaaatgttgggggtcaagtttgggggtgactgtncctggtgaggggag

SEQ ID NO: 320139 - DNA, 425 bp, Homo Sapiens
  misc_feature (219)..(219): n is a, c, g, or t
taaagcttttaaaactaattttattcctaaagttaaaatcagctagcgggtagcactgaaaatacaccttcactatacaaaacaatgtaaactgattacacattaataaggaatttagcacacacacttctaataaaagaagctagatgcagcccttgctataaaaggctatacctgaacaaaaatgggacatgtgggagtctaaggccctgggcagtncgactagagaatgtcagttgttcccaattatgtttaaatgcggaaacaggcaacaatgtgggaaacttacattcatcaaatgttaggcatttaaaatatacatggactaattaaggtggaacattcggggggggcccctgctccggcatgttccctggtcgggccacttgtggggccactggtcctccttccaaggggggcaggag

SEQ ID NO: 320140 - DNA, 788 bp, Homo Sapiens
acttcttccagattggtgctattggtgtttatcataattgaatctgtatctccataaataacttcaagattcatcttttgtaccatctctttcgtatgcatcaaaatctggcacacagagcagcaactctttcggcttctcactgtacagcatggacctcacttagtgcttctgtaccacaagctatagacacacactagtatcaacagcaaaatgcggtggtgccaggagtttatcacttcaaccattcattaccagatggcaaaactcccttcctttgtatgtcaccaaggcagccagtggtttggcgtaaaatctgctataggaaaatcccaggcaaccatacatactgttcgctgtgagcttcaaagccttctgtcgaatgtcatactgaagaataaggtctggatttaagtcttgctgtttcattagctgtttgacttgttttctccgttctaccagtttccggatctctctgggcaaaatgcccatttctaagcttggatctggcaactcagggatctgttcttgttctccatcctctgtaactttctgtgcctctgaagcaactctttgtactgttgtaaaacaaatgttaaattcctgaatgatggaaggatatagactgttgaagtccagaagcaaaatgaacttatcataaaaaccaactttggggtccaaaaccaagcctccagcataagctgctttcttacgtcctttcttgtatttattggtatctccatcaatttcttcatcttcatctcccagtttttgctgaggctttctga

SEQ ID NO: 320141 - DNA, 533 bp, Homo Sapiens
ctttactcagcagtttttgttctgggaagccctgggattctgctaatacctatcactgtaggtgctgaagggaaacagatgaagaacatgacctcaaggagcttcctgtcaatgagaagaccaagctgacgcctggcaaagatattaaagaggagcctgaaactgttccttggacatcttatgaatgtcagaaaataccttttggagggttagaagatcaggggacatggttgttcacatttgctgccacggaacaccgccagtcttcacttggaaacagaatcacgccttgtgaagagatcatccctaagcaggagagaagctactaaaggattgtgtcctcctccaccttccctgtgctcggtctccacctgtctcccattctgtgacgatggttcaatggaagagactctgccagctgcattacttgtgggctctgggctgctatatgctgctggccactgtggctctgaaactttctttcaggttgaagtgtgactctgaccacttgggtctggagtccagggaatctc

SEQ ID NO: 320142 - DNA, 1400 bp, Homo Sapiens
tactccttatggtttaagccattgtttctcggccccctttttttcaacccgggaaaattgtgggatttttggataacaaatgtccaggggttaacactatccccaatatgaaggaaaaatttattctgggtaaccgtggtcttcccataggaccatggaaaccagagtagcagattcaggcctgcgtgacccgatcctgagtgagcaggacttcttcacataagggtacacagagctgggcgcagttgctcacgcctgccaatacagtttttagttactcgacatctttaagcctataactcttaggctatgcatagccccatgtcctaatcaggcattcactgatcccagcaggtctccatctatttgtaccagcctcctctattcctcccaatctcaaggttactcttaaatactagtaaatgcaaaaagaacttgtaaagtggcaaggcatggcctatcaaaagtcagcccaagggcagttttcagccctgcctcacctgggtctagttcagctgacggatgagctgattgatgcgttcaccccgatagcccaggtgtgcccctctccttgaggaagcccactctatttttggtagcatgacgggccactgagaggtggaaagggcacaagaaccatgagatctcctggaaatgcttccctgggaaggcaatttcatgaatgaggtcttccaagcaaatgacgccaaacttccccaggtgctcctcaatcactgtattgtctgtcagagggatggtcttattcttgaccttggcttgtccacgtttcaaaatgagttctcggacagacttcagatttggaaatccccaggtcacataaggttccactatacgcagcatttttagattctggggggtgacttttacaaagacaccactaaaaattttctttaggcgaagtcttgcaatggttctctgcaccagtaaactcacgccgtcaatcctttcgatgcgtacaacaaaggccaaggaatgtttatctggcaattccaaggcatgaggtttcacttctagtcgtctgagacgcaccttgtcacgtttctgccgccaggaatcatgtaggaatgattccagtcgcttaaacctgagcccttttcctttcttctgctccttctttgccaaaagtgcctgctttgcctgggtggctttgagggcttgataagccttcctctttttcaggagattttctggaaccaaagggatttttctttgctcttgctccgccatctttctagtggtgcagctacctgcactttttattttagtaattgctttacaggttacaataggtgttcttatcagactttatcttgaaataatataccatacacacaatttgagattcttaaaatagtataatctcatttacccgcaatcca

SEQ ID NO: 320143 - DNA, 1014 bp, Homo Sapiens
  misc_feature (69)..(69): n is a, c, g, or t
  misc_feature (134)..(154): n is a, c, g, or t
tgggtggtattatcggggagggggtggtataggcgagaggagggtgctcgcttggggcgccaccggtgnatataatggaaagataagggggtggttgggtgagggggcgggaagcgttggtgttcggatatatnnnnnnnnnnnnnnnnnnnnntcccgagcggcaggccattggggagtccggggaagggtccaggcgccggtgggaggggcccagcgggggccccagaggctactgcgaggtgggggcagggacgcaggtcgtaggagtgctggcgcccgagcccactcccatgtggtctggccccgcagcagcagcatcccatggaagggcagcccagccccgctcagcagcgcacccgccccgcaggtgtccgtcacgaaggccaaggcaaactgtgccagagacactctgcctgtgagcaacatgagccagggaagcaggaggagggcagccatgtggaggggcgtgtgggctcgcagcagggccgacagtgcagggcccagcagcacagagacgtggagcaggacgccggcggcatgaagcagcaggcacaggaagggccggtagttgccgaagcccacgcagcggcccagcaggcggcagtggtggtcccgacgcaggatgcagacgcggcaggcagagcagtgtccgctgcgtggcggcacctggctttggcattggtagcagtaagcccagccctggcccagaccgcggccggccagcatcacgccacggatgctgggatccgagcgcaggaagagccccacgttgcccagcaggttgagcagctggaaggcggccagcgccagctgcaaggcccgggccaggggtcccagcggcggcggcccgggaccgagcaccagcacgtaagccagctccaggcccacggccgcggcccacagcgcggtgagcacgagaggcagctgcgcgggcgccccgtccgtgctcccagccgcccagggctgccccatggcctggacacccagctgtcggagccggaggactagcca

SEQ ID NO: 320144 - DNA, 684 bp, Homo Sapiens
  misc_feature (87)..(107): n is a, c, g, or t
tatttaggtttttataccatactgtattggcgagaataccactatcattgtcctttacagtctatttcttcccccaagtcttggtcnnnnnnnnnnnnnnnnnnnnncatgaaccacacaggagactttaacatcctggtcttttctgtttcttctttgtttccccaagtttgtctgtccccctttgccttccctgagtgttgaacatcaggtagtaaaaggctaaacgcaatttcttgcatgtcaatctattctttttctatgtttgactctgatgcagtgtgtttagcgtgtctagtagctggctactcctatttaaaaactcttcctggtagaagacaacccaaagacccttttcgatgaggtggtttctcattctacatcctctgatctctatagactgtaggatgctttgctttcaaagataactgggttagagggtggggtgtgcaataggtgatttatcatggtttttttcattatcaatattacatggatgattttctcagattcttctgaaagaagaaattgacaggcactgctagattcagctattgaatggctgaagagattgagtatttgaccttctctcaaaatcataaagtgagaattcataaggcacccaatgttaagatttatccagatttttacattttgatttcttctctctgtggggtggcaagt

SEQ ID NO: 320145 - DNA, 597 bp, Homo Sapiens
  misc_feature (13)..(13): n is a, c, g, or t
  misc_feature (22)..(22): n is a, c, g, or t
  misc_feature (95)..(95): n is a, c, g, or t
  misc_feature (101)..(101): n is a, c, g, or t
  misc_feature (117)..(117): n is a, c, g, or t
  misc_feature (143)..(143): n is a, c, g, or t
  misc_feature (160)..(160): n is a, c, g, or t
ccgaaaccttttnaaaacaagnaaaaatggtgggggttcccccttgccaaaaacccgttcccccttcggaaaaaaataagaaacccctctccccnaacctnaaaaacaaccaccggnaaggtcgttgcctccccggtgttccnacggaacccggggtccnagcaaggaaacagcgctgcgctgtgtaagtgcacccagctgccttccctgaatccgggctgctgttctcctgcctcgggaggcctggggggctccctggggagacaggagctcttggatactggccaggctgctgtcaaggtcaggcaggctcatgtcgggcacggtcaccgaggggctgaacaggtccagcagggcactggtggtccacgctgaagccgtggctgctcagcatggtctgcaggttatccaggttggagtccatagcatccaagtggtcactgagctcattcttgtccaggcaggctacgctgaggcacttttcaggggtggaggtgggcgtgggggagggaggccggccctcggtgtccgtgtggcccctggcgtccgtgagggctgtgacggaggcgggggcaggttcactctcccgcaggatgg

SEQ ID NO: 320146 - DNA, 495 bp, Homo Sapiens
  misc_feature (406)..(406): n is a, c, g, or t
ttgcaccaaagctttatttgctattttcatagtctgaatgcaacatctttgtacatgcaaaggtcatcttgttttattgcagtcgaccagatttccaactgctcttctgtgcatatgaaacttctttacagttacaaaatataaaagcacttgtagacgtccaatactctgtgaggtctggtaagccccatttgtttttacattaaaaatataagtttttctagatgacttctcagtcacacggttagagattctttctggggactgggataaagtgcctctcgtctgccttccgttcaggaactcctaggaggcttgtggaattcctaagggcaattgcaaggaacaccgcgggcagggaaggctttaactttccctacacaagggaactcggaggctccttttnctatcggtggactcaagggatctgaggggaggggccccggagggaagggttaggggaaaatatatacctatacttgtgtgtgtgtggtg

SEQ ID NO: 320147 - DNA, 439 bp, Homo Sapiens
  misc_feature (20)..(20): n is a, c, g, or t
  misc_feature (35)..(35): n is a, c, g, or t
  misc_feature (41)..(41): n is a, c, g, or t
  misc_feature (69)..(69): n is a, c, g, or t
  misc_feature (353)..(385): n is a, c, g, or t
ttaacggttaacaaaataanaaaagaccactgtangacgtncccaaaaacactgtgaaggtctggtaanccccccatttgttttttaccattaaaaaataataagtttttcctagaatgacttcctcaagtccacacggttagagattcctttctgggactggataaagtgcctctcgtctgcccttccgttcagaactccctagagcttgtgaattcctaaggcaattgcaagaacaccgcaggcaggaagcttaactttcctacacaaagaactcgagctccttttctatcgtgactcaaagatctgaggaaggacccagaagaaaggttaggaaaatatatactatactnnnnnnnnnnnnnnnnnnnnnnnnnnnnnnnnnatatatatatatttccacgccctgccccatcttacaaagcatttggaggatcac

SEQ ID NO: 320148 - DNA, 587 bp, Homo Sapiens
  misc_feature (111)..(124): n is a, c, g, or t
  misc_feature (132)..(244): n is a, c, g, or t
gggggaaatccaaccctttttcttgccccgattttctttggaaaaaattaaggcccttttcctttccttttgggggcccggcccccaaaaaaaggttttaaaaattttttnnnnnnnnnnnnnnccgccaannnnnnnnnnnnnnnnnnnnnnnnnnnnnnnnnnnnnnnnnnnnnnnnnnnnnnnnnnnnnnnnnnnnnnnnnnnnnnnnnnnnnnnnnnnnnnnnnnnnnnnnnnnnnnnnnaaggataaatcactgcagttttatttaaaattttagacaaaatttaaatcatgtatataaatacaaagatgaacattggttctttaaacactgacaaaatcctgaaacaatataatgtatatattttaagccacatttcctatttttacaacatagtttacaaccttcccatttttacaacatagtctaaaactaagtttataaaaaaaagtacataggaaaatatgattgaagcattctcaaatacatggctctgagggtagattacttgttttttatcatttaatccatatacaatgcagcaaatagatacattaattataacattttccttcaattaata

SEQ ID NO: 320149 - DNA, 892 bp, Homo Sapiens
  misc_feature (67)..(67): n is a, c, g, or t
aacccattattcacatggtcctagaataaaaagtcaatttatattgtgaataaatttatcaaaaaancatgtcatccaattcccacaaatgagacattttaaatacagaatacactctgttcatgaatataaaatccccaggtgaaagtcccttaaaacactattatggttatgtttcctagaataattttataactttttcagagaattcctttaaacttgttaaaataccttgttgctagtgctcagaacatctaggttcagtctttatttttaagacagtatctatcctaggcaaatgagagcttgtttttatgtatttaagagtttcctcttgtcatttcaatgtcaaattgatttgactcaatttcatgatttcatctcgctcaaggccatcaaccggtcagagccagagcccttcaaaggctgtatgtgagtatatgagggaaaactttccacataattttacatcatttctatctcatagcagttttagttttctcatagctatctcatagcagttttagttttctcaaattctatgctgtttttgtactactgcagctgaccaatccaaagccagtttacactcagcatgtgttattctactttaaaatataaccttagtgaaagcacccttcaaatcaacagcaatctcacagtgagtttcctctgggtagtcaggatttgtccagaactacatccttttcagatgttcagagttttgcttgccattagggaggcaagggaaggatgagcaataaatcaggtttctcgttcgtatcttacttcttacctaattttctccctgttgcttatttggtacattcccttctctgaattccttaaacactttataaggttatttctgccatacaagtgtagacaattg

SEQ ID NO: 320150 - DNA, 681 bp, Homo Sapiens
  misc_feature (282)..(282): n is a, c, g, or t
gaaaaacccattagtcatctgctatatcactgaatgatgcctaattcttatcagttacttataggtagtatacttagaaattaccttaaactttctagctgtcagtcattttccaacagaagctagtatatgcaataaattagaccaagtgaaattctttacaaagcatacaacatatgtaccaattctagacttcataattaaaacaggatatccacatcatagttaaaaataacaagtccccaaagtgacgagatatttaatgatctgatttcaaaaagnccccggattgagatccccaaattccctatcaattaattacagtcttataacataaacaaacttagaaatttctagatggcaaaaggtttctcatgcatttaataccaaggtcttcaagaaatggtgatgtcaaaagtcatcatagtccataaagataaaacttctttcacaagtaaattgggttaaataactgatttttcaccctaacacactatcaaaaagagtgagagagaaagcagagagtgaggtatagcttattagctcaaaatggttataaatacttgtgactccttaagactccatcagaaagtgcagtattgactgctttactatactatattgtggaaatagggcatttagtgatcaaaataggccccattctagtcattagatcattac

SEQ ID NO: 320151 - DNA, 1091 bp, Homo Sapiens
tcccagtgacactgttcccaattccctccaggataagctgagactcctcaggatgtggttctgcagcagatgaggtgcgaacaaagcctgctctgccctgggcacccaggatggcactgagttctaaaaggcaaagggtatgtggtgaggggccaggctgaggccctggtgtggtaccatcatgggcagcagcaccatttgaggccgggtaggagagacgtgccaggggcctgcccccccaagaggaccagcagacaaactgaggcggcagagagagagattccagtgtcaccaggaagactgcagatcataacaacaatggttgctgatttggcatcaaagaggtggcactgtcaaagccgtaattgctgaaaatggcaccaacatgctgcagctggagagagtgggtgaccaacatttgtttgaagaacagatgatgctctttgaatggctcagccaacagcccaaagttttaagggaagacctctctgccagcttctcttggacagtgtctcatgtaaaacctccaaggcacttacatagcatatttttgtgtccactctcttgctagtctgttgtacttctctctgtcggccttgtaggtgtgtgctatctctggcaccagggggtcatcggggttggggtcgcagagcagcgagcagatggacaagagaacttttgacacagtcaacgctggagaccactgagaccgcaggatatcaaggcagatgctgccattgctgttgatattagggtgataaattttggttgtgaaagcaacctttgggggcttgaacgggtaatctgtaggaaagtggatggtcaggaagaaaacacctccttggtaaggactgtcattcgggcccatgatggtggcctgccagtggaacaagtcatcaccgacaggtcctgcagaacactgggcaggaggatccctctgcaagtcggttaattccttctggatccgctttagcgccatcctaccccgctgccggggacccgggcggcccggccggggctgcctgaggcggcccgctgccggctcagccgccaccaagctgcaccctcgtgccgaattcgccacccaggcc

SEQ ID NO: 320152 - DNA, 850 bp, Homo Sapiens
  misc_feature (111)..(111): n is a, c, g, or t
gcaccatgaggcagaatgcagggtgctctcaaccaggtgggggttggggttcaggctttttttcatctttcggccaaggcagacaacaacggactcatcatcccacgcgantgagtgacgcgaggcttcaaacgcaagcacgagtgtttagaatcctgcattttcaaaggctcttgcccactgggaactacatggagaggagattaagaacaacaaccaaaagaggcagggggtggggcaggcgtgaggtaggggtggggtggggatgacagtcaacacagcttggaccagaagcccatggcgcctggctccctggaaaggcacagggcacagacggatgccgcctttcttgctgggacactcctgccaccatccacagctcccccgtcactccacgttcttgtacttggtgaacaggttgtaaagaaccctcagggtggatttgaggtccaagttaaccacgtcttcaggacgagccttgggtttcttgaggcctccgtccagcatcagctcaaaggcgaaggacacattgtggaccttctgatcgaagctttccggagtcaggtagaagtggtggagaggaacaaagtagtcttccagaaggcccatgagcagaaccaggtacacgccatctgcaaactgggtctccagttccgtcacctccaaattcagcttgttcaggtgcttgttcacaaaagtgatgagagacttcttcaccacgctgagcttatccggggcgtggtcgaacagcgtgtcgaaggcatcccgctcgaaccggcccatcatcatctctgtagttgtggtcagctcctccgagatgtggctggaatgcagcaggccttcccgtttc

SEQ ID NO: 320153 - DNA, 2689 bp, Homo Sapiens
  misc_feature (90)..(90): n is a, c, g, or t
  misc_feature (140)..(140): n is a, c, g, or t
  misc_feature (385)..(405): n is a, c, g, or t
gacaaaaacctttctgtgtaaagttaggattcggaaatggttccttggatagttttcccgaattggagaaaagaaagtttttattttggncttatttagggaagctaagaagaattgaccaaagttctgctttatgtccnttcggcaagcttagcatagcttttgccttccctcaaatccagttataagtcaaaacaaattaagggcacattttttaaaaaaaattcccccctttaattgaccaaagtaaagccatgacatttcatttggtaacctgtttagaattataaaaatcatttcatttggcccagcccatactgcccaagacaaaacttccagacaattctgatgccatccagttttgttcttacaaactgcatatttnnnnnnnnnnnnnnnnnnnnntcttcaacgtcctaaatgtgatgtgctcagtgcgaagcatatcagagctggacgtgacatttatgtccttgacaagcctcgattatccaggtcctttaccttgtatatcctgaccagccaatgttctgtggtatatgcttcctccaggacatcaagctcaaagtctttattcccaatctcagcatttcggacacggtcaaagcctggaggacgcttggcttctgtgtaaacctgtccaaagcgatagtaacacatcttgtacatgaggcagttgagcagcactggagaaccttcacggtccacacggaactccccagttggagtataatagtcattctccttgatatgtttgcctgtatctgtgctccctccaatccggaccatccaaagaaacttgttgatatcatcagaggaatacccagtgaggcctccaaaaatgaccagcacatagctgacatcgagctccctcatgatctcataggctttttcctctgtggacgccattgcctgccctactcgagaaatatgggtattattccatgtgttattgtccactaaaattgttcggtttgccatagctgtaatctgatagccataatcccaccaggacatgaccttcgcatcctctggagtattatgacgaagccaataatatgcttctcggaagtcatcaaatatgatcctactgccatccccaccacgggcagatagtacaatggacggagaagagtaggcctcactggtcacccaggttgaatgaaaaggtgtaggtgatgagaaagaaagccatgacccagtatcatcccacttgccacttcattcttaatagggtaggtggaatcctgttgcttcttgctcttcttgtctggacgacttatgtccagattcttcatgtatgtggacagcacctgggagactccaatgccagagagaatgcacataacaggtgccaacactagcattagacgcaccattacagctgaaaagtacatgctggtcacaccatacatgatgataaaaatccgggcatcagacaggttgctaaagcagtaatagaggccaactggaaacatgaagacgaggagctgcaggtcaaaatagtatgaggaccaggttgtgggctgatgctcagacacagaagcaatgatggggatgttgttcttagcataagagggatccagcagtgagtagaaacgccccgtccagggagatatttttcctgtcagcatgaggagagctcccacggtgagaaggacaaagcctaccagagagatgacgctccggaaaagaacttcaaattgttgtggattcaacttgctgcgcaggtaatccacaaaggcatggatctggcagagaccaaagaccccaaaggctgccatgtgctctgatgaaaggacaggctggaaacccacaaaggagatctgcatagaaagtatagtgcccaggcagtaaacagtacagtaggccacatagatccggtgagagaaacggcctgtgagcatcagcacgaggacgtgagaggaattaagttgatcaggaacacataacctccccatgacgagaccatgtagaaataagcaagggcacacttagctgcccaacagatggaaccagtctttactgccttgatccacatgtagtaggtgagtagcatgcaaaagatggcaatcccttcattatcataggagccagccacagatcgggagatatatccaggaactacagcaatcatggcagcagcaagaagcccagcccctgcatccttgagctctttggtaaggtggtacgtgacgatggtggtgaaggaggagaagagaggggccaggaacacacagacattccgaatgtcgatggtgatgtggaaaaaatggagtacatggtagattgcagcagaggtgatcattaaacctgggtaaattgttcctccaatgattcgtcccaaagggtaccaggctcggtcatcaaaccagttatggaatttataaaacccctcctcagccaggaacctggtagtccgataattaaagtacggatcaaactcatggataacactttcaaatctcaggacagcaaacagacgagtggagaaggataatacagcagccattgacagaatgagaagcttcaaaagtgtgtcctgcttctcataggacaatcgcaaaaatccaaacttagtcatcttgacatgaatgggtggcaacacacgacgatcagctggccggctttcctaaacgatccgcggggctccctcagccatccgttcagcggcgcacccaaccctccc

SEQ ID NO: 320154 - DNA, 508 bp, Homo Sapiens
  misc_feature (111)..(124): n is a, c, g, or t
  misc_feature (134)..(250): n is a, c, g, or t
  misc_feature (427)..(448): n is a, c, g, or t
ggggggaatccaacccctttttttgccccggttttctttggaaacaattttgccccggttcccttcccttaggggccccggccccaaaaaaaaggttttaaaaattttttnnnnnnnnnnnnnncccccaaggnnnnnnnnnnnnnnnnnnnnnnnnnnnnnnnnnnnnnnnnnnnnnnnnnnnnnnnnnnnnnnnnnnnnnnnnnnnnnnnnnnnnnnnnnnnnnnnnnnnnnnnnnnnnnnnnnnnnntaaaaaaattcccccctttaattgagcccaagtataagccactgacactttcatttggtaaccttcgtttacgaattataaaacatcactttcatttggcccagcccatactgcccaagaccaaacttccagacaattttgatgccatccagttttgtttttaccaactgcatattnnnnnnnnnnnnnnnnnnnnnntcttcaacgtcctaaatgtgatgtgctcagtgcgaagcatatcagagctggacgtgaccc

SEQ ID NO: 320155 - DNA, 529 bp, Homo Sapiens
  misc_feature (349)..(349): n is a, c, g, or t
ctttatagggagacactctgagaaagagcacattgtgggggcccactccatgtgatgtttgcttggttgcctgttcccttttctacctgcagagcacggttcccataagggcggcgagatcagcctcctgtctcatctggaagaccaccactctggggtctcagaggaatgatggaagccttggggtttctaaaattggaagtgaatggccccatggtgacggtggccctgtcagtggctctcttggccctcctgaaatggtactccacatcagcattctcaagactggagaagttaggcctcagacatcccaagccttctcctttcattgggaaacttgacatttttnccgccagggttttttgggaaagccaaatggagctcagaaagctgtatggacctctgtgtgggtactatcttggtcgtcggatgtttattgttatttctgagccagacatgatcaagcaggtgttggttgagaacttcagtaactttaccaacagaatggcgtcgggtttggagttcaagt

SEQ ID NO: 320156 - DNA, 923 bp, Homo Sapiens
  misc_feature (20)..(20): n is a, c, g, or t
  misc_feature (32)..(32): n is a, c, g, or t
  misc_feature (78)..(78): n is a, c, g, or t
  misc_feature (81)..(81): n is a, c, g, or t
  misc_feature (112)..(112): n is a, c, g, or t
  misc_feature (159)..(263): n is a, c, g, or t
  misc_feature (272)..(272): n is a, c, g, or t
  misc_feature (291)..(291): n is a, c, g, or t
ggtacctaaaattaattacncctgaggggggnccccaaatatttaaaatggcttcaaaaagtctcttccaccttttantanttaggatttccattatgtgaccaaataattnaattattttctttttgaaaaatccctgaaatccggctggccatggtnnnnnnnnnnnnnnnnnnnnnnnnnnnnnnnnnnnnnnnnnnnnnnnnnnnnnnnnnnnnnnnnnnnnnnnnnnnnnnnnnnnnnnnnnnnnnnnnnnnnnnnnngggatccancaggccttgctccaccccnccaggccatctctctcacagcattgctgatctcatgacgggatgtgtatgcaaaacagacattcaggaaacatttgttgtagttcttcgtggcctgtacagcttgtgcaatcagctcctggagatccaagggcaacaagtgcagatcgcccaggacccggatacacaccccatgcttctgcagtttctccttttcttccatcaagcggctgaacttctgccgggccagatccataagcccgtctacctcactcttggagcgtttgaagttctcaatgctgaatgcgtagactgtcacctctaggatgcccaggttcaaacaccaccgcagagtctcagctagcttgttgaagccctgtgagtggccttcctgccgctccacctggcacttcttggcatagcgacggttcccgtccattatgaatgcaatgtgtttcggcattgggcctgcctttatgatgttggcacagaaccgctcccaaagtgacagctctccttccttgatccatgacatagttcttttccagtcagaagatcactccagaacaagcaaacaccagccaggtaatctgattagctccgctgggcgcgtccccacggcttcagtgggccggcacttcctcatgacgtccc

SEQ ID NO: 320157 - DNA, 1116 bp, Homo Sapiens
  misc_feature (437)..(473): n is a, c, g, or t
tggtacggtccggaatcccgggatatcgtcgaccacgcgtcgcgatggagacgccgggcgcatcagcgtcgtccttgttgcttcccgccgcgtccaggcccccgaggaagcgcgaggcgggagaggctggggctgcgacgagcaagcagcgggtcctggacgaggaagagtatatcgagggcctccagacggtcatccaaagggatttctttcctgatgtggagaagctccaggcacagaaggagtacctggaagccgaggagaatggagacttggaacggatgcgccagattgccatcaagtttggctctgccttgggcaagatgtcccgggagcccccgccaccctatgtgactccagccacatttgaaacccctgaggtgcatgcaggcactggagtggtgggcaacaagcccaggccccgcggccgaggcctnnnnnnnnnnnnnnnnnnnnnnnnnnnnnnnnnnnnnccgctgcccagcctagatgtcttcctgagccgctacacgagtgaggacaatgcctccttccaggagatcatggaggtggccaaggagagaagccgggcacgccacgcttggctctaccaggctgaggaagagtttgagaagaggcagaaagataatctcgaactcccgtcagcagagcaccaggccatcgagagcagccaggccagtgtggagacctggaagtacaaggccaagaattccctcatgtactatccagagggtgtccctgacgaggagcagctgtttaagaagccccggcaggtggtacataagaacacgcgcttccttagggaccccttcagccaagccctgagcaggtgccagctccagcaggcagccgccctcaatgcccagcacaaacagggcaaggtgggccccgatggcaaggagctgatcccccaggagtcccctcgagtgggtggatttggatttgttgccactccttcccctgcccctggtgtgaacgagtccccgatgatgacctggggggaggttgagaacacacccttgagagttgaagggtcggaaacgccctacgtggacaggacacccggcccagcttttaagatcctggagccaggccgcagggagcggctgggtctga

SEQ ID NO: 320158 - DNA, 933 bp, Homo Sapiens
  misc_feature (33)..(33): n is a, c, g, or t
  misc_feature (45)..(45): n is a, c, g, or t
  misc_feature (89)..(89): n is a, c, g, or t
  misc_feature (309)..(309): n is a, c, g, or t
gcctgaacaataacttttgaacatactgtgtcnaaaaatcttaangtctcccccctcctttgggtaaagtaggcaaaaaccttaacaangaaaaacactataatacacggaaatatactgagttagatttccagtcacctgctctatggctcctaagatgcactacatcccataatggttccctaggactgtgtcccacctgatggtttggagtacggaaaaccagcccctatggcttaagagtcatctcccatggaagacaatgctggccttctgaacgctggggctcatgggcttgttgatgtggcnctctggtgtgccaggatctcctggcagctcctgtatacttcaatcaagcagtccagccggggcttggcactctggaagacgggtactacttgggatatcccatgtggttccactggatctttcaataagatgcagaggtagtaaatcaccttctgcatgtaaatggcctcattgatgacaatatccttgaccttgcccatttctatgaaggtagtgctttctttgcctgaagcataagatgaagtcatctgaatgccaagggaatcaatgattaacagagtctcctgatcaatcttcacaaaatggagataaccaagcagacctaagagggtgatgaagatggcagcagagaggatcatgctgttctcgcagagggtgaagagtccgtaggccgccagccacaccgtgcaggtgacagcggtgagcgaacgcagcgagagccgagggcagctgaggcagaattcccggcaggacggggagtagtagcggcgctgcagcgccaggcggccgccgcagatatccgaaaagctccgctcatcctccatgacgcccccactcggccgcccgcaccgcgcggcgctgcactgcgctcgccggccctggtcgtctcgcccgctccagacc

SEQ ID NO: 320159 - DNA, 918 bp, Homo Sapiens
  misc_feature (600)..(600): n is a, c, g, or t
gtggcccagtgaaacccagtcagtgccccatcaactacgggggtaacttgaacaatggccacaattccattttacccaaaagaaaaccttccactggcccctggggactgccaatatccttccattttaaaatattttgctgccgttttccttccaagggcggcttgtgacaactgaactgctgattattccttccatggacagcatggtagtggcaagtgcagtaactgggctcattgcattttctctttccatacaagttactgcaactgccatgtgatcacttttccagcaggctgacttcgatttgatttttttcttatttaaatgttagaaacatctcagggctattattatttatctacaaagcagaaatcagccaaagacaaaggaaaaaagtaagctaatcagaacctgaagacttgaaataccacatgaaatgtaaacatttaactttttatttccaaaggatttcttgaagcctctctggagataatgacatcaccacacatactgttaaacaatcttttaatacctttggaattactctttataatttttatacttcaaattaagaaaaccgcccaatgttcaggcaanctttggcattaacatttccaagaaagggacaaaaacaactattaatgcaacatcatgaagagattggggacaattgtgggtgtctataaagctctctttgaaaagctctttaaagcgaactcaggtaaatggaaatgaaatctgactttttacttaggccaaataacaatgaggtttgaatataaaatggaagattcaggccctttctacctaagatgaaggcatttagtttgctcaaattcaaactccaccaaatactctgaatggaaagtttggcaacagaactggacatgtggaggttcaccaaccattttgatc

SEQ ID NO: 320160 - DNA, 951 bp, Homo Sapiens
  misc_feature (333)..(373): n is a, c, g, or t
  misc_feature (407)..(528): n is a, c, g, or t
ccgaacgagaagaggaggacgaggcggcccctgaaaagctgtcccgggcggtcgccaggccgggttgcccccccgccagtgctctcagagaaccgccgaagtgagagccgcgccacccccgggtgtaataaccgaaagaagaagtaaggctggcctgggtgccccgacccaccctggagccagcggcatcattagatcaggtccagaccagctggtcaacaggggaactgtcctggacctaaaacccatattaccaggctgtggcgcactcaccctgtaatcccagctactcagaagccgaggcacgaaaatcgcttgaacccaggatcggannnnnnnnnnnnnnnnnnnnnnnnnnnnnnnnnnnnnnnnnatgacagagtgagactctatctctcaaagaaagnnnnnnnnnnnnnnnnnnnnnnnnnnnnnnnnnnnnnnnnnnnnnnnnnnnnnnnnnnnnnnnnnnnnnnnnnnnnnnnnnnnnnnnnnnnnnnnnnnnnnnnnnnnnnnnnnnnnnnnnnntggggggggaatatgcatttcttgagtccctagcctatgatagataatatatgtgaaaccacattgctttattctcacaacaaacctcattaggtcacacctcctgggaaagaccagaaggatctgtgtcactatgtgtccttcccccttttcagtacaaagccaggctaatcttagcgcgaagcctaccaaccaaacctttgcggcatataaacatccctaactcagcacatcatccactcacctccacctccctcgcctctgcctcacgcttgtttttccttttgatgaaaagcagagcgtcaggctcttaggaagtaactcctgacttagctacacatttttacatgtcactcagtttctatgtagagggaatttcggacgcgtgggtcgacgatatcccgtaaattccggaccgtaccc

SEQ ID NO: 320161 - DNA, 1389 bp, Homo Sapiens
  misc_feature (63)..(63): n is a, c, g, or t
  misc_feature (68)..(68): n is a, c, g, or t
tgattgggtgggatggattatgggggggtcttgggtgaggatattaatagtatggtatgaatnagganggttggaatcttaaataaaaggaataacattttaagaaataaatgaaacagaggcagggaaaccaaagagccaattaggggaaagaatcctgaaaaagtatggcttcacacagcagcagcattgaagaaaacactatcgatttttcccagagaaaaaaactccaaaaatgtccaataaccaagtgcacagagttatggtcaataagactttgaacatgcatcacacatacataagtacataaagaaaattttcatttatttttccctcagatatacttcaaaataacatgtagacacagaatcacaaatatatacaaaacaaagtatcgcctggttatttcaagaagagttttccctcaattttcttagctgctgtgcataaaattcaaagctttcagggggttcaatgaaagggacaggctctccagcatacttcagcaaagatgcgtaacgctttagaaacagatcatccaattttgtattctttgcagtcaaatgttcatacagtgctttagcagatgtgacatctttctctgagacatagcttttcatgagggaattgtatgcttcttccttttcatttaattcaggaatcaattctaacacagatttcacagttgatgcctttccttgtttcctagaattcctaaggaggaacaacaacaaaatcggggtttgttcagcaattgcaccacatctctgtaggagagctctggcatcatccaccttgcctgcatccacaagttgaaggaaaaaatcagtgacaggtttataaattgcaaactgattggccaatctctccgccatgatgcttatcttttcaactgctggttccaactgctcctctattacttttctgaataagtatgccaagccgaagtattggggttcaatgactttattctctgaagtaagcatattttcaatgttttctattgcggcatctatgttattattctttatttgagccaaagcaatgttattgatgaaaaccatttttgaaagtccaatggagtcttcgagtccatttaacatcttctgaactacttctatgttttcaacatcacccttcatggccaatgcctggatgacacgggtcactgctaacctagaaggggtctgctgctgatccaatactgttttcagtgttgtcacagcctctttcaaataatcccgcctaacttgcgttatgatgaggcggctgttggcagcatcgttcagtgtgaagcccttgatgtgggtctccgcgaatgctttcacttccattgcttgtgtaaaataatcttctgacatcagtaatttaatgagattgctgtaggtt

SEQ ID NO: 320162 - DNA, 1010 bp, Homo Sapiens
  misc_feature (25)..(25): n is a, c, g, or t
  misc_feature (54)..(54): n is a, c, g, or t
  misc_feature (70)..(71): n is a, c, g, or t
  misc_feature (89)..(89): n is a, c, g, or t
  misc_feature (168)..(168): n is a, c, g, or t
cattacatcatttcacatgccattntgatttggagtcagtccattaaaaagtancagcccatatctgaanncaacagccttctaactanctgggttggggtgataagtcattgcctctttaatagaaagccccaacagatttgggtattaaatacatcttttccatcnagcatcttctgcattttctgcaaatactccagcatatttcaggcaaactgctagctgtttatcttcagatatcttccaaatcatccctccctgttcaggacacttttctgggatattgagaaggctgttaagtcttttcattgattctacacttaagacaattcctccttccatacccacatattcaaggtctccagattttatagtgtggcctagatagaaaggctgtgatggatccttttttaacaaaaaatactttaggttttcaatgatagcaaacgtagtggggcgtgcaaggaagaaccagttgtattggtctctatacttatcaaaggcgtatttgtaagcttttctcatcattaaccacatgtcatttgtgtccatattaattgactcaaacactttaacattttcagaactgaagaactctgctttgtcacagtgtttggtccaagtctcctttactgcagcccaaagactcacatctttgggttttacaaggataatacagtatactcgaaagctcttactgagctccatgcgctcatcctctgaaattttcaagatatcttctttgttaggagcttgtaggtgatgatgctcatggtggtgcattctatttccatgaccaatcctaatgtgtcctagcatagtgatcaaagcacagaaaatgcttccaagcatcacacccttcaaaaaggagctgctttcagaaagcatttttcccgcgtctagaacggcttggggacaggaaagcgcagccgcgcacgggtttcctctcacgttggcgcaccactccgttacgctcctgaccaggctgttctagctgcaggcggtgttct

SEQ ID NO: 320163 - DNA, 2355 bp, Homo Sapiens
  misc_feature (216)..(226): n is a, c, g, or t
  misc_feature (468)..(483): n is a, c, g, or t
  misc_feature (514)..(532): n is a, c, g, or t
  misc_feature (575)..(637): n is a, c, g, or t
  misc_feature (722)..(733): n is a, c, g, or t
  misc_feature (743)..(746): n is a, c, g, or t
ggggacgaattatttctgactcgccgtgtctcttctcgcccgcggggacacttatatattgtcatgagggggactgatgcacggtgagatacccgcgcggagggcgcgtcgagacgcccgctttgcgtcctcttgatgggaggacgcctcttccgggggagacggtagtgttcccagtctttccccccccaccttcctggcactaagtgcttggcnnnnnnnnnnntgatatattatgagggtgggcgggccccggggcacgcgacgcttaagttggtgtgaccgcaaaataggtccgcagtacacccctctcccggtgattgttgtctggaacccaatgttctgccccgcccggggggtgttttattgtggggtcggggtccaccacccctgttgtgagggccggtgggcgtctttccttgagaaaacgtaaagtcggcgcccggtcgttaccctgtcctggggggnnnnnnnnnnnnnnnnacgaacagtgggttggagaaaaactatttannnnnnnnnnnnnnnnnnncggtccaaagggggttcagtcgacggtgtggtgggggtgagcnnnnnnnnnnnnnnnnnnnnnnnnnnnnnnnnnnnnnnnnnnnnnnnnnnnnnnnnnnnnnnncggtccttactcttgtggctcggttggcggggctgtcgtcctcgttgcttcttctgtcgcggcgttctgtctccgtctgttcgcnnnnnnnnnnnngttcttctcnnnngttttgctaccatttatttgctgtatggtatgtactcaaggcatgagtcagggcttctgtactaccctctgatcccaggagacagggcaggcaagaaggagagcccagggagaagctacctcatcatgggaaaattgtgggagctggaagaggtagggggagacccagccatcctgttctgacttctagcaatttcttctgccctcagtcatgaggggctccctatcctcccatcctatggtcccaggtgcagcaatgagagaggggaagggaagagagaaaggaagacaagttggtgccaggtgaaggcatctctgctctgcatagctatttggccctggccatgactacaagcaaaagtgggtgcagatggctgggccaagggctgtggtatggagtggatactcagtaggcatggttggcaatgtagagtgactgtgctgctgctccaccatcttctccactgccttcatacttgccctgtgctgcaagcccattcacctcagcccgcttgatgaactcctcagtggcagccccagcattgtcccgttgccctcgccaggcattgagtgcagaggcttgcaggcacgcccataggagaaggtaagcgcccagggtcggggaagggggcagcggttgatggcattgaggttgaatgatgcctcttcttcgctctgacccccagacaggaaggtcactcctgggacagctgggggcacagtgcgacgcagggcagtgacagttgccatggcaatctcctctggggtatacttgatgggacaggcatggcccggggtcaccatgttgggcttgagcagggtcccctccaggtatacatgatggtcactcagggccttgtacacagcagccaagaccttctctgtaacatactgacaacgtttgaggtcgtggtctccatcaggcaatatttcaggttccacaataggcacaatgccattctgctggcagatactggcataacgggccagcacgttggcgttctccagaatggcaagtgcagagggtgtacgctcactgattttcagcacacagcgccacttggcaaagtcagcaccatccttcttgtattgggcacagcgttctgagagcccatccagcccttgagtggtggtttctccatcagtcccagctagaggcaccacacccttgtcaaccttgatgcccacgacgatgcccttatcctggatggttcggacgaagggaacaccattatcatctttctggtagagggtctcatggaagaaaatgacgcctccaatgcactttttcacacggtcatcagcactgaacaggacctggcggtacagccggcggttctcctctgtgttttccaccccaatttggctcagccgcttggccatgctgcctacagactcatccgcagccagaatgcctttgcccggggctacaatccgcagggcaatgtcagacaactccttcttctgctcagcagaaagggctgggtacgagtgaggcatggtgacagctccctgtgcgcagccagttagcagccgcagccacaagcacagctcgggttctgatccgcaaacagatgaggctgcagccctggctccctctggtaaaaaat

SEQ ID NO: 320164 - DNA, 614 bp, Homo Sapiens
ggacagtgtctgagttttcatcggtcttcacatgctgctatatattccacagagttccttgcatgtactgagcttttgttttagatggaatagcacaaggagaaaaatctttaaacttagtgctttgtctattctttatttctctcagggtggccagtattttgacttatttatcctgcttgaaagctacttgagatgtgtactgctattctaaacacgtgatctagtttctttcatctctggcataagattatataacttaatgttaagtgtcttgaggcataaaagacaaaatgtggcttattttaggatctgttttttcatcgaggtctcgggtatcctttcaaagatagtgagaagcagacactgctccttgtgcagctctggtacctcctgcccactgctgtcacttcaagccactggcaatgcttctgtcctcgtgtcttggaggaaaatcacctggggggaggggacttcttgtggtaagagcaagtgcaggtatgaaatgcgaagattgccccagctaaaagtggacaagtccgctttgtgagatgaatacttcctgagaaacttgacaagtatctctccattttaccattatgaaaactatcatt

SEQ ID NO: 320165 - DNA, 865 bp, Homo Sapiens
aggtaggccctttgctgtcacataggcgatcggcagagccctggagcagcaggaaagggcacagtcagcttggggaggcgcgctccacccgtgagacggcattcagcagttggatgccgaagcacaccttcagccctgcccggcagatcagggggtctgagttataaatgtcgacctctgtcttattccgagagagcacgctggagtcgatgggcccgagggacaagtttggcagcacaaggttgagcactttcgcagcaaggaccttgaaagttgttgcagattcaggattggcaagaaccagaggcgaaatgagtaccatgccggcgaagtggcccggcctctctgcggccgtgaggatggcgatggcgcctcccatggagtggcccagaaggaagacaggaagcccagggtagtctttctgcatggaatccacatgctgcaacacatccctgacgaaaacgtggaagtcagacactaccatcctctccccttcgctctgtccgtggccaacatggtcgtgggcgaacaccagcaggtccagccccatcagcatccgagccagctcttcatagcggccactgtgctctccggctccatgggacacaaagatgagggccttgggtgtgcctgtgggtttccagtacctgcagaagaggtactgtccgtctgcattgaccaggtgagggaggtcctggtagggaatgctctgcggggtccgcctgggggaactttcctctggcatgctggaagggtcttcaggtccggggccacgagcgccgctgtcgcgttccccgagcgcagcggatcctcgtttgcggcgggccagggccgggacgagctgcgcgcgaccggcttcgcggcg

SEQ ID NO: 320166 - DNA, 727 bp, Homo Sapiens
ggaaacaatggaactagcactgtttgggaacttctgtaatctcacagaggacaacagatctaactgaatgttttcaagggaaaataaaaaggtctgttccatgttaaacctgggagcttttagcgtgaaggaactgagccgaaagatggtttaacgcttgcactctaagagagccaggattctaactgaaggtgcagaccagctgccccatctctttgcagagctgaacaggagaaaatccttgtaagtgggagagatgcagactagattcagaaggatcttcccctggaaggatgcgagcaccaagagaatgccagaatttatacatttttctcctctgaaaccatacaaagggagggaatgggagaaggcggggagcgagcacgtgctggaaacccaccttttgccagttggccacggacagagcgaaggggagaggatggtagtgtctgacttccacgttttcgtcagggatgtgttgcagccatgtggattccatgcagaaagactaccctggggcttccctgtcttccttctgggccactccatgggaagggcgccattcgccatcctcacggccgcagagagggccgggccaccttcgcccggcatggtactcatttcgcctctggttcttgccaatcctgaatctgcaacaactttcaaggtccttgctgcgaaagtgctcaaccttgtgctgccaaacttgtccctcgggcccatcgac

SEQ ID NO: 320167 - DNA, 1110 bp, Homo Sapiens
  misc_feature (96)..(97): n is a, c, g, or t
  misc_feature (167)..(167): n is a, c, g, or t
  misc_feature (172)..(172): n is a, c, g, or t
  misc_feature (174)..(205): n is a, c, g, or t
  misc_feature (208)..(285): n is a, c, g, or t
  misc_feature (419)..(419): n is a, c, g, or t
  misc_feature (429)..(429): n is a, c, g, or t
aaattcccaaaccccccctttgtttttttgggccccggggttttctctttgggagaaaccaagagttttgggcccccgggttccccctttcccttnngggggggccgcgggcgccacaacgaaaaggtttttagaaaaattttttggaagggcgcgagccgggcccncccangnnnnnnnnnnnnnnnnnnnnnnnnnnnnnnnnggnnnnnnnnnnnnnnnnnnnnnnnnnnnnnnnnnnnnnnnnnnnnnnnnnnnnnnnnnnnnnnnnnnnnnnnnnnnnnntttttggagttccagtgggcttttattgagataaattaccaaaaaccaagatttttaccatatttttggaaccttataaactcagcagacttcggtccatatatgcgtacatacaccataacacatcccaacanaaaacagagncccccccgccccactggaccatctgccaattaagagaaagccaattttcccttcccccaatgtttctgaaattttgagttcccactgttcacttctcagtggaactggtcccttgtggctagggacattggaattctctaccatttttactgaacaaaaaataattttttttcctgtttcaaaaaagggaatagtgactttgttttctccaggctccccttcccccacaaccaatgtaaaatacagcagcctgtatcttaataacccagccctaccccctcccttacccagcattgtctactggagaatttaaatacacttctgttggaatctgtcagctgtggatgggcagagtccaggtgccaggctagctccctctgacctcatgaactgtgacaacctttggacacttaactctttaccccaaagatgagtttttagatcagaaaggagagcagattttctttgggagttttaaaaaactatctttagatttagagatacaaagtacaactacaatctcacagaagtccactaaagttcaccaaaaagctgacttacttcagctctcatgaggccaataattttgataaaggtatctggcaggaaaatgattccacaataacaaatttaaagatacctagaacattgaaaaaaatagcaaattaaaataaatggctt

SEQ ID NO: 320168 - DNA, 541 bp, Homo Sapiens
ttggagtttactgacggcagcagttaatagcacagtcaacagcatttaaatcaaatatattattaccagccaacagcaaacagcccgagcaggaatcggcacatagtcataaataacatcaggggtaaataacggcacatttaattaaacaacaaagattttacagaatggttttgatctgaaaaaagatgaaaactctctttgttcccaaataatggttagaacctctttttattatagaaaagcctcaaaatcattggtaatcttcaagtcacacaattcaactgtcttgtttcattttagtcacacaaagcgggctgctctttgaataaagttatcttgattgatttcagttaaaacgtgtctaccctgtaatatctttggggataatgctgctcctgtgcagcatcttacaaatgctacctgtctccatgggcttgctagatccacggcgtagggaaactggctcactcaggcatcctccccatgggaaggctcaaggcatggggaacagcttcggggcctgggtgcagctaaggga

SEQ ID NO: 320169 - DNA, 1314 bp, Homo Sapiens
  misc_feature (92)..(122): n is a, c, g, or t
  misc_feature (125)..(180): n is a, c, g, or t
ggcccctgtttccctttcccttagggggccccgccgccccaacgaaaggtttttgaaaggtttttcaggggccggaggcgggcccaccaagnnnnnnnnnnnnnnnnnnnnnnnnnnnnnnnggnnnnnnnnnnnnnnnnnnnnnnnnnnnnnnnnnnnnnnnnnnnnnnnnnnnnnnnntttgaagggcttaccttattttaattaaaaagaagtcggggctaccaggggtttcagacgtgctcgatggacacgtgatttgtaaacagccaagattctgggggacgggggggtgcctcggtggggttgacatttgagttacagggacttaataatggccagcctttcacatcccatgggaaaccgcccccccgggccttggagaatgggggtccaagtgcctatccccctttggatgtaaaattcatcgttagtaaacatcatccgcccagcaacaagcaaagcacatcgcaagattaaaacaaagaatccgccgtgaacagaaggcctccatctctgctctcaggcaggtgtccttcagggaggagcctcaggcagctgttctaaccctgctgccaacgcctgggctgtttctgccgacaatcttctatttctctaaaagagtacgctgaacagctggctctgcgttggcattccggtggctctccatgtccacctccccttgttctgcattttctttgaagcatagcttctttttctggtaagcaatgaagctagagatggctccagccacggcgaccacgacagcccccacaatcccggggatcacgcctggggcgtcggcctcttccccttctttcctgtggctgcctccaccatcactgcctccttttccttctccacctgaaacgccatccgcaaggtcagcatctgaaaagctaccggaggaactagggtggttggggtttggatttggcatcggtttgggtgggttcggtggtcgtgggtcgtcattttctccatcaacaacagcatctcctaagtcaaagtcatccccagcactgggtttcttggggattgcagtgggtttcttgttttcattgtcaggaaggacatcggataaatcgaaaccaccatccggggcggcgaccagaacacccagcaggccgaagagcagcagcgccagcgcagccccgcgggccatggtgcgcccagagcgcgcagggacggtcccggagtgcagggcgtgggcgaaggcggcaggacagatactcccccacgggccgggtggggcgaagcccgaggactcgaagggggcgggtgaggggagcggccctgcaagctcagcgcccc

SEQ ID NO: 320170 - DNA, 2911 bp, Homo Sapiens
  misc_feature (29)..(29): n is a, c, g, or t
  misc_feature (58)..(58): n is a, c, g, or t
  misc_feature (93)..(93): n is a, c, g, or t
  misc_feature (118)..(118): n is a, c, g, or t
  misc_feature (126)..(126): n is a, c, g, or t
  misc_feature (217)..(217): n is a, c, g, or t
  misc_feature (243)..(243): n is a, c, g, or t
  misc_feature (247)..(247): n is a, c, g, or t
  misc_feature (277)..(277): n is a, c, g, or t
  misc_feature (288)..(288): n is a, c, g, or t
  misc_feature (346)..(346): n is a, c, g, or t
  misc_feature (350)..(350): n is a, c, g, or t
  misc_feature (577)..(577): n is a, c, g, or t
  misc_feature (582)..(582): n is a, c, g, or t
  misc_feature (645)..(645): n is a, c, g, or t
  misc_feature (659)..(659): n is a, c, g, or t
  misc_feature (726)..(726): n is a, c, g, or t
  misc_feature (735)..(735): n is a, c, g, or t
  misc_feature (1041)..(1111): n is a, c, g, or t
aaagttgtcagaggttccagtcatgacgnaggtctgtgaagtacgtggtactgtgggnggccctcgttgactcacgttgccctgcatccaacncccgtggatggactggaccttagcnagacgtcnaggagcggcggtagggatgcagtgtcggccgggaggtaccggggcatggcgccgtgctgctgcctaagccggtgcgacccgcattcctacntctgccgtggtcactgcgtccggcanatangcctggaatccaaccgccgatggcgtgcgntgtcctctcanagcatgccggcgcagtaccggcctacggcacgatacggtatcgtgtgctcgtggagangganacgcagcggagcgcgagacgtgtcgatcatggtgagaagtcatgcgcgtaggtggggtgtacgtcgttgggctgcgatagcacggacgggccgcgctgacagggtcgagcgcgtgcgatagttatacacgctgtcgtgcggcatgccgtggcggccatgttgatattaaagcaagtagacgtagacgatatatgcgggggaggcgccaggtctcactgcggaagacnagtcngcctcgtcgccgtgacgcgccaggacgcgcgggcgtcataagcagcgcagaatgtagcagtgncgtgcgtgaggcgngggagcggacgcagcgggggtgcagcgtctggtaggcaagtgcggtgcgtggcggtgacgagggagngagcgcgcncgccggacgcgacggccgatctcgtatagacagattcttaccgcgagccaagaccggcgcgcgcgtgcggcggtcgacgaagcagccgttcgcgccgcttccgtacgtgggcgcgagaaaagagaggggatgggaacgcgggaagaccgcgacgacccactcctatcgcctcggtgctggggagcggagacgaggaggacagaggaggggcgaggaggttagagaaatgcgaagggggcaccggtgggcgccattcctcggtgaagagggggcgcgcgggaaggggacgccaacgagagggcgctnnnnnnnnnnnnnnnnnnnnnnnnnnnnnnnnnnnnnnnnnnnnnnnnnnnnnnnnnnnnnnnnnnnnnnnagccagcgtgccgtgtccggggggcttgcttagcgaacgcggctggggtcgcggttgggctctctcctgggggggcccgggccaacaccaaatgtttgtgaagcttttttgggggcgcgaggcgccgcccaggattgattccagcacgcctcggcggccgcagagcggcacgggagcccgaggggactgtttgccgtgatgcaggtggtttttttgctaatcaaatactgcagtactgatttaatcagtataaaatcgaaagagctttagatctgtaataaaaatccaaatttggggaagggcaaactttaaaacagcagccaagtagagaagggttggggaagggagaggtgagtgaacaggcacattggaactgtggggacatgtaactgaccactgtcaaaccagtgtaagtttcttggtttctcatggaaaacattttatacacctatttttcttccttccatacttaagtccatcagtgtccaaatacgtctgttccattttttgtctgatttttgttggggatattacaacacagtattgcatttactccagttcctgctccatgtgaaaaaattagatgatttcaaatactttcttcagctccacaataagctgccagtcactcttctgcatttcatctctgaaccagtctttgagtgcatcaatggactgccggctgatcttactaacaagaatatctgtagcttcaaaatgtcttccaaacattttgggtgactcaccagggataggttctatttttacacaaacttcttgtcctttttttgcaacatccacttgtttatggtttatttcaatacttgttactattccgatgtcaacaaaattttgcttgggacacacatgggtgtcccctgtttcacctgacctgcttccaccgtcacccccatcactatcggatctcgagaattaaaaatgtactgagggaggatttttatcttgcagggaaatactgctatgtgcttaaattcttcttgtttctgtttcttgtagtcttgtctatattttgtaaaggcatcaaataaatgataaataatttctgcactaaaaattctaactcctaaactatcagccatttcttgtgcatctcgttcaattctcacatcgaaggccaaaattactgcatactgagggtcatgttccaacatcactgaagccttcataacatcttttttatgcactgggccaatgttaattcctgcatagggcacttctgatgttttcagaaattccagtagagcttccaaagaacccagtgtagatgcctggacatagactcctttttcttctaatttgatagcatttagtgtctgctttaactcatggatcaattcatctttaagaacagggatttcatcttctttataagccacaaggaggggtaaaccagccaatgttttctccaggtcttttccaagaatctttaccccctgagctgcttctacttctttatgcttttcatactggttcttcactcgtaattccttcataggaggaggtaacaggaggcctcgaatctgagttacaatgggcccttctactccaggaacaatgattgtatctccttccttcaaacgcccattgatcaagatgacatctatagtggtgcccatccccgggagagctttaacctccatcacctgtgctctcagctcttcacagtgtgcaagtctcttgctcaacatggtctgagttaactctacaagaaggtagatcagacttcccatgcccgacgcgtgggtcgacgatatcccgagattccggaccgtaccagcc

SEQ ID NO: 320171 - DNA, 908 bp, Homo Sapiens
ggaacagcagacttgctgttttcacttggtatcctggagttgggttgctaaccttaatttctatgatgttttctaaaatgaaacttgataaagtagaccaccagctgcaccgtgttttctgtaaaagtattgttagtaagtggccaagagacttgaggaaaatacagattttttgtttaccttggtcttgttttaagtcttaaaaaattaaagataacattataatgtagaatacagatgggacatagtccttgtaagtttcccttgaaaatgttttaaatatttaggaagcttttaaaagacactaaattgtactctaaaagacactaaattgtactaattgtacaaaggtcaagccaattttatgaaacagtcctacagagtaatatatgtgatgcagtgtaagaaggaaaatacttatctctaacattatggtaataatatttagcctcttaggagttggagcagggggatgggtaattacagatttgcagactatagaaagagtttcatttttttgtgaccccacagagtctcaaatttttatttcactacctgctagagcctactgtgaaatcactgctccatatttgccagtggaggaaatgggcatagagtagagaatagcttcatatgtttacacgtttgcatagactacacacatgtcatgcgtttatggcaggtagctggtatttattcccccaaagtaataatgttgaaagtatggggtctcatcattcccatatacagaaacacaaaacactttgatcgtaaacttttttcttcagaagccaaattaacttgcagaataatagagccactggtttaatgtttcctcaagataggttttagtgtaagctagtattctgtgtgttcgtagaaatgattcaatacctgcagctggtgaa

SEQ ID NO: 320172 - DNA, 878 bp, Homo Sapiens
  misc_feature (196)..(196): n is a, c, g, or t
  misc_feature (343)..(343): n is a, c, g, or t
cttagaggggccctttggggaaaaagaatggaggggcgctttcttgggccctggggggctggggcccccgcgcctttccccctttttgggaacccctttgggttcccccttttggttccggatggatggatgaaccaaaatgccaggccctggttggtggggagccagcccgtgcccttgcaccctctttttcccntagtcatccacctttttccatgaggttcttgtgcgagtcacccccattccctgggtgagggttagaatgaccggtggtgatttcttcccccgcagcactccaagtggatgaagagcagctcctgcccgctgctggcagcctcaggcncaggggcctccaccccggcagaggctgagccaagctcgccattcgccctgggctggatctcagctccggaaggagacgtcgagaagaggctgccaaagagcctggaggggccacttcagagcagcgccttgaagaggaaggagagggaggctccacaggaaagtcccagggccaggaagaaggtcatgagggcgccggccacctccctctcgtgtggcagcacctgcctgggcgccaggcacatggtgagggacaccaggtagccattagaaacggcaaagagcagcatgaaggtgatgaagtaggcatcctgtgggaagaggatgggcagccgggacctctggggcacgtggcacagcatgaagaggggcacgaacaggaaccgcaggcagaccagcaggggcagcagccggctgtcctcgtctggccacaggaagtaagaggtcaggctccgtcccagccagtccatgatgttgaagaggaggaagcagcagatggggttgaagaactgactccacttcccaggactggtgga

SEQ ID NO: 320173 - DNA, 709 bp, Homo Sapiens
tgtaagttttcatcagtagcttaagtactagtagcaaaaacttaaattcattcagaaagttgccacttctgaatgagtagagcaggaaaagtaaactttactgaaacataatttgctgcaacagtcaacattgttatgctgaatgtgctctcaactgccctttgctcatcgccagatttattatccagtgtattcctaacagtcttttgttgtcgttgtttttaaaacaacggtacggaccatgtgctatatataaatcgaatggcttaaactaatttgctatgatcctctaacaccgaaatttcccataaacttaagtgcctacacttaggacttttgaactttcagtcatctttttcgtggtgtctcactgaacgatgtgttagaacatgtgttccatttggagttttgggcctgtgcacggtcaaccccaattaccaatttagttgaggctggattcgattgctcagttcacctgccacgttctctccaaggagtggggtctacgtgacctttagtcctctacctcagagccccgagtcatttctgaccaccccgttctgtgtcctcactcttgtccctgaatgggtccctgtgtggatctcagtgtgtgtgtggtttctccactcctccccgctcatgtcccacacctgccatattgaaccgtttctgcactaatcttctccacgggcacggagtggagggaacg

SEQ ID NO: 320174 - DNA, 1185 bp, Homo Sapiens
tttttttccccccagaaggagaaaaagggggctcgaggttgcgggaactgctgggtaaaaggcggcaggtggggaggcggtttttgttagccagtcgggggcagaaatttattttcagaataattcccagaagcgcagttggaggttactctggggaagcttccctcccgttcctgttcctcctctccttcctctctgaatgccagggagaacacagttgaaggaaggaaacatgcaatcacaaacaatgaacaactctaaagacaaaaaggtttggtccaaaagaactcaacataattaatccaatgactgtgaagagcttcactgagtaggattaagatattgcagatgtagtgtttccacagggtggctcttcagtgcaccagcggggcctgcttgagggagatgaggactgagcgcatgcgggagacatctttggcctgcttgctagacttggggttaaagtcacacagccgggccacccgttcccactcagtgcctggggacgactcgtcaatgtcatttacaaaggcttcttctgctgccctgttgtttgcttttgttttctgtagctgctcgtcctgtcttgcataccattcttctagctcctttattgccttttctttccactctgcttcttgcttccgagaattggcatcaagggcttccaagcgttccatttgttcttctctccatttacggatactttcaggctctgactgcaatcgatccacttgtgaaatagctgcataactgtctgttggaccattactttcctggtagtattcaccattcattactccatcaacagcatccggaccccccggcggctcgccgtgcggctggggcccgggggcgccgccgtccaggatggcgaaggcctcgtcgttctcgatgcccgcaatctcgctctcttgctgcgccaagaaggccgcagccgggtcttcttcgccggcgccggccactccgttccccagcgcgggaccgccaggggcgccggcaggggcgccgaacggatccagctcagccatggcgggcaactgaacggcacggacaccaacggtgagacaaaaaccaaccgacccaccgacaccacgcccggcagccaccgctgtggtgccgactgggagaggaggacaagcgccaggagggagacgggtaaagcggaagccctacccgtgtatc

SEQ ID NO: 320175 - DNA, 960 bp, Homo Sapiens
aggaagtacagacgtgaagcctagcagaggactttttagctgctcactggccccgcttgtctggccgactcatccgcccgcgacccctaatcccctctgcctgccccaagatgctgaagccagccctggagccccgagggggcttctccttcgagaactgccaaagaaatgcatcattggaacgcgtcctcccggggctcaaggtccctcacgcacgcaagaccgggaccaccatcgcgggcctggtgttccaagacggggtcattctgggcgccgatacgcgagccactaacgattcggtcgtggcggacaagagctgcgagaagatccacttcatcgcccccaaaatctactgctgtggggctggagtagccgcggacgccgagatgaccacacggatggtggcgtccaagatggagctacacgcgttatctacgggccgcgagccccgcgtggccacggtcactcgcatcctgcgccagacgctcttcaggtaccagggccacgtgggtgcatcgctgatcgtgggcggcgtagacctgactggaccgcagctctacggtgtgcatccccatggctcctacagccgtctgcccttcacagccctgggctctggtcaggacgcggccctggcggtgctagaagaccggttccagccgaacatgacgctggaggctgctcaggggctgctggtggaagccgtcaccgccgggatcttgggtgacctgggctccgggggcaatgtggacgcatgtgtgatcacaaagactggcgccaagctgctgcggacactgagctcacccacagagcccgtgaagaggtctggccgctaccactttgtgcctggaaccacagctgtcctgacccagacagtgaagccactaaccctggagctagtggaggaaactgtgcaggctatggaggtggagtaagctgaggcttagagcttggaacaagggg

SEQ ID NO: 320176 - DNA, 819 bp, Homo Sapiens
  misc_feature (20)..(20): n is a, c, g, or t
  misc_feature (40)..(41): n is a, c, g, or t
  misc_feature (49)..(49): n is a, c, g, or t
  misc_feature (54)..(54): n is a, c, g, or t
tgaccagttctcatcccagnctgatccctgtgcagcagtnncatgaggnaaatnccaaggagcgctcatgggcactcatctcaggggtacaggctgcccacttttcttatacacatccacattgccatgagagagggcatgctcatagcggtgtagcgtggcctgcagcaggctcagcgagtacaccagtccagcagcaaagctgagttgctccccagcagctcctcgcagcccaggccgctctgaacagttctcacttagttcaaacttctcctgggcctgcttccggatcagctctgccttgcaaatgagacgaggcatgagcaacagcaccagaacgcagtcatggtccccacctggccgaaggaagctgtcaggcatgaaggctgtcagcagggacatgtgtcgattggcctgggccacctccatctgcctcaattccatctcaattgccttggcatgggccttagtctcagcaaacttgattttgaagtcaaaggtctctggaggtggctgctgttgcctctccacagatgcttcctgctggtttgtcagttcccgattcacatcctgtagatgggcggtcagctggcggtacttcttgatggtctgctggtagtctgcaaccgtctcctgggctgcctccacacgcttctgggcctcacgaacccgcgcgcctgccatgtccagctgctcccgcagctccagttctgtctcacgtgcattctcctgcagctcatcgttcatctcattcatcgcttccaagtctcccacagtctccctcaactcgcgcactttctcttccagattcaggttccc

SEQ ID NO: 320177 - DNA, 986 bp, Homo Sapiens
  misc_feature (718)..(718): n is a, c, g, or t
ttaacttacatttttaataatattatttttaaaaaaacttggagctgggataagtggcagcagggaggaggggcccagagctttacccctctattaccagctgcctaggggaaggagcattcaacgaagccccgtaactttaagtccctaagggctgtgggtatagacaaccccaggcttgaaaggggtaaagtcagggggatgggaaacccacaatctggggtgaagatggaggcaaatgccctggggggtggtcaggacatgtctcagaggcccaggttccaagtaggcatccacatgagtaccccctccccctaaaaggctctgtagaggccaggcccagcccagggccactgggggggcaaatcttggcacctgcccccagagagtccagttcctccctgaagcgggtggatggaggctgcccattttagatgctcagtctcttcattctgtcttctgctccctggggctgtgaggggtggggcaggtaggcagagcactgggtggccacagcagggccttttactgggaggcctgtgacgtggggttctccgatttgctttcttggctggacggaggcttgctgttccaggggctgttggcgcccagtgcaggggagttgttaaagctgtcctcgtcgtcaatgccgttggctgcgtcaaactgggtgttctccagccgggtgatgagcctctcgtcctcgtccccgaactcncccgcccatcagggtgggctcccccaccaccatcacatcctgagagtggcggaggtccccaaacataatcggggcaagggctcgcccggcccagggcggcagatacccccagagccccagtacccaccctggaagctcaagagtccccaccccctcctcatacccgaatttaaaccccaactcctgacaccctcagctcctggaatccttcctactgaagaacaccagagcatcaaagcctttagcccatatccattacattctagat

SEQ ID NO: 320178 - DNA, 451 bp, Homo Sapiens
cttccgccaccttgatcttcaccagaccattcttctcggctcccgccagggacatggccgccccagacgccgcgttcatcggctgcttctcgggctctaactcattcagctccacctccttcatatccacctcggtgtcctggctcatggtgcctgagtcgtcccccgcgctgagaccctggacaccagcctccgaatgtgagccaggcaactggcgcggaatcgacacgacggcgatcgaggcttcaggaggctgtagctccatggaggcggatcctgcacacaggtttggggtgtgtgggcaaggggcagctcagaacagggttagggggtaggcagtcgtgaccgtcagtccaggatcgccgtgaggcagtgatctcaccgctcctgccacatgcactgggtgagaaaaccaagccgcaatgcggtcggtgagccagcacgctcccgt

SEQ ID NO: 320179 - DNA, 760 bp, Homo Sapiens
acccggattttccaaagagaaccgttccaaaaaatctttccccggggggccccaaaaaattgggggtttgaattttccaaccaagctcattttgaaggggaaatcaatcccttttgggtttttggggaaattggggcccaagcccaagggcccttcaccttttaaaagaagctccgggtaaatggagacggcccctttaagaccccgcccaggttgcccgcgccgtggccctggaaaggcctgaaggttcgccgatgcggtagagggcgcccgtgtgccaccacttctgcgccggtagctcgcgacaacgcggcgctcgcacgattatgaccacggcaccagcaagcatgccgagccagccgagccagaagagcagcagcagtgcccagcgggtgcgtacccagccggggctgcctgccaccttcagcagctcctccttggacaggcccgtgaacttagccgcggctgccgcctccgcctcgtcttccgccaccttgatcttcaccagaccattcttctcggctcccgccagggacatggccgccccagacgccgcgttcatcggctgcttctcgggctctaactcattcagctccacctccttcatatccacctcggtgtcctggctcatggtgcctgcagaaccggcgacacgacgcagcttgcggtcagatggtggctcaacccctacctggaccctcggacccagaacgctctccccggcctctgtgcctccgcgcagtttcggctactgcatctg

SEQ ID NO: 320180 - DNA, 774 bp, Homo Sapiens
ggtccagatctcccgtgtgctccacccgccaccacttcatccaggagcaggtcccgccaaaggggcatccaccgagatgactgtggtcagatctgggagcctctgactcttcaaggcccctggctgggcattctcccacttctggacagatctgcttcaggacgttgtagtattgctggcgtcttgaattgcttggggaacacaagggccttgcagcccaccttcttgaggacatactccagttccatagcctggtaggctgggttcacagacaccagaatgatgcccgcctgggcggtggccaactgcatgagcacccatgcataggagttaggtccccacatgcccagccggtcacctttgcagaggccaatgctcaggaggccagaagcagctttgtccacctcctccttgagttgggcaaaggtcaacctgacgtcttcatggaggacgaccaaggcctctcgttctgggaccctctgtgctgtggtctccaggcactggcccacagtcttgctgttaagatgctttttggtgcacccctgaacgtagctgaggcctccgatgggcgtggagaccatgcgatccacctctctggaactgaggaagcggacaccctgcaacctggcttcctgccaactccgagagagggcggcccgggcccccagcacccccgagctcccggcgcacagcctccccaggcgcagcatcccgacgtagacagccatggctcgctttgccctgcgtcccggcccgagtaaacttttaaagtga

SEQ ID NO: 320181 - DNA, 457 bp, Homo Sapiens
ccgtagggcggatgaggaggggtttttttccaagtgttcaggtttactgagagcattaggggcaacaagggagccctgggcatctggggacaaggcctggcatttgcctggacagtggccctgcaagcagccaaggatggggtctccaccacctggtttacttgaaagtgtggctctcggctccgccccgcccaaagcctttaggcccaaacatggctgcgtagcaggggtggttgcagtagggtttgccttcgtgctcagcgtggcccccagaggtcagcgtcttcccacatttctcgcacttcaggcagggccgatgccagtccttgcccagagaggtcaccctctcggcgaagtacacctccttgttgcacttgggacacttgggcatggcggctccgggtccggtgcaggcggcagcggctggggcggcacgggctgcaggcgcgagactccc

SEQ ID NO: 320182 - DNA, 545 bp, Homo Sapiens
aatcttgttgcctctgagtagtagactcttcaattctggaatttggttgccgaagactctaaaggagagactcactcagtaattcagtgactttagaagcaagctgagtatctcattctaaaatgacactgatttacactgttgagaatggttaagtacgtggggtaccttgcagcaaaagacaaaaagcaaaaagccagtagacctgcaattcacagctattcctgaggggtgcacattgcagcccactcttgagctccccagtgttctgagcaggggacagggcatacttctagtgatttgctcagtttaatcccttcatccaagaaaacagaccttccccaaccacacctgcagggttacttcagacaaccagcttctcattttagagtcaccagttcttagaattggagaaaggaagttcccctttaagccctaggtcctgcccactagagcagatacgcaactttaaagagtacaaattcaagtcagattttcatatttagcaggtgatcttacaaagatatttttcaataaatggatta

SEQ ID NO: 320183 - DNA, 581 bp, Homo Sapiens
  misc_feature (50)..(50): n is a, c, g, or t
  misc_feature (71)..(71): n is a, c, g, or t
  misc_feature (92)..(92): n is a, c, g, or t
  misc_feature (114)..(114): n is a, c, g, or t
tctggagctccccccagtggtcctgaagcaggggggacgggggcaatacntcctaggggattttgcctcangtttaaatccccttccatccnaagaaaaacagaccttcccccnaaccaacacctggcagggttaccttccagacaacccagcttcctcattttaagagtccccagttccctagaattggagaaaggaagttcccctttaagcccctaggtccctgccccactagagcagatacgcaacattaaagagtgcaaattcaagtcagtttttcatatttagcaaacatccattgcacccttataaggtcctcgactttaagaaatttatatgaaatcggaaaacttaaatcttgaaactatacaaggatctactggaagcatcagcaggctaaactcatcacatggtattttcattccaaatttagtgttattgatcagtgtaccctcagaatatccttaagaagcaggaaggaaacaagttttcctcttcccacttccaagactgagaaagagtccagatgagctggtttgcccaagcaattcttatcaccagaatctccgttattaaacgtg

SEQ ID NO: 320184 - DNA, 644 bp, Homo Sapiens
aggaaatttggaaaatgcctttgttctttataataaatttataaccttatttgtagaaaagcttcctaaccatcgagattaccagcaatgtgcagtacctgaaaagcaggatattatgaagaaactgaaggagattgcattcccaaggacagatgaattgaaaaacgaccttttaaagaaatataacgtagaataccaagaatatttgcaaagcaaaatttagtggttgaaggactgcgatgtgtagttttgccagaagatctttgccacaaatttctgcaactggcagaatctaatacagtgagaggaatagaaacctgtggaatactctgtggaaaactgacacataatgaatttactattacccatgtaattgtgccaaagcagtctgcgggaccagactattgtgacatggagaatgtagaggaattattcaatgttcaggatcaacatgatctcctcactctaggatggatccatacacatcccactcaaactgcatttttatccagcgttgatcttcacactcactgttcctatcaactcatgttgccagaggcattgccattgtttgctcaccaaagcataaagacactggcatcttcaggctcaccaatgctggcatgcttgaggtttctgcttgt

SEQ ID NO: 320185 - DNA, 2475 bp, Homo Sapiens
  misc_feature (100)..(161): n is a, c, g, or t
  misc_feature (275)..(365): n is a, c, g, or t
  misc_feature (401)..(402): n is a, c, g, or t
  misc_feature (414)..(414): n is a, c, g, or t
  misc_feature (436)..(439): n is a, c, g, or t
  misc_feature (441)..(444): n is a, c, g, or t
  misc_feature (448)..(605): n is a, c, g, or t
ttgtgtgtgccgcgcttttgtgcctcgcgggtgggtcggcgcggcagtttcggtgctttgtggtggcgctcggtgtctttgccgcgcggccggttttgtnnnnnnnnnnnnnnnnnnnnnnnnnnnnnnnnnnnnnnnnnnnnnnnnnnnnnnnnnnnnnngccgcgttggtcccggtcgcccgctgtttttgtgggggtgtcgcttgggcccgtgtcgggcctgggccgcggccgtcttgcccgcgcggcccggtgtggtctggttttgttggnnnnnnnnnnnnnnnnnnnnnnnnnnnnnnnnnnnnnnnnnnnnnnnnnnnnnnnnnnnnnnnnnnnnnnnnnnnnnnnnnnnnnnnnnnncccggtgcccttgcgcggcttgcgggttcgcccgcnncctccgtccttncccctttcttttttttggcgcnnnntnnnntccnnnnnnnnnnnnnnnnnnnnnnnnnnnnnnnnnnnnnnnnnnnnnnnnnnnnnnnnnnnnnnnnnnnnnnnnnnnnnnnnnnnnnnnnnnnnnnnnnnnnnnnnnnnnnnnnnnnnnnnnnnnnnnnnnnnnnnnnnnnnnnnnnnnnnnnnnnnnnngaagagaacgtcagtttaataaagctaaatggggagaattgaagtttgcatttgacatggtattaaacaaaaccaaagggctgaaactcatgtttagacaacacaggtcactagtcactaggcaaagaaaacagtccacagcaggtggcacaaataattcctatacaaaacaaatgttgcaaatattctgcttttaggaaacatgaaacaagggctgacatgtcatttacaaacacataatataaaaatgcacagccccattggaacaaaactccagcaaatgttttatagctgacttccctcagacccacccccacaagaggccattctgtgaattactagcatctgccatttcatcttttaaaattaaaagaatgacgggcacatgtgctgtgcagggtggaagagaagtgtcatacaaaaaggggccggagctggccagaaacatttggacaactgtgtctcaaaaacagtgtgttctcgtttcgcttctgtgcctcagtctttaagatacaaaactatctcaggacaccacatcctgggcccagcctgcagagtggtcacttttctgccactgccctcaatatgagggagcactgaaaggctcttgacttagaaccccttcccctttctgtctaaagccgaggagccatctgtggttgcgagcacgcagcacaccaggcctgtccatccccagtgcactgctgggtggtgggaggtccgccgggccagagtgaagtaaggcatttcctgtctcccagcgtcccgttcactttctcagaaacagcttggcaaaatcggcattggacatcttgggtgcctcggtggctgctggggcggcaactgcaggagccgcggcagggccgttctcagcctgaggagctgcagcacttgggcgctgcagggcacgaggcagtagagacagctgcgtccttcccttccccctcgctccgtatgtctgcggcaaaagcatggggccacctggtgccttcctggtctctggcttctctggaactttcctctgaggagggttgctgattgccactttgatgatgttctctttgatagtcatgccgtccatcttcatcacagcctgcgacgcctgggattcattttcatactccacgtaggccaggccctttggtttgccagcccggttggtgaccagcctgaggtccttcacggtgccatgagccttacagatttcttctagttcctctttagtacaggagaaaggcaggcctgagatgaacagcttgtgtttctctagggaagtgctgtacctgaacaccttaaaatcggggtttttgctcttatccacacagggggaaacaaacattggcctcccttctacacttttccggtccatctccagtgcctgaagggctgatttctcttctttaaactccacgtagcagtaacctcggaaatccccacggttgctgaagatgggtcggatctggaccacctccccacaggcctcgaagagtggcctgagcttcgtgtccggctcctgcatgctgtagggcaggttgctgacaaagacggtgatgctgtccttgctgctgtcgtgcagcaccttgggcatgtccctcttcagggaggctgccttctccttctgcttcgaagggggctccacatctacggcagcacatttcccagcgggccctgctgctacttctacattttgtgtttctccagctgcagggatgctgttctcgacccttctgcgtttggaaggctgctcttcttcatcatcgccccactctttctcatcgtcctcatctgctccgcgcttctctgggcctctgatctttttcttcttttttaacgctttcttctcagcccgagctcttttccgttgttcagc

SEQ ID NO: 320186 - DNA, 822 bp, Homo Sapiens
  misc_feature (23)..(23): n is a, c, g, or t
  misc_feature (44)..(44): n is a, c, g, or t
  misc_feature (108)..(108): n is a, c, g, or t
  misc_feature (201)..(219): n is a, c, g, or t
  misc_feature (321)..(321): n is a, c, g, or t
attcaaaaccccccaaccccccnacagtccagactgaaaaactnaacaaagaaggtgtctgtggtgaaagaacgttaataaaaccttaaatagggccctgagagtttntccccttatgccttaggtgaaaaaggcaatgaacaagatgctctcgttctttaagtgctttgtgcaacaacgtccgtgtcgatgccgaaatcnnnnnnnnnnnnnnnnnnnggaggaatcttttggacggaggcaaaagtcttcctccagagttccagtctcagaagtttcgatttccgccggtggtgacgctccagtttaccctacggtgantcacacgtgtgctgatatacctcttgtgcccacgttcctccttggggtcagtcctgcagacctgcatcaaaatgctttcagagagtctgtggactttggggaggtgtcatctgggtgaaatgctggggctagggaaggagcccgaattccttggtgactgcaaagggatggcggaggatgtgggggatctcttggggctacacaggtccccattgtgcagtttccacagaagctcctcgttttccatagagagtcgcttgttgactttcgactccttctccagcgactcttgcagaacagcctgctccgtggaaagctgccttgagattgccatgtgcttgtccatccgagctttcaattcttcattctcctgctggaaacgcttcaatttgtcaaccaatgctgtgttgttgtccaccagtttctccattttcattaacttgatgtcctgttgatgcagtttctcattcttgatctctaacacagctttcaggctttcta

SEQ ID NO: 320187 - DNA, 1214 bp, Homo Sapiens
ggtatatggcacaagctggcctaatatgcagggaaaggatggtctctacccacacagccagacagtgctttctactttattaaacatcaaagcccaaatagatgttccctgtggaggaggacttaaggacactaggggaggagaaagggacacctgggaagagaatcacaccacagagaccaatcttcacaaaaagggtccaatattgatttctagggaggagcagggcatggtcagctcaaatttggtgataacgtcaggatgaaggaccccaagcttcccgacgctttgacccctggcaaagatctctgcacatcgcccggggaagaaagcaggcccttctgatgctttgatcacatatccccccttgtcttcaccaggaggcacatcgagcaactgcataattctgtccagcagcccatgaatgatctcaaacccaggattcttgttgtaataaacagcacagagatgtctgtagttttttgcacctacatctgtattagaatcttttattacaatgtcagagatttcaaacagtttcagtggaaggggcatcttacgatttgctgctatggtcttcaggaggccaggaagaagggtagtgcgtgccacctgaaattcagctgttttaggattacttatgtggactgcctttgttgcagagatatccacacctagtttatcagcaatatcttcttgggagcacagggcaaaggtaagtgcttcagtgaagccagcggctgccatgtcatgtcggagaagttcagtgagcttattaagaggaaattgattagctatggtgtaagttttcgggagagtcatctgaatgttgttatatccataagcaatagctgcatcttctacaatatcacatgcatggataatgtcagctctggttggagggatttcaatctcaatctgattcccatcacctatgacttctgattttaaatacatcctggtcagaagtttggcaagattttctggagtttctctgattccaacttttttgttaattaggtcagctctcaccatctcctttcggtaagctaattctggaaaggtatgtgattttccattaggaaaaaccacttcagcagcttcgaccgtaaattgattctcacaatattcactgaacatggtgacaataatatcaagaactatttttgccttagtaaagtcagttcccgtgcattcaataaaaatatttctag

SEQ ID NO: 320188 - DNA, 783 bp, Homo Sapiens
cggcatttctttttattgatcttcatgttttcacatcttgagatgcaatttgttagcacaggctgtcattccaagacacacaaatgtcattaaggcaaccgcttaaaggagtgtgatattttattgaggtagacaggacaatagataaatatttaatctgttacatgtttgctctgtgtggagccagggttggggctgcacaactctctggctgctatgtgtcttcctggaaaccctgtcaaaggccttaccgcctgcctggagaaacacagtgcctgcccttggcaaatatatgttggtgtatctgaaaaacagctcctggaagctttttctcattcaggctttaggggttacccatctttccttatgtgtgtaatattggagaatgtacactctcactgaactggggatgtttgacttaaaatgatggacaataagatagtgagcagtaagtgtgctctaggctaggctacgagaggccatgagctcctcatctcttctctgttctgagctctctgatccactgcacttggggcagggggtgcattctctgtgcctctcctgagtctactttctgcatcattggttctcccagctcacttccataatgtcctcctaggctgcattggaattgtgtgttgtctagacccatggccaagactgtcattgcctgtgagggagaccaagctcaccaccaagggcttttgccagattgctttcatttacagaatttgcccattcatgtgtctttgtgtttatggattaaatggctttctgaccagc

SEQ ID NO: 320189 - DNA, 1615 bp, Homo Sapiens
  misc_feature (185)..(194): n is a, c, g, or t
  misc_feature (319)..(429): n is a, c, g, or t
tccgcgcgcgcgcgccagtcaccgcatgcgacacccgctgcccgccagcaggcccgccgccggacggaccccccagaagagatccgccgggcgcggccgccgccctctggcgctcgtctcttcccgcactcccggtggtgctcgccccccccggggcgtgtttttttgtgccgggcgaccgccannnnnnnnnntccgcgcccccgtgggtcttgtttgggtgcgccggcgtggtcgccggcggcgcctccgcctccgggcggccccgccggccgcccacgaaggcgcggggagaagttttccggcgccgcgcagcggnnnnnnnnnnnnnnnnnnnnnnnnnnnnnnnnnnnnnnnnnnnnnnnnnnnnnnnnnnnnnnnnnnnnnnnnnnnnnnnnnnnnnnnnnnnnnnnnnnnnnnnnnnnnnnngggctcccggacctgagcgctcgcgccgccccccctctctccagttttcatcttgttgctttattcagtttgctccgagggcaaaatcaacagtagtagagatcacaaacattattttgattggcctcacaagcctcatcagtaaaacctgaaaaaacagaaaatgttacacaagttgcaaagaaagcactcctggcgttcactgacatgatagcaaatggaaagaatataaatgcaacaggtgttaacatttagaacagtacttgtaaacctgctcatttctagacaagtccgggactctcgctgcgaacccttcatctatcactgctgatttcctttgacatgaaatatgactttatgaaaatcttcctaaacctcactctggctgcacctgagtggttcctattcctacggcgctggcatatgctgtcaggatttccactatctgtttcgtttctagggtcattcgggcttccttcagccagtcctgtgccactcgtctggattccccccttcagctgattgacaaactttgctgctagctcccagatcaccatgctcaatgcaataggaagcatatgacagtaatttaaatgtgtttatatcctcagggcagagctctgggggcggcttcagttgctgaggtgggaataggagcagggactgtaggtaggagaggaagtactggtacaagctatttctggtttcatcaatcattgctacccttcgggccagtttttgaacagcatagaaacgggctctaagggtctcttcactgtacaccccacgggtcagggactctggagggatagctgcggttaaagcttgggtgaattcattatcagaacagttggctttgatggcctcaactgcactacccagcgggatagtaggtgtttctgcagatgaggtcttcatgctgtactttaatgcctccactgaaagccagagttggtgggcttttctggcttcctcttcagcaactgcatggctctgaacagcctgttcgattcctctgagtctggcataggcagtatttatatccagagtaaagttgtcaacttgctcttgactgagacgacgaaattgtaattcttgttcagagagtttctcagacaggttctgctcaaattcagacttcaattcctgttcttgtaccctaaggacatctcgcctgtgccgaaat

SEQ ID NO: 320190 - DNA, 412 bp, Homo Sapiens
  misc_feature (276)..(276): n is a, c, g, or t
  misc_feature (348)..(348): n is a, c, g, or t
  misc_feature (365)..(365): n is a, c, g, or t
  misc_feature (372)..(372): n is a, c, g, or t
  misc_feature (386)..(386): n is a, c, g, or t
  misc_feature (392)..(392): n is a, c, g, or t
aattatcatcttgttgctttattcagtttgctccgagggcaaaatcaacagtagtagagatcacaaacattattttgattggcctcacaagcctcatcagtaaaacctgaaaaaacagaaaatgttacacaagttgcaaagaaagcactcctgggcgttcactgacatgataggcaaatggaaagaatataaatggcaacagggtgttaacatttaggaacagtacttggtaaacctggctcatttctaggacaaggtccggggactctcgctggnggaacccttcatctatcactggctggatttcctttggacatggaaatatggactttatgggaaaatcttccnaaacctcactctgggcnggcaccngaggggggttcccnattccnacgggcgctggggcatatgg

SEQ ID NO: 320191 - DNA, 935 bp, Homo Sapiens
gtaatatatgaaaaccccttgggtgttttattaagcaggctgtaccggtccggaatcccgggatatcgtcgaccacgcgtccggaaaacaatatgaggagacattctgtttttcaaaaggtaatggtacatacgttcactggtctctaagtgtaaaagtagtaaattttgtgatgaataaaataattatctcctaattgtatgttagaataattttattagaataatttcatactgaaattattttctccaaataaaaattagatggaacaaatgtgaaaacacattattcatgctctcatatatattttaaaaacactacttttgcttttttatttaccttttaagacattttcatgcttccaggtaaaaacagatattgtaccatgtacctaatccaaatatcatataaacattttatttatagttaataatctatgatgaaggtaattaaagtagattatggcctttttaagtattgcagtctaaaacttcaaaaactaaaatcattgtcaaaattaatatgattattaatcagaatatcagaatatgattcactatttaaactatgataaattatgataatatatgaggaggcctcgctatagcaaaaatagttaaaatgctgacataacaccaaacttcattttttaaaaaatctgttgttccaaatgtgtataattttaaagtaatttctaaagcagtttattataatggtttgcctgcttaaaaggtataattaaacttcttttctcttctacattgacacacagaaatgtgtcaatgtaaagccaaaaccatcttctgtgtttatggccaatctattctcaaagttaaaagtaaaattgtttcagagtcacagttccctttatttcacataagcccaaactgatagacagtaacggtgtttagttttatactatatttgtgctattt

SEQ ID NO: 320192 - DNA, 2169 bp, Homo Sapiens
  misc_feature (61)..(61): n is a, c, g, or t
  misc_feature (138)..(138): n is a, c, g, or t
  misc_feature (183)..(183): n is a, c, g, or t
  misc_feature (664)..(679): n is a, c, g, or t
  misc_feature (1411)..(1411): n is a, c, g, or t
acaaatgggtgtcacacaacgagccgccgggcgcgcggaaacgtgatccgcgcggtgcgcntatagcgcgacgctgtcgcgcgtatgttgacgcggtgcggggtgtaccaccacgtcgtcgagcgggacgcaacatangcggtgtagttgataaggaggtatgcttattaaccagaccgcgcntttttcctcggtgcgtgtatggtttcgcagatcgcggcggcgcggcggggggataagccgcggtgcgcagttgacatgcagaagacctcgcgcgtgcgcggaggccgacccgcgccggtgataaaaaacagagacgcctcgccgcgatgggggtgcgctcccctctaacgaagatacattcgcccacctgtgagcgggagtagtcgattctctcccaaacagcggccgctctgcaggtgtgggctcaccccgcgcgcgccaggcgcgtcttctttatatctaagttggggcgggggaagaatcccacccgcgggccaccgcagatagtatcggtggactccgcggaggggaatcttccctatagagggtgcgcgaaggtggttagcgggcccacaaatactggcccatacccccctccgagggcgccgcgcgcggcgcccaccaaaacaagagtgtgtctggaagaaaatttctttttgannnnnnnnnnnnnnnncgcacaaaacaacataggcggatggcgtagggaacgtgggggacgatcgacccgtaaagtgccgcggtctgtagggccgcgataggatgggaagcttgcaggaacacactgaggacgcccgtaggactcgaggcgccgcgcgttccgctagggttttgcgcgtgtgtgtggtttgttgtgaattccagcatttttattgagcgcaccacatcggggaggggcggcagtggtttccacggtaaccaaagtaaggcttgtgcacttgctgagcttccagatgcgaattagtaaaagctaaattcaaaagtagaatgggcatctccaaagagtacgataaaaacattttgtatcaaacttgtgattaaaaaaatacaaaagttaaacccacaggcaaagaggaaaatgacaatcctgagagctgccctgataggtgagccctcgaacctcgtctaaatccgtaagaaggcaaaccctggggaggccagcacccctcgggagagtgggagtgaacgcggagcccacctggcttcatctgggcaaagcttcgtagcgcctctggcaggatgtgtgtccagtcccccgaggggcagaggcactgcggtgtggacacacgagggctggggggcagggcggagccgaaccctgcagccaggcaaaagcgggaaaggcctggttcctccagcatttcccagcttttgggggctcccaagagatagtggttcccacttgccncaccactgctgtggccaagcagcagggtcggacctgagcctgtggtcacagcagactggctactactcagctccaggcccttatttccaatcctcggtgtccaggagagaaagctggtcccagaggccccaggccagggatgggagaagggaaggaaggccaggccaggcctctgggaccagctatagcccttctgagctggggcccagcggtcagcagaagccagatggggacagagtgtggaagtggcgttactgtacagagaggcggcaggcaggagtcgcagatggtggtggctgctaggacagcatggactgctgcacggccttctgcagcgactgccgcgtcaccagcagacgcaccacctcctccgagcgcttggtgagccgcttgcgggcctggtcgtgtgtgaccatggtcatgtcccagccgttcacctgcatgatcttgtctccaatctgcagcccagcgatttcagcagggcctccttcagacacccgtgtgacataaatacccttgtccgtcttgtcttcagagaagggattctgggaagggtcctggtcgattccacctccaatgctgaaacccaggattaagttctcaccttgacgcagcttgtgaatttcaactctttgcaccacggcggtgaccggctggcccgggatgtaggacatctcgaccctgctctggtcgcccagcgccgctccgagaagccggcagcagagtacccgcggtcgcgccctcgctgcttaacaaag

SEQ ID NO: 320193 - DNA, 1058 bp, Homo Sapiens
  misc_feature (818)..(836): n is a, c, g, or t
ttttgtagtgtagcttggttttatttatgtccacaaatatttcaaaaaaattacaaaatactcaaatggagagaacacagaagtcacgatttctgggtgtctactgtttacactgtgttatctcatggcaaactactcatatatacatttagcttcaagatatatagaaacgtagcaaatccgagtgtgcacgctgcctctgccgcagtggagtgaagctcaacctcgaggacaccgaacaagatacggacacacacagaggagccaaaccaaaccccgaacaaagggaggaaaatccgaaggaaaccgagtggttgggcttcaaagacaccatgaaggtcagggcctcctaaacaaactgtagtttatctggtgagggtttcgggtcgagggttttttagatggaagaatctcagcgcttcgccttgggatatggggagaaaagcaaagctaacaagaatgccttcggacggttttcaagcacagacctcagaggactcgactcttctttggaaaaatggatgccagaggaggagataaagaaggtttaactgaatggtagatgttgtgttctaccaaaaagaaagaaaaaccagaagccgagaaggtgggggcctggatgcaggagtctgggagcccagcaggaagaggcctcgctcagagccacgggaacaagcctgccatgagggcctgtccccaccccagaaggaaacgaatgccttcaagccaatgtggcctgaagtcccacgacaaaaggttcatgtcagctttgcctccctgtgaacaaactaaagttaaggcagaaatggaatgagagnnnnnnnnnnnnnnnnnnnctagaaacattttcaacagacaaaacaagcctatcccaactgaaaccaaacacggtttttaagagaaactggaaatgtcgctatttgacgccagaacctgaatttgagccagtagctgctggtttctagatcaaactatcagcatctcttcctgctccctctgcggcctgggtcctggatggactttgtgtccgccgacccagtgtggtctctgtcctacaa

SEQ ID NO: 320194 - DNA, 1023 bp, Homo Sapiens
cgcaggggcgtatttagtagtaaaggatgcgtgctccgcaaggggtgtgtgtcgcctgggggatacttcaggctgtgacttgggtgcagtgtgtagttcgtgtagacgcgcaggttctgaatatcgtgtcgggtggcgggcgcaaataatgggtacaggttaattgcctggctgtcttacacttgggggcactcttgtgtattaccgttaccgtggttccacccggagctctaagtggaacggcgagtccgccccgggagaagaaggaagtggcactgctaccaggggccccactcgagcacgccactgtgagctgacgacagaatcacagtacagcaataatgtccgtatcgtctttccagaagccccagtggggccctcaggtcacgcaggacggagccagctgggtgggtcccaccaactcggcatgaaatgagacgacggatgaaccgcagccccagcatcaggagggcgcctgtgtcaacacccaacgtgggctgggaccccgtgaatgcccagtctgggccgacggacccccagggaaagcctgggtgcaggccaccttgtgcgctgcccaagcctgcaggccccgagaggtcagcctgaggagtcagcctcggctgccggtaatgctgcctgcttcatctgggccacctcccgctccaggtcctcgccggctcgctgcaggagctcacacctctgcctcagcacgttgcccgcctgctgcagccgctggttggcagccacgtaggcccggctttgctggtagagctgctctcccggggcctccgcatcctccatcatcctgaagggaactggggggtcttccggggccaggatggtgaacactggatcctctgccggcgcaccccgcacatcctccaggatctgctccaccgtggggggcgctgggcgggtgggcagcagcacgcgcttctttgccttggagcccatctctgggcgcgggacccgaaagcccagcgtcgacgacgcagccacttccgattccggtcggagcaccgc

SEQ ID NO: 320195 - DNA, 845 bp, Homo Sapiens
ctcacttacaggccctccaagcagtacaacgagaggtctggaagccgctggccgctgcttatcaggaccagctagatcagccagtgataccacaccccttccgtgtcggtgacgccgtgtgggtacgccggcaccagactaagaacttggaacctcgctggaaaggaccctacaccgtcctgctgaccacccccaccgctctcaaagttgacggcatctctgcgtggatacacgccgctcacgtaaaggcggcgacaactcctccggccggagcagcatggaaggtccagcgttctcaaaaccccttaaagataagattaacccgtggggccccctaatagttatagggatcttggtgagggcaggagcctcggtacaacgtgacagccctcaccaggtcttcaatgtcacttggagagttaccaacctaatgacaggacaaacagctaacgctacctccctcctggggacgatgacagacaccttccctaaactatattttgacttgtgtgatttagttggagaccattgggatgacccagaacccgatattggagatggttgccgctctccggggggaagaaaaaggacaagactgtatgacttctatgtttgccccggtcatactgtaccaatagggtgtggagggccgggagagggctactgtggcaaatggggatgtgagaccactggacaggcatactggaagccatcatcatcatgggacctaatttcccttaagcgaggaaacactcctaaggatcagggcccctgttatgattcctcggtctccagtggcgtccagggtgccacaccggggggtcgatgcaaccccctagtcttaa

SEQ ID NO: 320196 - DNA, 661 bp, Homo Sapiens
ttcttttagggcagcacataatcctccttcttttaggaacagcagatctaatcctctccggttctgtaggaccacctcagacaacgaggtcagagacttttctagggcactgactgatttttctaaggccccaaggtctgtatgtatggctgcctggagctgctcgaattgtttggtggccactagggctgtagtccctgttcctactcctgcagctatgccgcccatagtaagtcctcccaacagcagggccagagttaatgacaccggctctcttttatatttggtttttctctcaaactggtcataaacataaccaggggagtggtaggtcacctttggccagagctcaaccaggacacagtaatcggtggtgaggttgagtacagtggtagataggcagggagtgagcccggtgttgcaagcccagatggtcccggcgggagcagccagatagtaggacccatcgctcgccttctgggtggtattacacagggcctgatgggttttgggaactgctcctacgcagagtccctgcccggtcacttcggacagggtcagcttgtgttgggaggccacggagcagttagctggggcagaggtatggttggagtaggtacctaggacggcaaccccttcgtagtaggggggtcccgatacc

SEQ ID NO: 320197 - DNA, 949 bp, Homo Sapiens
  misc_feature (212)..(212): n is a, c, g, or t
tgtagggccaagcggttgcacccaccccggaaacccacagggcagggccagagcccagcgcacccttccaccaggtccccagaagaaacactttcccgtcctcagaacagcggaccacatgtgtgtcacgctcgttcaggcagcagtccagcttgtattcctggttcttatggcccttgtactcgcccagcagcttcccctgtgtctttgtnccaggagcccgcaatgtggagtccagggctggccaccagggtgcactgcccatccccggctgaagcaggtgcaggtgatggggctgcccacgtagtctgagaagagctgccccatccttaggtcatagcgtctcacgcggccatccacggagcctgccaggatctcgtggtctgacaccttcacactggacacgccatctctggcctcatccagcgtctgcactggctcaggcctccgtgagcggcaatcccaacagcggatactggaatcaatagagccggacaggataactgtggcctcttcattaaactgcaccgtgttcaccttccctgcgtggccccggaatttgcgcacgacctgccctgatgccacatcccacagaaccaccgccttgtccccgccgccggagcagagactactgttgtcaaaggagccggccgcatccagcacctcgtagccgtggccgctgtacgtccgcagcagcgtcccccgaagcgggttccacagcttcagcgtcttgtcactgccgcacgtcaggcagtaattgccatccacattaaatcgtacggctcgcactgccccctgcccgcagtccagcgtcttcaaccgtttctgcggcagctctggaggccgcggctttggctcagggaaagccatgctcccaggactccttccttgcagccttaaatcggtctgtacggaaaattccgcgccttagaaacccacgcttgggtgt

SEQ ID NO: 320198 - DNA, 922 bp, Homo Sapiens
  misc_feature (68)..(68): n is a, c, g, or t
aggtactttatggctgggatcaaagggggtgacttcacttgtttgcaccaggaaacaaaagggcaaanaggaagtgttggcatcagttttccatctgcacatataaccccccattcctttcatgaattgcatgagataggtttcattttctcctggtggcctgtctggagccggctcctcatagagtctagatagaagaccctcctctcccgagcccatccccctccagaaggctcgcagccctctgaatcctggtcgaagctggacagcgaaggaattcacagcctgccagtttggggatcccagtcgaccagggtcgtcgatggctcttcctccggcccctcctccgagtctgtgtgctcctgcgccagggggtctaagtcttggagctgaggggtgtatgagtactgtaacgtttgcgggcccaagactgccaacgctgcctgcgactccaataatgttccttgtgtggacacctcctcctgcaaactgagctcctgctcttcaggccccgcacaaatgtcagtggttctgacatcatattcatattcaatgactgttttatccgggggtattgttctgctgagggactcttgctgggtgaaagaagtaccttccgtgttttcttcagagtcacaaaaaatttccatcaaatgcgaagcataccctaaatgtttcacctcctcttcctcctgagggggcctcaggttcccgctgggctgaggatcattaaggctggatacatcactgctttttcccagtaaactcatatcctgatgagaaattttagaatcatccgagatattgagggtgataaagttaatcacgattttttcagcaggcacaaagaatcttttgtcaaattcatttccataaatcaaaatcaaatttgcatcccgggaatccggaccggtccagcctc

SEQ ID NO: 320199 - DNA, 2118 bp, Homo Sapiens
cattactggttccgaaataccctggacatgtgagtgtttgaagcgcgcacgtcccgcggccctttcgcttcgtcggtgccgccggcgttatatgtagcttagattttcatggcaagttgggcgcccccaacacccattatgggtaagccaattcccatgtccatgaattccttagctttaactagctgccccgtgtaaatccatggttctcctgttcttgctcatgttaacatggcacgggttcaattggcacacacatacacaactgtagaacatgcaagaacattatggaattggcttggtataaacatgttgtactgtctactattgaggaatgcatacttagctaaaaagaaaagcaaaccttgatgattggactcagaatagtggttacctttagggagaagggagaggttatgttcaaagaggaaaaaaattccaacttctggcaagtcatttaacctccaagccttagtttcctcatctgtaaaaggggaatgaaacacctacgtcaatgggagtcctgaagattaatggccttgagtatatcagagcagagcacttagtgtggggcctgacacacagttagcatcctttgaatggtaactaggatctttattttcatcttgtggggactcttttgcctaagctggttcccaaatcatggagggaaatctggacctggcaccgggaagggaacaaccttcccaaccttcattgctaggttggtccccagcgcctgggagggatgggtcagcccactgagttattgatgatttccttcctaatttcagtttccactatctctgggttgcagctggacttgtgggagagcacagtgcaagagacaggaataagcagggtaaggcagttcggaggagggtccagtacgccaacagcaagaactcttgggcagtggtgggcccagggcagcccctcactccacgttacggtacttggtgaagaggttgtacaacactcgtagtgtagatttcaggtcacagttgactatgtcttctggccgcggttttggcttttccaaccctccatcttgcatgagctcaaaggcaaaggagacattcaagaccttctgttcaaagctgtccggggtcaggaagaagctgtgcaggggcacaaagtagccctccaggagccccatgagcagcaccaggtacaccccatctgcaaactgggtttccagttctgtgacctccaggttcagtttattcaggtgcttgttcacgaaagtgatgagtgtctttttcaccacattcagcttgtctggggcatggtcgaacaaggtgtcaaaggcatcacgttcatgcctcccggaaagagcctctgtgttaccagttatttcctcttggatttgccgagactggaggattccttctcgtttctggaccacaaccacttggatggaaacatggtctgggagtcgaattggtgcgcggaaatactgagacagagcaacgagcaggtgtaagatggccaccaggctcttggcatgaacagaatccacattccacttgatgctcctgggaggaagtttcagggtttcattgatcttctccaggacagtctgcagtttttgcttctgagcaatctctgactgggtgacctcagccacatttagcttctcactctccagtttctcgaaaagcttctgcaggacttgtccatcatacaaatcttcagctaggtctttcacaatgattctttctccaaccaacacatcattaatccagtcaattaataccttcatcagttcttgaagcttggggtcactgcgtgagtttggatccaccattgttcgcacctcattctcctccagcatcgtgtcctcggggtccagctcaaagggaattgggctgaggggcaggttgatggcgttcattccctcctcctgcagctcggacacctccttggctttcttcctccgggccagggtccctccgagtttccccaagaaggaatcatctttcttgcgggacgggggcgacttgggagtgggagacttggggacagaaggcgacttctgcggggaggtggccatggcgcggcgcaggctgccgcgggccggtcgggacgcggagctggccctcgtgcgaattcgcc

SEQ ID NO: 320200 - DNA, 774 bp, Homo Sapiens
taggtcccaccgctgggactgcagagcttggctggcatcgccaagcggctggggcctctccagcagtgtcaggagctgggcgctcgctggccagcacagagtcgaactgcagcccccagaataatccagaaaggggcatctgggtggggctgcagtgtcgtgggctcctctcagaggccatccagggcttgctggactcggctgtccagggaggtggctgagtggatggagacgccgggggcaccgatgctggtttccaagcagtcaaagccacagctggtcagggcctgcttcgtggcctccacttctggctgctccagccctggcttgaggagtgtgatgccacagccaccaccgcctgcgccagtcagcttgctgtgaagtccgcgggccctggtcacctggcagagctggtccagagaggcgtggcccacgccgagggcattcagatggtgctggttcatgtcaatgagctcttccagcacgaggtactgctccggggctggggcttcccccatctctcccagcacgcgctcacactccagggagatggcatctattgaggtcaggaggggggccacgatctctgggaacttgagcagcctgtttctgacgccagccacaagggccctggtattgcgagggactttggtgttggtcagcaggatctggagagctggcgacctctttaaggatgaaatcttcccttgatggtatcggagggctcctccccaggtgctgacagcattgtccactccggaggggttcccgtga

SEQ ID NO: 320201 - DNA, 444 bp, Homo Sapiens
  misc_feature (33)..(33): n is a, c, g, or t
  misc_feature (56)..(56): n is a, c, g, or t
  misc_feature (89)..(89): n is a, c, g, or t
  misc_feature (134)..(134): n is a, c, g, or t
gcgcccaaatcaacttgcctgttaaaaatccgnggggccccctggttcaccctggncaaaactggttcccaaaaagaaacgtggccccnaaccccaagggcaattcaagatggtgcctggttcaatgtcaaatngagctccttcccagcaacgaggtaactgctccggggctggggcttcccccatctctccccagcacgcgctcacactcccagggagatggcatctattgaggtcaggaggggggccacgatctctgggaacttgagcagcctgtttctgacgcccaccacaagggccctggtattgcgagggactttggtgttggtcagcaggatctggagagctggcgacctctttaaggatgaaatcttcccttgatggtatcggagggctcctccccaggtgctgacagcattgtccactccggaggggttcccgtgt

SEQ ID NO: 320202 - DNA, 1131 bp, Homo Sapiens
ttttttagaaaaggcaaagtttattccagtgttgacagagagagggtgagccttgcacagcaattctaaaaacatgtcatctccttcacctaagaggtaagaaccggctgtaagtcatggggtcactaaaccggccgcagttacagtaagcagaagaggtcacggctcaggccttctcagactttccctgggacacacggctctctgggggggcccggcgaaaccactcggaccaggagccatcgtacacggccacatcaggcttgccgcagaggtaggcagccaaggccacatggcaggcggtgactcccttgcggcacgtggcaatgagaggctgcgagagatccaccttcttggtctggaacagagcacggagctcttctgggcccttctcgaagccatcctcagtcaggaagtccatgaaaggcatgttgacggcaccacggatatggcccgagtccagtcctactgcatccggctccggctcggtgcccaggaaccgcccttgagaccttgaatccaccagctggaacctcttagattcaaggttctccagcacctgctcgtaaggtcttgagcagggagcggtccagtgtggctttgaagacggccggttctgggcgtgagggctcggatgtcaccgggtggccctccttcagccagttccggaagccaccattgagcactgatacggtgcggtggccaaacacacggaacatccaccagacccggggagcatagaagctgcccaggtgttcaccatcatacaccaccacgtgcgtgtggttgctgatgcccaggcggcccacatactcggcgaagccagcctcgctgggcagcatcatctcgtagggcgacgccgtgtcccggcactcttctatgtcaaagaaagaggcgccgggtacgtggcgctcgaggtactccttgcgggcctctcgggtgcctggtgagtaccaggacgcgtccagcacccgcaggccgggccccagcttgccagtcctgatggactccgccagccacttggtggagaccagcgcccggtagagcacctgatgaaccatggcttcagctctgcgtgtcactcgccccggacgccgcgctggcgctcgccccggccggctggagaagttg

SEQ ID NO: 320203 - DNA, 701 bp, Homo Sapiens
ggggtgtgtgtgtactcgcatgtgttggcgggaccaaggcagggaggtaggataaaagggggaggaaggagagagtagccagggaatggtggtcctcagggctggggctgccccgcccacgtccttgtccttcgtgggagtgggttggtacatgggctgctgctgctcctccatgtcctcattagcctcctctgtccctgagccccgctccacctcggggtacacgaccacacacatcttctggctcaccagggttagcagctcaatgaagtcactgaaacacttgggcttgtgttgccagtaaacacccaggaaatagacaggcactcctgtcagcatgatggccaggccaatgccacacaccaccggctctgaccacaggctgaagaccagcaggaaggcccagaacagcaagtagatgatggggaacagcaggttgatcttgatggggcgggggatatcaggcttcttccagcgaaggactatctgtccagcaaccgtgaccccatagaagaggtagttgatgaagcccacgtagttgatgagtgtgtacatgtcgctggtgaccagcatcagcagggtggagatgcatgtgaagagcagggctgggattggggtgcagcgcttcacgtggatcatggccaacacactgggaaggtggccctctcgggctccagcgaagaacagccgagaggaggtga

SEQ ID NO: 320204 - DNA, 968 bp, Homo Sapiens
caattatgtccaacatggatcacttttacatcttgattgttaatgactgtctgctttttaatatctatgatgtacagtcaacttgcaccttctaggtcatttaattttttagcaaagaagcaacatcatttagcagcaattagagtgccttcaagaagacttaaaaaaaatacaatatccaattagaaaagccatattttaaacatttgtacaagaataagctgctgaaacttagtaattgaaatatgacatctgtacaacaatttacaatagagctagaagggaatttatcattatcctgcatagaactggtctgcatttggttactcactgtcacctgttttgatgaacaaggcctggtaacaaaagaaaaatacctgttatcaattctaacgtgttgaaaacactggcaatattataatttagtgaattcaactgatttcaacacaagcagctcattttgtcaaaggtgtaaagtatttagaaataatagctctccctttaatataaccagtgaaagaaaacggacatgtgatctcgaggtacaacttggtaaaagtctgaataggcaaatgacaaagcctaactttgtccaaagattctaactctcacattctattactataaaacacaactgtcactgtcattcagttcttactttggtttcagcagattaactgccaaatgctgaagaatgtatccaggcactatagttcgtatgttagaaatatgtctcatatttttccatgtgtttttaaataatgaaaaactacccttcatattagaactctctagtaacaaccaaatgtatttaagtattataaacgttatttacagtgttcccccaaataaacaaaatttttttcctctatcttaacatggtattcctgtttctgtgtaacaggcagtcatccttccttcactgctcaaaattatagtcagaagtgtgcatttattcattgtccatg

SEQ ID NO: 320205 - DNA, 818 bp, Homo Sapiens
  misc_feature (24)..(24): n is a, c, g, or t
  misc_feature (81)..(81): n is a, c, g, or t
tgtctgaaaaaagttaatataatnaggtccttccacaagtttgactggtgtaatggaagaacatggacctcgccatcaaanaccttgtggctgatgactctgtcgcaaaaacttcctttgtggaagagttggcaggaaaggaaaacaaccattgttgatatagcttctactgatatttcatatgtaatatctaagagtggaatatcagtgatcaactgcatcaaacagcacagcaattcttccaaaagatcttctgagtcagaactgtaattgcccaggagatttttcttcataagtaaaatgaagttgtaattcctcctctgacatctgacagatgaacactttcagcaaacagcaaataataaacaaagcattgtgtgtctgccaaatgaagatgtggttctgacattctgctgaaagttttagttctttggttctagaaaggaagaccttaattagtgcaccaagatttcctgttcgaggattgttttcaactaatgacctgcagactgaaatggttgcttcctccaagagtttcaactcactactgctagttggtgcagggaaagaaaatgagagaagctgattccagaacgggtcattctcagagatagattccgtgcctgataactttttcaagtactcatttttaggaagatcgccgattctgctgctattcgatcccatcttctagcttaagcagataatttgtccttaaacctgcatttccaaaagacaacctgtctcagccggctgggggatctgctccagctccacggacccgcggacggatgggagggtggcagaggggtcaggag

SEQ ID NO: 320206 - DNA, 464 bp, Homo Sapiens
tttacaacaatgcagtcatttatttattgagtatgtgcacattatggtattattactatactgattatatttatcatgtgacttctaattagaaaatgtatccaaaagcaaaacagcagatatacaaaattaaagagacagaagatagacattaacagataaggcaacttatacattgagaatccaaatccaatacatttaaacatttgggaaatgagggggacaaatggaagccagatcaaatttgtgtaaaactattcagtatgtttcccttgcttcatgtctgagaaggctctcccttcaatggggatgacaaactccaaatgccacacaaatgttaacagaatactagattcacactgggaacgggggtaaagaagaaattattttctataaaaggggctcctaatggtagtactgcttgaaaatggtacatttttggttgtagattattttaaacataa

SEQ ID NO: 320207 - DNA, 1096 bp, Homo Sapiens
ttattttcatacaactcatttataatttattttcacacaactcactatgttacaaaactgtacacctgcccccaaagttggataacccaaagtcacattccttggaaagagaagaatcaacactgggccgctttttcaagagcagtctcttctggattgggcccaacaaggctagaccagaatgtggagtacaggaatggccattcttcaagtccgaggggtcaggttcttagcctggtgcttccagtcgttacaggaggggtgtctctgtttggaaagccagcaccagcacccagaacacaggagtccagagagacaggcaggcactgctggccaccatctggctgtggtgggaatgcccacggcgagggagccgcagttcagtggagatgtgcctgtccaggacagggacctggagttgcgggactatgtcactctcctccaggcggacccacagatcgctgaattgccggagtcgcagcctccgctgtgaccgcctccgcttcttccggaacctctgttcggcctcactgggcgtgtcggcacttccaggccgggacacaaggggaggcagcgttgagtgccctgaggatacggcttctggtgccggtacttccagggtagggacttttggagcaaagatggtggacagagtgggccgtgtggaggtctttttactcttccctttgtggatgggtcgtccagcaggggcgtgttctacctcatagccttcacgccgcaaaacatccagcactgtgttgttgcccatgaaatgaccagctccaaaggcaaagaagaagcctttgtcagggaactcctccaaaagggccttcacccgcttccctattctctcattccgcttgtagatcagctcccggcgtaagtagctgtcaatctcctgagcagtgatgcgctcctgaggtggtagcgtggcattaataaaattgggaacctgggagctgtcatggctgaggatgacggagctgaggtccccgcagttatagtgtttgatgagatcctccgtcgtgtaggggatctgaagactgcctgctcgcaggctttcctgctgcaggagggcctggttcaaagcaaagat

SEQ ID NO: 320208 - DNA, 447 bp, Homo Sapiens
  misc_feature (268)..(268): n is a, c, g, or t
  misc_feature (408)..(408): n is a, c, g, or t
ctctcctccaggcggacccacagatcgcttgaattgccggagtcgcggcctccgctgtgaaccgcctccgcttcttccggaacctctgttcggcctcactgggcgtgtcggcacttccaggccgggacacaaggggaggcagcgttgagtgccctgaggatacggcttctggtgccggtacttccagggtagggacttttggagcaaagatggtggacagagtgggccgtgtggaggtctttttactcttccctttgtggatgggtcngtccagcaggggcgtgttctacctcatagccttcacgccgcaaaacatccagcactgtgttgttgcccatgaaatgacctgcagtgagaaaaacaacctgaaatgctgcagctctcaggaccaccaaacatactccccantacacacaccctagaaccaagaaattaccgctgccaagc

SEQ ID NO: 320209 - DNA, 832 bp, Homo Sapiens
  misc_feature (43)..(57): n is a, c, g, or t
  misc_feature (63)..(63): n is a, c, g, or t
  misc_feature (77)..(77): n is a, c, g, or t
  misc_feature (81)..(121): n is a, c, g, or t
  misc_feature (125)..(125): n is a, c, g, or t
  misc_feature (129)..(129): n is a, c, g, or t
  misc_feature (133)..(134): n is a, c, g, or t
  misc_feature (150)..(230): n is a, c, g, or t
  misc_feature (233)..(237): n is a, c, g, or t
gccccccgcgccacaaaaaagaggttgtataaaaatttttttnnnnnnnnnnnnnnncgccgncaatttttggaaanagtnnnnnnnnnnnnnnnnnnnnnnnnnnnnnnnnnnnnnnnnntaanttgngttnngggggatggtttaagnnnnnnnnnnnnnnnnnnnnnnnnnnnnnnnnnnnnnnnnnnnnnnnnnnnnnnnnnnnnnnnnnnnnnnnnnnnnnnnnnggnnnnnggcagaggcacaatcattttagattaaaaaaaattgaacaaagagaccctcttgcgagaggtgagatgaggccctgccatgcaaaggagtcccagcagaggaggaagaattccatcctggggttcaagtttctgtgcagagacaggacctggggacagagaacggtcctccacccaatttcagctggtctgtcctcatcagctttgggctgagcctggggtgatgagaggtggagtctcccctggatggtgaccggacttctggccaaacttgcatttgcattttgcacctgttggggagagctgagtggtcaggggaggggagccccagccccggcccgcctgctcccccgagctcctccactcactcatgacgatgatgatgcccatggcgcacagaaccccagcgcagatgagcccgccaacctggaggctgtgccagtcatagtagaaaggactgtttttatcttctaggtcattggcgtccaggacaggaaagcctgccaggaacacaagcaggcccagggtcaccttctgcatgtcagagcgctggcctgtgtggttcaccaggctgagcagaggttccgggagaaaaa

SEQ ID NO: 320210 - DNA, 1128 bp, Homo Sapiens
tggggttcaccggggggccttcttattaataaaccggtttggaaccattcccattcatagcggggacgattcctatgtccccagttttccctggaatggtccccgggtcccactggaatgttccaggttcccatctggttagagctctctttcattccttttggttactagtaaatcccaaaattgcatatgaggttcccatggctgaggaggcagagggcgggcctgtgccatgtcccaagccacaagggaacaggcctgtgggcttttcccaacaagcaggctcagtgccagcctctgtgtcagcctccagggcacgccaaccttctcatggtgccccaagccccaccccaatgcacacataggaagtctccaggctgcttgggcagaggcacaatcattttagattaaaaaaaattgaacaaagagaccctcttgcgagaggtgagatgaggccctgccatgcaaaggagtcccagcagaggaggaagaattccatcctggagttcaagtttctgtgcagagacaggacctggggacagagaacggtcctccacccaatttcagctggtctgtcctcatcagctttgggctgagcctggggtgatgagaggtggagtctcccctggatggtgaccggacttctggccaaacttgcatttgcattttgcactcatgacgatgatgatgcccatggcgcacagaaccccagcgcagatgagcccgccaacctggaggctgtgccagtcatagtagaaaggactgtttttatcttctaggtcattggcgtccaggacaggaaagcctgccaggaacacaagcaggcccagggtcaccttctgcatgtcagagcgctggcctgtgtggttcaccaggctgagcagaggttccgggagaaatcgggctgccaggcggagtcctgcgtttatccgaagctgccacgccctaagcaaacctcacttcttttccttagatgatgtgttttgcctggtggaaggattgctggcagttgtggagaacttaaagtccccttccaggccacatcttgccgctggtacaatttcaggatcagcagaagatgctagcgtccccggccgtaatgccactctgggtgataccagtgcttcc

SEQ ID NO: 320211 - DNA, 730 bp, Homo Sapiens
gatcgggccagcagggcagtggtgacacgctggctattttctagcagggtgttcttgttctgtttccactgttctcgtattctcagcaacactgtgcggaagccgactcgggtcaagccatcctcaggagggaaataggtgcccccgacaaagggctggaggttgggagtcagccacacattcatgggccagcccccgccgctgctggtggcctgcacgaacgtcatgtacaccttgtccacgtcaggccgctcctcacggtctaccttcacactcacaaagtcctcactgagcaggcggccaatctcctcattctggaaggactcctcttccatcatgtggcaccagtggcaggtggagtacccgactgagaggaaaatcggcttgttttccttcctggccttgtcgaaggcttcctgtccccaggggtaccagtccacaggattgtaggcatgttgtaggaggtatggtgacttctcgtggatcaggcggttggggaccctctggggtgtagatgaaggatggcttcctttccctccagcaggcatgggcactgaactactgaccgtcgcacttcggtccttgtcccgggaggagctacccctgcggctcgcggcgaggcctgcaccggcgcggggcagcagaaggacgcggcccaaccaggcccgcgcgcccagcatggctgctcggggccgtgggcccggccgctgaggacaggaagggaagtcag

SEQ ID NO: 320212 - DNA, 1025 bp, Homo Sapiens
agtgcctaagctggggtgccattggaatgtgcctctccacactttcggatggacccttctttcttggccaaggggcggcataggtttctttggttgcaaaggaaggcgcccccaatgtttggcccagggttgaaagcccattggacccaggtggtggttgattggagatggtggtcatcctgggtggtgccaggccaatgggccaccaaacaccatcttcggccgttttcttgcgtgatctccaaggggtgggccagcaagctggttccgtgggtgcaggtgtgtgtcgcagagtgctggggaggtcacgtcgtagggcaggttgccgtggcggtcccgcagggcctcttcctgccctggggggaagaggagccacttcttcctcccacagacattgacagaccagctgaaggagcggaagatgtcagcatggaacggggaccagctgcccgcaggccccgcgtagacaaagcggtagtcatccacatccagtgcatcccagaactcattcagccagtcggacgagaagtacacaggcagggtgaaaacgtcctccaccggaaagtccctgcacaagtgccagtctttgaggtagagacagcccctgggagaggagtagcccgcctgtatgtactctttccagtaggtgatgtagtctctgagagtcatgtgctctttggggttcgagttgtattcctggaccccacagtttgcaactggtacaaccacgtctccgtaggtccgtagcaggtggtcgaagtcgggcctccccgcgggcgtcacccagcgccgccggctgccccagccctgcgtgaaggcgctggaaaacacgcagggcaggttgggcagcaagaagccccgcacaaagtcggcgtaggagaaggcgcccggctccgagacgaaggctacccggcccggagcctggccgacgccggggacctcgacccccaggcctcggaagtggctgtcggcgagggcgcgcgtctcgcggtccatccagctcagcacgggtcgaaggacccccc

SEQ ID NO: 320213 - DNA, 997 bp, Homo Sapiens
caataacaatggtggccacctgggtcccagcacttggctggtggagagatttttttcattatggagctaataaagggtccctacgttttacattgattaatgaattattacccagacatgtgcagatgaaatgtcaatataagaaaaatcaaggtatttgggaaacatgggcataatcaggtaggtttgctaaaattcctcttccttggtctacataaagaagacatgggtctgtcatagaatggggacattagactgaaaactgggacaacccccttccttattttatagagactaggagttaaggggcctgcctaagattgcagtgataaagaactgaaccctaaatcagctcccactaatgaaaccctgctttccttgtatcttttgaactcagttctgcatccaacttgagaagaaaaaaagcttctttccatatcaagtaccatatgagttcatttaaactgcaccttgcagaaatgcattgccagaaagcaccagtagcctcctatctgcaagcagagtagtgctctgctctggggaggggtcattggaaaccataatgcagagtgggccccctactccatttcccagcaaaaggctccagctggagggatgggttgtggggcaacctggttcctgctaactgccagattgaatgtgtgggctagaatgcctgcacatttagttaaactgggctcagcatgcttgtcctcaaaatgtccatcctggtcacagcacacaagatggctattggtctgcttttaccctaccctgtactatacatgaaaattccagttattaacacactcaaactggtggagcttgttcaccctaggaaggggattgtatatatggcaggcttccctggtgccgatgtaaagggctacatttgggaacatttgacttccttgggactcttaagtgcatactgatggcatgaagtaaaaggggcctcaatgatgataggaaaatcagttcttttaaaatttcttca

SEQ ID NO: 320214 - DNA, 1102 bp, Homo Sapiens
  misc_feature (53)..(62): n is a, c, g, or t
aaattaatgatgcagacaacttggtgtggtctttgaacagctctctgcagtannnnnnnnnncctgttaccataaattgtatttaagtgcttgctttccacttaagttgtactaatagaaccggtaactcccagccctccctgtttgacactccttagcttagattgatgtagttgtttttgttatccctataatgtgacttttatttttaagtcattgtgtactgcatttgtttgtcactagttgggcacgtgccaataatattctctccattccttatctgccatctctgttttgcctgatttctcttcaactgaataatggctttttgcatggaaaaaatagtttttactattagacgtgtaaagggaagagagagctaatgtattggactttgtgagcctacaaggaatattttggatccctccaataaataagggctatgtactatatgtactatatagagttatcatgtggtggaagatacttgcaagtcatagatttatgggcaggaggatttgttactccctatatctaggctgaatgtaaaatcccttatgttgtatcaatgggggtaaaaactatttttatttgcctatgatatacttggtttctaataaagtgccctaggctctagtgagaactgtctactttgaattgccatttactccctttcctcctttggccgatatgctcttggctagctttttataagttaatgtgtttccccaaaaagtttcactactttatattcatttgagtgtgatcctaaaacacctggatcaacagtacatctcatatgcaatctgcatcagctcctattctgtctggatgtctagaactgttggaagattttgacgtcttaagccctaggttttgctttgggaaataaggtttgaaatattgttcattgcattaagatttgtgtgtgtgtgctttgtaagcccagaaccaggttttggaaaatgcctgtactgtgaaagcaaattaggactctttctgagcctctttcattgtcagaaatagaatcactttccatcagcttccaggaaattgtgtatctggagtcgaagagatttgacatcaagaatccagattttta

SEQ ID NO: 320215 - DNA, 643 bp, Homo Sapiens
ttaagaatcaaatatttatagatcaaaacttgtgttttaagtattatacgggacctgtttacttatagtaaatgtgaatgtacacatgagttgttgctgaagctgacaagcatattacatacatgcattttccctgtgccctcatagttgcagttagagttccagtacctgtaggctcacctgggaggcagattagacccaaaggtagatgtttttcccctttccatgaagcatgtcagtgggagttgcttcctttgatttccctagtactaaattttaaggcttttgtaaaaacaaaacaaaactaggagcttggaacagttaaaaatcgacactgctaccatcaattcatcaaatatttacttagagctttcatacattaagattccagtaaccaataaattagaattcatttcttctgcataaagtaaattttcatacacttgacctactaagacagcaagggtgtcctaaattgaggcatttgtataatgcctgcataactaaatggtcactaaaatgggacagcatggggcaagaccttgtagttcttcacagaatatttgtggtcagtttctccaattaatttgctgcatgagccaaataaccataattcactttttatacccactggtgccataat

SEQ ID NO: 320216 - DNA, 2260 bp, Homo Sapiens
  misc_feature (231)..(232): n is a, c, g, or t
  misc_feature (239)..(239): n is a, c, g, or t
  misc_feature (241)..(242): n is a, c, g, or t
  misc_feature (244)..(245): n is a, c, g, or t
  misc_feature (247)..(247): n is a, c, g, or t
  misc_feature (250)..(250): n is a, c, g, or t
ttctcgaaaaatccctctccggggctccccgcccccgggggccatatacttaatttggcgtgagggatctcccaagccccctttgttcggggccgccgggatctctcctagggaaaaccagcatttgaccccagtgttcactttccctttcgtggggccccgccgcccccaaacggaatggttttagaaagcttttttgagggcccgaaggcgggccgccaatttcttctnntcttttngnntnngntgntaccaaaagtcctaaaagtttattgccagaatagcaaacttcataaagacaccttaaagtacatcgaatatgacaagcaaaataaacagaaaactttgaccaaagaaaagattgccgctgtcatgcacagtcaaattaataccaaaccaaacaagtacatcgaagagtatatgggttatacaatccacactctgaaactaaaggagactcattccaaaatgcttggttttgggttgggggtttgagaggggggctggtgctgggagggtaattttctcctaatacagaatatggaaatatttagatgagaagcagaatgactaaaatatcagtgatccatttaatttttatctccaagaatagaaaactgtattataggcttccaaaattaaagaattgatcaaaaatcgaaacacagaagagaagaaacaaatcctaagttcgatttgtgctattgttacaactgattagcacttcagacgcactgcatccaagtgtactacttatttaagatgagctaagaagataaaaagccagaacagcctttactatttgatttcaatcatggctatattttctgtaagcatagaatgtcctatcactctactgcaagcaccgggattttcttttctattatttaataaagtggaaattcatataaatgaagtcaaggtatagcaaccactcccaactgactactagtgcccaatagaactactgctaaatgagtaggaataagagtaggaagaattccctgtggcgtcaaagcttcctctccgggacccactgcgggacccggagcgagatccggagcgagatcccgagcgggagccggagcgggaccccggagccgaagacatgttgtaagggctgggtaagcccttggacgacacggaggcggcttccagaaggcgcagcccagtgatatcttctaccatggagcgatttatggcatccttataggatatttttaatttggttttggggcaggtcaggattttggcatagctgctggtgtcttgcagcctctgtgcggcgcggccatctatgaaccccttccggatggcttcttcggtgcttatcctcccatgcacttccgggtcaacaagacctcccgtgaggtactggaactccaggaagcgctggccagcctcatacgggagccatttttctttcactgcctctgctgctgacatcttcttctttcccttcacaccctcgaagcctatgaaggctttctgagcaggcttcagcctggtggccatgtcttggtcaatcacaccctgggagactgcgtcctgaagtgacagcttctggcccgtggttgggtggatgatgccacctgtgcaggcctgagcctccagaagcctctgacccgtgatgctgtcaacgatgccccgctctataccttctgtaatggagattttctccaggttttctgtgtcaaagatggctgcaatggggctcgattcttccagggtgtctgaaaaagagctgctccttatggttaaattcctgacgctggatatggtggaaatcttacttactgattcatgtcgggagctgctaaaaacatcatcgctgacaccactgcccatgctgctgctggtgccgacaccatttttcaaggagatcatgtcagcaaattgagtgaggctgaggctgccggatcggtactgatcaaagaacttcctgtcaacaaggcccttgtcaatagcatcttgaatatcatactgactgcctgtctttctatctaccaggaccaccctggtggagccatctgatcccgtgatggttatttcttcccattcacattcctgctcacacagttctttgaaggtttcataatcaattaggcccttcttgtaggcctcctgaacagacatttctttattggtttctgggtcaactatgaccactctacgcttcctgagggtattcttttgtgatgtctgcacctgtttcttcttttctttcagaggcagaagacagagccctgtttcctcatcc

SEQ ID NO: 320217 - DNA, 625 bp, Homo Sapiens
  misc_feature (65)..(95): n is a, c, g, or t
ttttttaaacattttttaaaagaatgaacatctttgcacccagagaaaaaaaactggtattttannnnnnnnnnnnnnnnnnnnnnnnnnnnnnngaatgtaattttaaagtaacattaaccccttttgtcctctggtttagaaatgttttaactcttccataaagtgaggaaaatagggaaaaatgtcaaccatctgcaccagtaaataataactattaatattacatatgttcattaatttaaaaaaaataataaaacctattggaggtgcaaggcaggagcatattgtttggcttcacaggcctcagcctcctcccagtgcacacttgaaccacacacacaaaggggaagaaaggctggtggtaaccagccataacaaaaatatattctttgtattctatcatccctcaggttcatcttgcatgtttgctttaaaccacaaacggctactgcacagttcttatgtgttccaaggaaaattgtcttttaggctacgaaagattcaaaaaaattgttttcagtacaaaaagtcttgttaagagaaaataatttttttgctcccaaaatactacaaggtgtctctagtgtatgtctagtgtactctgtgagaggtttgaattccc

SEQ ID NO: 320218 - DNA, 1503 bp, Homo Sapiens
  misc_feature (41)..(52): n is a, c, g, or t
gtcagactgaatgttttatttcaacagacatccctggtttnnnnnnnnnnnngtggtggtggggagggttcaacattttatcacacctgacagagagcaaaactcccaccccagaactcagagccccttcggaggcatcacacaagtctttgctagctccaggacagaaaggagctgaattttctaacttgttaagaaaaatctatcaaatatgttcattctcgcagaggcgagggctgggtccttggggaaagagatcctgggcttagagcagctggggtcccagaggtgaagctgggggccaggccagctgggctggcaggagatcctgggagcaatcagttccagagccctagaatccatatttggcttgggtctgacggcggctgagcttgttctctgaccaggtgttcttcagttccagctcccgctccttggcctgatgaataagatatgtgatctggtgtttccgccgctgctggcctgttggctgctcacctttctttttgctgaatgacttcatggttttctcttctgtcaatgacttagtcatccattgctgggccccactgagctggtcatcacctttgatctccacaaagttgatttcttctctccctcggttcctcttgccctgcagccgcttaaatgcttcgtcatcgatgaaggaggcatctggggcaatttcctggggggggaccagggccgggtcctgtgcaggatagtagccaccactgtaataatcctgataataagcaccagcggcattggcatcgccatatgtggaaaactgattgtagctgtagtcgtccccaggcttaggcatccaagggggccccacttgaacctgctgccatcttgaattccaaggggggcattggctgcatcgtcctggaaaggcggctctggttccgtgcttggaggcagctcttcagggacagtggggatggggtaagggtatggctcaactccaggtggctcagccttttcagggagggagaaaaagttttcgggggctacttcctcatcactgtcgtcttcttcctgcgtgatctgctttgtcacctgcagggcagcactcttggcagcagccttgatagcagagggcgacggagtggtggttgtggtgcccacaacaggggcaagagaggaagtcttggtcttagaagccagtctggagggcttagtatcaggggagccatccgagggtttgcgggagaaggcatggggcaggagcaacctgttagtctctttcacagtcaggtttttaggttggggaagcaaggcagacaaaccagtcccctcactggatccctgaaggatagttttcttctttgtgggttcatcttcctcagaatctgaatctcccttatgcaactccggcgccgcgatcttcacgggctctttcctcttctttggcttgggaagccccagcgggggaccggcaccgccaattggagggggcagattgaggccagggcctcggggcgagggcaacccccc

SEQ ID NO: 320219 - DNA, 924 bp, Homo Sapiens
  misc_feature (42)..(43): n is a, c, g, or t
  misc_feature (119)..(119): n is a, c, g, or t
  misc_feature (163)..(163): n is a, c, g, or t
ggcattcacaagcttcacaaaaggggtcttccccttgattgnnccaggggcaggaacctgcccgctttttctcgggtgcacagacagtcatgccaaccctgggcagggtggcatctgcncctgctttccccactgagtggggagacagggcagtgtgctcagnccctcaatcctcacgcaggtaggcttcctgctcggactcagcccgctcctccccttcctcctgtgttttctgacggagctcttctatctgtgcttctgccagcttggtttctgctttccgggagagctggtgcacctcttccacctgcagtttcaccagctgaatgtgattcctggcggttatagaggcctgatctgcgccagtttgatatgcagcttctgctgccatctctgaaagaccaactgcagtcatccaagtggtttccagcttcaagtactcttggtgttttgaagtcatctcagctctggctcctatgatcacctgccacacttcatcttcctcctctgaattcattttcccaagtaaacttgtatattgtcggtaaagagaagttaaggtataaacagccttagtatattcagtaatagcttcaatcaacgcatatgtggtctgagagagaaaggtagaggtgctatctgttaccaaagacactgctctcctcatcaatgcttcactactaagggaatgaggctctgatttctgtgcaataggaaccgcacacagggttactccaaagccaatcgtcacagttttgtgccatggtcttatcaattctgagaaacaccgcttcttaaagttagccacaacaggaacacacaaacactgtctgtacctgaagaatgaagttacgctgcgcgacagccaactcttcagagccgccattgtgcagcgcgcggacgccagacgcacacgccggaagt

SEQ ID NO: 320220 - DNA, 1353 bp, Homo Sapiens
attttttcctgttgatgttaagtcctgttgagagcaccaggtaaacactctgcaccccttctcttagtagtaataggtttttcactccttggcctcagctgtcctcacaggacagtgggggcagatcagagaacacatcagaaatacatacaaagaaatcgtacaaactggacaggttcccctccccctgccacaactggcatcccaacagagggaacaagtactaaatcatttttgacgacgtaaataagactgaaaacaggttaaacagttgctgaacttaagggcatgacaaaaaggactcctctctctgacccaggtaggcaaaatgctttgggtgtgaggtaaaaaaaatgggtaagagcagctgtacagagtggggtgaaatgttaaacagggtgcagtgcccaagggctaagaaccaggtccagcgcaagcctgagaccacaggaggcactcacagctcacaaaggcgtctcgcctgattggccagggcaggacctgccgcctcttctcggtgcacagacagtcatgccaaccctgggcagggtggcatctgcccctgcatttccccactgagtggggagacagggcagtgtgctcaggccctcaatcctcacgacaggtaggcctcctgctccgactcagcccgctcctccccttcctcctgtgttttctgacggagctcttctatctgtgcttctgccagcttggtttctgctttccgggagagctggtgcacctcttccacctgcagtttgcaccagctgaatgtgattcctggcggttatagaggcctgatctgcgccagtttgatatgcagcttctgctgccatctctgaaagaccaactgcagtcatccaagtggtttccagcttcaagtactcttggtgttttgaagtcatctcagctctggctcctatgatcacctgccacacttcatcttcctcctctgaattcattttcccaagtaaacttgtatattgtcggtaaagagaagttaaggtataaacagccttagtatattcagtaatagcttcaatcaacgcatatgtggtctgagagagaaaggtagaggtgctatctgttaccaaagacactgctctcctcatcaatgcttcactactaagggaatgaggctctgatttctggaagtagaagtcagatttcataaggcacgaccgccaatctgtaacaggctcttggatttacttgcaggggctgtaaactcaaactcgagccaagcaggaacctaaatgaggatgcaggacagctgaggggttttgaaattttcaacatacaccaagtttaaaatgttgcctcaggcagggtgttggtggctcacgcctgtaa

SEQ ID NO: 320221 - DNA, 763 bp, Homo Sapiens
  misc_feature (157)..(281): n is a, c, g, or t
gtggggggggaatcccaacgcccttgtttcttggcgcccgggttttttcttggggaacaagctttgtgccccttttccccttacccctaggggggcccccgcgcccaaaagaaagggttttaaaaaattttttggggggccggaggggcccccccannnnnnnnnnnnnnnnnnnnnnnnnnnnnnnnnnnnnnnnnnnnnnnnnnnnnnnnnnnnnnnnnnnnnnnnnnnnnnnnnnnnnnnnnnnnnnnnnnnnnnnnnnnnnnnnnnnnnnnnnnnnngtagaagtaaatttttaatggctggttaattatatcactacattttattgcaatatagtactcatttaagcacttaaaaatggaaggtgtacaaagattaaattaagacacggtaaattgactaaatatttggtttttatataaataaaggtcataaccacaccgttgacatgtaatactgttataatacaacagttaaacttgtgagtctacaacagaagtcatctgtagttaaacaggaaacaaagttgaaaaagaccatgttaaaacaaaactactgggactaacaggtcgggattgtaagtagcaacaaacatattcactcagctcctgagtatttcaagttttacagtacacattaaaaatgatttcttccatcaacactataaattcaaactgtcggatgtttatgcattttgcaagttacactgattgaatgcttatatgggagtgggggtcggaacatctcccaatttaagttt

SEQ ID NO: 320222 - DNA, 953 bp, Homo Sapiens
agaaattagggctctaatttccttaaagcaagctcacttgctttagttgttaagttttataaaagacatgaaattgagtcattttatatatgaaaactaagttctctatcttaggagtaatgtcggcccacaagggtgcccacctcttgttttccccttttaaaaactcagatttttaaaagccctttccaaaggtttcaactgtaaaatacttctttttacaatgtatcaacatatttttatttaaggggaattaacaattgccagggaaaccagccaacccaagtttattatatcattaaccttatcataaattcaaacctaagttgctggaccctggtgtgaggacataaatcttccaaagttttgcctatcctaagagctgcatttttctactgctctttaccttgcattttagctaatttaggagttttgagaatgtattggatacgctccagtacataaggggttgccgcatattatatcagactgctttgagaaatctcatccctagtctattgcagttgtttctattagcttactgattaactcagtcctgacacaccttttgggaaatgctgatttaaacttcttaactggcaacagttggaacagtaatcagtttgctaacatatttaaagtcttgaatgttgaagaactcatgtgatttacccttttcaactttttggaaaacgatttaatttattctaattagattaaccctattaatctatggattgggtatcaaaatgaatgccagtccagatgtgcctagacacgaaattggagctgaggactctcacgatatgcaagttcatccaacgtgaagataccataagctttttctctgaaccagagaaatgaaagtcagtttaagaggctgatagatcttggccctgttaaggcatccacttcacagttctgaaggctgagtcagccccactccacagtta

SEQ ID NO: 320223 - DNA, 477 bp, Homo Sapiens
acagctagagccctgcccaggccgagccggagctgcagcccgagcgcgttggtgccctcagccccgtcctcttgtcctcctcagcctcggtgccttggaatttgtgtcgctgagtcagcaagcctttcagatttgcccggtttttgttgtttgtggtttgtatcaagatgggaactcaaacaagtcattcctcctaaggagctggtgtcttcatccagaagggacagtttgtgccagctctccagagataaaagatctgccggaggcgctgggcaatgaccccgggactccaggccagaggggtctgaagctgtttgggaaagcagcgggactccttgggaagatggccatggccccaagcccttccctggtgcaggtgtacaccagccccgcggctgtggccgtgtggggaatggcacgacgggctgggcacctggcacccctacagtgccaccgtctgcagcttcatcgagcagc

SEQ ID NO: 320224 - DNA, 993 bp, Homo Sapiens
  misc_feature (79)..(79): n is a, c, g, or t
  misc_feature (185)..(193): n is a, c, g, or t
  misc_feature (231)..(231): n is a, c, g, or t
  misc_feature (349)..(359): n is a, c, g, or t
ccaggggaggcctatctgtgggggggccggggagaggttccacattttgtgttttgtctccaagacgcccggactcagntcgtgccttggggggcccccacccccagggagcggtgggccaagtgtccggggcgcaagcccagggggcggtttgcgggtccaggggttcccccgaccagggtttnnnnnnnnnagtgttaggaaggcccccccaagggggaagggggtctncgggggtcccgccccggcacaaaggggaggggcgggcttcgcacccaaggtcttccccaggggttaacttgtccttcgggggggatttccccccttgaccaggggcggttaagaaggnnnnnnnnnnngggttgggttggtcgtccacaggccaggcccaaggcaaggccggttgggcccccaacggggtcccgttgcccaagcccccgccggtgattgccttctcgcccgtggcggagggaactttctcttcgggggcagggtagccggggcactccgggggtcctggccagtgcagctctgccccgcagcccgagcagttcacgccgctgggcggcaatgccgggtccgggtgccccacgaccgggtgctcccgggacctggcccgtaggttttgctgtcgccgctcctcccgccgctgctgcctctgtcgctcctcctcctcctgctgttgctggagctcctgcagctgcttttcgcgggtgggttgcggctccggatccaggatgtactccgggaacagaaaacgctcctgcatgtcaccaccttctccaaagccctccgtgtccacggggtcataaggaagctcgcgtcccagactcgatgagtgctggaaggaggaggcggcagcgcacctcctctccaggagcggctcccggaggccatggcgcgctgccgtgggagcggatccacgaaggaaaaggctcagcagcctgaacggtaggcgagcgggcagcatgaggaagtagctccaaagggccc

SEQ ID NO: 320225 - DNA, 2419 bp, Homo Sapiens
attggggtggggaaatcccaagccctttgtttattgccccggggttctcccttaggcaaccaggtaaggggccccgttctcttgaccttctggggcccccgggccccaaccccaattggttttggaaagctttttcgggggccgagggcggccgccaaggcttttatgggccgttcgctccgccgtttttcaaagtcagaagttgcccctttatttttagattcttaaatattctagaatgaggtaaaacgagcctgccagtacaaagtgaaaattctacatggtgcatctttggcgcttcatgcatgattatttcaatgaacctcttcctggtcactcttaagatagatctgagtttttgactcgccagtcaagggctttggcgacactcaatgacataatattcttggaaaaagcagtagcatttctgacttttcatattcagctcggaggtgtattgtctcgggctcctgtgcagtcgagcgccacggctgctcattggatgatccaggatgggtccttggcaattttcgggttctcgggtccgaggatggccaggccgtgtgtgctcttcccagtgccgaggtacctatcgctcacggccaggagcttgtcgtggctgacagcaaagagctgctctctgtgggcctgcttcatctcatccgagaggccgtacaagaagtggtccattcctttgtctgaaggagcgacaggagcatctacggttgagaagacagaaagtttggcttcgtcgatgtcttgctgtgtgaattttccagacttagcccagtcgacagccttcccaaaagactggagcgtctctattgtatttgggtccctgtaagagtaaagggtgaaaatcccattgtggctgagttttgcgcctccaccataagcaccgcctttttctcgaatttctgtatgcaagaatttggcagtcatcaaacgtgcaaggattttaagactggcatgatctgggtccgtgtaggggacagttcggatgcattcacccacgtaattcaccgggaagggcatcaggaagtgagtcttcatctgccagggcttgaaggtgggttccatgaccagcttcctaatgacctgggagccatggggaacgtgggcatctccaccagagctgctgggcacaggtttctcgaccgtgtgtgggcgcacaggcctccgttcctttttactccgaccgatgcttctaaggaagtcttcgaccgctttttctgtctgaggcatctgctgaggagtcgcattcactgaacacctcatattatcaccatttaacaagtgtttcttgatacgtgggagcttcctcaggatgggtttgatatctgtcatttctgcaatcctcttcatcagccgcacctgatccatcccgctgaaggtctcctgcaggtcccctgcgggcgtgagggtccggcctgccctgatggatgcgtacaggtgcccagagtcaggaattccattggcgagctcctgggcggtcatcttcaccagcaccttgaagtgctcctcttcttcaaagcacgggttgttaaatatttcactccatagctgcatcatgtctggcaggtttcgatccaggcagagagaggagaaaagcacaccctgctcgtaggtgtccatgtgtgagtcgtcggggagcacgtggggagaagcactcatccctccggtcttccaattctatctgctgagcctgctcccgttagtcaagaaggtcgcagcccagcttgggtgaggacgctgcagaagaggggcacatagggcctcagctcctcggggagtgtgttcaggctggagaaggcccggaaatacaccatgccattggtgggctgggcgcagtactgaacagggatatctccagctgtcaggaccacgtccaactctgtgacaggtatggtgggttcaatatcggaaactttcaacgctggcagacaagaggcatcttgaggtttgctttgttgactccgtaattctagacctttctcgtagatctgctgcctgtctccgggggacagagcctcgaccttctgcttgagcttcgtggcttccacctgtgcctgcttctcgtgatacttgtcatctggcctcatcgataaagtcagcttatgctggttattcttaaaatactgttttactttttcttgcaaaaattttggattttcctgcaggcactgtctgaatttagctaactgatttcccaacttcaagagctccacagggtccccatcatggttccagcaagaagctatgtatgatgtcagcatcagcccaaagctggtagactgatgtttcatctgtatttcaattttatgaagtaaagcctcattcgatcatcttcaaatcctttctcaactacttccgacgcgtgggtcgacgatatcccgtaattccggaccgtaccagcctg

SEQ ID NO: 320226 - DNA, 1749 bp, Homo Sapiens
  misc_feature (316)..(328): n is a, c, g, or t
  misc_feature (469)..(477): n is a, c, g, or t
  misc_feature (641)..(729): n is a, c, g, or t
  misc_feature (731)..(731): n is a, c, g, or t
cccgcgcctttttgcggctttttaaaagcgtggtggcccccacatatttgggggccacactttttgtttgtcggccgcccccggttgttttccccccacccgggggggcccaaataatttatttcctcccacaaggggcggaccaaagagggggtttgggaaaccccccgctgggctcggaaattttcgagggttttcaccccacaccccccctttttttgcgaggggggcttttcccaatttttggcgccccggaaaagtcctctaaaaagggaattttcccccccggtttcttttccaaagggagggcgccacnnnnnnnnnnnnnccgtaaatattgaattttttgaggctccgccttgggggcccccctggttggaaagaatcccccgaacatggccctcctcggaacttccccattttggggatttgtttcaaaagaacccttcgggtttcccccccgggccgnnnnnnnnnatcgtgtgaggaattcccaaggccctttgttcattgcccccgggtttttccttgggaaaacacgctatggcccatgtttcactttcccttcttggggcccggcgcgccccaacggaatggtttagagaaactttttcaagggccgagggcggccgcccaagaannnnnnnnnnnnnnnnnnnnnnnnnnnnnnnnnnnnnnnnnnnnnnnnnnnnnnnnnnnnnnnnnnnnnnnnnnnnnnnnnnnnnnnnnantaaagagcccactctgctttatttacaacacgcaggctgtctgtacaaacagcggccgatattattaaaaacaaaagaggtgagtgagaatcgtcacctttctgctttccttcctcacttggccaggctctagtactccacctttgagctgccatgcccaataggggaagtccaaaattaaaaatacaaccggtgtagaagaaaataaatggggagtgaaatagaagaaaagatgagggaggggagtgctaatatttacactagagttttatagacaactgtcccattccatcccaattccaatcctgacccagaaagtgatggtggcaggtccaagagacagagattatgtgtcgggacacagacagcctcccatccccaaccgtaatggattcaatttcaagtccacagagtggggaggaaggatagggtgggaaagtgagacactcattttcaaacaagtctcccttgagaattcctgccttgaagtgcagacagtatccaagctccaggggataggctgaggaccctgaggctcagttcccaaatcatgttgtcatttggaagttccaggctaaagttggtgccatcagggctctccagatttgggaggcccccctaaccgccgggcctctggcttcagttccttgcatttctggcaataaaagaagtcggggacgttggtcttcttaatcttagcacaggagaggtggatccacgtcccacacaggctgcactcaatcatgggccgccctgcaaagggctttcgacagtaacatgtgatcagatcccatgagtcatcacctgattctaccatgatgtcctcgtccatgacccgcatctcgccttcactggagctggcatctccatcttggcttgtttcagtgctgcccacctccttgctttcactgtcagcaggagggactccttcagggtgcactgtggcagggggcctaggagcctcagggggtgttggcagcacagggactggggcttcaccccctaccactgtgccatc

SEQ ID NO: 320227 - DNA, 1044 bp, Homo Sapiens
  misc_feature (69)..(69): n is a, c, g, or t
atgaagggtacaaaggtgatggtggccaaaagtgtcccctttggcccaaagattttaaaacctccacanttcattccccaataaggtttctcagggaccagatcagtaaaattccccagagacgtgcccatctaccatgtggagctttcccacctccggtctgcttctaatgttgcaggagcatgggtaaaggcctgcaccagctcttgggtggtaaacactctatagagctcctctggtgacgtcaggaaggtttccttaagagtgatcttacaagtggggattttgactccaacaggtctggcctgggtttttgaaggagcaggcttagccttgcgctcctcagttttcagtgctggctgccccactgggtctactgactctccattcattgtaggtaagatcatgccctgggtgaactctgttttgagggtgctgatgtaaattcccattgcttctcttagaagtttcaccccttcttccttcattaaggccacgagatttgtgtcaggctcatctttggcaaggctcacactaatctccacttcatccacgctgttttcatcagacaaattggggatctccacatgtcctttgtactgtactcctgacttagaagtacctgtccagtttagtttgacgctccattcataaaagaagataagtttccctttgcgattgttaatggatgcctctccatcaagcttactcacttccgtcacctcacacttgccttcttcattttgaacctgcactgccaagaacagtgttttcagcttatccgtggaccaatttgaagcatctctctccgtccagtgccagttgttgacgttggtggcgtccgcccgctcctccacgatccagcgtgggtctccctcaccccacttggccatcggctctcctatcgcggcgccaccagctccggagcagccgtagccacagcctcaggaccgcttagtgccagccgcccggcagcgcctggaaactactagaagcggccgcaagcacctcgtgccgaattcgccacccaggcctcgcttcctt

SEQ ID NO: 320228 - DNA, 2454 bp, Homo Sapiens
  misc_feature (488)..(556): n is a, c, g, or t
  misc_feature (780)..(791): n is a, c, g, or t
  misc_feature (1002)..(1036): n is a, c, g, or t
gagcgacgggggaccccagctgaggcgcggacgcgcgcgggtccgccctctcgctccgcaacgcgttgtcgcacgggccgtggtcgaacacccctaactcccgccccgttcctatgttattgggtagtggcacgatatttgggcgggcgagggtggtcagagtgcgggggtgcggtactggagttaggggaaaaagggggtggcggcgtgggtcggatcgcccgcgtgcgaggattgcctcagcgcttacacatgcacgagattcctgtggcgatacccacccggcacgcgagagcgtcactccagagctctcgcgacgggggtcgtggcaggtggtgtgattcgtatggagggagtacaggcttcgcctcagagggagtaggtggggctggccggacggtagacgagggataatgtcgggccgggcggaaagtggacctgggcgcacgtacaggggtcggccggaagaatgtgggcggtcagttgtnnnnnnnnnnnnnnnnnnnnnnnnnnnnnnnnnnnnnnnnnnnnnnnnnnnnnnnnnnnnnnnnnnnnnaatcgttggggttttcttatcctacgtgatccgccgggggggttgaagcatccgccctcgcccggggcgggagaggacgagcgagcggggggccgagccccgcgggggagtgctttgcccgcgagtaccgcagtaggcacgcgcggggggatgagtgggggcagctaccatcctccgacgcggggggggcgactggtcgcccccagtgcgcttcgggagtcccnnnnnnnnnnnncccgcagaccgtggtgtcgtccaccacggctttcggcccccgcgcggcacggaaggaaagaggggcggctgttgtccttgcgcatccggtccactccagcgggggtccgggccatccgccggggcacgtggtcggcttgtggtcgagtacatttaattggtttggcacgcgagggcggctggccggcccccccggcaaacgccgtcctgannnnnnnnnnnnnnnnnnnnnnnnnnnnnnnnnnntgcggttttttaaattatgtttatttagcatatgtacacataaaagagaaattgccctctgaacccacccagcagaaaacatgcacaaacccaaggtatatgtggaagggaggggccccggccccaagttagcagctgggacgatgcaatcctgtgagtcgcaagccccagtcaggagagagctggactgaagtgtccagcaggctggagtcccctgccgctggccctaaaataagcgtgcgccatagccaaaggtctgtttaatgccctcaaagtagtaccgctgccagccctgtcgcgtccgctcttcctcaggagcagggatgcctcgaccttccatgcacagctcagtctctccgttcttgtcgatgaaggtcaaggtgatggtggcaaagtgtccctctggccaagatttaaacctccacttcatcacaatatgtttctcagggaccagatcagtaaattccccagagacgttgccatctaccatgtggaactttccacctctgtctgcttctaatgttgcaggagcatgggtaaaggcctgcaccagctcttgggtggtaaacactctatagagctcctctggtgacgtcaggaaggtttccttaagagtgatcttacaagtggggattttgactccaacaggtctggcctgggtttttgaaggagcaggcttagccttgcgctcctcagttttcagtgctggctgccccactgggtctactgactctccattcattgtaggtaagatcatgccctgggtgaactctgttttgagggtgctgatgtaaattcccattgcttctcttagaagtttcaccccttcttccttcattaaggccacgagatttgtgtcaggctcatctttggcaaggctcacactaatctccacttcatccacgctgttttcatcagacaaattggggatctccacatgtcctttgtactgtactcctgacttagaagtacctgtccagtttagtttgacgctccattcataaaagaagataagtttccctttgcgattgttaatggatgcctctccatcaagcttactcacttccgtcacctcacacttgccttcttcattttgaacctgcactgccaagaacagtgttttcagcttatccgtggaccaatttgaagcatctctctccgtccagtgccagttgttgacgttggtggcgtccgcccgctcctccacgatccagcgtgggtctccctcaccccacttggccatcggctctcctatcgcggcgccaccagctccggagcagccgtagccacagcctcaggaccgcttagtgccagccgcccggcagcgcctggaaactactagaagcggccgcaagcacctcctggcttgcttttccgccacccaggcctcgctaccttaaaccctagtagtactgcca

SEQ ID NO: 320229 - DNA, 1806 bp, Homo Sapiens
  misc_feature (793)..(804): n is a, c, g, or t
cggttgtgtaacacgtccacgccggagtgtcgttgttgcccctcgtggttgtgcgttgcgccttgtgggcccgtacgcgttgtgcgttgctggtgcccttgtatggccaggggcacaccccgtgctgttgtgggacttgttgcgcgagacgtgttgttgatggccatggtgttcttgctttcccgggcccaggtgccctgttcttcgcgtccgtacggtgtggacgtaagagttcactcgcccgatgctttagtgtaggttgtcaccacctgggaaccctggctctcctcgcactcactttgttctgttctgcctatgttcgtggacgttgggtcaccatcgcaggcctgtcctacgagcgttcctgtccttgcctccctcaaagggggtaaagccccccgtcggatataaggaagacagtcttgtttaggcttcccggtacctgatagcaatgtcgcccatgttaaaaaagtgtaaagatggaggcttggctgtgtgtggctcacgctgtgtaatccccgcactttgggtaggctgttggccgcccgatcacttgaggtcacggagttcgaggaccacacctggcccatatggtgaaagctctgctttcgtggtctgataatccctctcaatttagccacggcatggtggtggtgcaccctatattcccagctatctcaggaggcttgatggtcacggagtattgcttgaaaccccggagggtgaaggttgcagcgacgctgagataagtgcccttgcactccagcctgggcgtttgcagctagactccgtnnnnnnnnnnnntaaaaaaaagtttaaggatgtatcttaacccacatattattttctctacttgaatgcatcctctgtaacttagtatatgtaatactacagatagactttctcaacatttgctgcctatgctaaggatctgcagccaggttctcagaagcagtacctaccaattctcaacagcagatggcaatgttgtacaagttaacgacagaactacttttatgccacaggagaggaagacacaaggagtcaaaagggggaaaaaaaagtttgggttcatagtagcaggaacattaacagaatagcctgagattttaacagcataactcattccctcttccacctttgtactttatccaggtcaacacatcagggttctctaacgattccagtattctgtttctttactgtaagatacatgtaattcttgccactgtgattaaacaagccctgtaatagtcagcagggttaaaaagagattacggaaaggataaactcctacctactttcttgggagatgtgggaaagatttcaagtcacagcatttttcatgactgtttataaacaatggtcatttatatccacactttctcttatttacattagttttggcccttaggcaactcatactcctacagtgattattggctttgctttcataacatgtatttttaagtatttactctcttaatggccctcgatgtctattttatacatcatatctcttaattctctagatggaacactgaaggacaggaattaagtaagtgactggccgtgcaagggttggaaattttacttatttttccttggtagaagttatgttaaaaattcaagcaaccacatatctaacagaggaattttatctaggatatataaaaaacctctcaaaactcaatagtaaaaagaacaaatgacctaaatagaaaatagacaaaagacatgaagacatttcaccgaagaggatacataatggcaatattagcacacaaaaagatactcaacatcatt

SEQ ID NO: 320230 - DNA, 795 bp, Homo Sapiens
  misc_feature (95)..(123): n is a, c, g, or t
aggggtttggcgcaggaccctgtcgcgttgttgcgcttaaatttgtccaaaatttgtccaatggaatttaggtggtacccacttcaatttttttnnnnnnnnnnnnnnnnnnnnnnnnnnnnngccggctcccaaaagatagtcttatcgcccttctttaaaaaaaggaaactgttccttttaactttacacccaccccacaccccaatttcaaaacatcatttaattgtcttggtcatggacatttccaagatgagattttatatttcgctcccacagcttctggttatcagaaaacccatgctttcctttattgaaggagtttggtccagctgatgttggtgtatcccttccaatattcttcatcctcatctttgcttctggaggcatttcctctggttcactatcttcatcttcattaaaagctgctgctactgaaagagtttttggagcaagagttggaacagtttctttaggcttacttgatccaagtttgatggatatggctgatgctttctttgtcgtctgactacctatggcaaatccaaacttggagatctttgtaggctttgttgggaggtcggcagcttcttcttcagctgatcgcttctcagcgctgcgactggaactttcccctccattactggaagaaacagtcttagttttcacaggtttttctgcttcttcttcaggtcctccggcggctccagctcgctgcgacttttcaggcttctcgtctcccgccttcccgtccgccattttccccgccgcggcctcacctgcagccacgccaag

SEQ ID NO: 320231 - DNA, 815 bp, Homo Sapiens; identical to SEQ ID NO: 139145
  misc_feature (189)..(215): n is a, c, g, or t
  misc_feature (229)..(229): n is a, c, g, or t
  misc_feature (278)..(278): n is a, c, g, or t

SEQ ID NO: 320232 - DNA, 614 bp, Homo Sapiens
atttgccaacctgtctcagtaacttatcatatctctgtgatcctcaaggaaagcacttttgcttttacttagaaagcgtttcagatttgctttatagactcctgctgtcttcagtacctgataaaactttaaccagggaagcattaaacacagtgcagcagcttttgcccaggcttctaagttcctgccggcagcatttatcaatgtaagaactaggatgcttcctgcagtggcactaccttcccctagagctggagcatgctgcttggccttaagccccagcatgatgaggcttccctcctgccaggtcagtaaaagttagagagctcagaattgggtcttgcctgggtgcaggtggcagggtttgctgaaacccctaaagagaagtcaccaagggaggcaggtaatgaatgtttccagaatcagtcggatactcatagcaatttctggctatctttcaaatgttgaatttctggatgctgagagggactttgatttgatatcattaaatccaggacagtcccaagaagtgcttggagtctcggctctgacagcccaagaagggaaataacttgtattaaggaacaactatgagccaggccctgagctgtctc

SEQ ID NO: 320233 - DNA, 829 bp, Homo Sapiens
cattccagggtaaagggggccccccaggcccaaaaggtctaaaagtggaggatagaatcccagttcgtaactttttttcgttatcctccattcgggtgggtccccagggattaccaaggctttccttagcattaattcaattgggggaaaattttaatctccgtgcaatatccagtgagctctcacccatggttattcttatattgtggggtctgcacggcttgccaagagcagagggataagagactggtttttcatttcacaggcataatgtaatgcggtgcagccataacaatctgtagcattaacttcgacgccagcatcaagtagcattcgtacaagagcgtcattctgctttgtctttgataccatgaggaaatacccaataagcagaacaggcattaagaggataattagtagataatcaatgaaggtaaattttttcttcacagcataatgcaagcaggttctctctttctggtttttgaggttgacattagcatttcttcttaaaaggaaggaaacgattctcacatgccctcgcctgcaagcacagatcagggggcgtgtctccattaaagccatcttgaacgttggcatagctgctgtcttctttcacccaccgccacacttgtccaaagtcattctgataggctgcttggcagatgggctcagagtataggattcccatgctggtccttcacaggcttacttcacctctacagctccttgaatcttctggaggtatttctgatgaatatcaaaatccttcctggctgagaggaaagtccctagaagtccaagctggtggcaagctccaggagtcccc

SEQ ID NO: 320234 - DNA, 971 bp, Homo Sapiens
  misc_feature (48)..(48): n is a, c, g, or t
  misc_feature (78)..(78): n is a, c, g, or t
  misc_feature (81)..(81): n is a, c, g, or t
aggcagggacagtcgagcgcggggggaaaaaataactaacaaaatagnggtcgcggggggtgcacaagtgtatacctnctnggcggcgggggagaacaagacgggtggcggtccccccggtgctcttcatcagcagggggaacccccccggaggcggctgggaaaacggtggcccaaggtcaagaagaatgaatttgtcgcgaatgtttcaggccgtcggtatggtgggacagggctccctttgggtacacattggcagcagtcggtgccatggcctcccagtcccagggggcattccctccccgacagcccctctggtgcagctttctgatgagttccagtaggttcatctgcaggctgcagctcctgtgggattggtggtcacgtagaagccagccacccccgccttctccagtgtgctgtgctggtcagccaccttccggtccagctccaggatgatcttttggtccatcgcccgctgctcctcacggatccggtgttccacggcctctcagttctcgctgctgagccgcctgaaccacaggcaggttgtggggccggcaggcctgctgggcttcctggtgcttctgccgcagcgcctgcctgagcactcggtgctcgttctgtaggcgcaggcgctggttgtacaggctcttttcggtgaggtgctggatctccagtagcccctgcacgatttcgaacacggtgccgtcgagaagcgccagggccaggtcgctgagcgtggtgtaggacaggcgctgctggaaagagctgggcaactccttcaccaggctctgtagcgccgacagcaactggtagtgtcgctcctgctgccgggcaccgtccgccacctcctccaaggcggccgcgtagcgctccatggcgcggacgcccgctagccgccggcggcggcgacgagctcccccagcttcacgaccctcgtgcggaattcgccacccaggcctcgctac

SEQ ID NO: 320235 - DNA, 427 bp, Homo Sapiens
  misc_feature (19)..(19): n is a, c, g, or t
  misc_feature (64)..(64): n is a, c, g, or t
  misc_feature (73)..(73): n is a, c, g, or t
  misc_feature (116)..(116): n is a, c, g, or t
  misc_feature (159)..(159): n is a, c, g, or t
  misc_feature (277)..(277): n is a, c, g, or t
  misc_feature (281)..(281): n is a, c, g, or t
  misc_feature (297)..(297): n is a, c, g, or t
ccccaaacctccccctttnaatgaaaaacttatccctagggttttgaaacaagcaaaatccccnagatgaaanggtgaaaaaggcaagctgggggtcccaacctggtctctccctncaaagaagggggaaaccccctgcgggcaagctgggaaaggcantggcccaaaggtcaaagaagatgaaactctgccccagacttcctgcctcctgtggctatggtgggacagggctgcctttctggtcacactgggcagcagcaactgcccagggacctcnctancccagggctgccttcncctgcccagagcccctctgctgcagcttccggatgagttccagcaggttcatctgcagcatcagctcctgtgggttgttggtcatctgtagctgtcaatttcctattaagtatgaggtcctatagctcca

SEQ ID NO: 320236 - DNA, 414 bp, Homo Sapiens; identical to SEQ ID NO: 33230

SEQ ID NO: 320237 - DNA, 526 bp, Homo Sapiens
ttaaactcagtaattcctttattttgattttaaattaatcacaaccatcgaagtggtaagaaacagctgacaggtgtacttaaaaatactgaattgacagctacattgaatgcagggtttcccagggtagttcttattttgtcacttactccaattacattcaaggtcgttatgcctcatctttttcctgagctgtggcagctctaactggggcacccagagagatacataccaggtaatctccacttctacttttctggtagcttggccctggcaaaatgagccccacaatctagaaagtaggatgctaaacaaagttgaatcaacatatctttttagaaaatatcaggttagagaatactcctgaggacctgtttctaaccagagttgacaaatgtgaaaaatgcatcagctaggcagcagtcatgtgaacacagcccggaacctgccaagtcaagggaaatggggttctggggcctgccttcccaggggtaacccaaaacccattatttcaaaaggaactttt

SEQ ID NO: 320238 - DNA, 905 bp, Homo Sapiens
  misc_feature (122)..(122): n is a, c, g, or t
ttagggagggagcctgggggccagagcttggagggcaggaagagagccactggacagacaagctatggtttggattggggaagagattaggaagtaggttcttaaagacccttttttagtanccagatatccagccatattcccagctccattattcaaatcatttcccatagcccagctcctctctgttctcccccttactaccaattctttggctccttacacaatttttatccctcaaatattcatccctggcccaaccagtcccctgagcctccctctggtggagactcctccaccccatgagctccccagagcatccaagacagagtgcacagagacctggggaaggaagctgaactttgcagagatgaggacaggtgcaggctagggtacagggtggtggtagaggagacaagttttatctccaggcccacagtctctccccaacaccccccaagaattccagagggagttctcagtgcccccggacaggcctctccagcttcacactcttggccgcttctccaatcagctcccagaaactcctgaactccagtttagagtcattgcagctgcccaggttggcaattttctcttccaggccacagttgctcggcatgagatggggcagctgctgggtgaccaggtcccgtagctcagaaggggtcagcgtctccttcccaccctccacggagtactggtgaaagttcttgatgagggtctcaatggccctctccacatcactgaattcctgagcatcctctgcgttggctgaccgacactgtcccatggtgcccactgtgtctggtcctttggtgagagttctgttgtcctatagctggccccagaggagctgatggctcatgatctgttggcagccgctgagacaagacaggagcccc

SEQ ID NO: 320239 - DNA, 942 bp, Homo Sapiens
gcgcgggtggcccactacccaggctagagggggcagggacggggggaaaggggattttggcaaaggtgggggttctttaaaaagaccctgttgtttttgttccccaaggatagtgccagccagtatttttccaggtgcccctaatttaaaaatccatttcccctaaagccccaaggtcctttttggggttttcccccctaaatacccatttttttgggcttcttaccccaattttttatcccctccaaatatttcatcccctggccccaaccagtccccctgagccttccctctgggggagactcctcccacccatgagctccccccagagcatccaagacagagtgcacagagacctggggaaggaagctgaactttgcagagatgaggacaggtgcaggctagggtacagggtggtggtagaggagacaagttttatctccaggcccacagtctctccccaacaccccccaagaattccagagggagttctcagtgcccccggacaggcctctccagcttcacactcttggccgcttctccaatcagctcccagaaactcctgaactccagtttagagtcattgcagctgcccaggttggcaattttctcttccaggccacagttgctcggcatgagatggggcagctgctgggtgaccaggtcccgtagctcagaaggggtcagcgtctccttcccaccctccacggagtactggtgaaagttcttgatgagggtctcaatggccctctccacatcactgaattcctgagcatcctctgcgttggctgaccgacactgtcccatggtgctcactgtgtctggtcctttggtgagagttctgttgtcctatagctggccccagaggagctgatggctcatgatcctaagtgtgccctctggacagcaggcagtatatttgggtgaaaagccttgggtttc

SEQ ID NO: 320240 - DNA, 693 bp, Homo Sapiens
  misc_feature (674)..(674): n is a, c, g, or t
ggcacacacaaaaaagtagttttaagcttgtttgcacagttctttttttccattggaaatggaattcattgccttaggtctttttaaatagtgtattattatcgttggggctggctctatgcttgaaaaccagtttatttataacctgttataagtgctatattctgtttgcagttaggaaatgcagaattcaaagtgatctcctagcttgtaagcaaactgagatgcactatcccttttctataaaaaataagttaatgtgtcaagaaaccaactctattaaggtggggtttaatattaccctttcctatgtgttttatctaattattttggttgttaatatggtgataatggaaagtcaagttaaattttaaatattaagaattctgatttattgagattgaattatgccaccacgtttatgtaaaaatgaaggtggcaccgtggtgagacctaatgagaaatagttactcagttgtaaaaattttgatttattctctttcttctgacctccttgcctcttgtcttgaaccataggcaaaaggatactgcatctctcattactgtagtgctgaggttattgaagttataccaaaacacatctccagtctctgtttcttgggaaaggtatcctattaccatcctgctaggctgactgacaaaactaggcgggnggattaaggtaattgtatt

SEQ ID NO: 320241 - DNA, 1988 bp, Homo Sapiens
  misc_feature (64)..(181): n is a, c, g, or t
attcggacgaggctgccccgcctcccagtagctgggattacaggcatgagccaccacgctcagnnnnnnnnnnnnnnnnnnnnnnnnnnnnnnnnnnnnnnnnnnnnnnnnnnnnnnnnnnnnnnnnnnnnnnnnnnnnnnnnnnnnnnnnnnnnnnnnnnnnnnnnnnnnnnnnnnnnnntgagccagtgcacccggcggaatcttggaatttttatagacagcacctcagtttctgactccagccgcacacctcctgcctctgccagcaggggttgccgccagaccagagccagggccaggtccctgcgtccatcccccccggtaggatggacgtgagccatccttctaggggacttttttcagtgtgcgactcgtctctgttaggtggtaggagccagtttgtgtggcctgtgccacgctccacagtgcgtggctgggctctgtgtgtggcctgtgtcccctgtccctgcaggacccagcaggcatcgtggcgtgacagctgtgtccaagccactgcccgggcatcccatcacccaccagggtgcacggtctctcctgctgggggctttctgtcgcatgtgtgtctcctgtcgactctgcagtttgttctcagagcagaatgtttcctgttctcagtgcacaaagacactggtttttcatcggcgtctaaaaccacggttcctgcctttcattggcacacggtgtgttcatttgtttaaaacagtttaatgagtaagtttagatgactggtcaatatcttaaaaatgtatattagtaagaagttcttcctggaatttttctttcgattctggcagaataaacaggtgtttttagttttcccactgtctgagccaagcaggaccctgtcccagagcaagagatgtccccttccatctctgacccttgcctgggacaagctttgatggggggccccagcttcaaggctgtggtgggaacagcacccccaaatgccagcctctcctttcttcccatccaccagtatactgcggggccatttctggtctttgtccaacaggaaacccatttctggtgggatatgccttccagtgccacagggccactcaccccatgcatctctgtcctgcccgtcagtgctgggacggacagcaagggcaagcccagtgtctggcggataggtgggtgggaacagagaggggagaatgccgtcctaagcttctgcttggggatcccccacacgacctgggtactgcctgggaaacctgtcctaagtaaaactatggacctcgcctcgcccaccggcctgcgaagccagcatctccgtgaaggtggatggaagcgcctttgtcctcattttgagctgcaagctgggtcagcggctctgaagccctcgagtgactttctaacccaagacccagcccctggcaggaggagggtgggtgcagggctggtgggacaaaaagagggctccgcaggcctggaagacccttccagtacatcccacagcgtgtcgagcagctgggagaacctgtgtcaagctcgagccgtcataggtccccatgaggtgtctgaagccccttccttgagtgatgggaggcagaggtgctgacgttctggagcatggacgtgagtcctcagctggctccgcgtgggcccttggagggtgccaggtgatgtggtgaccttcgtggatgccttgtaacttcatggtctgcgtcattcactgatttagaactttaaccggagcttcatctagtgattgcaaaactggaccaatgggacggagcggcggcgcagcccgctccctccgtggaatggagctcagactcttcggaggcatcaaagcaccgtgtcggctccgtggtccccctgaccgagggagtgcggcctctgctaaggttcgggggtggcttcgtttgctctggagtggcaggacctgcttgatgccatgtgcatgtttgtgagcctcggtcctacagcactgaaagcgccgaggctgtattcgt

SEQ ID NO: 320242 - DNA, 538 bp, Homo Sapiens
ctgggtgacagtgtgttcaccatggttttctctttttctgggctcttccatgctgccctctgtgctgtgtggggcaccttgtcctgctcctccggcggtgcctggttggcctcctttcctctgtctccggtggtgtgggccttgggctgggtttgtgtgttgagggcattgttctctggcactggctctgcatagatggttgtcctccttgcccttgtgggtgcctgggacttaggctttgccagggactgtagagacctttctttaatgttctctgtgcgttgatgcctggaaggctttgtttgaggctccttaataaaagagggcaaggcgaagagaaagaagaccaggacagccagaagcaaggaccactggacgccttggctcaggtgcctgcatctccacaggcaggacctcatggtggtgggtcgggttctagaggaaggttctgcatgtcctggggccttgatgtaggcagctgggagtctcaccgctcaggtttcctggccaggaagtgcacaccctttgtcttaacaat

SEQ ID NO: 320243 - DNA, 1174 bp, Homo Sapiens
  misc_feature (1144)..(1144): n is a, c, g, or t
gggctggtggccattttatccactttaaaataaatattgtgctgtaaactgttcagaagtgaaatccatattacagtaggcaagtacaagggatagacagcacagtgttttgttagagtaaaccattctgagtctcagaagcatcaccaactgtctacatcagatagatactctgagagtaaacatactcataagaagaaaaaagtaatagataaaagttctgagagagaagcaacctattataaataagagtttcttgagattaacaagggtgaggacaactcccatgtgagcctctaccatgtgcccagtttctagtttaactacttgcagagagcagttgctatataaaaatctgttgaaaggatttcaggtactagaatttacatattttacatggtctctcatttacacctatcaatttctttcttcatgatctttacttcattagctacttacatatactataatttacataataaatctattatttaaaaactttcaataggtacaacaattatgacatttgattaggctggactctaacttgcttggatgagatttattttggaatcacagtatccaagcaaagaaaaacagtcagtttataagacacaacaaaaatgaaaaaaagcgagacaaatgtctgcctcagaagtttatcaataacctcttatatacacatatgtattcacaaagtggttgagagtcattttataccatcctttagaagaggtccaatggctgagaactctataatgagacacagtgggacagaaattatcatgactttcaatgatcttttctttcccctaactttaatatcctttagttggggagagaaagaagtccattttcatctgctgtatctaagattttacagatcactggagattcaaccccaagaatatattgacaggagtgaggctctagcatatatacagtaacagcatgaggtgaatctgattctttgcactttagttttacagtcacctgtcttggtttgtcagttatatcacaaatatctccatttccataaaaatgtgacaccatcctgactgtctggggtaccatcgtcttgaaggatgataaggctctaggcaggtattcttcttaggcccattcaatatggctcttcttgggntccctggtcccgacaaccacagagggtttt

SEQ ID NO: 320244 - DNA, 914 bp, Homo Sapiens
  misc_feature (745)..(754): n is a, c, g, or t
ttttgggtctcactcatgcttactgaaacattgtgccaagaaactctgtgggatttgtgtcccttaaaccagactcacttttctgaaaaatctccattgttgaggagaggctgctcaatcgacaccccgagttctcatgactgggaagatagttttcttcaggtgtcaatggcgttagactcccaggaagactagccctgcccacagggccacctgttggtttgagagcgtgttcgtgttctcttgccctccctgcctaagagctactgggatcacgttagcgggcatttaggctttgatgagagggcacagtttgagttaggtttacctccccctttctgtgcctgggaactgtttggtccagctttagaactgtggttttgacttccttatctcttgggagaagcttctgttttaaggaatttctcttccttcttctccttgcctctagccttctcctggaaaggcctgggatatggtttcctaaaatctccgcctgacaaacttccggaaaaacaggtagccagcaacttttccttttttccctaggcggcctaaaatcccccttttccccttataaacattgggcttccaactttggtgaaaacccccattgggaacacgaattcccgcagggtttttcccggccccctcccctaaggcgggttggggggaacaggaacctcatccccggggttccaaaaccaatggcctttttcccgtcctcctgcgtcttgaagcccannnnnnnnnncaatttcccctccaagaatctccggttttcgggcccaagggccgttcccatcagcccccacgcactcgggggcctttatttctctttggcccacttctttttcccctttcccctgaacgcagctttatgtgtaccaccccccattttcttctatccccca

SEQ ID NO: 320245 - DNA, 337 bp, Homo Sapiens
ggggagtcgccgccactcgagtgcgcaggcgcctggcgattaccggtctcaccatggagcggaaagtgcttgcgctccaggcccgaaagaaaaggaccaaggccaagaaggacaaagcccaaaggaaatctgaaactcagcaccgaggctctgctccccactctgagagtgatctaccagagcaggaagaggagattctgggatctgatgatgataagcaagaagatcctaatgattattgtaaaggaggttatcatcttgtgaaaattggagatctattcaatgggagataccatgtgatccgaaagttaggctggggacccttttcaacagtatg

SEQ ID NO: 320246 - DNA, 941 bp, Homo Sapiens
aaaaaaacgggggccatcttccccaaagctgggggccaaaaagttcacacccaaggggccttgaaaagtttccccccaggccagccaggagcccaggggcccagggaagaaggaccgcccggccgttggaccgtttttttaagaaagtcagggcgccaagattgctcccgttcccccgccggggaggccctttcggtggtgtagatgggcgttgagcgaagacacagagggctagcccagcacgccggaagacggttgccccagccacgacaggggtgccttctgcccccctcctggtcccacaccaagcccagaagccccccgatgatgataccgcaggtgagcagggcatagaaggaggtggtctgcttgagcagcaggtaggagagcagcacgttgaagacggtggtgagtgagcggcccacattgtagaaggccacaccgacgtacttgaggcagaggttattgaaggtgatcatgccgatgaagaccaccgacaggggcaggacgctgcgggccaccctgaggtccaggcgcaagctggggaagtccacggcaccagggcagcaggcggccagagcgctgaggcctttgcacagcagcgtggtcaccaggcactggtagaaggtgacgaagatgggggtgtccagccgcagggaggggctgtccagcaggtacttattaaggaacaccatggagatggaggtgacccagtagagggagaccaccagcgcgatctgcaatgcccgcagcagaaagggcttctccccgttggcctctgcctctgcagaggggtctgaggccccggtcagcgccatgtgcaggatcctggaccgcttcagaggggcccccttccagaaaatactgtttccccggccggtccagccgcatcagctcccgcgtccctgcctgtgtccccgggccgcgaaggcgacctggcg

SEQ ID NO: 320247 - DNA, 1059 bp, Homo Sapiens
  misc_feature (933)..(933): n is a, c, g, or t
ccattccggtggaggcagaggcagtcctggggctctggggctcgggctttgtcaccgggacccgcaggagccagaaccactcggcgccgcctggtgcatgggaggggagccgggccaggaacaatatgttagccgtgcactttgacaagccgggaggaccggaaaacctctacgtgaaggaggtggccaagccgagcccgggggagggtgaagtcctcctgaaggtggcggccagcgccctgaaccgggcggacttaatgcagagacaaggccagtatgacccacctccaggagccagcaacattttgggacttgaggcatctggacatgtggcagagctggggcctggctgccagggacactggaagatcggggacacagccatggctctgctccccggtgggggccaggctcagtacgtcactgtccccgaagggctcctcatgcctatcccagagggattgaccctgacccaggctgcagccatcccagaggcctggctcaccgccttccagctgttacatcttgtgggaaatgttcaggctggagactatgtgctaatccatgcaggactgagtggtgtgggcacagctgctatccaactcacccggatggctggagctattcctctggtcacagctggctcccagaagaagcttcaaatggcagaaaagcttggagcagctgctggattcaattacaaaaaagaggatttctctgaagcaacgctgaaattcaccaaaggtgctggagttaatcttattctagactgcataggcggatcctactgggagaagaacgtcaactgcctggctcttgatggtcgatgggttctctatggtctgatggggaggaggtgacatcaatgggcccctgttttcaaagctactttttaagcgaggaagtctgatcaccagttttgctgaggtctanggacaataagtacaagcaaaagggctgggaaatggctttcaccggagcaaaattctggcctcacttttctcaacgggagggcccccccaacggtctgcctgcccggtttctaggacaggaaatcta

SEQ ID NO: 320248 - DNA, 859 bp, Homo Sapiens
cccccctgggatttcgcgttccactggggtagatttctttcccagaaaccggcaggccggaccgtgggggggcccttccggtggagaaagtgaggccagaaattttttccggggaaggctttccccaggccttttgctggtacttattgtcccttagaccttcagcaaactggtgatcagcttccttcgcttaaaaagtagctttgaaaccaggggcccatggatgtcacttcctccccatcagaccatagagaacccatcgaccatcaagagccaggcagttgacgttcttctcccagtaggatccgcctatgcagtctagaataagattaactccagcacctttggtgaatttcagcgttgcttcggagaaatcttcttttttgtaattgaatccagcaggtggtccaagcttttctgccatttgaagtttcttctgggagccagctgtgaccagaggaataggtccagccatccgggtgagttggatagcagctgtgcccacaccactcagtcctgcatgggattagcacatagtctccagcctgaacatttcccacaagatgtaacagctggaaggcggtgagccaggcctctgggatggctgcagcctgggtcagggtcaatccctctgggataggcatgaggagcccttcggggacagtgacgtactgagcctggcccccaccggggagcagagccatggctgtgtccccgatcttccagtgtccctggcagccaggccccagctctgccacatgtccagatgcctcaagtcccaaaatgttgctggctcctggaggtgggtcatactggccttgtccctcgtgccgaattcgccacccaggcctcgctacct

SEQ ID NO: 320249 - DNA, 1474 bp, Homo Sapiens
  misc_feature (1336)..(1380): n is a, c, g, or t
gccgcggagcctctgcctcctgccatggggcccccgcggcctggccacaccggagctcccctctacgccggcccccaaggacccggccgggcctccaccggaacgcccgggggggccccggcttctcaaagaaattcttcgggaaccccacccggcgcaaactctcccctcggtctccagagcagaaaccctgcgagtaatagcttcaaattgagcagagaggaactccccccctttgcgacccgatctaccaacaggtgcccgaaagaggaaccagtcatagccacagtgagtagaggatcttcagtgggcttcaggacgtgtggatgagcccatcagcccacaaggaaaggcgcaggagggagatgaagaggggggtccgatcccagcctgagatacagtgtaccagcagcccgctgtcatcatcactgttaactaaggaaagcagcagcttcaggtagttttgtgtttgttgcaccagatcccaacactgatactggctccagtcaatgttcagagagtgagtcaggaagtcggggatgctcaatggggcatcaacgtagtcctgcttccagttaaatatgagcccttctgccatgtaatcccgatctttatattccttgaaaaattcacagcctggatacgggatggagaggagagtgaagtcggcatagcgctgggctttgtccaccttctcagaggaggttacattcatgccaaacttcaccttcttgttctccaccatcaggtcacagatgtatttgactgacaggtatcgaagcagcttgatgtcatagcctctgaccttatcaaaaagatgcgtgtcaccacttcgaagagcacagtcctcctccgtgacgtcctccacatctgcccaggcatcatctgcaccccctgagaaacaatagttgtagcctgagcgtccatacagctctccccatccagccagtgtggccgacctgcaaatgtgcttgcccttgaacaggattactgggcagacaaaccgtcctctgcaccgggccatcttgctgcggtggatgaggtcttgcaacttgctcacctgtacggtactctcaaacgtgtctttctccttctcagaactctcatactccaggaacacgatgtgccggggatagtggccacagatatccccattcgtgtttggaatcacgctgaaacagtagtctcggccaaacagctccagacatctcttctcaatgcgctcaaccttagagccgccggtcccgctgccatccttggcccggtactgagtccgggagaactcctccagcagctccccaagccccagctcctgaggcggctggttgcctgaagnnnnnnnnnnnnnnnnnnnnnnnnnnnnnnnnnnnnnnnnnnnnncggccatggcccagccccgcgtcccctcagtgtgcctcaagcgggcccatggcacctgcctgcacccaactccgacactagaacctccggaacc

SEQ ID NO: 320250 - DNA, 956 bp, Homo Sapiens
  misc_feature (162)..(289): n is a, c, g, or t
  misc_feature (784)..(815): n is a, c, g, or t
gcaaatccatctgatctcctggagctgggacactcttctgcctgtggacatcagagtctaggatttctagcccttggactccagtgcatacaccagtggcctcccgaaggatctaaggattttggccttgaactaagaattacaccatcggcttccctgggnnnnnnnnnnnnnnnnnnnnnnnnnnnnnnnnnnnnnnnnnnnnnnnnnnnnnnnnnnnnnnnnnnnnnnnnnnnnnnnnnnnnnnnnnnnnnnnnnnnnnnnnnnnnnnnnnnnnnnnnnnnnnnnncatatatagtcatttaccccacaacatttcagtcaagggaacagcatataagatggtggccgtccagtaagctaaggttaatttattacttatttactttatttaccttgagttcaagtcacaattaaaggtacatatacctttggaaatttggacttttgtatataaaagtacttttttttggcgggggcagtgggcagctctcatcctaaacaaatgtgttatttggtacctatgcaaagatttggttaaaagaaagaaaagaattgcttccataaatggagcattttcttagaaaaactggagcccatctaaatgtttttcaaggtcacgtgatctgagataatctttagtaaatagaaagctagtttaagtttcttggtttaattaaaacagacaattcttaagagttgtcaacattatttacagttcacacatacaacttctacctggatttactaatcaaaacacttacgtatggccgggcatggtggnnnnnnnnnnnnnnnnnnnnnnnnnnnnnnnntgagccactgcacctagccaagatgtctacttttaaatatttttatatttaatttttggtaacttaaaaatcttatattaacctaagttaaatgatggttatttgtattagtctgttttctggtgctatcactgaatacct

SEQ ID NO: 320251 - DNA, 1397 bp, Homo Sapiens
  misc_feature (472)..(485): n is a, c, g, or t
agttgctgaagtttggtatttttatgcagcattttctttttgctttgataacactacagaacccttaaaggacactgaaaattagtaagtaaagttcagaaacattagctgctcaatcaaatctctacataacactatagtaattaaaacgttaaaaaaaagtgttgaaatctgcactagtatagaccgctcctgtcaggataagactgctttggaacagaaagggaaaaaacagctttgagtttctttgtgctgataggaggaaaggctgaattaccttgttgcctctccctaatgattggcaggtcaggtaaatgccagaacatattccaactcaacaactctaggtaactttatggaggtggaagctgggttagttcatgctaggtggctgtagcactgacctcatgtataaaacgcaaaacacttaaatactgtgatctaggtcttaattgcaagctatactgaggannnnnnnnnnnnnnatgttttggctatactttcattccaaaagaagagctgaattgatgcttgagttacagcaccagtctattattagtgaatgaagtatattcttggcagataaataccagatcaaaagtcctgtttcagtaatttgattaaactgtagaatactaaaaaataagttatttctacagaaatctttgaagggagcaaaaaatcaaattacagtatatacctaatcattttaaagggaaataaaccaatcatcttctgaaagtcaaacagtatttgctatgttgtaatcccgttcaccattaggctgcaactggaccacgacatcatgttcattaatttcattttctgcatcactactgtcagtatcttcattgtcgtcttcctcatagtctgaagattctgtcatgttctgatgtgagcgggattccgataaagccccaaatgactgggcactgacagaagctaaaggtctcagtaaaggggtatgttctgtcacttcattttcttcttgactactgtctgtgtcagagtctgaatcgccttgagaaggaacaactttttgcttgcacactggacaggtttttttggttttagttagccaagggtctacacacttgcagtgataagcatgggaacagggaaggattctgagtttgtctccatcttcatactcatccaaacaaatggcacatacatcatactcatctcctttcttgaatttatgtacaggaagtttcttaagttgatctttacgaagtctgtttcttctagctctatgtctatcctggacaaattttgtgatcatgaaaatgactatcaagatgagacagatgcccactatgataaggaagggaattaggtagtattccaaaggaagactaaattctggaactaagataaggtggccccctttttca

SEQ ID NO: 320252 - DNA, 619 bp, Homo Sapiens
agggtttgctggggatgaggacagcagggcagtcaccatctcgaagcacctcagccactcctttattgttcttgaagccaggaacacagaactgcttatagtactcaaagtcccgggagctgcgagcattcaggtacgtgaggtagcggtcggggcatttttccacgcagatctggggagtgggacattggaattccagcagaaccagggggctggcacatttcacaatgttgaaataaaacagatagggtttgttctcgttttttgtgcccttctgcccgcagaactcgccccggctatcagtggggtagatcacctttcgagggtctccatgagtccaggctatgatgcctacagccacgtagcccacaatggccaggagcaggaacacacagcatatgatatccgtgcagcccctattgtaaatgggtcctttgaaagtgggatcatacttctgtggcgttccgtgtttcccgtagtagtggggccgctcgtcccccatccctgcaggcgaccagccccggcggccgcccgcgctctctcctgcgccccctcgaccctcccgagtctggagcgaggcactgaccgcgcgactggcggcggctcctcccagcacagc

SEQ ID NO: 320253 - DNA, 991 bp, Homo Sapiens
gggcagtgcgcaggcgcagtcccggctcctggcggcgtgttcctcttttcctcggttcccagtgttctggcaggtaaggaacgccggctcttcgcctctcagcgcggcttgtcctttgttccggacgcccgctcctcagccctgcggctcctggggtcgctgctgcatcccgcacgcctccaccggctgcagacccatggccgagcgcggggaactcgacttgaccggcgccaaacagaacacaggagtgtggctagtcaaggttcctaaatatttgtcacagcaatgggctaaagcctctggaagaggtgaagttgggaaactgcggattgccaagactcaaggaaggactgaggtgtcatttactttgaatgaggatcttgcaaatattcatgatattggtggaaaaccagcttcagtcagtgctcctagagaacatccatttgtcttgcaaagtgttggaggacagacattaacagtatttactgagagctcatcagataagctgtcattggaaggaatagtggtacaaagagctgaatgccgaccagctgccagtgaaaactacatgcgattaaaaagattgcaaatagaagagtcttccaaaccagtgaggctatcacaacagctggacaaagttgtaacaaccaattacaaacctgttgctaatcatcaatacaatatcgaatatgaaaggaaaaagaaagaagacggaaagcgagctcgagctgataaacaacatgttttagacatgctattttcagcctttgagaaacatcaatactataatcttaaggacttggtggacatcacaaagcaacctgtggtgtacctgaaggaaatcttaaaagaaattggtgttcagaatgtaaaagggatccacaaaaacacatgggagctgaagccagagtacagacactatcaaggagaagaaaagagtgactaagaagactcctagccagcatgctagtgaaacgactagcagcgatgc

SEQ ID NO: 320254 - DNA, 925 bp, Homo Sapiens
aggatcgaggcatggggcatgtcctttccatctgtccacatccccagagcccagctcttgctctcttgtgacgtgcactgtgaatcctggcaagaaagcttgagtctcaagggtggcaggtcactgtcactgccgacatccctcccccagcagaatggaggcaggggacaagggaggcagtggctagtggggtgaacagctggtgccaaatagccccagactgggcccaggcaggtctgcaagggcccagagtgaaccgtcctttcacacatctgggtgccctgaaagggctcttcccctcccccactcctctaagacaaagtagattcttacaaggccctttcctttggaacaagacagccttcacttttctgagttcttgaagcatttcaaagccctgcctctgtgtagccgccctgagagagaatagagctgccactgggcacctgcgcacaggtgggaggaaagggcctggccagtcctggtcctggctgcactcttgaactgggcgaatgtcttatttaattaccgtgagtgacatagcctcatgttctgtgggggtcatcagggagggttaggaaaaccacaaacggagcccctgaaagcctcacgtatttcacagagcacgcctgccatcttctccccgaggctgccccaggccggagcccagatacgggggctgtgactctgggcagggacccggggtctcctggaccttgacagagcagctaactccgagagcagtgggcaggtggccgcccctgaggcttcacgccgggagaagccaccttcccaccccttcataccgcctcgtgccagcagcctcgcacaggccctagctttacgctcatcacctaaacttgtactttatttttctgatagaaatggtttcctctggatcgttttatgcggttcttacagcaca

SEQ ID NO: 320255 - DNA, 726 bp, Homo Sapiens
tgcaaatataaacaaaagaaaaatccaactgaaaataacactaagtatttttgagttcctagaatgtccattttggtatttggttacattatcatatttactagtcactatcagcacaattaggttaataaagaagtgggtcattatattcaaagagtgctcaggaagttatgtgttcaaagttctctcataaataccatcgtctgcctgatactgctcttgtctaatagagggttgacattacaaaagaaaagatgtctgactcaagaactcagttgattctgtttgccttaagtttggttcagtgataggctgtcttctaacccctatactcctcttctctcctttaatagatgaggaaactaagggcaaacagttcgttacacttacgggaatcttatttccctctctaggggcagcatgttttcaccttctcctttgctgccaccttggcctaaactagcaccgtcttttagctagaccattgcgttaactgttctcctacacccatttttgttctttatttccacccacatgagtcactgcagccaatctattacaaatttaaatctgattatgaattcccctcctaaaactcttttttaaaagagactttattttttggagcagttttaggttcacagcaaaattgaacagaaagtacagagttccaatacagcccctatcagcatacatgcatagcctcccccactatcaacatcccag

SEQ ID NO: 320256 - DNA, 918 bp, Homo Sapiens
  misc_feature (477)..(478): n is a, c, g, or t
attcaaatttctaaaattgtctgccaaaggcttattcattctggtttgtttgctgttgggtgtttggggcagagttaaccatttctccatggtgtctttatactttactggtttgtgaattttatacaattgaaagtctttttttcttgcttctttcttctcttctcaagtttcccccctgtttctactttattgtttgtcctaaccatttctactacagttttttccttatggacccatactaggttgtacaaaccttaaggactcgttaccatttgcagttaccataagtgctttatcttctctatgcacaggcttaaacttgactgttgtatgttagcatattttctatgcagcagttggtcaacttcaactcaaaacactgttttcttatgtttgttacaaacttaattttttgaaagtactctgtagcatgacaatttttagagctgcaggttagctattatagctcaagcnntttttgttgtttttttcttcactttcttcacatctgaggtttctttctctaatccactgaaattattgtgtgctaaatttgggaaacagatctattctaactcattaacccagttgaaatttaggtctgtcatcttaatatatcatgcagtacaaggaagaatctttttaaagtgacccacctttcatgctgctccagcattgtcctgcttgtgctgatggtgtgatctaggtgtacgagaatttgctttacatttttaacttcaaagttcatcacaccagcttaatgagtcccattgaaataactcagtaaattgaaactgccaaatcactttttaggttccaaaaagagctaaagcatgtcagtgggcatgatgccttgcccagccaagattctaaggcatcctaggataactcaacgggattctactattggcacgt

SEQ ID NO: 320257 - DNA, 1308 bp, Homo Sapiens
ttttttacattgtaacaggtttatgcattttgaagtgccttctacacatccacccagaggctctggtgatttcacttatgcccaggctataaaatgcctttctctcatcccccagtagagcactgggatcaccactaggcctagggggcatatcaagggtttaatagactgggggaatgggcaacagaactggctaccttagaggctctggaatgccccccacccatccacccaccaatggaaggaaagtcaggcatcgcctaaaaggagtggtccctatctagccccaagtctggagcagaaagggcaggtccattctggcccaagtgacattgttagatcctgtcccctcccccaatcactgctgcttgccagggtgcctcttcacagttcccatgtggcagcagtagtggcagaggcagaagtggacttattgtagattgcagtacagatacatggacacaatcatggcagccagctggagggcccccaattccagctgcccacaccaccccacgggtgactgcattagttcggatgtcatacaaaagctgattgaagcaaccctctacttttttggtcgtgagccttttgcttggtgcaggtttcattggctgtgttggtgacgttgtcattgcaacagaatgggggaaaggcactgttctctttgaagtagggtgagtcctcaaaatccgtatagttggtgaagccacagcacttgagccctttcatggtggtgttccacacttgagtgaagtcttcctgggaaccataatctttcttgatggcaggcactaccagcaacgtcaggaagtgctcagccattgtggtgtacaccaaggcgaccacagcagctgcaacctcagcaatgaagatgaggaggaggatgaagaagaacgtcacgagggcacacttgctctcagtcttagcaccatagcagcccaggaaaccaagagcaaagaccacaacgccggctgcgatgaggaagtagcccacgttgacaaactgcatggcactggacgacagtggcccgaagatcttcagaaaggatgccccatcgattgacacccagatgcccactgccaacagggctgcaccacacagaaagatgagcaaattgaagaggatcatcatggtcttaatgaagctgaagcactgcatggtggctcctgttcagggctcttggcagtgagttctgaaagagggaactgctgaggctccacaaaggacaaaacagctcccgggtgttgccactgagtgggcaggcagagggacgcctggctctcacacaccactgctcacctgcag

SEQ ID NO: 320258 - DNA, 1290 bp, Homo Sapiens
  misc_feature (79)..(87): n is a, c, g, or t
  misc_feature (512)..(525): n is a, c, g, or t
  misc_feature (616)..(647): n is a, c, g, or t
  misc_feature (851)..(877): n is a, c, g, or t
  misc_feature (1042)..(1051): n is a, c, g, or t
aattgtgttatgtgatcagttttgggggttaactttgcttaattcctcaggctttgcgatttaaggaggagctgccttnnnnnnnnntaaaggccttattttgcaattatgggagtaaacaatagtcctagagaagcatttggtaagctttatcgtatatatattttttaaagaagagaaaaacaccttgagccttaaaacggtgctgctgggaaacatttgcactcttttagtgcatttcctcctgcctttgcttgttcactgcagtcttaagaaagaggtaaaaggcaagcaaaggagatgaaatctgttctgggaatgtttcagcagccaataagtgcccgagcacactgcccccggttgcctgcctgggccccatgtggaaggcagatgcctgctcgctctgtcacctgtgcctctcagaacaccagcagttaaccttcaagacattccacttgctaaaattatttattttgtaaggagaggttttaattaaaacaaaaaaaaattcnnnnnnnnnnnnnnccaattttaccttctttaaaataggttgttggagctttcctcaaagggtatggtcatctgttgttaaattatgttcttaactgtaaccagnnnnnnnnnnnnnnnnnnnnnnnnnnnnnnnnattattaaaagcaagtttctttgtattcctcaccctagatttgtataaatgcctttttgtccatcccttttttctttgttgtttttgttgaaaacaaactggaaacttgtttctttttttgtataaatgagagattgcaaatgtagtgtatcactgagtcatttgcagtgttttctgccacagacctttgggctgccttatatnnnnnnnnnnnnnnnnnnnnnnnnnnntttgacacaaaaacaatgcaagcatgtgtcatccatatttctctgcatcttctcttggagtgagggaggctacctggaggggatcagcccactgacagaccttaatcttaattactgctgtggctagagagtttgaggtttgctttttaaaaaagacagcaaacnnnnnnnnnnatttaaaaaaagatatattaacagttttagaagtcagtagaataaaatcttaaagcactcataatatggcatccttcaatttctgtataaaagcagatctttttaaaaagatacttctgtaacttaagaaacctggcatttaaatcatattttgtctttaggtaaaagctttggtttgtgttcgtgttttgtttgtttcacttgtttccctcccagccccaaaccttttgttctctccg

SEQ ID NO: 320259 - DNA, 923 bp, Homo Sapiens
tatatcccccccaaaaaccaggacttgggcgcacttggtggggggcttagggaatttcttcccatttagggggaggtggaagggctcttggaatgtggagttgcttttggaaaggggccaaagttccattgggtccagaataatttcccaaggagaccaggtggttttcccccgggaagaaaggaaaaggtttcctccctatccggcaggagtgaattttaaatgtccaaaccaaagtgtggtgtcatcgctcagtctgcagggaggttcttgttaatccccgtggccgttttagtggatcttccgtttgtcatccagatggcaaacgttggaagctgcttttggggaccaataattggagctttcaaagagcatttccccccttggcctggcgcctgtgcatcagtggtaatagatgctgaaggcatggagaatgtagagcagcgtggcgatgaaggcgaagaacgaggctgccgaattaatgtagtaaattcttgggtccagcagtttctcagaaacaatcgtggcatgtacttgtaggacggcagcgctcatgtacaggatgccagtggtcccgtggtacaggctgtccagaactctccaggattcaaatcttttgtaaaatccaaacaagtaagacaacaggaacatcaaggagatgagaaacgaggtgagcgagacatacatcacccatccttgcagcaaggggtatactatgtgggtggcggctaccatggtccagaccaagaacccaaatatcagctcgggcaggaagaaggcgaaagggatggtgaggaacagcgcgacccccgagggcacgtcggacggggcgtagctggtggcgggcgggtcgggcgaggccatgctgtcagcccctgccgggtgctccgcggcagctcgcccgcgcgcagcctgtcaaatat

SEQ ID NO: 320260 - DNA, 802 bp, Homo Sapiens
gaagacccgctttgcccctcagagagctgtggcctgcctgactgccatcagcgacttctactacactgtgatgttccggatccatgccgagttccagctcagtgagccgcccgacttccccttttggttctcccctgctcagttcaccggccacatcatcctctccaaagacgccacccacgtccgcgacttccggctcttcgtgcccaaccacaggtctctgaatgtggacatggagtggctttacggggccagtgaaagcagcaacatggaggtggacatcggctacataccccagatggagctggaggccacgggcccctctgtgccctccgatgatcctgtgatgcaggatggcatgcactgatccgacatgccaccctgcccgtcagggcgagccccgtgcagtttgtgttatgcaggagatcacagtggcagcaggagctgagctgggaggaggctgcccggcgcctggaggtggccatgtaccccttcaagaaggtctcctacttgccgttcactgaggccttcgaccgagccaaggctgagaacaagctggtgcactcaatcctgctgtggggggccctggatgaccagtcctgctgaggttcagggcggactctccgggagactgtcctggaaagttcgcccatcctcaccctgctcaacgagagcttcatcagcacctggtccctggtgaaggagctggaggaactgcagaacaaacaggagaactcgtcccaccagaagctggctggcctgcacctggagaagtacagcttccccgtggagatgatgatct

SEQ ID NO: 320261 - DNA, 724 bp, Homo Sapiens
  misc_feature (702)..(702): n is a, c, g, or t
acagtcaactcctcaagcagaagactaaaatattatttctttttagaagatcttggttgagggagaacataccaatatggagaacagatctatgcttctcgaattcaagaaaaaccattaactaatctatcaatttttctccgatatggtgtgccagagtgctctgtgaagaatccttttccatccctaccacgtgtctgggtgaagggagaggagggggtggcaagctgccagtacactagcaggcactcctggtgatgctctgggctctgctccctttctgctggtagtagtaggcatgttttctggcagctgcagcagactgatgttggggggaggaaggggccacccaccaatcacctcttcttgaagccgtattttttgcgttcatagaagaggtctgtcttagagctccccagattgacaatctttgggcagccatctctgtccttctcctggatggtgcactccttacaataataggcatcagagaccccaggtcctccacagatcacacagcgcccctggtaagatccatagttacactcatcacatatgcgcaccagagtgcagggacgcacataggagtcacaaatcacacacttgccatcacatttttcacacagtcttccgatggcaacaccagcctgcttgcggcaaaagatcaaatcaggatgatgtttagccatagctcctaactanagccggccaccggaagcttcgg

SEQ ID NO: 320262 - DNA, 422 bp, Homo Sapiens
cccaacctttccgaaaagcccctggtctgcacccatacccggctgttggaataactctgtcctggggtggatttagacaaaattctgcgggcaggaggttttccctggcccactgtcagaatacctcctcctagaacttccgatttcaaagcaaacaagtttgttcagcatggacccttctttttgttgttctccctctatctgagaacatctccctgttgcattttgctattcaaaaccagaagaaaagagagtagatgtagatgatttctggctttgtgtaacccaacaaataatagccactaatagcacttgatatatatatagtgggagagatacctgtataggagcagtcaggatagctgggagattgagtgttggatgaattttaacttggatgtgggagattaaggtgctggtag

SEQ ID NO: 320263 - DNA, 897 bp, Homo Sapiens
  misc_feature (717)..(717): n is a, c, g, or t
  misc_feature (812)..(812): n is a, c, g, or t
  misc_feature (885)..(885): n is a, c, g, or t
cattttgaaaaaaaagggcctccttcgacttgccaggaaaggctctatgagagcaggtcaaggtggccatgcatatcttaagggatggttgtggtgggctggactgctgtcaatgggagctggtgaggtggccaacttcgctgcgtatgcgtttgcaccagccactctagtgactccactaggagctctcagcgtgctagtaagtgccattctttcttcatactttctcaatgaaagacttaatcttcatgggaaaattgggtgtttgctaagtattctaggatctacagttatggtcattcatgctccaaaggaagaggagattgagactttaagtgaaatgtctcacaagctaggtgatccaggttttgtggtctttgcaacccttgtggtcattgtggccttgatattaatcttcgtggtgggtcctcgccatggacagacaaacattcttgtgtacataacaatctgctctgtaatcggcgcgttttcagtctcctgtgtgaagggcctgggcattgctatcaaggagctgtttgcagggaagcctgtgctgcggcatcccctggcttggattctgctgctgagcctcatcgtctgtgtgagcacacagattaattacctaaatagggccctggatatattcaacacttccattgtgactccaatatattatgtattctttacaacatcagttttaacttgttcagctattcnccttaaggagtggcaagatatgcctgttgacgatgtcattggtactttgaagtggcttctttacaatcattgtggggatattcttgttgcatgcntttaaaagacgtcagctttagcctaagcaaagtctggcctgtgtcttttccgaaaaagacgagaaagcaatgnatggcaaatctc

SEQ ID NO: 320264 - DNA, 1539 bp, Homo Sapiens
gaaagcgcaggcttaaatttattctaaaggggaaggcccctttttattaaacttgtacattttactttccttctttcagaatgctaataaaaaacttttgtttatacttaaaaaaaccataaatcagacaaacaaaagaaacgattccaacatcacttctgtgatgagaaaagaggcaatggaattcaacataagcaaagaaaactctacctggaggaaagaaatcgatcagcgaggaaacaactcggggctgctgccagactgcaggccatgcgaggaggagcctcctagaggatttccaaagcaaacccatccctgccagaccaggaagcagccgtcctacctcccagagaaacagacctcagccctaatgatcactcaaatccgagtcaatccctctatttaaaaaaagctcacacatagtctcccctcccttcccccagtcctcttggcgacagggcggtcacaggacatatgtgttcttcaccagctgctccttgtcatctccggagctccagacggtgcgcagggcacgctcctggttcctccgtgccacccggatcaggtagaccatggaggctcccaggaagaggatcaacaccatcacgaacagccccgccagaaccaccacctttgagccaaggggcaggggaggattctcctgctggcggaagcagcggagcatgcaggcctcctcagagcggtagctgttcttattgccccggcagcctccatagatgaagttattgcaggagttcctctccacgtcaaagtaccagcgtgggaaggatgcacggcaaggcccagtgactgcgttggcggtgcagtattcttcatagttgaacatatcgctggagtggtcttcagaatcctgccttctgggagcacttgggacagaggaatccgctgcattcctgctggtggccaggtcacccgtggcattctctgtgacagtggcacatttcttgaggcactcctccttggtcaggtaattattgctgtttccgtcacagcccccatacacaaacagctggcaggatccgtcagtgacattgtaccaccacctaggcatggaggcccggcatctgcccaccaccttcgacaccaggcagaagtcgtggatgctgcgttctcggtcggccgccaggaccccagagaggagcagcgatcccagcagggcgagaaacgcccggctccgcctcagcccgcacagctgcgccatggccagctcagccgagacgcgcaggcgacgccaccagccgttggggtctcgcgatcaggtgcgggaagcccctcaacgcgcacgcgcaatggagcgcctcgcgttcaggtgccgacgctccgggagggtccgccaggtgccaaagcccccggaagtcgcctttccggaccttcagtgtggggacgcccggccttctcggcgcgcgatgcctgggtctgctcctcactcgcgccctcgccgcctgcgacactcaacggccctcagcgcgttcagagccgcgctacacctcccaacgcgcggaggtcgccagagccaat

SEQ ID NO: 320265 - DNA, 900 bp, Homo Sapiens
gatttttctggcgggcggaaagcagggggagcatgccaggcttccttcagagcgggtaactgtttcttattgcccggggcagcttccatagatgaagttattgcaggagttccttttccacgtcaaagttcccaggcgtgggaaggatgcacggcaaggccccagtgactgcgttggcggtgcagtattcttcatagttgaacatatcgctggagtggtcttcagaatcctgctttctgggagcacttgggacagaggaatccgctgcattcctgctggtggccaggtcaccccgtggcattctctgtgacagtggcacatttcttgaggcactcctccttggtcaggtaattattgctgtttccgtcacagcccccatacacaaacagctggcaggatccgtcagtgacattgtaccaccacctaggcatggaggcccggcatctgcccaccaccttcgacaccaggcagaagtcgtggatgctgcgttctcggtcggccgccaggaccccagagaggagcagcgatcccagcagggcgagaaacgcccggctccgcctcagcccgcacagctgcgccatggccagctcagccgagacgcgcaggcgacgccaccagccgttggggtctcgcgatcaggtgcgggaagcccctcaacgcgcacgcgcaatggagcgcctcgcgttcaggtgccgacgctccgggagggtccgccaggtgccaaagcccccggaagtcgcctttccggaccttcagtgtggggacgcccggccttctcggcgcgcgatgcctgggtctgctcctcactcgcgccctcgccgcctgcgacactcaacggccctcagcgcgttcagagccgcgctacacctcccaacgcgcgatcccgagaaattccggacc

SEQ ID NO: 320266 - DNA, 881 bp, Homo Sapiens
atcctacgagccattttggcccatttctgggaacccattccttgttgcagtcagcaaggggggaccccgggcttatcaaacaggaaagtggtcatcaataagttggtgcttttcagcttctgtcatttccctgagcttatagtaacgtccagccaggtcacccttcaggcccactcagtgcatccaccacaacacgttccacctctggtcgctctgctcgagtgcaagctggaggcagactgagtcctcggatgcttcggccagttctgactctagaggacaatacatacctctcatcaaagtagccagaacggattttactggcatctagatccgtggtgtgcttcattgtccgggggtcatatccattgtgtcgctcttggatcacagggtcaaacaggtcagcaaatacctcataggtctcctcatctccagccaccatgcccacagtcttgatgaaggggtggccagggttgtccacgccagtctggatacactgatctagcgtccaaccagtgggtgtggtcttgtcgcagagccgtgcatagactgctggggtcaggtgactggccatgcagttgttgtgctttcggaggtctgggtactcagcgctcgggggatacagcctccgtcgttcactggcagctcgtacaggttccggtcggagcagaaacccagcggctagagaccccgctccggccaaagccaggagcctgagtcccgggcgggcggacagcagacgggagaagggaccagccatggcttgaggtctggctacgggatcctggagtaggcgctggcgcaagataagatccggaacagggagggaggatgcaaccggatagaccgagggccggagctaggtccgaggctgcagccga

SEQ ID NO: 320267 - DNA, 1448 bp, Homo Sapiens
gtcccagatccccgcgtttccccaaatcaattccaaataagttttatctcccatcggatggccccagtgccacccagctccccccttctgattgccttagtcgtccccaattaggaaattatccaaagccgcccgcctgtggcagcagtgtcccctccctccagtaccccgtttttggagtcttaggttctccaggatctttgggaagcggctatctttgcttagcaggggcagtttgatgtgcactcctgcccgaagtccagtgcccaggttagatggacaggtcaagatgtatcccaaacgctcattccacatgaactcccagccacgttcttggataagtctctccacctctttgaggcctcggcagaatctttcaaacactctcttcatgttaccacccttctccatggagatcacccgtgtatgatcctcctcattcacccagatcaggaagctcttctcattgttgtgccaaattccacgagcatctggccagtctcgagccattcctgctgcagtcagcaacggggacacaggcttatcaaacagaaagtggtcatcaataagctgctgctgttcagcctctgtcatctcactgagcctatagtaacgtccagccaggtcacccttcaggccactcagtgcatccaccacaacacgttccacctctcgtcgctctgctcgagtgcaagctggaggcagactgagtcctcggatgcttcggccagttctgactctagaggacaatacatacctctcatcaaagtagccagaacggattttactggcatctagatccgtggtgtgcttcattgtccgggggtcatatccattgtgtcgctcttggatcacagggtcaaacaggtcagcaaatacctcataggtctcctcatctccagccaccatgcccacagtcttgatgaaggggtggccagggttgtccacgccagtctggatacactgatctagcgtctaaccagtgggtgtggtcttgtcgcagagccgtgcatagactgctggggtcaggtgactggccatgcagttgttgtgctttcggaggtctgggtactcagcgctcgggggatacagcctccgtcgttcactggcagctcgtacaggttccggtcggagcagaaacccagcggctagagaccccgctccggccaaagccaggagcctgagtcccgggcgggcggacagcagacgggagaagggaccagccatggcttgaggtctggctacgggatcctggagtaggcgctggcgcaagataagatccggaacagggagggaggatgcaaccggatagaccgagggccggagctaggtccgaggctgcagccgaaatgggggtcggattggaggctggagccggaatgggagccggtgccaatcagactgcaggagaggcgcaatgagctagtggcaggcgggcgggcggaccc

SEQ ID NO: 320268 - DNA, 1116 bp, Homo Sapiens
  misc_feature (54)..(54): n is a, c, g, or t
  misc_feature (61)..(61): n is a, c, g, or t
  misc_feature (305)..(305): n is a, c, g, or t
  misc_feature (307)..(307): n is a, c, g, or t
  misc_feature (454)..(454): n is a, c, g, or t
  misc_feature (705)..(705): n is a, c, g, or t
aaacaaatcctgtaaactcgttaacaaaacacgattctcccttaatcccttttnacccccngaagttggtcctcgggcccgaatgaagtgtccctaagttccctagtgaagacacgttcctttgttaaaaaccctttatgggccaagaaaggtaattcgaataccatttgctttccggcgtcggtttacatttttgttcaggagagagcaaaacacagagatttgcactgggggcaggcggcttaacaggaaacacgtggcaatcacaaagtgccaggcccatttcctatggaagtgtccccagnancctcgtgggcccagccgccgggcagctggggtggggtgggagagcagctggggatgctgccttgggagcccatgctgcccagcacgtccatcaggtggtcacggagccagccctgggcccagagcagctctggaggacaacgttgcngttccggccagaggaggtaactgagaactgggttgttgcttccggaggccttggaaacggcaggaaggctgctcgagtcgctgtgtggattttgggggactcctgcgaaggagaaaggccagcaccctgggctgaggttcctgtccgtgaccccggcggcctcttgtgcgtagagctcccagcagcacgggcccccggtcagcccccctcaggccagttccttcagtccaatgtcttagtttccagagaangtaaggaagcgccccatggtggagtattgttggccgccctgggaaggggagagggggcacaggggcctgccctcttcctgatacctgaaggcagtggggccgggagagaaacagagcaggtggcgaggagtcccggaggcttcctccgaaggttctcgggcctttccccgagagttctggggagtttccccaggacagctggcattgggggcagccttggaggcatgggtccccaccaaggagtgttcaggatctgctgacagaatcagagcagggacaagatgagggacctcagggagggacagatggagccccccaagtctgaactcataggctggggaggaggagacatctaggtgggttcgagggggtgcgagcccacctccaggccctcagccctcttttcctcat

SEQ ID NO: 320269 - DNA, 503 bp, Homo Sapiens
  misc_feature (366)..(366): n is a, c, g, or t
  misc_feature (389)..(389): n is a, c, g, or t
ctataaaactcctccataatttcacaatttaacaaaagtttaaaatccaggaaagaaacaatcctgtaactcgttacaaacacgattctccttattccttttatccaggagttggtctcgggccgatgagtgtcctagttcctagtgagacacgttctttgtaaaaacccttatgggcaagaaaggtattcgataccatttgctttccggcgtcggtttacatttttgttcaggagagagcaaaacacagaggatttgcactggggggcagggcggctttaacagggaaacacggtggggcaatccacaaagtgccaggggcccatttcctatggggaagttgttccccaggagccctcgtggggncccagccgccgggcagctggggngtgggggtggggagagcagcttgggggatgcttgccttgggggagcccattgcttgcccagcacggtccatcagggtgggtcacgggagccagccctgcttcgtgccgaatttt

SEQ ID NO: 320270 - DNA, 651 bp, Homo Sapiens
gtttttcttttcatacacaatgatcccaaaggaggaagaaaaagagaaagaaactccttgccacaatgaggaaggatgaatcacgtgaaagaaaaggccaatcagtggtgtggcagcccccatcatcctttccatcctgcccctacagcagttaaaaacaggatattagacacagattcctttgactcttcaagcgcagatgtcatctggaaatatggtagaaaatgttttgacaaagtataagattaattctctttctctcaatttaagataagaaaaaatagggtgaagagagtgggcttgaaggaagccctagaaatgtattcctatataaagataaattgcaccctttgagatccacacacttgatttacaactgaagttgtggaggtgggagggctcacaaacagtgtggaagtgtgtgtccttcgagatgaacaaagcctccagacaaggcagtcccatctggctggcctggaatgctgtcacacaaagcagattagcaataaaattattctggttgaaatggctacagagccatgattcttagccaatttgtaaaccttacatcttcctgatttggtagtacagctgaacaccccctttccctctgatttgtgttctggagggagaggggattatcaatagata

SEQ ID NO: 320271 - DNA, 1314 bp, Homo Sapiens
  misc_feature (305)..(331): n is a, c, g, or t
  misc_feature (334)..(344): n is a, c, g, or t
  misc_feature (346)..(369): n is a, c, g, or t
taaattggattattgagggctctcggtttgggactctcccggtggagtaaaatccccagttaaaggacccccaggaaatttccatatttgggatttgtttccagaaccggcttgggtttccccccccgggcggtttttttatttgggtggggaattccaagcccttaagtccatggctccgggatttccctttgggaaccaggtatgggcccatgttccccttaccctactggggcccccgcgggcccaaacggaatggttttaggaaaggtttttcgaggggccgagggcggccgaacatgttnnnnnnnnnnnnnnnnnnnnnnnnnnnaannnnnnnnnnntnnnnnnnnnnnnnnnnnnnnnnnnttagaaagccaaggtcttttattaaaggtcccgactggttttcccactgtatttccatgccagccagggtccagggacagcctctcgggaggtaccgggtggctgggcctggggcccggtagcacagcgcttaacggtatctgcctgctccactccacggggccagaggcaccagcacgatgccgccccgactcggctctgcggtggcccctgtgggcctgcccttcctttagctccagctgctgcccgcggcatccccgctcattcccgctgcgcagctccgcgcttgctatctaagatctccctccagttgtcactccaggagagcagccgtctccttgtcgggggcaggaccaggtgccgattgtggcagcaggtgaacaagatgtgctcccagcttggggtctcctcctggcctcgaactgtgtccttgtcatcaatgagcaggtcccccaagaccaccgtcttgtcccttgtcaggataattcgttctacgaactggggccccaggtgctgctccacccagcggtacttctcacccacacagtggtggtacttcagcagggggctggtgcagatgaagacctgcgtgtccggtaggtcgttcatctcccgcacagcgtccaaggctcccgggatgggctccaggtccaggaaaaagcccggggcttcgtacacactggccactttatccgccaggtcgggccgcagggcgcggtactgctcgcgggccaggaagccgcggcgttgctccagcggcacgtgcggctcctcagggaagcggcggcggaagccccgcaggaggccggcctcgaagtcggccaggacgccgtccatgtccaccagcacgcgcacgctccgcgccatcgccgccgggccggagctgcgagctctcggggtctggggggcgcgggctcggccggaagcggagggagcgcttttttt

SEQ ID NO: 320272 - DNA, 1177 bp, Homo Sapiens
  misc_feature (113)..(113): n is a, c, g, or t
cctcccccattttccaaatagaaaagagagccacccataaaggtgccccccgccctccaatttaaattataggtattggacacaaattgccacggattacccagttttctttnctttgtgggagagaaggtctaatttttaccccctttaatttccaaaaagggccacaaaagttcatctgagggccttcagaatatttaacccccccctgcaatgtttaatgaccaccacccctggagggggcagcctcaaaggtaattattaaagggttataccacccttcccccaagaaattaatagattcttttctataaataataatttaaaaaatactgcaccttaaagaccaatacaggcttaacaaaagacctgaaatttctgcaaggccagttttgtttcttgatagaagtacaacttttgaaagtctattcccagcaaaagaaacactagacccagcttggccaaagaaacaaaataaaacaagtgatttctaacacgctaaaagagtacattttcatcagctccaaagaaagcagtcctggtcattcagaaggctcctatgatcccaccagtctgcagtcattagaaatatatgctttacaggccacaggctgctctggatttggtttcagacaccagtgaccagaagaagccagttttgcgtgtgaggggtgtgggcccccgctgccttgggcctgctcaccggggtggatggacccccgccgggtcacagcctgctgtcacgtctggactgttggcctcttctgcatctgggctgttgggctctcctgctctctgtccctcagtcacgtcattgtctggctgtccggtgctggctgcactctcatttgtgaggataaccccttccttcttcttttctcccaatacctccagccccatcatcctgagataatgaagccgttcattcttgggcacaaaagttcgaatggaggcctttccccgccatccgcataagacgatgggacactgcagagcgtctggattcgcagaatctggttcatacttcagcacgatgcttccctttgccaggtcctttgcttgactgtaggtctcactgctgagttttctaaaaaagggattttcctgggtcaacagtatcttaacatcttcccgaacgcgtgggtcgacgatatcccggaattccggaccggtacca

SEQ ID NO: 320273 - DNA, 630 bp, Homo Sapiens
  misc_feature (89)..(179): n is a, c, g, or t
caagcagctaaacttggcttccttctaatcctggaaaaccctgtacccctcctcctcaatctggccctctccacatgcacaccctgaannnnnnnnnnnnnnnnnnnnnnnnnnnnnnnnnnnnnnnnnnnnnnnnnnnnnnnnnnnnnnnnnnnnnnnnnnnnnnnnnnnnnnnnnnngtgcgccttcatagcccagccaagggcatgcaggcagggtgtgctgcctgagatggcacctccctttcagccattcttcaagaatgggccacacacagctagaagtcctctcccagctagaagtcctgtccccactctcctggcctgacaagatgagctctcctgggaccttgctctagggcactctgcctctaccctaggacactggaatgccctgggagccccctccctgcaaccagcctgagttcagccccactggacaaagggacacacagcccccaatggagaccattgtaagtggtggggctgggagaggaggaacagaaggaaagccatagcgctctcttgccccttggcatgtaccccaaggcctgatggccactgggctcagcctgtcccccactcctgcctgcttcccggtgagctgccccccacacgtgcagcccgggct

SEQ ID NO: 320274 - DNA, 956 bp, Homo Sapiens
ctcacaaaatactgggtggcttggttagagctaattgtagtggagcctgcaggtgagggtgagggagggggctgcaggtcaggtaagatctggaagacagaccgtacagcttggagggcagggggactctaaggcaaggagatttacagttgggaaggaggcagtggcagaggggtgagggacaggggcccttaagtccagcgaggaaagctcggtgtgggcccgctctacgctccgtttggggtgacctggaacgcctcttctcccagctccctccagccatcagcagcctcttgtcaagcttctgcctcgccccagtctatccccaaccccaaatcaagaccacctttcttcacggtcactatttattctttgttcctttttctttttgtaagaaacattcacaaaaaccagtgcaaaaccatcagtgtgggcgtcctgttttatattacaaaacttcctctggatatatcatataaaaggggggtctcacaggagagaaacgtgataaattagctctgcaatctacggcaaggaacatagtttttaaaatagactttcaacatatgacccatgggggaaggaggagggggcttctggggagacggcgggtgctggggcctcggctggtttgggaaatcctgtccgggccccttaagcatggatagagacatagacaagggaggctgtggacaggcctgagcaccaaggccagaaattaacagggaccctggggaggggccctcacccccagcccataaagagctattccctttctctaagaggcagtagcttcagagcaggaaagtggctttcgatacaggcagggtttgtgatgagcggtgtagtcttcttgttccttgccctgttagtggggtccgaggaagtctctgttatgggctgttgtatttcggggtgaaaagaaacaaagaggtatccctgcccacccctccccc

SEQ ID NO: 320275 - DNA, 1077 bp, Homo Sapiens
  misc_feature (663)..(701): n is a, c, g, or t
agcgtcgtgggcgccgtgcggttcttctgcgcctgtgctgcccggttccacatgactcctcccttttgggtggtgtactttacatgttgcgcctcgcgctttcgccgctgttgcaccttgccgcaggcggtgcgcccctgcctacgaatctttggtctttgtgctcccttacgctgatagaccgtagatgggtccccgttttgggcctgtagctctcctttggcccgttctggtgcaatcaggtttgcatctcaaccggggacccttctgggcccacacacgaacactcggatccagccagggaccctaggaaagccccaggcactgcatctttgagactcaagttcaccgcctttcccagggagctagggctcccttgctaagctgctcacagtcagccgatggtcagtacttccttcctcttgggcatgtctttcctccgtgcacagagtatttactgttctgcccaaggccacaggagtaaacaggctcaaaaagggcctctcaccgcgcacgcgctgcagcgttagggccggcaaacccttcgtttaagactcagccctgagcacaagcaatgggaactgagctccccagccctgagggcccggaaacgacgctctgccacacagaagagccggggagctgtaactggctataagtcgnnnnnnnnnnnnnnnnnnnnnnnnnnnnnnnnnnnnnnncgaggctggcagccgcagctcgtgtgggaagtgtacggtgggaacacacctcactccttcctagtaccgggcaatgcgtctgcaagtcgggtccctgctccctggcgggtgcctacagcaccaacaaggaggccccagcagaacccagcccctagaggcggctgtctgattccccactctccccacaacttctggagttcccagtgtttacccaaaaggctgtatccagaagctggggcggcaccacaatggctggccaccgtgggcctgtgcctttgcttcccaggtcctggaggaccgtggcagtgcttggctgtggagtgtgtcgacgcgtgggtcgacgatatcccgaaattccggaccggtaccagcctgg

SEQ ID NO: 320276 - DNA, 1031 bp, Homo Sapiens
  misc_feature (411)..(440): n is a, c, g, or t
  misc_feature (552)..(655): n is a, c, g, or t
caagcaaatataagtgggttttattatttttatgctcagaatgcaagaaagctttgcaccagaaccgttaaacattcatgaactcactaaaaagaaaatgcccttagaagacgggcggggcgagggggaagacctatgaacatgtttatagaattaatgtctgtactgtagcatacacaggtaattagaaaatattctcaatgcatttaagatattttcactaaagggtttgagattatccaattagctgtactcgaaagtgggcaaatacttgaagatcattgatttaatttaaaattctgagtgctgagttcagtttcttactgaatataaccagtgccctgggctctgcatggcagttgacttgccaatatctcaattaaagtgactaggcacaggtggctcacactnnnnnnnnnnnnnnnnnnnnnnnnnnnnnncaggagcttgagaccagctggagaacatagtgagatcctgtctctacaaaaaaatttaaaaatacatactttttagacaggtgtggtagatcacacctggtgcctggtggcnnnnnnnnnnnnnnnnnnnnnnnnnnnnnnnnnnnnnnnnnnnnnnnnnnnnnnnnnnnnnnnnnnnnnnnnnnnnnnnnnnnnnnnnnnnnnnnnnnnnnnnnattagccaggtgtagtggcacacacctatagttgcagctacatgggaggccagggcaagaggatcgcttgagcctaggagtttgaggctgcagtgagctacagactgcaccactgcactccagccagtagattagaaatgtttgtgagaaggtaccttaatggatgggcaagatggacagcagctatagtaattattcatagcagcactctagaaataaaaactagatcttatgtggcagggctgtgaaaatgcttttgtcaaaatttaaaattacagattaacacctatgaggctgcaggcacaggggtcacgctgatgaaggcataaaccctgctctcaagtagctcacatccagtgaaaggctcaaaccacaa

SEQ ID NO: 320277 - DNA, 599 bp, Homo Sapiens
gaacttatttcatatattatctgcccttcttcttataatctctctcatgaaagatatcattatccagtcattgaagccaaacccccttcaccagcccccaatctctagacatcaagggttaacaagacatcttcctaaatttctccggaattaagctcttctctgttagaatttcctttccaagtccatttcttcataaatctggcatgtgaaatttgaattgctctgccgcagttttctcttctttagtcagtggtgacagctccaggtctgtttgcttctgtagtttttgtatcatattcatagtctttttcacagtagcacaaatgcggctcttactctctttctgctcaacagcaactggtttaaagcgggcatacaaagtttgatatcgagactttatcactgacaattcctttaagagtgtaactggatttttctcacttgctgaatcaggatgattagtcttgatttcatattccagcctgtattgaatgtaatccagatcagactcagctttctggaacatcagttccagcttatcgacctccgcctccatgtgaatagttgacattccgcagaccgcggcggcgcttccc

SEQ ID NO: 320278 - DNA, 521 bp, Homo Sapiens
aaaacgagcgtagcttccttgtcgtgtggcctcagtccttcgccgtccctcgccgtccttcgccatcgcacgccaccgcaccccatctctcgaaatctgcagacatcttgatttttcccacgctgtctgtcaggtctccgccgccactcgacgccagggcgccgggtgagtccacagcagggcgcatggtcggctccactctcaccatcgggggaaactgaggccccggggaaggcggccagagaggtcaggccctgtccttggtgcagtgtctcgtcctctttgccggagtgagccccccaggattcgcgtgtcctcgggaaagacactggcaggccttgtgggctgtgctgcacctcggacggcttcgcaccagccagcgccctctctctcctgcagcactctgatctgcaccccctgaggggcttccactgtccgcggggtgagaatgcccctgggagtgtcacatgactgccgccccatgtgtgtgagaggcgtcctctgggagagcatggatcctg

SEQ ID NO: 320279 - DNA, 1685 bp, Homo Sapiens
  misc_feature (910)..(910): n is a, c, g, or t
ggggtacgcgggcttcctggcgctggccgtgggctgcgtcttcctgctggagccagagctgccaggctcggcgctgcgctctctctggagctcgctgtgtctggggcccgcgcctgcgcccccgggacccgtctcccccgagggccggttggcggcagcctgggacgcgcttatcgtgcggccagtccggcgctggcgccgcgtggcagtggggttcttctttgcggtccagttggtccaaagctacatgagcttcttgatgacaatgtctttgttccaccagagtcattgcaggaagtggatgagttccacctcattttagagtatcaagcaggggaggagtggggccagttaaaagctccccatgccaaccgattcatcttctctcacgacctctccaacggggccatgaatatgctggaggtgtttgtgtctagcctggaggagtttcagccagacctggtggtcctctctggattgcacatgatggagggacaaagcaaggagctccagaggaagagactcttggaggttgtaacctccttttctgacatccccactggtattccagttcacctagagctggccagtatgactaacagggagctcatgagcagcattgtccatcagcaggtctttcccgcggtgacttcccttgggctgaatgaacaggagctgttatttctcacccagtcagcctctggacctcactcttctctctcttcctgggacggtgtttcctgatgtgggcatggtcagtgacatcctcttctggatcttgaaagaacatgggaggagtaaaagcagagcctcggatctcaccaggatccatttccacacgctggtctaccacatcctgggcaactgtggatggacactgggccaaccagctggcagccgtggctagggnagctcgtgtggctgggacacaggcctgcgccacagaaaccatagacaccagccgagtgtctctgagggcaccccaagagttcatgacttcccattcggaggcaggctccagggattgtattaaacccaaacaagccagtagtagaatggcacagagagggaatatccttccacttcacaccagtattggtgtgtaaagaccccattcgaactgtaggccttggagatgccatttcagccgaaggactcttctattcggaagtacaccctcactattaggaagattcttaggggtaatttttctgaggaaggagaactagccaacttaagaattacaggaagaaagtggtttggaagacagccaaagaaataaaagcagattaaattgtatcaggtacattccagcctgttggcaactccataaaaacatttcagattttaatccgaatttagctaatggatactgggatttttgttttttatgttgtgtgtcacagagctaaaaactcagttcccaaatccccagtttatgcagcgccatcaggtattttaagctaaacttcttcacccctgagagcatgtcagctggagaaaagcagttcttccttgcccacttgagaagtgcacgcccactcacccaacatcctggtctctaggaaagcctcatgtgaggttcctctttctttcagctcagtgcccatgggcaaggatcatgatttccattccgtgttacaatgacaatatttaatgagcataaccttctcagtctcctgctc

SEQ ID NO: 320280 - DNA, 478 bp, Homo Sapiens
ctgtgcagccacagaaatactagcactaagaatgcagacagtgccagctcccctccctggaactgtgccgccccgagaattctgagcaaaccatgaagccagcttggaaaaggtgctcccaggaacagagattgagtaaggcaccaaagcaggaagccattccacagcactgagatgatataaaagtgggaaaaatatctcttggggacatcaaaggctcggcaggcggcggggcgcgacggctccccacacttggttttcccatagcggatcaggtcctggaagatcgcgcagcccgggagcaggccgggcggcaggagctgcagcagtagggtcagcaggaaggcggcggtcagcgtgagccacaccgcgcgcagcgggttcagcgccgagtgctcggcctccgcccagggagccatggcccgcgtgcccgccttccgcgctgctggcgcccccaccgcccgctagcccgcggaag

SEQ ID NO: 320281 - DNA, 956 bp, Homo Sapiens
  misc_feature (332)..(332): n is a, c, g, or t
gaatgacggttctcccttctttccatccaaacctcggatccttccaggataggcctaggttatttgcccaaaaagcattagggcctggactaacaggaaacctttccgccccatcatcaggaaagtgactatgaatggggtacttcccaggcaggcacctcttttgaagggtggattgcctgtgtaaagaaatgtgttggagtgtcctcccaccaaggacgtccacaccccctcactttctgagcgatgagtttatccatttcaaaacccgaatgtcccagtgcaataattttgttcacatttagagtttttaacttatctacttcaggtgntaatgcagtgatttcatcttcaaacactaaatttgtccctggatttgagagaaaaggggtttctttggaagtgtatccaacgattcccacaacttcatcaccaacaggaagaactttatatggcaaataaagtcctgatatttgagatgctagtggcccctttgctttaatgtttgcactcagaattggaaatttggcctctttgaggagtggctcgatcagtccttccacaccattatcaaattcatgatttcccagtgccatggcatcgtagcgcagggcgttcatgaagtgcgccacctcggcgcccttgtacacggtgaaccagatagtgccctggtactggtcgccggcgtccagcagcagcacgttgggttcggcgcggcggatctgctgaaccttggtgaagagccgagccacgccacccatgcagcggctggcgttgacgcacttgctggagtcctcgctggtctgctccagccggctgtgcacgtcgttggtgtgcaaaatcgtaagctcccaggcgccagccgcaggccacagcaccgcgcccagggcgaggagtagcgtcgcgggcgcccgcgcggctcggggacacatagctgtggcgcgtgaactgggtgc

SEQ ID NO: 320282 - DNA, 1031 bp, Homo Sapiens
  misc_feature (230)..(477): n is a, c, g, or t
  misc_feature (488)..(509): n is a, c, g, or t
  misc_feature (837)..(846): n is a, c, g, or t
  misc_feature (861)..(949): n is a, c, g, or t
ccctctcaggagaggccgggaaaaatctgttttgggaaggcagcccttttccaaaaggggcccagggaaaatggatcaggtttccccccgctgttttttattccggaaaagtggcctccacccatttcatggaaatggtaatttttttccctagacagaaaggctatggtgggttccccgcacatgtttggatattttaaaccaggcccaaggcattctagctcacgcannnnnnnnnnnnnnnnnnnnnnnnnnnnnnnnnnnnnnnnnnnnnnnnnnnnnnnnnnnnnnnnnnnnnnnnnnnnnnnnnnnnnnnnnnnnnnnnnnnnnnnnnnnnnnnnnnnnnnnnnnnnnnnnnnnnnnnnnnnnnnnnnnnnnnnnnnnnnnnnnnnnnnnnnnnnnnnnnnnnnnnnnnnnnnnnnnnnnnnnnnnnnnnnnnnnnnnnnnnnnnnnnnnnnnnnnnnnnnnnnnnnnnnnttccgtctccnnnnnnnnnnnnnnnnnnnnnntccacacatttaatccctaagcataaaagattaattggaggccaactaagattgagccgtccgatctgaagtattttactcaataagggtaaccccctattgggctgtcactagcgtgtcacctcagccgagaccagcatgaaggtcaaaggcgaagccacctctgctagatccacctcacctgcccctccatccagtcacctgtgcacgctggctatgtccctcggcccctaaagacctaatcaagttggtgagttcagacccaacatcatcaggaaatctgtaaatttggagaaacttgttttcaaagctaaaacccagatgaagnnnnnnnnnntttttaggccaggcnnnnnnnnnnnnnnnnnnnnnnnnnnnnnnnnnnnnnnnnnnnnnnnnnnnnnnnnnnnnnnnnnnnnnnnnnnnnnnnnnnnnnnnnnttctatattggtttctccatgaaaccctgtctttactaaaaatacaaaaaattagccaggtatggtggtgggcgactgtaat

SEQ ID NO: 320283 - DNA, 894 bp, Homo Sapiens
  misc_feature (121)..(132): n is a, c, g, or t
  misc_feature (137)..(137): n is a, c, g, or t
  misc_feature (146)..(147): n is a, c, g, or t
gttcctcctaggaaacacaggttatggcccaggttccccttcccctacggggcccccgggccccaaaagaaatgggtttaagaaaggtttctcgaggggccgagggcggcccaaccagggnnnnnnnnnnnnttgtnttgtggggnnttggcctgcttcaggtgtattttatttttcccacatccccagaaagcctttggaaaaacacataaatgaatacatttattctctcacaggatactacactgttacccagtgtgaagggagcagccatgtggctcccaagctcccttagcaaaagggtggttctcagaactgctccattcacgagtcctgcaaccagaggcctgggctcaactcacacaaagttctgagcaatggccagcaccttggaatactcgccttcccgcttgcgcaggctggtggggatgggtgtcttaattcgtgtccccacagggttcccgttgtcctcaatgaggaccacgttgttggagtcaaatctgggggtcattcgggggccaggcatgcagtgccccacaatgagcgcctttttcttctgtcccttgatggccagtagtatctggtcgcccaccttgcccactccattcttcttatagacatggatgcagcgaggagcccgatggtatgggctgttccccagggcactgttgtccaccactcgtacccgcgtcatcttctgaatcgcactcagactcccagtggtgctgaaacagtgatggctcagcactctgcttacacaggtgaaggggccccagagcccagtaaagaaagccatgggatcccaagatagatccgctctcgccgcccgggaaaatcccgccgcgggccccaccagccaagcgccgccttcgccccacgcggcctcttcctagc

SEQ ID NO: 320284 - DNA, 1219 bp, Homo Sapiens
  misc_feature (26)..(26): n is a, c, g, or t
  misc_feature (116)..(125): n is a, c, g, or t
  misc_feature (364)..(372): n is a, c, g, or t
  misc_feature (411)..(419): n is a, c, g, or t
ttggaaaatccttttccaggaaaaanacccggggtaaagaataacttgggtaagggtctcccccagggctatataaaaaatttggggataagagggttgtttgcccccaaaatctnnnnnnnnnntttaaaacgggaaaccttttttattttaaaagggcctgggccaaatttatttccaagcccgggtttacaaaaatttttgcttccccagaaaattggttttaaaaggatttccagggtaaaaaattaaaaaggtttttcgttcccaagactttaaatttacggggaggcccacttggggttgtttgaccatcaagtttcaagggaattgggcaaaaaatggaatgaacaggtttcccttnnnnnnnnnaattaggaaaaatgccaaacccttcaaaggagctggcgnnnnnnnnnctccgaaaaatttgcagtatccttcacttcagggcttacttggccatttatagaattctgcctgcttttaaatgtccaataaaaatgtacgtcaagttgactgactttttcaagcccctgaagtgatatgtttcaacgtccacattcaggctaagagaaaagtcaactagaggcttactcaaataactgacttcctccttccctctccccacaaacacacaggactccctccctcccacagagaacacaaagttgttaactgaagaacaaggtaaataatatgctagtccattttactgattttaaagatactgcaatttttatacatttcgatgatttttcaacattttgcagctgtttggctttgcagcacagcaattcatacactatactgtacaaaattaccagcaagactggaatgatgtattaatagaaggcaccatcatgcttattacattaccagagaacaaaaatacagtaaagacaattttcactgtacacagcttaaagaaaggaaaaaaggggaggaggagtgtgttgagcagccagccatccctgtactgaagaggggcaggtagaaaaatcttagatatggagctactaaatctggtctaatagtcaagaccatcgcatttgaagttctaatttttattatttagttcataactaaaatgatttccttctggaatatacttgtagtcttgttaaggtttatgtgtacacacgctggtcacagcaagcagataaaatgccctcatcatttcacaaactattttctactggaaaagaagatgagattt

SEQ ID NO: 320285 - DNA, 970 bp, Homo Sapiens
  misc_feature (64)..(298): n is a, c, g, or t
tttttaaacagatattccctcttgtcctttaatatttgctaaatatttcttttttgaggtggannnnnnnnnnnnnnnnnnnnnnnnnnnnnnnnnnnnnnnnnnnnnnnnnnnnnnnnnnnnnnnnnnnnnnnnnnnnnnnnnnnnnnnnnnnnnnnnnnnnnnnnnnnnnnnnnnnnnnnnnnnnnnnnnnnnnnnnnnnnnnnnnnnnnnnnnnnnnnnnnnnnnnnnnnnnnnnnnnnnnnnnnnnnnnnnnnnnnnnnnnnnnnnnnnnnnnnnnnnnnnnnnnnnnnnnnnntacaggcatgaaccactgcacccacctacttagatatttcatgtgctatagacattagagagatttttcatttttccatgacatttttcctctctgcaaatggcttagctacttgtgtttttcccttttggggcaagacagactcattaaatattctgtacattttttctttatcaaggagatatatcagtgttgtctcatagaactgcctggattccatttatgttttttctgattccatcctgtgtccccttcatccttgactcctttggtatttcactgaatttcaaacatttgtcagagaagaaaaaagtgaggactcaggaaaaataaataaataaaagaacagccttttcccttagtattaacagaaatgtttctgtgtcattaaccatctttaatcaatgtgacatgttgctctttggctgaaattcttcaacttggaaatgacacagacccacagaaggtgttcaaacacaacctactctgcaaaccttggtaaaggaaccagtcagctggccagatttcctcactacctgccatgcatacatgctgcgcatgttttcttcattcgtatgttagtaaagttttggttattatatatttaacatgtggaagaaaacaagacatgaaaagagtggtgacaaatcaagaataaacactggttgtagt

SEQ ID NO: 320286 - DNA, 400 bp, Homo Sapiens
  misc_feature (247)..(263): n is a, c, g, or t
atgcgccttgacgagtgagccggggagccatggacaactgtttggcggccgcagcgctgaatggggtggaccgacgttcgctgcagcgttcagcaaggctggctctagaagtgctggagagggccaagaggagggcggtggactggcatgccctggagcgtcccaaaggctgcatgggggtccttgcccgggaggcgccccacctatataaacagccggcagccggcccgcagcgcgttctcccggnnnnnnnnnnnnnnnnncccccaacccttagtgcttccttcagaacaatggctgaattcatggactatacttcaagtcagtgtgggaaatattattcatctgtgccagaggaaggaggggcaacccatgtctatcgttatcacagaggcgagtc

SEQ ID NO: 320287 - DNA, 508 bp, Homo Sapiens
  misc_feature (81)..(135): n is a, c, g, or t
agcatgaagaatttgctttcttctttcttcctaacattttcatgtgagatccagaaaggacacattgtctctggccattcnnnnnnnnnnnnnnnnnnnnnnnnnnnnnnnnnnnnnnnnnnnnnnnnnnnnnnngctgaaatgggttcgctgggttctaaaaatccgcaaaccaaacaagcccaagttcttcttttgggacttgactcagctgggaagtctactctcctttataaattaaagcttgctaaggatattaccaccatccctacaataggtttcaatgtggaaatgatcgagttggaaaggaatctttcactcacagtctgggatgttggaggacaggaaaaaatgagaactgtttggggctgttactgtgagaacaccgatgggctggtgtatgttgtggacagtacagacaaacagcgactggaagagtcttagagacagtttgagcacattttgaagaatgaacacattaaaaatgtgcctgttgttctattagcca

SEQ ID NO: 320288 - DNA, 401 bp, Homo Sapiens
gttaacatttgatttatttaaagtccttaactgcaaatgatcaagaacattttccacggcttaaaatctggtattatttttgttatttaaatcaaaatatttttaattacaatcacattgataaaaattaacaatttaatttgtaattttaaccatcatttaaagcaatttcagctgtaaagaaaaagaataaaccatgcaataaattaacattgagaaagcaaagagaaataataatgaaacccgtctggctatactaacaccatgtccaactgtggaaagtgcataacactggatgaaacaagcacacgatggcaatgattaaaatggccactatcaataggatttttgaatcttggaccacgttttgaaatccagctccctataacttatctctcctt

SEQ ID NO: 320289 - DNA, 1245 bp, Homo Sapiens
tttgacacttataaagaaccatttattcatctgttgattttcattcattattttcatcaattacaatttttcctctcctgcatcagaggaaatcacaaaagacctgacagatttacgtagtcaactgagtgcgtaggttgctcaattagtagtacattagtgagtgctaattgataagagatcattttttttcttatataaggatatttatgacattgtaaatgccctttggaccaactcaggacaaggtacaaaatggggcccatggatggagctgtgagcccagctcaccactgttcaactctcttctctgaaacaaattgtccatggggaccctcagcatctgggggcaaaagggccaagtacacaggggtctctgcaccttcttctgggctcttggtggccttgggtcccgccatgtcagttctcacccaccctgggcagcaggcattcaggaggatcttgtcccctttcctctgctcactcagtttccctggcgtggatccctggacagaacggtgacgccaatcttcgtcaccccgtatgcgctgctgggccagccctccttctggtgcactcccttctttgtatcctccacaaacttgttcatgagccccaccagctcctcctcagtgatggtctcactgcggaacttcttctgcagctctgggctgcagcttttaagggctctgacgctcatgatgctagatacgttcaccactctcccttggggttttattagagggagtaattctgtgcacacatctcgggtaccaaagaaatttgttttcatcgtcacttcagcttgaatatgaaagggtgtgggatcagcaaccttgaaggcgatgcccgcgttgttgaccagcacgtccaggcccccgtactccttgcgcaggaagtcgcgcagggcgcggatgctctgcagatcgtcgatgtccagctggtggaagcgcgggctcaggccctccgcctgcagctgctgtacggccgcctggccccgcgtcacgtcccgcgccgtgagcaccacgtcccccgagaacagccggcacaggtcgcgcacgatggccaagccgatgcccttgttgcctccagtcaccagcgctacatggatgccggacgacatggctgaacggggcgcgcggaacacctgcgtggagaacagacctggctcaggcccgggagccccgcagcgtgttccagagactgctcgagtctggcggtcgtgggcgcgcacccgtgggttac

SEQ ID NO: 320290 - DNA, 577 bp, Homo Sapiens
ttttcttcatacttgtagtaggggctccgcaacatgaaaattaaaagtatgaatgggatgagtaagtagggggcatagacagacacaagggttaaccgttcatgcaaagtctcaggtctttgtcccttgaaaccactggctttggagaaatcctcaaacagaaatgtggagagtatcggaattaaggttgtcatggtgtgaacagagtagatgattgcaggagttcgaatccacttgcagcttcctttgaggaaggcatacgttgcaatgggaaagaaaggcagctgaaacacaagctcgcaaaacagaaaggacttaaaccaggctgggggctcctgtagcagtgggtctttgaactccttagcataccacttcagcaggtttctaaactcgactgggtagagctcgcgcggcagcaccgcctgcaggtccatgaacagggtgatggggatgtggctgaggaagtagaggcccagcagccactccacgcagcgcctggttgccggagcccccatagtctgtcggttgggcctggacccgctgatgtgagaagaggggccaaatccgcgcgccttcc

SEQ ID NO: 320291 - DNA, 2479 bp, Homo Sapiens
catgcattgtcgtgtgcccccggtccacccttttctgtcccctctttatcgccgtggccttccggtgtctgtcccccttgtttaccccccctttttggcccacatgtattgcgtgtccgggccccctaaattgtcgccctgggccccttctccctcccaaggggcgaggtgaccattcgggcagaaacgccattaaaaagaccgtgtgtagtgcccccccactactcagaggtggggaaaacagccccatctgttcttgcacttaaagcctcaccaaggccaggtgagggggcaaatggtaatactgggagggggtaacacaaggagaagcgacattgagtacaccaagatgtcaaagctgcgacgggctggatgagggagccccaagagggcatatgctcagggtgccagccggctgcttttccttgtgacagccttgcaaggaagctgtgaggccaggacactaggccagtggcatccacactgcgtccttcaggaggcgaggcctctgcgcctcattctccaggagggaaaaccagggaccaccccgagctctcccaagtggcaggagttcaaatcagggccagtggcgaaaccaggaggcctgcctgaccaactgcccttcacatgatctctcttcaatctgttgcccggggccccgaccatctgggcagaagcggatgtgctgacttcactttcttttgtcctctacacacacgtgcaggcgttaaggaggcaagcaggtgaggggaaaggaacacaagttgacctgcccagcctgacaattctgaagaaagactgtttcccggggcatgaggaaaaagaagaaaagctgcggcagagtctcttcggaggcagcacccaaggcatccgttgtactcggggcccagcctttcctcccctctgagtcctccaccaagtccacagcaagcaacgattcaccagaaaaaaacagaagacacaggaacagaagagctgctgatcactggctttggtgcttaagtgatgaggcattttcagtcacactcgcactgatctggctcctgggaggagacgccacggcatcctcccagggtgaggctctgatgaggctgcacatggacagggtcccctctcaggtgggaaaggcagcatcctgccattggaggcatgggtctggagagtttctacccaattcctccctcaatcatacctggaggtgacagctacccccaccactgctcctccaaaggcctcgagataaaaatccctgaaaagggggcaggggtgcttccaggtcaagctgtgcggcttccaaactattagctgttgtacaggggtatcacccgggtgatcgcctgtctgcagatagggcacttcttgggctctggcaaggcgcggtagcactcggtgcaggaacaaacgtgcccacactccagaaagacgcaggacttgaagctgctcagacacactacacaggcgctcttcagactctccctgtcctcaggcttggctcggctcagcaagctgggcctcatgctcctgggaactcctcctgcatctgcttgagggcgcaggcgctcctgccgctgcagatactgcttccggagaatgaagaagagggtggcacatgtggcaaagccaaaaaccagcgccagcaccttccagagcctgacgctcgactcctgcctctgcagcaggctgtcgaagtcctggctgcttagatagtactgcatgccttgtttgggcggctgcaggcggacagagttgttgtccaggaccagttcgccaacccctgtgagggtggcccccaccttcagcatctcctcggtctcttggatgcctttgggccgctcaccgctgatgtagtggccgatgacatcggtgaaggactgaatcgaggggtggaacttctcatacacagtctctagacccagatccactgagtccaggggcttcagcactcgcacagccacatccacgccatcctcgtggggcaccaggtcaaagggcactgtgttggtcctctgatgaatgatctttgagcaatcattccaaaggtgggtggttcgattccacaccatcttgtgctcctgaagtgtcagccgctgaattacccccttgcagttttccacaaactggctgttaagcgtttctttaacagaccgcacagctccttctataacagcataagggcacgcattttcctggagcttctgaaagaatactctttaaatcttcacccaaatgaacttttttagctcccttgagctcttgggagacccgggccttctgccggtacacggagtacagggcggcggtgaccacagaggtggtgcccaggaggatgaactggcacagcgagggccgccctccgctctccatgacggcggcgagccccggtggccgactgtggcgccaaggataggcctggtgacccccgactctccacctccttccgaccaagaccgcacccccccggcctaacctgaccggaaac

SEQ ID NO: 320292 - DNA, 473 bp, Homo Sapiens
  misc_feature (407)..(407): n is a, c, g, or t
  misc_feature (436)..(436): n is a, c, g, or t
aatatttggttgcaacatgtttaatttctgctgttcacactggacactgcatcatactagtgtcggcccctgaggcaaccccttcctcgcctgcacaaaggaggacgagagatgaacattcagaggcagaaaagggcaataaaaaaagagctgtgtatgtgacctccaactactcagaggtgggggaaaacagccccatctgtcttgcactaaaaggctcaccaagggcaggtgaggggcaaatggtaatactgggagggggtaacacaaggagaagcgacatgaggtacaccaaggatgtcaaagctgcgacgggctgggatgaggggagccccaagagggcattttgcttcaggggtgccagccggcttgctttttccttgttgacagccttgcaagggaagctntgaggccgggggcactagggccagtgggnttccacacttgcgttcctttcaggggggcgagggctt

SEQ ID NO: 320293 - DNA, 837 bp, Homo Sapiens
cttgaggctagtgtctccacacaacttagacttagctgtagattgcttccaagtgagtacgcaatactttggaacagtatctgcaatcctcaacgagggattttagggacagaatcatcatttctggtagcacgagtcatttaccgcctgtaggaatccccggtagcaagtctgcaaaatgtttgaacagagcaacattatgctcatttgcaagtataaatgcagctgtagctctagcagataacgtcctgatcgacgggtgttcctgatcttgcatacactgaactaacattcgtttgatgacatctaaatagtgttgttgctggttcccaaaaattccaggaaagttccagaaaatgtgaagggcagcttcccgcagtcccacattttgagagctgactgaatcaaaaaggaacttcaaaccttcgggccactggttattgccatcctcatctattaaattcctggccagttctgccgcaatatcacaaacttttttcctcatgctagattgtgtttccatctgaataatcatgagtagctcactcttgatggcagtctgaacatcagagggaagtgctggatagacttcatcaaatgcagaggacaagagacgtcttaggagaacggcggccatttgtctagcctcttcagcagctgttgtatttctgatggcttgtaagaggaatgtgatctttgactggcctgggatattctcataggtttcctctgcctgtttccggaccacattgtcggggctgagcaggtttcccaggagcaggtagaactgttgctgctccgccgcggccgccgccattgcgctaggcgtgagagaga

SEQ ID NO: 320294 - DNA, 655 bp, Homo Sapiens
tttccccccttttggctgtccccctaacaaaaggccagaaaaagcctaggggcccaatcttctgagcctaattcccttgaaatcccaggcaggatgagcattccacccatttggaccccctctctgtaagaagcctaggactttatttcttaatgaaagttcaacactgaggaaaagatagcaaagtcgttgactcacaatctcaggccaacctcaggcagataggttaaggcaaggataggcaagaaaggtctattttaaccctatccaggcaaaaagcaggttactttggaaatccctaagatcaagctggtgctcagggccctctctaggatggtcataagcggtgtgattgcataggtcatccccaggcactaattagactaagcttcccaagttccttccggaataaactcactattccttagcccttgggactagtggatgatatgtcactatttcaaacttcctggtccctttccagcctggttttatgtccccagagaattggggtagcaatggaccagactcagactgtgatgagagggagaaaatagctaggttttgtgcatttcagagattaactgaactccctttggagtcacatttactcctagctttgtgccaggagcatattattaaaacaaaacatctt

SEQ ID NO: 320295 - DNA, 1299 bp, Homo Sapiens
  misc_feature (882)..(890): n is a, c, g, or t
tggttgtttttcacaatcaatacaaagtcatttttatttttaaattagcaataaaataatcaagtttacatctaaaaaatacaaacaacaacaaaaaccttcacatgttgtattccaaactgtaagccccaggcctcaatgtcagaggagagcaaaggcctttagttattttgtctcttgttgctggagcccatccactgtctgacatcatagccatgggcaagaggatattgccttggctctgtctgagtgctggattgtgaccggccataagtagcctttgcaaaggaagctaatggacagtgcctgaattaagggtgcttaccctatcctagaaagcgttaaagtcaaagcggaaaatatacatggtacccaaaatcaaggagactgccagagaccagcaggggatctaagggatttaccactgggttagcacagacactacacttgaagatttcctagcggctgctgctgctgtttccatgataagaattcagtgagacaaagaacctgccaagctcattaaccgagtagcaggaagagctactgtgtagcctctggtgttccccaactgactcagccctgcagatgggacatcctgtaggtcatgtgaatatcaagttactgagggatgttctcaggacaagcctagcataggcaccaggtgggaaagggtgtcaaaaaattataccttctgtctgctaagcagaaaaacttaattgggatcaatttagctcactccagagttctcattttattctcccagtattcatccagaaaacaagtttcttgatgatatgggaagatcacatttccacagtgattcatttgcaggtaagcaaatgtcctttacccaatttttatcctagctcaaagttggcnnnnnnnnngaggtcataatagcttccatttttatttcctacttcctgagacacacacacttatgtgtacatacatttcatacacaattagaatacatctggaacacatgagtgaatacaccagtgtcatgaaatatttccagagcttaggattctagcaccttgtcccttgcccaatttaaaatctctgattatttttggccccaagacatagtctcacaagcatcactttctaacaatgagcagccagtttctaagactcagacatggaaacatattccataccgtcagccttttgcaagcataacctcagatgactgtatcatcctggtccctccttgagtaaatatgagagactacacacagagaaaaatccggacgcgtgggtcgacgatatcccgtaattccggaccgtacc

SEQ ID NO: 320296 - DNA, 1155 bp, Homo Sapiens
ggtagtcaacaattggtcacattgcacatttcaaggttacagaggcccaccatacacatgcggggcaggaggagataaatcttgcttggggctaaacaataaagctacagcgagtgttccagaagttggccacatctggaagcaaggagccagactctggaagaagcaccgtagagactccaggagcccccttcactcctgggctttcgggactctacagcgtggggcctctttctcagacatggaaaggcctccttttctggaccacagtggagcgatgtgcaggtcatcggctaagctgggcgggtcggggagggcagggggagtacagttccttcggatcccagcaaaggtagactatcaatggccaagggttcagaggcaggaaaaaaggccgtttctggggggttggctggggacactccccttcccttctctctccgattaaatataaaagccgatgatgatgaagattgaaaagatgaggaaaatggcagccgtgtctcgggtatcctcccagcggaggcctttcatggaccgatactcctgccgtttgcgaagggcctcccgccgggccctcaggcgccgttcccgctccagttgttccccgtagtgggcctggtagaaggcgtcaaagttgaacatcgtgcggttggcgccgggggaggcccgagaaccgtcgtgggtccgagaggtgggcggcggggtacgcggcgagccggggtcgggtgcgggcgtcctggagggccggacgccaggtccgcgcaggtcctcgtcgctgagtaggccgcgatcatacttgcgacggagggtggcactgcccagcaccacgtaggcctgggagatgcgcgtgaagcgctcggcggcctccgcgctcccggagttgcggtccgggtggtagagaaagcactgacggtagtaagccgccttgatttgggcctgcgtggctgtggaggggacgccgagcagatcatacagcgccgtgcgcgaatacgagcagtcgccctgggaataagtcctcgctcctaggcccaggctgggtgcagaattttgtggaaagccacgggcctgcagcaacctccaaggtaacagccgctgccaccatcgccagcgcatggctgccatgttgaattgattcggcaggcggtgcaagag

SEQ ID NO: 320297 - DNA, 562 bp, Homo Sapiens
gtttggtggagcccgcgatggccgaacctgcgtctgtcgcggctgaatctctcgcgggcagcagggcgcgcgctgcacgcacagtactaggtcaggtggtgctcccgggtgaggagctgctcctgccggaacaggaggacgcggaaggccctgggggtgcagtggagcgaccgttgagcctgaatgctagagcgtgctcgcgggtgcgcgttgtatgcggtccgggccttcggcgctgtggggaccgcctgctggtcaccaagtgcggccgcctccgtcacaaggagcccggcagtggcagcggcggcggtgtttactgggtggactctcagcagaagcggtatgttccagtaaaaggagaccatgtgattggcatagtgacagctaaatctggagatatattcaaagttgatgttggagggagtgagccagcttctttgtcttacttgtcatttgaaggtgcaactaaaagaaacagaccaaatgtgcaggttggagatctcatctatggccagtttgtggttgctaataaagacatggaaccagagatggtctgtattga

SEQ ID NO: 320298 - DNA, 741 bp, Homo Sapiens
  misc_feature (461)..(499): n is a, c, g, or t
caggtcctggaagaggggccctaggccttggagctatgggtcgtgccggaatcgggtggtagaggtcggggtatgataggtcggggaagagggggctttggagcccgaggccgaggccgtggacgagggagaggtgcccttgctcgccctgtattgacccaaggagcagctggacaacccaattggatgcatatatgtcgaaaacaaaaggacacctggatgctgagttggatgcctacatggcgcagacagatcccgaaaccaatgattgaagcctgcccatcctcccatgagagactcttgttagtcaacacatctgtaaataaccttgagataacagatgagaagaaatctgattgatgctggatggacctatcacaataggctgtggacttacttgccaccagcttgtgcatttagtgtgttccttttactttttgatactgtgttgtatgaaaccnnnnnnnnnnnnnnnnnnnnnnnnnnnnnnnnnnnnnnnaagggggagggggggtttcccctcctttgcccagacttctctttgaacacaaatgcattagccttgtggctagaacaccctcttcctacctctgtctcccctcacttgtcatatgctctgacatgctaacatttcttttgttcatccctgttgcccccacagaaacatcccagaaaaaacggtcagtgttccttcctccctgatccttaggtttctgaaatagggttctgttacatcctctt

SEQ ID NO: 320299 - DNA, 1805 bp, Homo Sapiens
gatgttagtgggcttgatccagtcaggtgaaggtctgaagagaaaaaaagaccgtcttcttcccagaacaagagaatcctccaacagatacctttggactggaccttgcaccatcagctttcctgggtttccagcctcttgcctcacactccagcttttggacttgttagacttaataataacaacacaagccaatccttttaaggaagtttgtctggagaatcttgacaaacacaaacatctactgagagttcctgtccaagttttgctcacaccctagcaagaggcttctggcttaccagttgggagtgtgaggttctttgcttgtaagacctgatccaccagcggtacaccagctctggcccagggcaagacagggaatttcccaatcactgagtaggctgtagccactctcttcattaggcctgacttcaccatggggaaggggagaccctttcaagggtattctttcctggggtactctcagtcctaggacatcatagctctctttcatccctcttaaaagttaataccattatcagttaacagttttttatattaaaattatccctgttcaagttaatggtatggtttctgtatcctgactggatattaggatacagtatttactgtcttatttctactactttatgtttaaagtttttcataatatttaaactgaagttttgatcattcattaaatatttacacagaacaggacaaaggatgattttcctttgtctagttattgtaaggtagcgtccaagatttaccaccacatcatgattacagatggtcaccaacttatgttttaggattttttgactttatgatgggtttatagggatgcagccccatttcaagctgaggagctccttagggcttaggaatcatacctctttcacaccatggtaaagttggaaaattgttaagtcaagctgtcattaattaggagactgctgtgttgctaacggttatatgcatttttaacttatgatgggtttattgggaattaaccacaatgtaaatcgaggaccatctgtatattgtatgatttttgctaatgcattgagagagatctgtgtaaattatctatgacttcagaatatgcatattacctccaactgtgttaactcaacgtttttcaagagagtaagggtactttcaccctatgtggatgtactgtagaatttttctaagctacgaaagtctataaataacaaatcaacttaaactttttgggaaataatttctactaaagattcataatcggcgtattccttcaatgactgtacaagttcatccagtagataatctccttgcataaaagtttcaagatcatgcagcgtcttgtttattctgtgatctgtgacccggttctgtggaaaattatatgttcttattttctctgatcttcctttacttccaatctgaatttttctagcattctgtcttttatttatttcttcttctagatgcatgctgtacagttttgcacgtaactttgtcatagccagctctttatttttcagctgagatctctcttgttgacattcagaaacaacacctgttggaagatgaactatccggacagcactgtccgtggtatttacatgctgccccccagctccactggctcgcttagtgtcaattctcaaatctttcggattaatcaccagattaatctcagtaggctggggtaatattgctacagtcatggtgctagtatggacgcggccttgcttttctgtctttggcactctttgtactctcctcgtgccgaattcgccacccaggcctcgctc

SEQ ID NO: 320300 - DNA, 1230 bp, Homo Sapiens
  misc_feature (519)..(519): n is a, c, g, or t
tggcaataaactgcaccatgtggacgagtcggtggggagcaagacgagaagggccttcctgtacctcgccgcctttcctttcatggacgcaatggcatggacccatgctggcattctcttaaaacacaaatacagtttcctggtgggatgtgcctcaatctcagatgtcatagctcaggttgtttttgtagccattttgcttcacagtcacctggaatgccgggagcccctgctcatcccgatcctctccttgtacatgggcgcacttgtgcgctgcaccaccctgtgcctgggctactacaagaacattcacgacatcatccctgacagaagtggcccggagctggggggagatgcaacaataagaaagatgctgagcttctggtggcctttggctctaattctggccacacagagaatcagtcggcctattgtcaacctctttgtttcccgggaccttggtggcagttctgcagccacagaggcagtggcgattttgacagccacataccctgtggntcacatgccatacggctggttgacggaaatccgtgctgtgtatcctgctttcgacaagaataaccccagcaacaaactggtgagcacgagcaacacagtcacggcagcccacatcaagaagttcaccttcgtctgcatggctctgtcactcacgctctgtttcgtgatgttttggacacccaacgtgtctgagaaaatcttgatagacatcatcggagtggactttgcctttgcagaactctgtgttgttcctttgcggatcttctccttcttcccagttccagtcacagtgagggcgcatctcaccgggtggctgatgacactgaagaaaaccttcgtccttgcccccagctctgtgctgcggatcatcgtcctcatcgccagcctcgtggtcctaccctacctgggggtgcacggtgcgaccctgggcgtgggctccctcctggcgggttttgtgggagaatccaccatggttcgccatcgctgcgtgctatgtctaccggaagcagaaaaagaagatggagaatgagtcggccacggagggggaagactctgccatgacagacatgcctccgacagaggaggtgacagacatcgtggaaatgagagaggagaatgaataaggcacgggacccatgggcactgcagggacagtcagtcaggatgacacttcggcatcatctcttccctctcccatcgtattttgttccc

SEQ ID NO: 320301 - DNA, 1332 bp, Homo Sapiens
agtgtgtccgcgtttaccttttctgggggcccgccggcggcccaaaaggaaattgttcttaggaaagctttcttcgaggggccggaggccggaccgaacatgtttgttctggatataaccgggaggggcgaaatggagttggggtccatttttattgtggatcagggcttagaggataagcaccggtcagcattgttggctgcaccatctgccatccttctctgtgagccacctctgtgagagagtctaaattcagcccaagaaatcaggatcaagaaggggtaaaaagccgtggaccacatggccactcctgctgtatctacacctaccagtcactgaacacctgcccaagtgtgatggcttccatgcaggagacccaagtggctctgctagggagaatgacttatttacctaaggcttttttatttctcaaaagtggggggaaaaagggctggtttctagaaacagatgtggaattgaagaatgtcccagggagctaagttttaaggactaatcacaaacttgtttctccaacaacatcctgaatccattccttgcaccatcacacatttttcatgcatcagaagtgtttctagagctccagaaccacgagtacctcatcacgtcctgagcgctcacatcccccagcaagccgcctgcaccaggcctttctctagaagtcctgagactgagtactctccagaggctggaggttcgtgcggagtttgtacatgtggttgagcgcttgtgtgaggaaagtcccgctggtgttgatctccatcaaggtcaagttatccagcttggcatgtgcctcctgctgtctcacaaagctgtcagcagacactcggagtttggctatacgagtgtcccacatatccttgaccagggtccggatttcgtctgccttcgggatgttgtctgaagcatgatttaacaggagcttcgtaagttccatgtagtaagggctgggcattggggtaaaagtttcttcctttcgttcatgatccctcatcttctccaacttttctacatccatccactctggagggagcaggcgacatttctgtctttgtttcaggttaatcgccagccacaggggcacttccacgggtaaaccagggttaaaaggccccaggtcccccccgatgaggtagatcttgtccagactgaagttggggataatggtaaccagctccttctcggcgaggaattcgacctcggcagcgtccatggcggcgcgagctgcaggccagagcctcacggtctcctcgggcccctcagcgtcccggaggagacgccgcggccgccgttttcccgccacggcgagagccc

SEQ ID NO: 320302 - DNA, 928 bp, Homo Sapiens
caagcctgaagggggtttcggccagcaatggacaggggaccccagggaagccctgcccccttgggtgacagctttgccagccccctgggagatgacaaagctttgaagggatgacttaaactccctgcacgtcagttgtcaaagcggctcaccaggctgccctgtcttattggcgtcaaagaaggtgatgtcttgtcggagcagggagctgaagaggcccctccgcatgtccacagccatgcgctcgccaacgtgggacagcagcaccaggtacccgaaggtcagcagtccctggacaccatagaggataagcaggtgggtgctgagattctgggactcagtcatgaaactccctacgtggtcccttgtgtacttggccacgacctctaccagctggcccaggagcagggggatctgtacattcacgagtgccgcacccaaggccagcacgacggctacccccaggaccagcaggtgggggtgcagaaactgccagaagagcttccagttaaagcgagaccccacgacatggggtgtggagctggcaggaggggcctcttctgcctcacacagggccacaaggcagaggtggggatgcttactcagtaccatggggcctagcagggctcccccaacccagcaccaggcagaggggctccatctgggagctaggggggctcgagggaggtgggcccagagctgggaccgcaggtgggccacggcccggaggagggaggagctgcggtagccatcagagtacctgacagctgagaatgtctggaagcggaggggcggtagcagcctgcctgggaatgggccaccccgaatcccgacccgaaataaatgcaccagcatgctgacgcggtaaaacaggagccgccggcaatagcagtttcaccctcatcccactgagggctctatgttggct

SEQ ID NO: 320303 - DNA, 560 bp, Homo Sapiens
tgcagcttcaggcccaccgtgtggtgccccatggtgttcagcagctgggtcacctcacccgactgcaggttgtcaaagtagatggtggcacccacaatctggtccccctccttgaccaccccagtgcgggccgcaggggagttctgcgtcacctcctgcacaaagacgccgtcgtccctctgggcgatggtcagcccgtgggagccactaccctgccagttgggcagcagcagctcccgggttgtctcctccttctccatctttgcaggattccgctcaggagcgaatgccttgccaggagcccgcccctccttcctctcttcccctcagtctctctcgtcgggaatctcggtcacaacctgagggctcagccccagggcacggccatagccggcgcgaggcccaaggctgcggtgctgcggctactggcggcgacgagccccgttccgggcgggtctggcagggcgggcggtgcagtccccgcggcagagcagctccgagtggccgggcccccgtgcgcggaggcggctcttgtaactccggctcgggcgggcgggtct

SEQ ID NO: 320304 - DNA, 1049 bp, Homo Sapiens
  misc_feature (814)..(814): n is a, c, g, or t
  misc_feature (948)..(948): n is a, c, g, or t
tttttggaggttcaacttcaacatggccgaagcaagtagcgccaatctaggcagcggctgtgaggaaaaaaggcatgaggggtcgtcttcggaatctgtgccacccggcactaccatttcgagggtgaagctcctcgacaccatggtggacacttttcttcagaagctggtcgccgccggcagctaccagagattcactgactgctataagtgcttctaccagttgcagcctgcgatgacacagcaaatctatgacaagtttatagctcagttgcagacatctatccgggaggaaatctctgacatcaaagaggaggggaacctagaagctgtcttgaatgccttggataaaattgtggaagaaggcaaagtccgcaaagagccagcctggcgccccagcgggatcccagagaaggatctgcacagtgttatggcaccctacttcctgcagcaacgggacaccctgcggcgccatgtgcagaaacaggaggccgagaaccagcagctggcagatgccgtcctggcagggcggaggcaggtggaggagctgcagctacaggtccaggcccagcagcaggcctggcaggctctacacagagaacagagggagctggttgctgtgctgagggagcctgagtgaggagaccgccagccccagaagcagagggcagtcaaggtcaagagcctgtggtccagcatgcctggcctgggcgggctacctctgagaacggctgaaatggtgcccagtccatcagcagtgatggaatttgctggaggactaggccagagcaagcctcactgccactgtgccttntgggcacccttgggggtggacatacacccccctttaatttctctgtttcttctacctggataattcttgggcatggtctctcttctctagggtcaggtcagctctgcccctccgccccccctctggtggttccncagccccttttccctggcccctggcttgggagaatctggttttcattctccacctgatggccccctttgctggccagcccagggggcctttttaccatggg

SEQ ID NO: 320305 - DNA, 1161 bp, Homo Sapiens
ccctctcttccctgtgtgggagagttgggggttattttcaccccacctgtgttcgcggggcaccaggagaaaaaagacccccatgtaagagagggggagaagtttgctccggactctccacagttttgtgcccttcgccgcgaaggatcgaaatctcttctgcaccccacgtcgcgcccccggcgggggccccctgaaaaaatttttgtgcacagtaatttttcgggagagggtcttccgagacttcttgggggcgagcgtcttcccccccggtgttcggcgaaatatagagagattcccccccgcggttacaaacaggctgcggccccctcttctcaagggaaaaaactttttcgccccaattttctctgggggcaaagtctctggggttttgcccaaggggaagaaccggggcttttcccgcgggtttttctggcgcccctccccgcgcggggcggctttcttttcttttacaatttgggcggggacgaaaattccccaaaagcccccccttaggtgtcaattgggccccaggggattttttcgcttagggaaaacccagggcttatggcccccaatgttttcggctttaccccttactggggcccccggcggcgcccaaaacgaaatgggttctagaaaagcttttttcgaggggcccgagggcggccgaccaagatccctctttgcggtttttggattgggattttacaattcaccccaaactgtatgagagatgtatcacactaagatttcttaagctgttaggaaatccttcacacatcgtcgtcatctgatgtatcactgctaccttgtctctgtgtcatcattctcagttgtgggtttgaaagtgctgttcttccacggtccaaacttgaagtcacagatcaagccatttttcaaaataccattttttctcagaccattcttctgtaactgttcactaataacttggaattctctcatttcatcctcagttaagggagcacatgtttcatcattttcactgtcttcctgccagcccatttcctttaacaatctgtgttctgcctcaagtgaacttgaaagaacatcagtttgtgggaaggttgaagaccgaatgatctgctgggaaatcactgaggcattgccattctcttgaggaatttcattttcatcgaa

SEQ ID NO: 320306 - DNA, 1213 bp, Homo Sapiens
  misc_feature (1125)..(1167): n is a, c, g, or t
tggtaccggtccggaattttcgggatatcgtcgacccacgcgtgcgataaatctcgatggacgtgcacatcctccggcagcagccctcagtacaacatctgcgagcagatgatccagatccgcgaggaccacatgcgcttcatttcggagctggcgcgctacagcaacagcgaggtggtcacgggctcgggccgccaggaggcccagaagacggacgcggagtaccgcaagctcttcgacctggcgctgcagggcctgcagcatgtgtcgcagtggagcgcgcacgtgatggaagtgtattcctggaagcttgtgcaccccaccgacaagtactccaacaaggactgccccgacagcgctgaagagtacgagcgtgccacgcgctacaactacaccagcgaggagaagtttgccctagtggaggtgatcgccatgatcaaaggcctgcaggtgctgatgggcaggatggagcagcgtgttcaaccacgccatccggacacaccgatctatgccgcactgcgaggacttcatcccaggtgacccttagggagccgctgcggcaggccatcaagaagaagaagaacgtcatccagagtgtcctgcaggccatcaggaagaccgtgtgtgactgggagacggggcatgagcccttcactcgacccagccttgcaggggcgagaaggacccaagaagcggtcgacataaaagtacaagacgacagcggggaaccttccagacataagcttaacatgggaaaacaagaaagagaccctaattgcagacagaacgggggcaccagaacaaccctggagaaaaaaccagaaagggccacacaacactgggacatacgacacatcaaccaaaagagcagacgtgagaacatagaacagcaaaacagagaggaacagcagtagacagcacgaacaccaccaaggacgggccagaggcgtactccagcgacaggacaggcgcacgaagacaaccgaccacaggaagaacaagacaatcatagagacaaaaaacgaaaaacagcatagaacacaaaacgaagagtcaagcgagtagcagcaagaagaacaaacacaggacaaaacaggtccaaaagacgaaagagtcaggaacagnnnnnnnnnnnnnnnnnnnnnnnnnnnnnnnnnnnnnnnnnnnataacgccacctcgacctacagtcagctcatagtgatagagcacac

SEQ ID NO: 320307 - DNA, 2138 bp, Homo Sapiens
  misc_feature (66)..(66): n is a, c, g, or t
  misc_feature (79)..(79): n is a, c, g, or t
  misc_feature (242)..(243): n is a, c, g, or t
  misc_feature (344)..(344): n is a, c, g, or t
  misc_feature (360)..(360): n is a, c, g, or t
  misc_feature (371)..(371): n is a, c, g, or t
tgtgggagatcgggtattaggggagaggagagtatatagacgagttagtttgcttggttcgcgtgnatgtctaaatctngctactggtgtgatttaggtgtgttatactatttaatggaggtggtgctgattaactgtagtgagcgtgtgtctgtatgagatgcaatgtgtagaagtatgttacgtgtcagatcatggagcagtgcaaattacgcgagctcagctatatataggaagtaaannatgtgagatagcgtaacatgatgtgtgcagcgtatgatcgtggatatgatgtgtctgctgggtgcgtgaggcgtactatagtgttagttattcctccgtantgtgggccggtgttcntcttggggtancgtgggtatcattgcgtacttcataatggatgctagggtgtgtgaaggaggcactcgcggagtccatggcggtatggaatggttgttagaagagcgagagatgtgtgagagaagcatgtgggaaaatttttatcacgcaagtgtacatgttggtacggtgaggcagcggttgcgttgtgctgtggcgggaggaagtgaggttagtgggggagcggggttgagtaattgcgcaatgaatgtacgatcgatattgatttgtagttgtgggttatatgagtagggctatggggggagtgagagaggcgtaaatgtattacccctcactggtacggtgggaaggaggggggggttaatgtatagggaggtaatgggttgtcatagtttggcgtcccgagggtggtgtttgtgtagcaacgcgggcgagaggatgtacattgggctggggatagagcatgccatgtttacggaccctataggagctcgggcccaggagagtggtaactttggtcttgcagattcccagcgccctccacgccattccgcctcccttgtgtccccgcattggtgccagccctcacttcatgagcacttgctttggcagaaagggctccgtgatgaggtctccacggtgggaagacagctgcggtggtggtggctgcccgggaggctgctggtgaacgcagggcccggaggcggaggcagaggcagaggctatggctttggctgcacctcggggaaggctgtagaggtagacagcaccaatgacgagtccagcgccaagggcaaataatgggtccacgtggaagccaaagaggcgaatggaggcaacagtggacagcacaatggacagggaggtggcaaagcccttgaggatattgtcagcgtacttgacaaccacagccaccagtagcccgccgaaggcctggttgagcaccacgccccagacagcaggtgtgtacccaaaaaagaaaccacgggtggccacggcggtaccctcagcccaccagagccccaccaggcccagtgctgtgccgaagaggcccagttgcaggttgcgcagccacacggagcctgagctgcctttgaggatcttctcaaagtagacacctgcgaagccggaggagagacaggaggccacgacggctgccaggcctgccccagggttctgatccagtggccgtgggcctcccccaccggccttgctgtgcctggacaatggcgacgccagtgaagaggagcagcagggaggcccactgcagccgggaaaggctgcgattcagcatgagcacggagaacagcgctgtggtcaggatcttcagctggtatgtcacctggaaagtggcagctggtaggttagagatggcaacatactggaggttattctgcaaggtgtagatgagagagggcactgcgagcttgagcgtgtccacatactgcaccaggacagcctcatggaggaagagaaccaggtgcttcacgttacccctcttctgtgcgaagagcagcagcaggcaggtgagacctttgagcacttccgccatgaccacagcagtggtggcaaagaagcggtcccctggcaacgtgcgggcgtagcggatgctgaggatgagggaggcattctggaccaccagcacagctagggatatgtacttcaggcgcctgtgagccgcactggcggtccccggctccaatgcacccgcggaaaccgcccctggcccgggcgccgcggtggaaccaccagccccaaccgctgccatgttggcatct

SEQ ID NO: 320308 - DNA, 520 bp, Homo Sapiens
gacctggcgccccggccgagtgcgcgaacagacggacgcaccggcgagcgccgaggggacaggccgagcgcggggcgccggaggcaggtgtgggacaggcactggcctcagaccggggccacactgaggtctgcccttctcccgctggccgccacccaagacaccatgagccagtccggggccgtgagctgctgcccgggtgccaccaatggcagcctgggccggtccgacggtgtggccaagatgagccccaaggacctgtttgagcagaggaagaagtattccaactccaacgtcatcatgcacgagacctcgcagtaccacgtccagcacctggccacattcatcatggacaagagcgaagccatcacgtctgtggacgacgccatccggaagctggtgcagctgagctccaaggagaagatctggacccaggagatgctgctgcaagtgaacgaccagtcgctgcggctgctggacatcgagtcacaggaggagctggaagacttcccgctgccca

SEQ ID NO: 320309 - DNA, 1031 bp, Homo Sapiens
gattgtcccagaagccttgtcgtccttagtccttttccagcttcccgtgtgtctaggtttccttacaatcccccgaaagtcccggtgtgtctcccgccttcccgccaggtgggccgtaggtgctactccatgccctagaggccacactggttcttccgccccactccctgccccgctgctccatccttagtttttcgggattccgcctacctcaggggtaccggtggaccacccttggagccaatacctattttggtcatccccccgacaccccgtctgcagagcaccagagaaaccacgagggctgcctcatgccctgttccgtagtcaatgcgctggagttccccactgactcctttaggtaaacaccacctcaggcacagcagctgccagatgggtagggaccactgtggccaccaagttttctgcttcctcatcaagtttggcataccaggtcctgtatgccttattcccaaaccgagagggctggtccactggaggagtctcatcaatccacctgtccagcgtgttgagaagagcgactagtttctcaatggcctcggagactctgtactcgaaggtcagcttcttccccttcacaccttcgttgagggtaaggatgaatccgatgtagtcagcgtatgcctgagaacgcttccatttgcccatgtctggaactgtgtggatctccttttttggaatgatgaagttctgagtggctggaggggcctcctctgaagaatctggcggcggctgccgctcgccctcagccatcttgctccggccaggagccgacccggatgcttgcagtcccctctcgcctttcactcttgcacccacccttcctctccccggctccaccaaaggctccgagcttcctgaagacaagtgagcgccggccggctataaccgaaaaccgagagttaaagtcaccacagcgaagacggccgccatgtcggtgcggggcgctcagggagcaagcctattaacggccggcgcgcggcggacgcgcggacccgggcgacggccat

SEQ ID NO: 320310 - DNA, 853 bp, Homo Sapiens
tggtaccggcccggaattacgggatatcgtcgacccacgcgtccgcagatatcgaggtcagccattcggaagctggcagcattttatcgcaactttgagcatctcagatggggaaggcaccttcttcctcgcctctccagattgtcctggaacctccaggatccttgactgagggcgtgggatggcttgtaggatttttaagagagtgtgtctacagacaagcattttctctgtagagcagccacacgttgtataaacataaactgtatgtgcagttatttaaatttgtttctatcaaattaatcattttgttggacgattcagtggcgggggggttttgcctaaattagtatataaaaacaaaaatgctaaattatatctgtgaattgcaggtattggggaacagttttaagggaaattttggggggaacattttaggtttgtatttggtagtcttaatgtatctggcatttgggtgaactgtggacatactagagttgattatagacacattgattttgaataaggaactgctggccgagcccgctgggagtctagaaagagaaaatctgtttctagacctcagttattttcccatttttggttgttttgaagcagtaacatttttctcagtgcacatgcaatttgggttttagagaagatggccaccagctggcttcctagatattttaaacttttgttctttaatatgctgtccatggctgagtttattagtacatgggcttagtgaccaccaaatattttattaagaaactgtttccccaataaatttgcgctgttcatttttctggcctcgctgttctccatagagcaagggtaatcctagaaaaaa

SEQ ID NO: 320311 - DNA, 1242 bp, Homo Sapiens
tttttaaaaagaacatattctctttatttctgcttgggatacaaatgttcagtttggatgatgagaatgaggcaagtactggagacaatggctggctctcctgtttgtcccaataaactccaatggaggaagaagctaaacaggttttggatggtttcggtctactgcatctagcttatcaaatctacagcctggtacttctggaacaggacttccctgccccagtgatgacagttaaagatggcaaaaatgaagaattcaacatgtatacgcagtgcagtctgatgtcttcagatgttctctaaaattctgtatttggtcagagctgggagtgagatcagggtgcttgcacattttctgctccactgctcccgattctgctttgctgccttggagggagagtagatttagatctgggggctggtgggggccatagccttggcagcttgctgggctaaccagtacttatatcttttggtcttgggcttctcaaagttcacgacagacataggcactctcacagtatcaagcccatttaccgtcacctcacaccaatactcgccccaccgtgtgataggctcttctggtaactttaatgtatgtggggcaaccacaacaccaagattcttaaagaagtggcgggcaactatttcagggttcagctcccatttgacattgttcttcatccctacctccaggcgacagctttttagaaatttcactgtcgcctcacctgccttggtctggatcttctctaattttccttcttgtctcagcaatttctcctcttcaaacagcttcttgttttcaggggatgcatatacagccagtccctgaggaaggagtcgattccggcctaaagatttcttcactgagaccaggtcaccccggactccaacattctccaccgactgcgtcaggatgagctccaggttttctttgggccgatgcttcgtgtcctccaccagcttatagacgcgatgtcgccggtgcaggcgcggcttccggccctccccggccagcggtaccttccaccagcgctccacgatgaccgtgccccgattttgagaaaggctgaagttgcaggccaggtcaggggcgttcccttcatgtcgcggccgcagtagctcctggacgcctccccgaagcagccgtccagcgcccgcccgcagcagagctctgcccggggccgtgacaacgggcgccgccatgttcacaggcacagaatgagacctgaggccc

SEQ ID NO: 320312 - DNA, 1019 bp, Homo Sapiens
tttttacaaaacagcagctggaaagagaaatgtaggtggcagacgagccaggcacgaggtttcagattggaagggaccagagatgaggaccaaggtgtggctgcctgactaggaacgctgtgggctggcccaggctctcgccacacatcctgggagaactgccataggccctagaaggagggatgaaaggcgtatgggagggaagacagcggtccccggatcagcagcagcaccaccatcctctgatggcccctgggcagttccgccagctcggaagcactcagggctggagcctgggctctaagcatgggccccaggagccagacaggagggaggcagcaggaagggctggcatggaagggctgagttctattggggtcccacgcgggcaagggaaccaggactcatccctgcttgtcagccaatcagcttcttcaggaaggcctccaactgatcctcatccttgatgcccacaaacttgtccaccacgtccccattcttcatggccagcacagtgggcaccgctgacacctcatactcaatggcgaggtctgtgtggtcatcaatatccaccttggccatcaccaccttcccgtgctgcttggccaccatcttctctaacctcggccccaggatcttgcagggtccacaccactgtgcgtggaaatccacaaccactggtgtctcactgttgaccactcggtcttgaaagtcaggtccatcctggatattaaaggttgtcaaggagatcctcgtggtgtatattgtccgggctgggttgggtgttacagtcaggccaccaggactgcattgtggggtctgcagggctctggaagtgaggggtggccactgaccctgagagggcttcctggagatgacagaggccaggaacctcctcagaagaagtcgctgagccatctccctgcaatgcgagcggagggatgcacagcctagccctccctgcctgtcaagggcacgcctgcctcgtgccgaattcgccacccaggcctcgctaccta

SEQ ID NO: 320313 - DNA, 384 bp, Homo Sapiens
  misc_feature (72)..(72): n is a, c, g, or t
aggcaacaagtttttcaaaattggaaagggacccagaagatgaaggacccaaggtgtggctgccctgaactnaggaaacgctgtgggctggcccccagtctcgcccacacatccctgggagaatctgccataggccctagaaggagggatgaaaggcgtatgggagggaagacagcggtccccggatcagcagcagcaccaccatcctgatggcccctgggcagtccgccagctcggaagcactcagggctggagcctgggctctaagcatgggccccaggagccagacaggagggaggcagcaggaagggctggcatggaagggctgagttctattggggtcccacgcgggcaagggaaccaggactcatcctctcttgtcag

SEQ ID NO: 320314 - DNA, 1401 bp, Homo Sapiens
ttttgcttcaggcgcttttattaggttccactgcagggctggggtcaatgtaatgcaaatccaagcccagtgatgcacacctgtgagccgaaacagagccgaagcaggagcacctgtgtcccaggagcagctggttggagggagccagggccaggccccacctcctctcgggaccaggagactggcagccgctgtgttcacctgggcaggtgtgcacccagtcacccccactggattatggtgctggtagcatgagagggtgtgtccacaccaagggcaggtgaagatgcgaggtggggctgagacctccttcccacaagaggaggtggctgagcctcccagggcctgaactctcacagcagggctcacccccaagcctgtatgcttagctctgactctctttggacaataaaataaagtgcattactgaacaaagagtaactcaaaaccagaatcagacaaatcgccaatgcttttcctttagctaaaagacaaaagaaaacatgaatgatgtgaatgccggaacttcagagtaagggaaatgctggtggaggacaacggaaactataatagcgtggtggataaggacgagcgagtgggagaggaactggcaacgcggctctctctagaagtccgtgctgtccagcctctgcccagtggtgggggaaggccttggactcacagggaagcaatgcaggaagccttggccacctaggctcacagctcatctcaggaccagaggagacagcagaggacaaaacttcagtgtgacagctgctaggagggagagcagacagcccgcggtgggcaagctgggagttgcatccgcagcagtccgcttcaacccagctcctctccacccttcctgaccctccacaaaagctctgccgtgaccagacccaacccaactggcccctggtcccaagagcagatgagctgcttgggccttccacttggtgtcccatgccaggcggacctggaggtgtcagccacggccctgaccacttcagaagccaacaggcaaatgttctctgttcatagtgccaagaatgtgggtcacgtgggcttaccccccaggatggacacagaagtccctaagcagtctgcagctgggccagcctctcccgtgggtgcagagcagcccagatgtggccatcattaaggcaaagaagcatcgagatgcccaccactccccgggtaagagccatgccccggcctggccacgccacagaggaacgcagagcacacaagcaggaccccaccacgtgctgttccagatcgcccagtctccctctattggtacactatcaattgtgcagtgccccagggaggtcccaaatggccctcacaagaggcacagcccctaacgccctcagccaggcggtgcagtgggacgaagca

SEQ ID NO: 320315 - DNA, 769 bp, Homo Sapiens
tctttaccagatgttaggttagaagggtgtaaaacaaaggtgtatccagataatcttcctacaacaagtgtggtgattgttttccacaatgaggcttggagcacacttctgcgaactgtccatagtgtcattaatcgctcaccaagacacatgatagaagaaattgttctagtagatgatgccagtgaaagagactttttgaaaaggcctttagagagttatgtgaaaaaactaaaagtaccagttcatgtaattcgaatggaacaacgttctggattgatcagagctagattaaaaggagctgctgtgtctaaaggccaagtgatcaccttcctggatgcccattgtgagtgtacagtgggatggctggagcctctcttggccaggatcaaacatgacaggagaacagtggtgtgtcccatcatcgatgtgatcagtgatgatacttttgagtacatggcaggctctgatatgacctatggtgggttcaactggaagctcaattttcgctggtatcctgttccccaaagagaaatgggcagaaggaaaggtgatcggactcttcctgtcaggacacctaccatggcaggaggccttttttcaatagacagagattactttcaggaaattggaacatatgatgctggaatggatatttggggaggagaaaacctagaaatttcctttaggatttggcagtgtggaggaactttggaaattgttacatgctcacatgttggacatgtgtttcggaaagctacaccttaca

SEQ ID NO: 320316 - DNA, 1060 bp, Homo Sapiens
  misc_feature (1029)..(1029): n is a, c, g, or t
ttttttttgtaaatttggtctcggggtatttttggcagggtgacgtttcgaagaagccactgctgggaccgacttccattgcagtctctaatgctgggcacctggctatcctcttctgtggctttatccaggcactgattactgttcacatgctgcagggttaatttcactgggtcatactcccagagttggttgccttttaggtggtggcatttgagcattgtaactgggccattaagtttggaaacatccaagcaaaggtcatctgttctaatttctttgttggcagtataagagaaaacctggaaatttcctttaggatttggcagtggggaggaactttggaaattgttacatgctcacatgttggacatgtgtttcggaaagctacaccttacacgtttccaggaggcacagggcagattatcaataaaaataacagacgacttgcagaagtgtggatggatgaattcaagaatttcttctatataatttctccaggtgttacaaaggtagattatggagatatatcgtcaagagttggtctaagacacaaactacaatgcaaacctttttcctggtacctagagaatatatatcctgattctcaaattccacgtcactatttctcattgggagagatacgaaatgtggaaacgaatcagtgtctagataacatggctagaaaagagaatgaaaaagttggaatttttaattgccatggtatggggggtaatcaggttttctcttatactgccaacaaagaaattagaacagatgacctttgcttggatgtttccaaacttaatggcccagttacaatgctcaaatgccaccacctaaaaggcaaccaactctgggagtatgacccagtgaaattaaccctgcagcatgtgaacagtaatcagtgcctggataaagccacagaagaggatagccaggtgcccagcattagagactgcaatggaagtcggtcccagcagtggcttcttcgaaacgtcaccctgccagaaatattctgagaccacnacattttatatggaataaatccaaaacctgt

SEQ ID NO: 320317 - DNA, 722 bp, Homo Sapiens
ccagcccaggtacaggcccgcgcccatctcgcggttctgcgcttcgggcaccacgggggttgtagaagtcccggataatggtgttggccgaccaggacaccggcacgagggtgagcagggcggcgagaaggaacagcacgcctgccacgatggtgatcttggccttggccgtgtcgtcctgcacgcagttggtgcactgggcgcccaccagcgccactagcagcccgaaggcggccagcaggatggccaccacgatgagggcgcgggccgcctgaaggtcctgtggcagtgccagcagcgagtcgtacaccttgcactgcatctggccggtgctctgcaccacgcagttcatccacaggccctcccagatgttctgcgacgtgatgatgttgctgccgatgaaggccgacacgcgccacatgggcaacgcgcagcacacgatggtgcccagccagcccagcacggccagcgcggtgcccgtgatctccaggcccatggacatggctgccgcggcaaggcccgctccaccgggtggctccgggtgcggggagacgaggggccggggccgctgggcctggcgggagctgcggcgccccgacggacggacggacggacggactgactcaccgacggcgcgcgctaacggctcggctccacacgctctcgccgcggctgcgcctgcacctgcctgggctttgtgggcgggcggcggcgactgggct

SEQ ID NO: 320318 - DNA, 1715 bp, Homo Sapiens
  misc_feature (590)..(590): n is a, c, g, or t
tttttcctgtgcacaggtcccatttattgtagaaaataataataattacagtgatgaatagctcttcttaaattacaaaacagaaaccacaaagaaggaagaggaaaaaccccaggacttccaagggtgaagctgtcccctcctccctgccaccctcccaggctcattagtgtccttggaaggggcagaggactcagaggggatcagtctccaggggccctgggctgaagcgggtgaggcagagagtcctgaggccacagagctgggcaacctgagccgcctctctggccccctcccccaccactgcccaaacctgtttacagcaccttcgcccctcccctctaaacccgtccatccactctgcacttcccaggcaggtgggtgggcaaggcctcagccatactcctgggcgcgggtttcggtgagcaaggcacagtcccagaggtgatatcaaggcctacccgcaacagaggagatgcaggcagacagagtggggaaaatgtaaatggggacagtggccaacaccgatgcaggcagatcccaaagtcagggttaagccatcctggccagcagaagccagcttccccccnttccacccaccacaccctgtcacttccgtccctccccaatatccagaggagggtggactctgttcttgctagcaggaggcggccttgggaagttgtccgagtgggccagagaggctgaaggctgctgccttcctgcctggctcagtctctgcccagtccccagtccccagcagccagtggcccgtggcagggccctcctggggtcacagcctgcgctgagctcagtccagggaagaacaaagcagagaggaacagagtggagcccgtggcaccttacacgtagttgctggcagcagcagagcgggcagcagaatacttggcggagtaaggcttgtctgtgcggggtggacagttgcagcaaagcagccccccgccaaggagcagcaggccggaggcggcccagccgacgtagagcgaggcacccatctcccgcttctgcccggaggccaccagcggattgtagaagtcttggatgatgttgtgggccgtccaggacaccggcactatcaccataaggccggccaacaggaacaccacgcccgccacgatcatggtcttggccttggcgctttcatcctccaggcagttggtacacttgccccccaccacggacagcagcacgcccagagcagccacgatgatgctgatgatgacgagggcgcgggccgcctgcaggtcctgcggcagtgccagcagcgagtcgtacaccttgcactgcatctggccggtgctctgcaccacgcagttcatccataggccctcccagatggtctgcgaggtgacaatgttgctgccgatgaaggccgtcacgcgccacatgggcagcgcgcagcacagcatgacggccagccagcccaggacggccagcgcgatgcccattacctgtagccccatggaggccattgttcagcgtccgcgggagttgaggacctggaaggctgaggggatccggctgtgggggccgtaggattccaagcgctggggacggacttaacgttcgcagagtgcacctttgcaccgtgagtcaggagataaagccagtcctgatgcgcaagccagcaagtgtgagcagaccagttccttccagccgacagctgatcccgggaatccggaccggtccagcct

SEQ ID NO: 320319 - DNA, 522 bp, Homo Sapiens
tcttttatgtcacacatctgggtccaggtgaagacttggtgtgggggtggataaacagtgtaatgctttctttcttctgcaacaaatcccattagcttgataaaatacggtttcccgaactccccgctgaggtgcttcttccagctctctccaaagcccacgggcacgttgcgggccgcgagtctgagcagggccgcggccttgttcctctggatccggtccaactgctcggcactcagcggcgaggagggcggcgtcccaggctcctcctgcccagccggggccttcttggctgggatggcctgcaagtggtccccgcagaggcggctcaagagctgcagcggccccttcccaggcgtccgcagcttccggcccaacccccacggcccaaggcagaagacgcccatttgtggaacaggtcccagcaaaagcggacagtaagagcccagggctgggcccggtccgggaattgggaattaggttctaaactggagcggggagacgggctgggaggcgccctat

SEQ ID NO: 320320 - DNA, 1239 bp, Homo Sapiens
  misc_feature (105)..(107): n is a, c, g, or t
  misc_feature (127)..(128): n is a, c, g, or t
  misc_feature (130)..(136): n is a, c, g, or t
  misc_feature (173)..(173): n is a, c, g, or t
gaaaaaaggttgggttcccgggaaaccaagtttatggcccaaggggcccattccaattcccctcttttccccgcccccccgaacaaaagaaccccttgggagggnnntttttgtcggtgtttatttnntnnnnnnnggcctgggcccaggacttttatttggttcccgggccnccaggggcccaaaggaaacactgccgcaaaacgtgggggccccagccctgagaggaacctctggggcggcccaggcctccctggggatccctgcccaagctgcccccggggctggaaggtgcatgggcagcacacgaacccaggatccacccactgccccccggttgccttcacagctcccccgggatctgtgtcctcagtgcaaagggcctggcagggaaaagctgggcctgttggtcaggcatggaggagctgtgtggtcactggcccactggctcttttctgcaccccccgccggcttctgacagtgcttgctgctgcagctgctggatcagctccgccacatagatcttgaacaggggtacagggtccttctcctccaaaagtctctgcttctcaatggcctcctccagcgtgaggcccacccactttgcctcctcctctgggatggcaaattccttgtacttgtcgtagatggctgcccgccgctcggggtcctcggggtgcagctgggggtcctgccgggcaagccgcagcagcatccctcgcttcaggtccatcccaaacttggagcacaggtcctccttcggggtcttgaggatgtaaaagtcgagcccgtaagcctcatcgatgaggtccagggtccgcatggtcacagtcactgtgaacttcttgtccaggatctcactgtagaactctcgctcaaacagctgtggcttccacactttcttcagcctcttggagagcttgtcgttgttggcatatatttggcccaggatccagccctcgccgccccacaacccccgctgggattcggggggaaagtagatgggaatgggcacgtcctccacacgctcccgctgcccgttcttggggttgatcttgaacttggccccatgaggcctatagtgcacgggagtgggcgtccgctcctcctccagggagcgcaggtagtggccgggcaggcgggaacagatgccctcccgcagctgcagccgcttccagagccacacgggatacttgtgtagaggcatcgcgagcctttcagggttcagagcccaccgga

SEQ ID NO: 320321 - DNA, 1063 bp, Homo Sapiens
  misc_feature (237)..(247): n is a, c, g, or t
  misc_feature (297)..(306): n is a, c, g, or t
tgttggcttcaaaggaaaggtgcgcttatctatataaacactcccggggggcgcgactgttcagctcgcgggcggtgttcgcccttcgttaacacggggcgggcgcgttttaatttcccaggaactttaacccgggaggaaaggacgcatgcttgccctgtgtgccccgagagagtggccatttttggggccggccacgggggggagcattgggcgtttgcttccataaaaaacgcnnnnnnnnnnnatacgggatggagtattgcggggtaacccggcgtccttttggttcccacnnnnnnnnnntgtttcaatgggggtggcacagggtgtgttattgggccgcggataagatgcgcgtcgcaaaatcttaatgggagcctgctatgttcgcggaaaacatttctccaggaggaccttgccccagtggaattcggaacatttttcgatccccttgatcctgaggaagtcaggcatcttgttagtgagacgaagagccggctccattacaagatttcctccgaccgcagggagccaaggagtcaggggctcaaaggcagctctgcagcttcacccggagtccttcgtgaaaacgcagccttcccactggttactctgccctcacctgtggcccaggccactgccgcgtttcccccagcccagaccgacaggcagatctctctcccggactgaggccggaggctgagccggggcggaattcggacagcccggttgacctgggcattccccgctcacgctcctctaggacgaaccccgggggtaagtttcactccccagaaaggctgggaacgctttggatggctacggccttcggttgggccccagaaagtatctagggagcctgaagcgggggttgaggtttccaagtggaagacagaggaaatatccccatctttgtcaccgggatccctgttccccagcggcctcggagctcccggtaaccttccctccaaacgccctccccacacaaatacacacaaacacacccataccgtgcgccgcagcctcgcgtggcggggggtaggggggaagaagtggtttg

SEQ ID NO: 320322 - DNA, 1238 bp, Homo Sapiens
  misc_feature (129)..(137): n is a, c, g, or t
  misc_feature (398)..(412): n is a, c, g, or t
  misc_feature (452)..(461): n is a, c, g, or t
cttaccagttcaaggaaaaagcttattcagtttgcattctaggacattttaaaaacctattatccacaattaaaatttcaaatggtaaaaacagttagggttttagaattgttttgtgatcctttatcnnnnnnnnnttctattccttttattcagtttttaaacacaccagtgagaatcaaaattgtcaaattttccaatggcaatttctccacaccagaaggtagtcatgactctcaaagaagaaacaatttgggtttttcctgccttcaaaatattatcaaatcctgtatttcttacaggcttttcaaacacgtagaaaataagaaatattccaatgaatgaaacataccaaatgtcagtaatatgcaagacattcctttggggaaatggctgtnnnnnnnnnnnnnnntccagtctgtatatgcaaagtaagcaaggaaattcagtcnnnnnnnnnngcttctttaaaagtccgttattcctaaaatatcattccacaaaattggaagtgaaagactaaaggtcaggaaagggaagagagggagagggagcacacaccattaacacacaaaaaaagtaaaattatacaaacttaagcagtttataacagactggggtcatactccaagataccaaaggctgtcgaaaattcaccattctgttggaaccagggtttgtatggctgcatgaagatccatgaagattcactgccgtggcgcaagcccccttcccactccaaatcctggtttctgcaccatgcctccacggggagggcctctcattccaccacccagcccacctcgagggcctccaggtccccgaaggcgattatctcgtcggtcgccttccctggcagctcgagtcttcttctcttcgacattcagacggacctcacctctgaacatgatgggcctgttgctaaggactttctgaacaggctcagaatcatcaaacacaacaaaaccaaaattgggtaatttcccaccactgttaatgcgcaactccaccacgtttgcataactttgaaagaaatctttaagctctgattctgtccacttcatgaggcaggttgccaatgaagagttggtgactgtcagggtgtctcaccattcttcggggttcaatgtcaccttgctcaccagcctcacggattggtctgggtcccctttggggaggaatatttattcgttgttctcgcactctttgatcccgctgaggtctttgtggtggaatct

SEQ ID NO: 320323 - DNA, 3174 bp, Homo Sapiens
  misc_feature (1391)..(1399): n is a, c, g, or t
  misc_feature (1557)..(1578): n is a, c, g, or t
  misc_feature (1660)..(1669): n is a, c, g, or t
  misc_feature (1950)..(1960): n is a, c, g, or t
  misc_feature (2087)..(2161): n is a, c, g, or t
  misc_feature (2417)..(2425): n is a, c, g, or t
  misc_feature (2620)..(2620): n is a, c, g, or t
  misc_feature (2625)..(2625): n is a, c, g, or t
  misc_feature (2739)..(2739): n is a, c, g, or t
  misc_feature (2769)..(2769): n is a, c, g, or t
  misc_feature (2912)..(2912): n is a, c, g, or t
  misc_feature (3037)..(3037): n is a, c, g, or t
  misc_feature (3051)..(3051): n is a, c, g, or t
  misc_feature (3066)..(3066): n is a, c, g, or t
  misc_feature (3101)..(3101): n is a, c, g, or t
ggggcgcggacgcagttgcgtgaggggtttgtgctatcctcggtgctgtggtgcagagctagttcctctccagctcagccgcgtaggtttggacatatttgactcttttccccccaggttgaattgaccaaagcaatggtgatggataatcctagtcccctgctggtcgggcgggaatttgtgagacagtattacacactgctgaaccaggccccagacatgctgcatagattttatggaaagaactcttcttatgtccatgggggattggattcaaatggaaagccagcagatgcagtctacggacagaaagaaatccacaggaaagtgatgtcacaaaacttcaccaactgccacaccaagattcgccatgttgatgctcatgccacgctaaatgatggtgtggtagtccaggtgatggggcttctctctaacaacaaccaggctttgaggagattcatgcaaacgtttgtccttgctcctgaggggtctgttgcaaataaattctatgttcacaatgatatcttcagataccaagatgaggtctttggtgggtttgtcactgagcctcaggaggagtctgaagaagaagtagaggaacctgaagaaagacagcaaacacctgaggtggtacctgatgattctggaactttctatgatcaggcagttgtcagtaatgacatggaagaacatttagaggagcctgttgctgaaccagagcctgatcctgaaccagaaccagaacaagaacctgtatctgaaatccaagaggaaaagcctgagccagtattagaagaaactgcccctgaggatgctcagaagagttcttctccagcacctgcagacatatctcagacagtacaggaagacttgaggacattttcttgggcatctgtgaccagtaagaatcttccacccagtggagctgttccagttactgggataccacctcatgttgttaaagtaccagcttcacagccccgtccagagtctaagcctgaatctcagatttcaccacaaagacctcagcgggatcaaagagtgcgagaacaacgaataaatatttctcccccaaggggacccagaccaatccgtgaggctggtgagcaaggtgacattgaaccccgaagactgccatttccccaaaggaatgtcttgcatattactgacatttggtatgtttcattcattggaatatttcttattttctacgtgtttgaaaagcctgtaagaaatacaggatttgataatattttgaaggcaggaaaaacccaaattgtttcttctttgagagtcatgactaccttctggtgtggagaaattgccattggaaaatttgacaattttgattctcactggtatgtttaaaaactgaataaaaggaatagaannnnnnnnngataaaggatcacaaaacaattctaaaacctaactgtttttaccattgaaatttaaattgtgataataggttttaaatgtctagaatgcaactgataggcttttcttgaactgttagtttttttgaagtagttttttcatgtttaatttgtatttgtnnnnnnnnnnnnnnnnnnnnnnttcccaaaaccgcaagataacaaccagagcaaaactgttgtgccttctatttatctttgatttcagtcttggcaattgtttnnnnnnnnnntctagatttgttttattaggttcagagtatgtggggaattatagaatccctctttcatcactttgtgtatgtcttttgttaacatatttgttatgccttattctaaaattgagtctcaaactggaatgcctttgaagacagatgcttctatagaggttctttgacctaaatagttcagcatttgtatttttattctggtatctaatcagattcctaatcatagcccgtaagaaggaatgttactttaatattggactttgctcatgtgctcgtgtccgcannnnnnnnnnncttaaaatcatagccatatggtaaattttctattttgttatggttctcttttattgatgggcatgcagtgggtgttacttggaaatggccaatttttattaaaatatttctggaagaaaatttacgnnnnnnnnnnnnnnnnnnnnnnnnnnnnnnnnnnnnnnnnnnnnnnnnnnnnnnnnnnnnnnnnnnnnnnnnnnngcaagaacgccgaaacaccccccaggaaaaccgaagccccttcccctccccgaaacaggggccaaggcgcccccggagggcggcgcgggcgcgccccccccacggagcgtggacccaaccgcgcgcttgctctactgccggcgcgctctccgaacaacccccatgagccggcgccgagcaagcagcaccgcaaggggccccccgaggcgcgagaccgagcccctcacgcccattccgcaaggcgtagccgagcggnnnnnnnnngcgaacgccccgcccgcgtttccgccgacagctcccaccccgcggagtggacggggagggccgggggtgcgggcggcacggggacagcgggatggctgggggtgataggaggcggcgcgcccgagataggagactctgccgcgggacgacaggagaatggaacaacaggtggtgttaggcgcggccgccgagcgnggccnctacgagagacagagacgcccgcagtgcacggagtgcgctgagcacaacgagagatgttctgctagcgatgacacgcctgccgatgcgacgccaccaccgcctgtgggtgcgangccacgaaccagcgatgatacatcctggtnagtgcagtgcacggcagaagaccagccgcaacataatcaaatacccaccatcgccgccgtccatcataaacacgacgcgtaccgcccgcgccactctctgcatgttctgagacgcgagcggctgctggcgagcgcgggaccgngcagaaccggtgctaagagcagccgcgcgacaggcccgcggcgcagagtctcttgaggcgcgcccgcgctgcagtgatagattactcgtcgagacgcgggtgtcccgcgcgcgcgcgtgttagangcatctccgccgcngagaaccgcgcgcgnagactcgtcagagtctgtccgacggcgtcaccgcnacccgatgcagctcggttgctagcgcgacgggaatggtcggcccgagcgcgcgcgccccgtggcgcatcctcg

SEQ ID NO: 320324 - DNA, 681 bp, Homo Sapiens
  misc_feature (244)..(244): n is a, c, g, or t
  misc_feature (669)..(669): n is a, c, g, or t
agagagacactagatgaatttagtgttcaaaactcaataacctactttgaaagaaatctttaagctctgatttgtccacttcatcgaggcaggttgccaatcgaagagttggtgactgtcagggtgtctcaccattcttcgggggttcaatgtcaccttgctcaccacgcctcacggacttaaaacggagacaaaaaccatcaatgaaaggaccacgagaacgaggaccatctttcaatgactngctcacattcaatagttttccctctacactaaaaacaggtaattccatcaaccctacaatatttttattttaaagtatataaatatcaactgccctcccaaaataagctctcacctcaaaatcccccaaacgagaaatcggcccttctgagctcttacttggtctggggtctcctttgggaggggaatatttattcggttgttctcgcactctttgatcccgctgaggtctttgtggtggaatctgagattcaggcttagactctggacggggctgaaaaattttaagttaacttttgtgttaaaacaaagcaggcttatcctttttcttaatgaagtttcttagctaacaagttttaaactacaaaatggacaattccctcacaagaaaaatcattaaaaaccatcttatacccttctcttccntcctatatgtca

SEQ ID NO: 320325 - DNA, 856 bp, Homo Sapiens
caccacccatgccacgctgctggggcgctacctgtgtgccggtgccgtggacttctacaacaacctggagaacttcaacgtggacaaggaagcaggggagaggcagatctaccaccgatactgcatggaaagggcggcagcccactgcgctcacgtcttcactactgtgtcccagatcaccgccatcgaggcacagcacttgctcaagaggaaaccagatattgtgacccccaatgggctgaatgtgaagaagttttctgccatgcatgagttccagaacctccatgctcagagcaaggctcgaatccaggagtttgtgcggggccatttttatgggcatctggacttcaacttggacaagaccttatacttctttatcgccggccgctatgagttctccaacaagggtgctgacgtcttcctggaggcattggctcggctcaactatctgctcagagtgaacggcagcgagcagacagtggttgccttcttcatcatgccagcgcggaccaacaatttcaacgtggaaaccctcaaaggccaagctgtgcgcaaacagctttgggacacggccaacacggtgaaggaaaagttcgggaggaagctttatgaatccttactggttgggagccttcccgacatgaacaagatgctggataaggaagacttcactatgatgaagagagccatctttgcaacgcagcggcagtctttcccccctgtgtgcacccacaatatgctggatgactcctcagaccccatcctgaccaccatccgccgaatcgggctcttcaatagcagtgccgaccgggtgaaggtgattttccacccggaagttcctctcctccacaagccc

SEQ ID NO: 320326 - DNA, 890 bp, Homo Sapiens
ttgcataaattggttcagtcactatttattagttttaaaaaaatggtttttaaaagctgcaaaccatacacatttctgaatcaggaagaggtaaactgtgacatagttcccctgtgctgctgattcttttggggagaaaaaataagtttccaaattctatttttaaaaaaactagaggttttttttctatgattagccttcactctaaagtcccttttacccaaggcatggtccctgggtcatctttttgacggcttagtttctgggaagttttcagtaaaccgctctcgtgctttgtcccagttttttttgttcttgttttggagaaggtgaacatcttcaaatgaggatggtttgcctgtccccaagcctgcatgtgttcgccgaagctgaagctggatcggcgttttcattcctccaccatccttccccaggccctctcctttcttccaacccatcttctccaacatcttccgacctttgttgctatcagtaatttcagaatgaacagatgcaggagcatcatctctttggaaagttccttcacttccaacctgctccctacgttttccagctctatctttatattttggattcttcaatgtcttttcatcttcgtattctgtattctgtaaaccatattttactcgtattttctttaattcttttcttctttccaactctttttcctccttacttagtgttggaccaacaaaagattcatctttcttatcaaggcgaaggtgggctctaacctgccctggttcacagccatcacaggtatcactgccaggatgaatgtgaaaggataagacagtttctccaattttgacttcatctccatgctcaagtacgtaagggtcacatttagttttcggctgaagaatccc

SEQ ID NO: 320327 - DNA, 1646 bp, Homo Sapiens
  misc_feature (143)..(151): n is a, c, g, or t
  misc_feature (472)..(577): n is a, c, g, or t
  misc_feature (580)..(580): n is a, c, g, or t
tttaccgccaagaggggggacacaagggtttttgagatttccccccgtcggcgggattctcagaggttttatcacactacccgcgttttgtggaagggggtttccacaatgttggcgcaaaaaaattttttaaagggaatttnnnnnnnnntttctttccaataaaatgggcccggggcgggggggtataattttaataattgggggttccgcttggggactccccgttggaaaaaatccccgaaaaggaccctccagaaactcccatttgggaatttgtttaaaaacccctctggttttccccccgggcgtttttttatttggggggagaatcccaagccctatgtctaggcccggggttttccttgggaaccaggtatgggcccaggttcccttcccttctggggccccggcgcccaacaggaatgtttttaaaaaggtttttgaggggccgaggggggcccacaagggnnnnnnnnnnnnnnnnnnnnnnnnnnnnnnnnnnnnnnnnnnnnnnnnnnnnnnnnnnnnnnnnnnnnnnnnnnnnnnnnnnnnnnnnnnnnnnnnnnnnnnnnnngtntccccaacatgtttaattttaagaatagagataatggtcaactcttgagaagaaccaaatgctggtgccatcttggaagtgctacatcacctcctcctcttacttccttgaacagcaatatttctggatttcttctgcaagccccaggcagtgcaggatgcgtttcttttcagcagccagttccttctcagagaactggcccaagagtttctggacaaatatattttgatctttcggaaatatgttcttattcactcctacatttggcacattctccaaggacccagacttgaaatgggaagcttaaatatctgtttggttttggacccaggtccttttttttcaatccatggccagtgggcttttcttctctgtctccaggcatactgtccattttcatatactgatctttctttccgtttttccaaagtggcagacacaagagaaagctccccaaagagggagaccagccaggtcaggcgagagatgccgctgaatgcagggaagccaaaccgctcttcttccaacgggccagctgtgaagaggagcgaccctttcagcaggtctttccccaccacttcttttttcaggaaagcgaattcctccatcaagagttcaacatgctcctcgtgcaagacttttcctttctgctcagccagctcccacagttcctgagcggccgccaatgacagtgtcatggggtattccacaaggacgtgcttgccagcattaaggaactgcctgatgtagtcctcatggctggagctctcactgcagatataggcgacctccacctcttggctggaaagagcatcctccaaagaaatctgctggactccatcaatgctcccgagctcccttctcgacacgaagccaatcaggttcaggaacgctgaggaagggtgtggattccgcaagtccctcatccgcacggagccggctcggccaacaccaaccaccaccacgccaaacttcctctcgggctctgtattcatcttggtctcttccttcggtcactgacgcgggcaccgctctccgtgcagcctccgggcgccaccggctttgc

SEQ ID NO: 320328 - DNA, 1111 bp, Homo Sapiens
caaggatgacaagacacaaacaagtgagataattggttgaacggcatcagtccgctttgccctgccctggtattcgagacggatagttgcatggagttccaaggtagaacagcttcttgagtgcctgcagagacactgtcacctctgtgccccacaacaccgaacaacttagagggccagctgtggtcaggcctgaagctttgtggagctgaattcctatatgtcaacatcctgtctcccgatctgctgtgagagaatctggcacgggacgtcctctgtgaaggctggctggagtccaggagcagcaaagtgtggctaccccaaaggctggaggcagagaagccaggcagctccctcagaataccaacgacatgagggaaaatgaatgtcttcaggccctgaagcaaggccctggtgtggtacagaaactgtcctccagagagcagcccggatccggggctggcatcatccttccctgcaggcaattactctcaccggaggtaataatcaatcgcagcagagaaagcagcaaaacctccacaaccaatggccccagcctttaagccagctctgaaaccaatagctcctcccgtgatgcagccactgatgacactgttcttccagtctgatgttccccggtaagattctatcaaacactcagtacaagaaaacatggctcccacaatggcgaaatttttggcataggacattcctctctgccccatgtctttcagcacttcttttgcagtcggtgtacggtaaggatccttagggtcaaagcccacgttggtatcgatgccagcggtaaacaccccaaatgcacctcctaagacaaatcctcccacgcaggccagcgcagccttgaaagcgcagctttccatcgccttctcgatcatcttctgctcctcactcttggctggacttgggatcccgcccaggctcccaggctccaggagccggggctgacgcttgtcacccaccaggtactgcaggagcaggctgtactgcagcggagcttcggcggaacccgctgtctcaggggccgagcctccggcattgggggcggccgccgccatgacagtcgctgcccaagcaaccctcgcgtccttct

SEQ ID NO: 320329 - DNA, 954 bp, Homo Sapiens
tgggatgctgagccttcggacagcttcaaggcccgtggttttctggcttgcttcaggtgtccaggcttctatgctcttttagccttgtgatgagggacaggctcctgcaagagtcacctcaagaccttctgatctccccccatcaatgctccattcttggtcggtctggaaattgaccaccccccagtgcaggcagcagggatcgctcctcctccaggggatcttgggaggactctggctccttggatgagagggaaggtctgcttggctcacagaattcgcagaagacgaagaatcagaagcagcagtaatagcaagagacagagggggctgggagtgtccccccctcgccaccctgatgttccactttctccagggctcccaacaggatgggctgactcagacttcctctccttgcagcagacagacacctggagcctcaagcactggccagaactctctggagtgggcaccgagatgtagtagtaagtctctccaggtaagaactcaaagccgagggagaagggtgtgaagcgctgaatcttctctgagaattgaacatggccaaagggcagggagcacacccagcgcttgtaggcccgggggccctctgcctggcaggactcatagcctggccagtccaccatgtacaaagcaaacgtctcggggccctcagggggccctgggccttcgtagtgggggcagacaatgtctaggtaatcgttgaggcccagctccaccacggcgtctcctcgaagcaacctggggttactggagttccagtagactacgtggcggaggctggagcccccgcgcagaggggagccgaggaacgcggcccagaggacagtccgcagcaggggcagcagccgcatcgcccccgaggtccggtttggtctggcctggcaggtcccggcccgcttcacagtcgaggagagaaaggtacaaagtgaa

SEQ ID NO: 320330 - DNA, 1092 bp, Homo Sapiens
ttttttacattagaaaatcacagtcagatgtttaatcaatccaaaatgtccactatttcttatgtcattcgttagtctacatgtttctaaacatataaatgtgaatttaatcaattcctttcatagttttataattctctggcagttccttatgatagagtttataaaacagtcctgtgtaaactgctggaagttcttccacagtcaggtcaattttgtcaaacccttctctgtacccatacagcagcagcctagcaactctgctggtgatgggagttgtattttcagtcttcgccaggtcattgagatccatccactcacatcttaagcattcttcctggcaaaaatttatggtgaatgaatatggctttaggcggcagatgatatacatatctgacttcccaaaagctccaggatttgtgtgctgttgccgaatactcaggacggacctgaattctgattttataccagtctcttcaaaaacttctcgaaccgctgtgtctccaatatcttcttcaggctctgacaggcctcctggaaacttccacatatttttcaatttatttcgatcttgtacaaccagtatttttctagtactttcatcaaatacagctcctgcaactcctacttgatgtgaagcatatcctggtaatctgctgggcccttctctcagccacagagtcaacgttgatgaatccgattctgcgtggtgaaagcggaagcccagggaagcagcaggggcaataaatcggctttggaggatgggaatgtgcagccatacagctgttctaccttctgatcgccattgctgtactgcagcctgcaagcccttctggaaggcggcagcgtccaggcggtccagcgcatcgagccgcgccaggcgcaccgagatgcccccgaatctgtccagctcgccctgcagatcgcacgctccaactggcggattccgcacgtaaccctgtgcgcccgaggcccagcggtaacccgccgaaggcccggggccgtaggttcgggcaagcatcgcgcgccagcggccccagctcagcggctgccgcatctccacgccgcttaattcgtccgttgcccaaaaat

SEQ ID NO: 320331 - DNA, 826 bp, Homo Sapiens
aaaatgtgaagtttgatttcttcatattttttattttcaaatttctacaaccagcatacattatttaaaaacaaagtttaactaccttgaaatttatacattaaaaacattataacagaactcctaaaggaagaaaaaaatagaagtccataattgtctttaagattaaacctaaggatgttaaaaggaacagcattcaaatggtatttgattcggtttaaatccttttatttgtccactctaaaactaccagaacatctgttacgtgccaagcattgtctttggtggtatggatataaaggtccagcagtgtaatgactttattctgaaggaattccagtctgatggaaaaatcatataaaccaaggtggttactataaaacatggtacttcccagtgcccagcgatgtgaaccaagaccatttggggacctctttttgcttaaaagatggtttcctggaggaggcgaaaccctgaggtgagttttaatttattccactcgtctctttggaaattatttagacttttttcttctgcatttagctgcagtacagcaatggcgatcagaaggtagaacagctgtatggctgcacattcccatcctccaaagccgatttattgcccctgctgcttccctgggcttctgctttcaccacgcagaatcggattcatcaacgttgactctgtggctgagagaagggcccagcagattaccaggatatgcttcacatcaagtaggagttgcaggagctgtatttgatgaaagtactagaaaaatactggttgtacaagatcgaaataaagtaagctgcttctgttttataaa

SEQ ID NO: 320332 - DNA, 1089 bp, Homo Sapiens
ttccccggaatgggctttctgcccaaggattccattagggagtgttccaatccacctgttattttttgggagccaaggcctccattctggttcctccctgaaggtatggttattggtgacttaactaactgccttcaaaagccatgcgtttgttgatgcgagaaaatagcaggcccgggagaagatttccatgagtcaaagatggcataaactcctggttggcgccagctgagagaagtttgtcagctgcatggcagattgtgccacaagtgtcagccatgtcatccacaaaggatggccacccgatcctttcacatctcccacaagcaccatgcggtccacttcattggctttcttccgttctttgtgaatcaaggcaaagtccacattcagcctgtctgcaatggaggtcactctcttagctccaccagcatcaggtgagacaatagtgcagttcctccactcagagatattctcccttatccactttaggacagccggctctgcatacaaattgtctactgggatatcaaaaaagccctgaatttgagaagcatgtaggtccatggtgataatatgatctgcacctgctacagatagcatatttgcaacaagcttggctgagattggcgcccggctcttatctttcttatcctgccgggcataagggaagcatgggatgactgcagtaacccggctggctgaagcaatcttgcaggcattaatcatgatcaaaagctccattaaattgtcattgatttcgccacaaccactctgaacaatgtagacatcctctccacgtacactttcaccaatttccacacaggtctcctggttgctgaatttcttagtcaccaccttgcctagctccaggcccaggcggtcagcaattttctgagataagtcctggtgggagctgccgctgaagattttgatattcggcatcctggccaactaccctaagcactccactaagcgatcacggctgctgcagagaccggaaccgaagtcggccacagactcaataccaagcgctttgcgttgctactccgccatcttacattcccgcccggcgcgcggctctaaatt

SEQ ID NO: 320333 - DNA, 696 bp, Homo Sapiens
tgttttacagataatgctttttaatatttcaaatatttttttaaatctcatcaaaaatgttatcaccttaacagtactttgcacatgtggaatttcatacctaaatttgatactattttggtttatttatggctacttacaagagtcacagtaataatgtccactcatcagagtctttctttggtagagcctaatgggaccagacagatgaactgttatgcaaatgagatggataaagcaaattcatgatagtatgaattataagggtttttgtttaatggaaatacaacttaaaaaggatttccatatttatccccatcattattttggaagcttaataccctgttcaggggttgaagagtttgaatagctcacacaatcctgtaaaaatgacaactggctgccctttaataaataaagtcattgtaaagaattacatttacagagtgaaaagtgaatacatagcatttcaaattcaattttggaagtactaataagtactgacccataacaatatacactagctatctttttaactgtccatcattagcaccaatgaagattcaataaaattacctttattcacacatctcaaaacaattctgcaaattcttagtgaagtttaactatagtcacagaccttaaatattcacattgttttctatgtctactgaaaataagttcactacttttctg

SEQ ID NO: 320334 - DNA, 511 bp, Homo Sapiens
ttttgccctttggcctttgctggctgtgtggcggctccgcggttcgcaggtcgttcgctgagcgtctctgcttagccgcggtcatgagccggcacagccggctgcagaggcaggttctgagcctgtaccgcgatctgctgcgcgccgggcgtgggaagccgggcgccgaggcgcgagtgcgggcagagttccggcagcatgcgggcctgccgcggtccgacgtgctgcgcatcgagtacctgtaccgccgcgggcggcgccagctgcagctgctacgctcgggccacgccaccgccatgggcgccttcgtacgcccgcgggccccgaccggggagcctggcggcgtgggttcccagcctgacgacggcgacagtccaaggaacccccacgacagcacgggggcaccggagacccgccccgacggacggtgacaggcgaagagccgaactcgctcgatggcgtggtggagccaggaggctcgcctgactgcatggggggactggggaacccg

SEQ ID NO: 320335 - DNA, 1166 bp, Homo Sapiens
  misc_feature (1038)..(1038): n is a, c, g, or t
accacgtgaaacctacattgctatgttcataattgccaaagcagtatttatactatgtaaacaactcgcacatctctcctgtctgttagtaataagaatacagggaaatgtcttcagccccacgtagatgctgcttaagatgagcgtttcaattgcatcatcactgacctgttagaatttaacccggaaacatcgcaatagcatttagggatgcacgcacagtggtaatttattactcagttccggttatgtttttctccaaaacctgaacatttttactctgttggctcattctattttgactaatgttacaaagtactgaaaaaactgtagaatagatatttttaaggctatatgtagtgtatgtgtcttttaatagatataggcatctgttcatccacatttgaacacagagctaaagaaacgttttttaaaaaactacttttaatccagatccatggaataatatgtaattcttgttttccttgtcttttagtccagtttttctttttccctctcatatatttgtaacctgggtcctaaactgactgaagagtttgtcctgactttattaattgcagtctcacagaatgctcatcattctccttcagctgttgccattttctttcaatctgaaaattaaagacattggagagaaaggctaaccacttaatggtgcttaaaaatcggggcacttaaaataagtttacggccaaaggtgcagcagtgcttatcacatccacatactaaggaggttgggtcttagtgcgtttgtgccctttgttctggtctgactcttgcgaatctcagagcaggagaagttgcagcttactgatccctcagtgctcacagtactcatgtggggcagccacactaaactgcattagcagtgtggttacttctttcttctgcctcggactcacatggcttctccccacgaaggtcccagggtggccatttatacaatccatttctgtcctctttatggaatgtagtcgacggatattgctgcacctcatcaggccattacattgtccnatgttaaaattataaaaatgatcctagtttttcataggagtctaggattttgatcttttaaaaaatacagtgtgatttcatgcttttgaacatctttttttcattgaaacaaattcaagttcttggct

SEQ ID NO: 320336 - DNA, 876 bp, Homo Sapiens
gtttttctccaccttaagggcacaaaatacttggggggtacatcggctaaggggtttggggtattcggaagccccctcctttaagatgcttcaaccaaggccctaaatgcttttggggatgttgtccccttctgaaaacaaatttcagccagaactgccatttggatttctttagaccagctttcatcatagagtgttttttgtgatacctcctcccggaatgcggatacaaaactcggaatcatctatttcaggaatgcaccggcttttttccatttcttcccagttaaggctctttattttattttgaacacttttttgcatggaaggtgtaagtaggtaccggaagggagtactacgaagctgcagatcattacgctgatatgaatgactgcttgaaagaacaatgactctggcacagccactgcttttcacccaggaaagcagtttttcacagaatggctttgatttatacttaataaaaatggatcttaactgtagagccaccagctttcttgaaggcaatgaatacacttcagcatttatgctaagttctgttgaatttccttctgtggtcgcatatggattgtttccaaccattggcacaagacaatcggtatagaagtaaccaatcttagacatattcagtgtagaaataatcagatccattgcaagctggccaacatttccaacagatactgctggcattaggagggtgaagccggcaaggtcgggggccgactccccgcagggaacgaacatggtcgcagtggggtggccagcagggactaaccgcggccctggcaagaacgagggcagcaagaaggcggaagcccgagaccccggagcctcgcggggcgcgggagggtctttttt

SEQ ID NO: 320337 - DNA, 832 bp, Homo Sapiens
  misc_feature (27)..(27): n is a, c, g, or t
gcggacaattccatcccaatccagggntgcaggcacggaggtgggcccagggccagtgatgccctccatctcgatgggtgtccctatcctccagagggtggtgccaggatcccaggagtgtttacaaccctgccaacgtagatacttataattcatgtgcccaccaaccagagacttggttgttgacgcataggggctggacatccacgtctgctctggtcacctgttgatgaagctggacttcccaacatttgggtacccacacaaaagcagggtcctggtattcggatcaatggttggcaaacgggataaatgctgacgcacttgctccaaatactccaaactctgcttctgcctcttgatcactgtgcacatccgtcccagggccgcacgcttcagctgtttgcagcggtagagagagtcgccatacttcatcagtcgcacataatctttagcaacattgtccactaaatttttggcaatatttatttgccccagagccaacttgtaatgatccttgtcgtagagaatattcatcaaatcagcatagaacggatgaatatcatccaatttggggaaatctgttagaatttgtgaaagtctatcatggtaattctgttgagtaaatttgacttttctcatgtaaaaatgtctaatgcgatgtatttggtaatgtttatgaataacggttggagtctttcgttgagtcttcgacaacgtgaggtctatgaagtccttggcggacggcaccaccgtaattttcttgaagttgtaatgtgccatgccggcagccgtatgcacgcgggtacttggcactcccggaacttccccc

SEQ ID NO: 320338 - DNA, 1425 bp, Homo Sapiens
tggaaaatctcttcctttcacaatttaaaccttggctgggatctccaacatatcttatcaattaatccatgtatccaatccaaaaggtgcagtggcttcttcattctggttccagaatggatcccgtgatttgaacaactgatcataaacttctagtagtctaggtaatggtactccaatttcattcattgtctgtattacgaagcccacatcccagttcaaagtacaaacctgctgttctaaaaactgtacaataaaatctaaaggaaagaagcgtggtgtgccagcataaattttgccaaggagaacaatcttgagactaagagcatgcattctatccgaggagctcaatgtcacactgtcactcaattctttctctatgatatcttgccaaagtgtctgcaccaatatagggtctgaataaccggcacaatgaattattgcaagtttgcactctgcaagtttaaatgggtcagcaaattccccataaagcttagttatgtccatcagctcagaatccagctgagaaactgcatcctgtacagaagaatgatgggaatactgcctttgtagtgtctcctgtatctgaagttggatcctagcaacctccattttttcttctaattcatgaagaaattcaccatcggcagctattgatgaaatggcagtggaacttttggcactaagaatggctcgagcaatgtactctagtcgctgctgaagtgaaatttctgtgctatgcatgtcagccagtctggacagtacacgagcagcattactgaaacttctgttcttctcgtaataccgccagagtaaatccatataacgaactctgttttgatcaactttggccattcggactagatgtggctccagaaatggagaagcaacctgtagcagcttatctgcaaggtcgacttgtattagccaattataaagggcaatactaaagagctcatccttggatcgctgtgacaatttaagcatttgttcaaaatgatgtcctgcttcttcattactcagcatatttggatcagatgaccacactggaggaccaggttttttgggtacactgggagactgaggagcggccttactttgatttaccagttcttgaagtgtgtctgtaatgcatttgtaactgtttaatctttcttggaaggcctgaagtccaactatgtcttcttctggttctccatgctttatagaaatgaagcccaagaccttgaggatcttttttctctgcagccgtaagagaaagttccaccacaccctcataaaatctcacttgtctatactgagcacaacattggaaaggtccacttgattgctaattttgtgatattcctttaatgattcccttaacattctttctttcgcacgcgtggttcgacgatatcccgtgaattccggaccgtacaagcc

SEQ ID NO: 320339 - DNA, 673 bp, Homo Sapiens
tttaattttcataaggtattacaacctttatttaagtagtaaagtacctgaggagcatagatgtcaaatgagtcacctgtgggttacagaagtggtaaactatggagctgagattttgttttccttccaacagagatattatgggaaattggttttacaggtgatgaaaaagtacacacaccaaacagggtggtaaggcacctctgggattatcaatagcagaaaagccaccaccacttcttgggctggagggatgagggttatggagcccaggtgcgaaggccagtatgtagaagctgcccagtgggacctgaagttcagagtgttctttcaggagttgatcatattctttcgaaagtctctctgactgcatcttcatttccatcacatcattttgtgccttagaaagggcatctgaagtcttccttaattcagttttcagtttctcctggtcttctactagttttttattttctgcttccaaaacacattcttcatcattaccatggcttttcaaaatcctttttagtttttcgatttcatccataaattttttggcagccctgttagtattttctgcttgagtgttaaggacaccattgtttggacgttccttgtgccagtgagttaatagcggaaacagacgtctccaaaacggccacaaaaaaagggg

SEQ ID NO: 320340 - DNA, 831 bp, Homo Sapiens
  misc_feature (207)..(207): n is a, c, g, or t
aaatagggcccggcgctgagtgagcgtggttgcgtgtcctttgcagacactttctggggcgaggtgacatggcgagagtcttggatcggtggacgtagacggtagacagttcgcgtgcgtttccttcgcctacttggcctacatgccttctgcccgtgaagcgatgtttcccctcgaaaggccgtaggctacagccgtccagaatcnggtttttcagtgagttttgacccctccgacgctccgtcgcctgacagaatcgcggcgttcttcgtacccgcccatcctccgcggacgcccgctgccatggcgactctgctgcgccctgtcctccgtcggctctgcgggctcccgggcctacagcggcctgcggcagaaatgcccctccgggctaggagcgacggcgccggcccgctatactcgcaccacctctttttctccccgctgcagaaagcgctgttggccgccggctccgcggcgatggcgctctataacccctaccgccacgacatggtcgcagttctaggggagaccacaggacaccgcaccctgaaggtcctcagggaccagatgaggagggatccagagggtgcccagatcctgcaggagcgtctccggatttcgacatccaccctcgacctgggcaagctccagagcctgccggaaggctccctcggtcgcgagtatctccgtttcctggatgtgaacagggtctccccagacacccgagcacccacccgcttcgtggatgatgaggagctagcgtatgtgattcagcggtaccgggaggtgcacgacatgcttcacaccctgctggggatgcccaccaacatc

SEQ ID NO: 320341 - DNA, 921 bp, Homo Sapiens
aggggagcctttattcacacactcgcctccccctccacttctctcttctcaggcttttggaattgggtgtagccctcactcctgtgaggaacacccagcctggcccccagcaaacctggctggctgggaggagttgcaacaggagcactgcgaacatcccagcatgagcccagacgactgatactgttcatgcatggttctccttgggtagctgctggtccccctgggaatgccactgtactgcttgtctctgcggggttcgtcctcaaggccactcagcagtggttatgacaaattatgataaatgttgtccaagggtcagtgttcaaagaagaggaacaaaggtagtcaagggagccctctgcctccaagggaagcaggggatgggggaggtaggccaggccccgctggctcaggagctcagccaagccctggacgtgcatgggtggtgctgtaatgcccagctcctcccgcagagccctcagggactgctcccagcgccgctcatagtacaggttgaggacacatggggctctgcgcccgttctgaacggcccatgggatcaactccgagaccagcacttgcaggctcgttcacatccaggaaacggagatactcgcgaccgagggagccttccggcaggctctggagcttgcccaggtcgagggtggatgtcgaaatccggggacgctcccgtggcggtaggggttatagagcgccatcgccgcggagccggcggccaacagcgctttctgcagcggggaggtggggaggtggtgcgagtatagcgggccggcgccgtcgctcctagcccggaggggcatttctgccgcaggccgctgtaggcccgggagcccgcagagccgacggaggacagggcgcagcagagtcgccatggcagcgggcgtccgcggagagccc

SEQ ID NO: 320342 - DNA, 904 bp, Homo Sapiens
tttggcttgccagggttcctagggggccctttgggggctggggccaggacaatcatttttcagaggggtccgaaggttccagaggttggtgcagctcaagcaggtccacgggccctcccaccaggctctgggttctccccgcatcatggggtggctgcttttccccccaccagggccttcagctccagcagctggtgggtgagctgagcacagcgtacagcaaacacgttctccgccacgcagagcactagggcgatgccccagaggcacaggctggagctataaatgcgtgtggggtcgaagggacagtcaggtgcgagggccagtagttcagagctcccaaaagtgcaggcagccagcagtgccttgccctgggtggcaaaggtcatggcgatggaggccaagaggccgagggcacaggtcagagaaaggagagcacaggccacgctcgagctaaacactgtccagcgcaggggggtgctagggaggtagcgtgacaacacgatggctgcgatgcctgaagtgatgaccacgatggcggaagtgacagagaggatgttgaccacgcagtactgcagagccaccgcatcttgaggggtgcccacgtagcgcagcactgtgccatggaacagggcagctgtgatgaagctcacatggcccagcaccaccagcaccaggcctgtcttcatcagcaccttccggaagtcgcccacactcaggcctccgaggcgcagacacatgtcggctccgcgctggtcccgcccccggcttcagcgcggctcccgaggctgcgggccgccgggggaccctgctcccatcccgctggcccgtcgcccgcgcgccccgcaccgtcgcgctcgcccacttcccgcccggagcccggggctgggcggcgccggaccgg

SEQ ID NO: 320343 - DNA, 586 bp, Homo Sapiens
gatcaaacttccggtaggcgtcacgcatgctggtagtctgggggtcaacgccctcaaaggtcttggggtcattctcatcgaagtttgccacaaacaccaggaacttgcggaagcgccgtttctcaaacatgcccatcagattggaagccaaggcctcagtctcagtggacggcactttgtagatcttgccccccttgtagacaaagctgccctccaccaccttgaagtccaggtagcgagtcacctctgtatacagtagcatctttaccagctgcccgttagccatgaggaatttgggaatcaggtcaacgttccagtctcggcctcggcccatcgactcagggggcccctccagcaactgaaaacgcttatacagctcctccaggggtgtgatggaggagctctcgcccccgtagtaggggttccggtccatgtgcagcaccttcttcccgttcacagacatgatgcccgacaggatgcattcggtgagaccggtccccagcacgatcacatcgtattcctcgtccatggtcaggcctcggtgccagcgcccgctcggctcctcctcctccttcaccgcagcagt

SEQ ID NO: 320344 - DNA, 437 bp, Homo Sapiens
ggtgcgtgcatatgaaaccacatcatgattcccgacgtgagttagatgagggagagtttgtgtaactccacacccaggagggtaagccactttattatcatgctttggggctgtgcttaagaatttaagctctgttttaaagccgaagaagaaaacatttgaatttaccttcatatgccactaagaacaaaagctctgaagttcttcctgctggcaccaaatattaggattacaagctgtctctctgacaccagtggtaaaaaagcaagtagaatagtttctgagtctgtgttgcagcctctgacacgtggctcaccgctgtcatttgggggatggaatgaacagtcactgttctatagcatcctcctgtgctcttacctaaggaatctaaattgtcctagccttccattgctatgcactgaatgaggactactctc

SEQ ID NO: 320345 - DNA, 918 bp, Homo Sapiens
  misc_feature (52)..(52): n is a, c, g, or t
  misc_feature (56)..(56): n is a, c, g, or t
  misc_feature (83)..(83): n is a, c, g, or t
  misc_feature (180)..(180): n is a, c, g, or t
tttctgggagttccctccaatcatttccctgctggacctcaaaaagaccacngtcngggtctcttcttcttcttcttcatccntggtccatttgctcatagaagtcaaacaggtctatggggatgtcagatttacccctgtggatctgtcactcgggaagtggagggcccaccactgctntcagcagtcttagaaatggcagatttgcttgtgaaagtctctgtgatgagctcagtggcctccccttcagagtttcttaagcggcattctcggatcacggggtcctggagaagatgctggattacatcagggtggcaactttcaacgaagtatctgttgtgcttcaagaccagcttgacttttccatagctgacagtacacaacttaataaactgcataattccatcagggactccagtcttgctgagcttcctgaggtactcggtgatgtcactggtttgcagcccaacgctgacagctgcatacaaggagtaggcagttagtttgtactcatgcacatgggttggtcggcacactggctctgcaatagccaccaagaagtcttgggcatatttgtaaactggagagaaggcttccaagaagatatggccatcgggagccacccagaggggcctggaggtgtggtcgtccttcagcggcatttgcagcctgtagtccttggctccatattcatccactttggtgcctgactcatccacctgcttccccgccgccgagggaaccgcttcctgagggtcgttccccggggcgtcctcttcatcatcctcttcatcctcatagtgccgcttcctggatttcttcttgtcgcggtccgctcggtctcttttgcccatggcagctacagcagcagagagaagatgaccccgctcccacaggcccgccgcggcatccgctctg

SEQ ID NO: 320346 - DNA, 1174 bp, Homo Sapiens
  misc_feature (99)..(99): n is a, c, g, or t
  misc_feature (108)..(108): n is a, c, g, or t
  misc_feature (112)..(112): n is a, c, g, or t
  misc_feature (114)..(114): n is a, c, g, or t
  misc_feature (332)..(346): n is a, c, g, or t
  misc_feature (759)..(804): n is a, c, g, or t
gcccttatagggggccccgcggccccccaaacggaaaggttcttagaaaagctttctcggaggggccgaggggggccggaccaagtttttatggtgtanatgggggtntatnanaaggtttaaatttattactgtttggcatccagtgacagctgacataccctcgcccgggcccccggcgagtctgacctgtccaataaaatacagtaggaggagtggacggtgacgcacatgcatccacacttaactacagtgactccaaactgcggcgcaacagtactgccagcaacggaaaagaaaaacaggtatcgtgtgttccccaattcggaatnnnnnnnnnnnnnnnttaagacagttaatgctgttacagatgctactgatgccaggacaggggccagtcacaaaccagtcctacagcttctctgctgtataaatatggaagattcttttgtttatacagttttactccaagtctgaaactacatctgctgctacccgttactgctaaggcctatgccatctcagctctggaacgaggggctcggggtcgagactggaatgtcggggctcagtcttcttcgctgccacttcctgagcggtcctcctcttgttcctcctcactgtcatcgtcactcacgaccggcttggctcgggaccctcggctcggccgccgccggccgcccttcagccggtcctgtgccttctccttccggccaagcttgatcttcactttgacggaccgagattcggattcggagnnnnnnnnnnnnnnnnnnnnnnnnnnnnnnnnnnnnnnnnnnnnnntgtcatcctccttctcgattttctgccgcacgctggtgaagaccgactgcaagacgatggagtcttcatagatcagggagccctccaggttgaaggtctgtgcgttctggcacaggagcatgacgtccttctctaggtcgttgaggctgcggtacttgtggttgcgaatgcgctcctttatcttcttgaagtccacgggcttgcggatgagctcgtagtactcgggcagctcctttcgcgagggcagctggatgaagacctcgctgagctgacgtccactgctgctgtccttgtacttgatcacggcatccacaatcttcttcatcttcttggtgaggttgggtgcctcgtgccgaattcgccacccagc

SEQ ID NO: 320347 - DNA, 787 bp, Homo Sapiens
cacaaacatcgaggttattaattgcagcatcacagaaatagaaacaacaacttccagcacccctggggcctcagacatagatctcatccccacggaaggggtgaaggcctcgtccacctccgatccaccagctctgcctgactctactgaagcaaaaccacacatcactgaggtcacagcctctgccgagaccctgtccacagccggcaccacagagtcagttgcacctcatgccacggttgggaccccactccccactaacagcgccacagaaagagaagtgacagcacccggggccacgaccctcagtggagctctggtcacagttagcaggaatcccctggaagaaacctcagccctctctgttgagacaccaagttacgtcaaagtctcaggagcagctccggtctccatagaggctgggtcagcagtgggcaaaacaacttcctttgctgggagctctgcttcctcctacagcccctcggaagccgccctcaagaacttcaccccttcagagacactgaccatggacatcgcaaccaaggggcccttccccaccagcagggaccctcttccttctgtccctccgactacaaccaacagcagccgagggacgaacagcaccttagccaagatcacaacctcagcgaagaccacgatgaagcccccaacagccacgcccaccactgctcggacgaggccgaccacagacgtgagtgcaggtgaaaatggaggtttcctcctcctgcggctgagtgtggcttgcccggaagacctcactgacccc

SEQ ID NO: 320348 - DNA, 694 bp, Homo Sapiens
  misc_feature (175)..(193): n is a, c, g, or t
ctaggtgcaacaatcaagctctatttttgtaattaaaaatgtatccaaagggaaaaaagaaacaaaaggaacaatatttgtactctatgttgctgcagagagcagaactgcggagggggtgctagtcccaaggggtggactgtgctgtgctagtgccctaaatcctgcaagcgcnnnnnnnnnnnnnnnnnnnagaccgctgtcgggggtcgtgagttccgggcccttgtgtgcatgttcacgtcctgtcattcttgcccccagctgagagagcagtagaggaaaggcactacatccaccagcctttgcattctcctcggagcacacagaaagacattttccagttatcttgcacacaagtgggcggcgggacccgttttggccgggaacgttgtcaggaacgctgtacaccacttccaggcggtcacgtccgagctgcccaggcagtccttctgcgccctctgctggccagatggaggctgcagaccctgcggggccatcaggagagaaccaccaagcaccctctgcacaccgcattgccacaacctcatgggtggtcggtcaatgtcgtaggcccgctttacagccgaggagacagaggcttccagaggcaaacacactggcccatgagtagcagaacgagggtaggcccaggaagccatgctcgtgccgactcgtgccgaaaactggggtt

SEQ ID NO: 320349 - DNA, 1500 bp, Homo Sapiens
  misc_feature (58)..(58): n is a, c, g, or t
  misc_feature (366)..(366): n is a, c, g, or t
  misc_feature (369)..(369): n is a, c, g, or t
  misc_feature (807)..(858): n is a, c, g, or t
ccgttgagaaaagttttatatggaaacacatactgatcatgaacacaataaacagggngggaagctcgggctcagccaggaaacctgccacaaggaagatgtttggaactatccaggagtagtgtcaaacactaacaccatatttacaagtctaatttggaacctggccctttttaagtgcaggaggaagttggaggagaagccatgcatgaagtaaaaaatacatatacacagacataaacacccacattttcacacttcttttgcccatttgttccacaaggaacaaatgagagaaagaagcccagcctctctccctggagtccgtatacttactacagatttgttagagaagccccagatggnttngggattcaaggagcagacttcactcttacctggccccactcacgtgacaattcaccaagggaatgcttgggacacaagcatgaatgtccggaagaggcaagaaaatatatggctcacttaacttacacattacacataagaggcctcagtttctccaagtactttcacatttgatctttagcagacttctaacctgcagagacagagctcagccaagctgtgagacacagaggaaagcagcattttgatccagtgtgcactgggtcagtcacttcatccgagacagtcacacatgccagccccaggtaagtccctgggggcttgcagctgttttctttgtggagtggaaatttgggttttttccttcagtggatttctccctgctgctgtcactgagctccacgctgctcgctctggacccgagacagctgctcggcnnnnnnnnnnnnnnnnnnnnnnnnnnnnnnnnnnnnnnnnnnnnnnnnnnnnaatttactgttctgctgctgctggcttgtccccggctgctggctcgtcctcggccactggcttctcaacctgtgactctggaggaatcagatactggacctcctctgtgctgacggctactttatctggctggagccacctcttgaaatgttccaaggtgctctcatcagaatcaagtccatccacaaagaactctgaagctaacttctcctggaggaaccgatcccagcattccttcttggcttgggccagagttcgaagcatgtccttggaagtcacttcctgatttaaacctttgattcttcttagcttcttctctagagatgctaaatacacttctgaatcctgcaagggagcccaaggctttacagctgggctggacagcaaaagtcagccacctccccttctggccttcacctttcagggcaaagaatccacaaaggagtctgagaatgcattgttggcaccatcttcttgttcaggatttggcagacaggaacaaatttcagcccagagatcctggccagatcttgtggctgtagagtcagcgctctcaaacattttcatttggaatctgagcgtaacagctgcccagtaaacgcttggctcagctctgtcgcctgtagcccggaggaaatcccc

SEQ ID NO: 320350 - DNA, 1333 bp, Homo Sapiens
aagtgggcctaaaatcaacagctctattccatttacatcacatcacaaaatgccatgatggaatcggaaggcgctccaccacttccaacaccctggcagaagcagctgctctctacagcaagagcattttccagaacggcatgagaaggagagacgcacgtcccagggacaggagagcgcgctgagacctcccagcacgagatgggaggggagcccccgccccgtcctggaccgccaggaaccgaaaacccacatgcacccaagaacaggtgtggacggggcggcacagaagtccacgggagggggcgacacgggtgctctttcacgggaatcttgttgggacagcattccttggggagcgccgggtcggcgtgtccaaagagcgggggcaaaacggcatcgaggcagaggctctatggctcctcccccatctgcagcagggagttgatggcggcatccttgttccctcgctgggcttccagcacggagcggatcacctcctggtccatgttggggaacatgtcctggatggctttcaggtcctcctcgctacagcggggctgggcgttcacggcggccgggggcagggccacgggcaccatgccggggctacagacagcgggcatccctgtgatgggcacatagccaacgccctgctggtacactgttggcatcaggaccacgggctggggtggcatcaccatggcagctggaagcagcgcgtaggacatgacgaggttgatcatgccctccttgtcgtccccctgcctcccgctcaggctgtaccacttgtcctccaccttgccctgcctcagggactctgggatggtgatgtgggtccaggcaatgcggtcgtccatggagaaggctctctcatcgaagatctcgagatagaaagagtccacgcctgggggcaccgtgcagtggatgaccttattccagcggggattcttggcgccattgtgtgccgtgggcgtctcgtacaccgcgtagcccaggcgcagtcggcagtaggggtccatgcgggtcatgccgtaattcttggccaactttgcctgtaccaccgtgatgttcagtcggcccacggtgcccactgcgcctccgtactgcagctgctgggccgcctgggcgtccagctggacctgccgctgctgctgtgtgggcgtgatgcggaggaagtcctgcgggagctcaccgatgtacaccggcccgcgctgagtgctgacggtggtcgccatggtgctgcggcggcccccgtggctcgccgacccgacagtgacgcgccgggcgacctcctgcgcccccgccggagcctgcgacggagacagttgtc

SEQ ID NO: 320351 - DNA, 803 bp, Homo Sapiens
  misc_feature (241)..(241): n is a, c, g, or t
tttaagaaatacagcaagcttgaggccattccaattctttccgcttatccaacggccgcactgaggatgttgagccccagagttttccaatttttgccaaattcccaaggaacaaaaggaaattcccaccccttcccgttgacaagcttgaagaggaaattaacccgagaattgcagacgacaataagctcttcagggaggaattcaacgctctccctgcatgtcctatccaggtccaccntgtgaggctgcttccaaggaggaaaacaaggaaaaaaatcgatatgtaaacatcttgccttatgaccactctagagtccacctgacaccggttgaaggggttccagattccgattacatcaatgcttcattcatcaacggttaccaagaaaagaacaaattcattgctgcacaaggaccaaaagaagaaacggtgaatgatttctggcggatgatctgggaacaaaacacagccaccatcgtcatggttaccaacctgaaggagagaaaggagtgcaagtgcgcccagtactggccagaccaaggctgctggacctatgggaatattcgggtgtctgtagaggatgtgactgtcctggtggactacacagtacggaagttctgcatccagcaggtgggcgacatgaccaacagaaagccacagcgcctcatcactcagttccactttaccagctggccagactttggggtgccttttaccccgatcggcatgctcaagttcctcaagaaggtgaaggcctgtaaccctcagtatgcaggggccatcgtggtccactgcagtg

SEQ ID NO: 320352 - DNA, 888 bp, Homo Sapiens
gggatacttgtgcggttccaagtgtggagaaagcggctctgggtctagattgagggatactccccctttccaccatgggcaagaagggcaaagttggcaagagccgacgagacaagttttatcacttggcgaaggagacgggttaccgttcccgatctgctttcaagctgatccagctcaatcgccgctttcagttcctgcagaaagcccgagccttgctggacctgtgtgctgcgccagggggatggctgcaggtagctgccaagtttatgcctgtatccagccttattgtgggagtggacctggttccaatcaagcctctccccaatgtggtgactctccaggaggacatcacaacagaacgttgtaggcaggccctgaggaaggagctgaagacctggaaggttgatgttgtgctcaatgatggggcccccaacgttggggctagctgggtccatgatgcttactcacaagcccatttgacactgatggctctacgtttggcttgtgactttttggcccgtggtggcagcttcatcacaaaggttttccgttctcgtgactatcagcctctgctatggatctttcagcagctgttccgccgtgtccaggccaccaagcccccagccctctcgccatgaatctgcagagatcttttgtagtctgccaaggaattcctggcccctgacaaggttgacagtaaattctttgaccccaaatttgcctttaaaggaggttgaagttcaggctaagaccgttactgaattggttactaagaagaagccaaaggctgaagggctatggctgaggggtgaccctcacctctctatcaacgtacccctcagtcactggacttccctcccgagctgcccaaaccctgttggactt

SEQ ID NO: 320353 - DNA, 605 bp, Homo Sapiens
tacggtaggaggctgggtggccgaattcggcacgaggggaagaggaagcactgcctttacttcagtgggaatctcggcctcagcctgcaagccaagtgttcacagtgagaaaagcaagagaataagctaatactcctgtcctgaaaaaggcagcggctccttggtaaagctactccttgatcgatcctttgcaccggattgttcaaagtggaccccaggggagaagtcggagcaaagaacttaccaccaagcagtccaagaggcccagaagcaaacctggaggtgagacccaaagaaagctggaaccatgctgactttgtacactgtgaggacacagagtctgttcctggaaagcccagtgtcaacgcagatgaggaagtcggaggtccccaaatctgccgtgtatgtggggacaaggccactggctatcacttcaatgtcatgacatgtgaaggatgcaagggctttttcaggagggccatgaaacgcaacgcccggctgaggtgccccttccggaagggcgcctgcgagatcacccggaagacccggcgacagtgccaggcctgccgcctgcgcaagtgcctggagagcggcatgaagaagga

SEQ ID NO: 320354 - DNA, 491 bp, Homo Sapiens
gcctgggggacagtgctcgcatgtagcagggccctggcaggggccccacagcaaactcggtgacattgggatgctcctggtcaccaaagaagatgacggcacgggcttcccgcacaggatgcctttcacctttatccagaaacctcagcacatggtacttcttgggcagcagcatctcgatgagaaacacggtgttcttggccatggtggtggtactggagggctgcagcctcagctccttcttggaccagaggaagctgtgcactgccttcagctcttggttgcttaggtctgaaaacacccctgccttcctgggcagagtccccggggagggctccgccatggccgtctgcagcatcaggatggcagccacggcccagcccagggccggcatctctcgctccacggctctgtgtgctctgctcccagttcgctctgcttccagcctttgcccttaagctgatctctgactccttcttgaagtcaatcag

SEQ ID NO: 320355 - DNA, 1214 bp, Homo Sapiens
tccaggtcctcacctccttccggttcgcctccgctttatcctggcgcccttcaaagtgcccgtagctgccccggttttagtcgcctttttgctcctggcgcttgctttaacagggggccgccaccgtttagtacctgtcgtttctccctcaacccccgtgtatctgctcttcagttctggcacgggtccaccatctctctgcaacttctccgttgaagggtcctggggaatctgacagtcccgcaggatgatggagccggtccatgatggtgccagagggcagccgcacggggtctgtcatgagggtgtccatcagagggttctctgaactcatcaggagcgtcgctgtagtcgaatttctgcgcgtgcgttcttggccactatctcctccactttctcggcgagcagcttaaatttttctattgctattgtggatttgatccctgccttccgcatctttgaaataacttcttcaaacaattccttactgtaggatctctggtcgtcagcaatggctttcgcgagccgagcacagtccagctgtaagtaaatatccgtcagttggtccaacagcttctttggttcaaagccgtatttctcagggttttcaactttcaggtcacggcacttggggccacaaagttgctgaagattaaagttcagcattgcagccaatcggggtccaagctccggtctgaggaagggcttctggacctgcttcgtgaggatgtggaacatgtccacggtttcggtggccagggcgaggtaagagcgggacacacgctcatcctgagcaagctgagactgacgagcctgctgctgatcctctggcgcactttcctccttcaactctgccatgggctggggaggagataataagagctgtttgactcatggatacaatcaggtactgcactgcaggctccggggcaactggtcccactgttctttgttcttcatctcttcctgcacttcatggattcgcttcagagactccagactttcatcgagcaaaaacgtcgtgtcgtttatcaacatgtttatatagcgaacaaactgcttcccggagttgaactcctccataaaggtgccatggtgagctatgttttgccaaaggcttttaaaaatggtgctaatatgatagcgaattgtgaacttgtcataaaactcactggtggctccggtatgctcaacatctgtataaaacttcatca

SEQ ID NO: 320356 - DNA, 860 bp, Homo Sapiens
  misc_feature (560)..(568): n is a, c, g, or t
  misc_feature (837)..(837): n is a, c, g, or t
tgtacatctgcattaaggtgccgatgcagaaggcaaattggaaacacgctccagcggcagtggggctcaaagccgacctccatgcatcattctctagagttgaaaggattgacatttctcagtaactacccggcaaaatatatattttcgataatgttgaatttgccttttaggaaaacaatgtttcatgaaacacttgtaagatacttattttgaaattaattataaggcattcatatttttaggactgaattcaaagggaaatgcttctttgactttttttcattgttcggttgactttcagctttctggagtgacaaagcagcagtgatgggtgctattcctggttctgtggtggtttactttgtctactaagtgatttactttcaaacctcattacagataatcttactaaaagacttaacatgcacactgctaaaaggtgttttactgttttccattaacgctgttgtatgaacaatatttggtgacatgttgtctttttgtcctgtagattgtcatatctgttatgtagttatccttttggcaagtcctttgannnnnnnnncctctagaaaatcctcagactgtcaatcttccatattttgaatattataatgctgtggccatttctatagaaagattacttgcaagtgtgtgtcttgaaaataacctcttgtatttgtgtgtttatgtgagttctgtctaagagatcaggataagctctgggaagcttcatcatctgtaccctacatgtaactgtatctgggggttacagggggcagggcgggtacccaagtcccggctcttcggaggggggtgggcctgaggaggatnaaagggttccccggaacttctcc

SEQ ID NO: 320357 - DNA, 268 bp, Homo Sapiens
gggtggatgctgaattacattttgatttgatacttataaaaagaaaaagtatttcttcagcttaaaaaattgtttaaaagtttgtgatcatattgtctaccatgtagccagctttcaattatatgtaagagggactttttgacatttacaaataatactttgaggtagatatctgaaagcaccagcacttggaaggtgttcagaagtaacaaattataaaatgagctaacaaacgaaaggcaaaataaaaccgtaaagcaagcaaaaa

SEQ ID NO: 320358 - DNA, 588 bp, Homo Sapiens
ccgcgcgcccgccaggcgctgcggccgtcccgggccgtgactcctcctttcccccgccccgcctccgttcggagagccggcgggcgggcgcctctcggccaggaagcgcctcttggacgcgtgtgaccgatgcccagattgcacgaccacttctggagctgctcctgtgcgcacagcgcgaggcgccgaggccccccgcgagccagcgccgcggggctggcggccaaggttggggagatgatcaacgtttccgtgtccgggccctccctgctggcggcccacggtgccccggacgctgaccccgcgcccaggggccgcagtgctgcgatgagcggccccgagcccggcagcccctaccccaacacctggcatcatcgcctgttgcagaggagcctcgtgctcttctcggttggggtggtcctagccctggtgctcaacctgctgcagatccagaggaatgtcactctcttccctgctgcgggacagcagctgctgttgttggcctactgtacccctgtatcgacagtcacctcggagaaccccacaaatttaagagagaatgggccagtgtcatgcgctgcatagcag

SEQ ID NO: 320359 - DNA, 962 bp, Homo Sapiens
  misc_feature (103)..(125): n is a, c, g, or t
aactatttttacattcactcttgcaacaggttacaagatgggggtcactaagctcagataaatcactatgatgcacataaaatacaggaagactggttacttnnnnnnnnnnnnnnnnnnnnnnnttcacacgttagcatctgagacataaactgagaatttaaaatttattctcttcagataacaaatcattttttattcttcataaacaaggtgcccacaaaagcacacaggtaaggcacaatagggctttctgttacagaatagtgtgcatcatgtttacttaaccagaaaacgtgcattatctgtgcaagttcatgctgcaaacccaacgcatacaataaaacaaaaaggaaactgagctttaaatacaaccaaaatttgtacaattccagctgtttcacatattcatttggactgacaattatatatcaacaggttatttttaaaaagccaattgtagattacaagtaaaatttactcagcaactatttttatctgaaatcataaacagtaataaagtaagtttactgaaacaaattaaatactgaggcacaaagcaacagtcaatcgtgcatttactatattgcaaactttcatgacccaaaattgcaagtataatttgtcaaatacacattttgctgcaacaatgtgccctgctttaaacttgacatataacagaggcactaacatatcattaaattataaatagattgggaaaatgacttaaccccaatggtactatgtcatggccctagtatttataataaatacagcttttcacaaaatatttttccaatatctgccaatttcttctttattgctcacataaatttgactctattacaactggtatcagaactttcacacaaaatcatactcagacatttttatataaaacctataaaagatattttaaacttgtatctaatacttccaggtgtttggctgtttgatctatg

SEQ ID NO: 320360 - DNA, 436 bp, Homo Sapiens
agtcatttttaatgcatttttctctgtgcacaagagaaataactgatgaagtcaaaagacacactttcctttatacatagcagttaaaagtaatgcaaacatcacatgacactttcagtgaaagttacatttccaattacaaatcaaaatgcatattagggtctctttatgggagaagctgagaaggaagtcttaggtaaaaagcactttcctggcattactacactgatccttcagggctggcacaaaggattaagggtcatatacagtcaatctggcaaatggttggacacaatggttacactgtaaattttctgtacaattaaatgtatacttagagataccaggataaacatttctactatattttaactgaacttgcctagccaacattttcactgagaagtttatcaaagatgctgtaagattctacaaa

SEQ ID NO: 320361 - DNA, 987 bp, Homo Sapiens
  misc_feature (625)..(625): n is a, c, g, or t
  misc_feature (744)..(744): n is a, c, g, or t
tccccagctgctgttctctggagggagatgctgcccccacccccttaggcccgagggatcaggagctatgggaccagaggccctgtcatctttactgctgctgctcttggtggcaagtggagatgctgacatgaagggacattttgatcctgccaagtgccgctatgccctgggcatgcaggaccggaccatcccagacagtgacatctctgcttccagctcctggtcagattccactgccgcccgccacagcaggttggagagcagtgacggggatggggcctggtgccccgcagggtcggtgtttcccaaggaggaggagtacttgcaggtggatctacaacgactgcacctggtggctctggtgggcacccagggacggcatgccgggggcctgggcaaggagttctcccggagctaccggctgcgttactcccgggatggtcgccgctggatgggctggaaggaccgctggggtcaggaggtgatctcaggcaatgaggaccctgagggagtggtgctgaaggaccttgggccccccatggttgcccgactggttcgcttctacccccgggctgaccgggtcatgagcgtctgtctgcgggtagagctctatggctgcctnctggagggatggactcctgtcttacaccgcccctgtggggcagacaatgtatttatctgaggccgtgtacctcaacgactccacctatgacggacataccgtgggcggatgccagtatngggggtctgggccagctggcagatgggtgtgggtggggcttggatgacttttaggaagagtcaggagcttgcggggtctggccaggctatgaactatgtggggatggagcaaccacagctttctccagtggctatgttggagattggagtttgagttttgaccgggctgaagggctttcccagggctatgcagggtccactggtaacaacattgcacacgcctggggaagcccgtcctgcctt

SEQ ID NO: 320362 - DNA, 1296 bp, Homo Sapiens
  misc_feature (43)..(65): n is a, c, g, or t
ttttggtttgccactggtgagtttattacacgactaaagttcnnnnnnnnnnnnnnnnnnnnnnntcttggcagggaagctagagccagaatcaggaaaatctgcttccttgtccccagactccctggccaagcccagctccactaactcatcttgactcgatcaagttcctcatcaagacttgcatctgtaccctggacatctctgctgctcccactggagagtgagtctggagtccctggcactggggctttggtgagggctccatatacacccatggcctgagccaccatgctggtgacatcgccagggttggagggcagtaggatagtgttggagtccttggccagtttggagaacgcgctgacatactgctcggccacagtcagtgaagctgctgcatctccattatgttgtgtcagagctgcagccaggattcgaatagcttcagctttagccttggccttcgccagaactgcactggcctctcctgctgcctgatttatctgttcagccttttctgcttcggaggccaggatctgggcctgtttcttcccttctgccacattgatggccgactctcgggtcccctcagactctagaactgtggcccgtttccgccgctctgcctccacctgcatctgcatagactctttcacccggggtggcacatggatatccttgatctcataacggaggcagcggataccccagcagtcagcagcttggttgatggcatccacaatgctggcattcagggactcccgttcccggaagactttgtccagagagagtttgccgagctctgatctcatggttgtttgagctagctgggtgacggcatactcagggtcctccacaccgtagcttgccttgtaagggtccatgatgcgcaggtaaaggactccatcgatttgcagagttacattgtcgagagtcacagccgactgctcaggcacgttgatgacaatttccttgagactctgcacatatcggatccggtctaacacagggatgaggatgttcaaaccaggctccaggatccggtggaatcggcccattcgctccaccacccaggcctcctgctgcggcacgaacagtaccacggtgtttcggggcaatccagaggaggcgcggcgcggagcgcggccagaagccagtagagagcccctcagcaaaagggccccagtgccccgcgccgcgcgcgccagcatttcccaccgccgcagcgacctccggaaccaacgagacgagcggagcggtcgctcccagaagcctacccgagcctttcctccc

SEQ ID NO: 320363 - DNA, 919 bp, Homo Sapiens
cgggaaggggccattcaatggccggaatttaagaggtggaagccgggggaaattcggtaagggttcatatctgtgtccaacccagtagtcctcccgccgggaagtcccgccccccgtccacggctgattgccttacaaagtacaccatgctgggcctgccatttgaaagtagcttttaccattccacatggccatcatttttcccccagtggtcaatcatagcgggacgccaatccagtagccaggcttgaaatctgggagacttacatacaggacggtcccccggcgaggggattgtccctccgcccgcacgtcacagcggatgcccacggggatggagcgggcctgggcattctcctcggccaggcgctgggcggcctcgggcctcctgttgagcacgctcctcctcgttgtaccggccgagcttgctgcgcttcaggaaagagcggaccgtgtcttgcctctggtcgtaggcttcttgtgagatcgtgtacttctccgcccgggacacgtcctcatattcaccaaggcgggcgccactgtggtcaatgtcgtggatgcggcagccgtcatctacagggtaggagcccaggagcgcatcctcttgatccagcttgctgtagaacttgtcgtcaactccatacagctccagttccatgcaggaagcagggctgcccaccagcaactccagtttacacttgaactcagcgatggtgaggctgcggctgtatcgcttctcggagcggaaggtgttgagggagctgctgatgaaaacggtcaccgtgggtgccgacacccccgtcacctccatcttgccgcgccctgcggatgcctgcagcgcggtccagccgcctcacgcccgctccgcagccgccgccgccgctgctgctgctgggctatcagccccgcctcctgctcc

SEQ ID NO: 320364 - DNA, 947 bp, Homo Sapiens
  misc_feature (22)..(22): n is a, c, g, or t
ggggcaggctttactttttttntccgggttttctagtgaatttaatgcatgagtctcaaaaatcaatggcaaaggaaaaaatgaataaaattaaaatggggtcaggagaaaagggccatgggcacacacaggaggggcagtcagtggctgagctaggagctgaagcaggggaattccttaggtgtcatatctcgtccaacccgtagtcctcctccgggaagtcccccaccgtcacgactgctggcttgacaaaggcgccatacttggcctggcattcgaagtagcgtttcccattcacactgccatcatttttccccagtggctcatcatagcggacaccaatccagtagccaggcttgaaatctgtgagacctacatacatgacggtgccccggcgaggggattgtcccgccgcccgcacctcacagcggctgcccacggggatggagctggcctgggccttctcctcggccaggcgctgggcggcctcggcctcctgctgagcccgctcctcctcgttgtaccggccgagcttgctgcgcttcaggaaagagcggaccgtgtcttgcctctggtcgtaggcttcttgtgagatcgtgtacttctccacccgggacacgtcctcatactcaccaaggcgggcgccactgtggtcaatgacgtggatgcggcagccgtcatctacagggtaggagcccaggagcgcatcctcttgatccagcttgctgtagaacttgtcgtcaactccatacagctccagttccatgcaggaagcagggctgcccaccagcaactccagtttacacttgaactcagcgatggtgaggctgcggctgtatcgcttctcggagcggaaggtgttgagggagctgctgatgaaaacggtcaccgtgggtgccgacacccccgtcaccctcgtgccgaattcgccacccaggcctcgctac

SEQ ID NO: 320365 - DNA, 457 bp, Homo Sapiens
  misc_feature (15)..(15): n is a, c, g, or t
  misc_feature (142)..(142): n is a, c, g, or t
  misc_feature (325)..(325): n is a, c, g, or t
  misc_feature (422)..(422): n is a, c, g, or t
ctaggacctccctgntaaaacccggctccctacctacgttgttaccgacccaaacctttctgcgccttcaaggaaaaaaacggaaccgtgtccttgcctctgggttcgttaggccttcttgtgaggatcgtgtacttctccnacccgggaacacgtccctcatactcacccaaagcgggcgcccactgtggtcaatgacgtggatgcggcagccgtcatcctacagggtaggagccccaggagcgcatcctcttgatccagcttgctgtagaacttgtcgtcaactccatacagctccagttccatgcaggaagcagggctgccnaccagcaactccagtttacacttgaactcagcgatggtgaggctgcggctgtatcgcttctcggagcggaaggtgttgagggagctgctgatgaaanacggtcaccgtgggtgccgacacccccgtcacctc

SEQ ID NO: 320366 - DNA, 1376 bp, Homo Sapiens
gcgccgggcggaggggtggggcttcccttccgcgccaaaggcctcaccgggcacgcgccccggccatgggcccgagccccggggttcgttcccccccacccagggcctccccagggaggtttggggtgttcctttttccgcaaacctcccaagggcaaataagccaggggtccccttgcctttctcccaaagctgggcccaatgaaggagggcccgcgccccccacccttcaggccccggccttctcccttttgaaaccaggtggtttttttcctacccccggaaaccagaaaatgagcccgctttttatggttgccaaagtacaagggagaggctctgccctgggagcccctgcatggatggtgggcaagttccgggagcccagctccaaggagcaggaagcagggggccatgccggcaggacaggcccagccatagccccgggaagagagactgccctgtacatccaggtccgggagcctcttccggttgagcagggccgggactcggcatggccccagcacccgagcaggtctggagggccctcagagcggggcaggggcgggcacgctggggaggggcagctccagggccggcgtctccgcagcctgtgccgggctgggcttccggtgatccagctgttccagcttctcgccgagctgggagtaaagctccttcactgcctctccgctctggcctgtaggctccagggccttctgcaacgcctccagcttagatggggccaccctggggtgcaggtgaatgaggagccgcagcgcgtgccggtgcacgttctccttccttggagaggcggtgaggaagaagccatcgaagaggctgctgcagaagtcctcaagggcaaattcgtcggccagcagcgcaaggttgcccgtgagcaggtggaggaagatgtcgccaaaggccaagtcgccaaaggtctccaccagcccgggcagcaggcggaggagcgcgttcttgttcctctgcttggtgatgtgcaggacgtagtacagccccacctcgcaggccatgcgctgctcctgcagaaacttagtgaagctttcgggaagtgtgtttggatatgagactggggctttctcctcagccggaagtttctgatccacattgaaagtgtagtcatccaccaggaaggacatgagcatcgggaggaacctggtgatgagctctacctccatcttgggctccttgaagacctggctgtcgatcatgtcccaggctccctggcccagcgccagcagccggagcagcagcaggaggtcggggctgtccctgggcagtgtctcctggccgaccagctcctgcaggtgcctgactgtgctcagtgccagatcccgggaatccggaccggtccagcc

SEQ ID NO: 320367 - DNA, 465 bp, Homo Sapiens
  misc_feature (266)..(275): n is a, c, g, or t
aaatagaagtagaatttaatcttttcacttctctgtaccagtttaaaaaaatatatatcactgatggtatcaaaaggtccccacatctggattttaactcttatgtaggtataagtagtgcttactactgaaactgcatggaagatatacctgcttctactgtatatttctgattgaagagaacatgcagttcctcttagggaactgtaggtctgataaccttatatatggatagtttcaaacaattattgctgagagatcatttnnnnnnnnnntacaatttaaaatacttgattccagagtaatataaaagtaaccttaagaacctcagcgctaaaggaaaacagcaggcaacttcagaattctcccatccaaattttcaagaatagagagtggattaataccacctttctaaaacaaagcaagtcattttaaaagctaaaggacccatgttaacatattgat

SEQ ID NO: 320368 - DNA, 995 bp, Homo Sapiens
  misc_feature (972)..(972): n is a, c, g, or t
  misc_feature (984)..(984): n is a, c, g, or t
attttatttccagtatcatgctaaaaatctccttgttgtgtgattcttttatttcttgacatgcacacatatatggatcaaaaagtatgtacaactagaaaaacggactccaagcaaaaatggaaaacatgtttccatgagcttagatttccgggtatattactcctaaacctaaggtagaagtaatgcattgttcacttacatgtccacttttctaacccaagctaagggctggaaaaagaaagtcagaacagtcccaagtaaatatgggaaaccatagcagtgataaaacctaagatttctcagaaatagttttaagtgggaagcctctaatcctacctggacagtgctttcctgtgggtttctcagcatgagtccaaacctcacaaagcaccttcaaagtctgggctacccagtatcacaagtatagcagtaagtccaatatctggatacaggggccaaggaaacaatgaaaaaaccaaatcaaggaccagatgctgagactccccttgtgttccacagttggaagaataagcagttggaccctaggtagttttccgcttcttggcagatggccgctcaaatacctctcgtaccccagctgccttttgtttgaagaactttgtgttctgggcactctcttggccccaagctgagtcaaaggaggtggtatcttgatccacaaggtgagtgtatttggtgcgacctgagcgtccaaagttcttgacctgcatgactttaggaagaatggttttattgaaatgatcctccagggtaggagcgctgaaatctctcttgtatacttcttcatcctcatccatgaagaaggcaccccggtgataatacttctgtaagaacttgtatttgcccttaacagctttgttggtaatgactttgccgtttgcccgaagttcagctctcctctcttcctcagtcaggttttgcatgcgttcaatttctgctttctccttnctcaagcgcttnctcgatcttct

SEQ ID NO: 320369 - DNA, 1014 bp, Homo Sapiens
tatgacagctggctataaagcaggctggtacggtcgcgaatctcgggatatcgtcgaccacgcgtcgggcagaaagtgatgggaataaagaaaaagtcagggtaaggaaagatagctcagacagggaaaatcctccccatgactctagacgggattgccatggtaaaagcaagacacatcccctttcccacagttcaatgcaaaggtgattagaaacttccaaggatgacccaacctttgcctttgccccatatattggggaaaacccatacaccaaaaggattttagcatatgttaagaggaattgcagtgaaaaggataacatttttccatagtaaatgtcttgcagtttttgaaaatgtttcaagtctagtttttacaagcacattacagtaattgcaggttgtccagaggttggtttgtcagaggctattgggaacagctgggcccagggtatttgctcagtgaatattttggggcagctttccggttatataacacattgacaagtatatgtattaagagtccttgcattgttaactgatttgcaagagaccatgattatcagacactaaaactacttatcttttgaagctacagcatgtgactccccagagctcctgtctgtaggaagtttctaattccactggtatctataaatccttttcaggggagagaccaggagaccaccatcttagatactgtcaaactcactactgtcttcctttgttctgccacaaggttgagtttcttttcaccacgtgtcttgacttactggggtcaatactcctcatgcttatcagtgtccagtgtctgttcctaaacttgcttgttggggacacactcataactatttcacctgactgacaagcataaaaggctaacttgtggatagtgtttacaaaagtacaaaagtactacttccaaggaaaatgctctgattctctgtttaggcatttgtgaaggattccagagcctttcccaaagtgagaccatttctggggtatttgtacc

SEQ ID NO: 320370 - DNA, 1164 bp, Homo Sapiens
ttccgggggcttacctccgtgggaatgaccttgaaaaaccttgagccattaaggttagcgaccctcctttagttccgattggctcaagttctccttccaatcaagggttcaaattaaacccgcagaaattctcaagtcatgaaaattaggttcttgtcatcttgcccttttctttttcgtcattctcattagctctgtttcatctgctgcacctttctgagctgtggtgcctttctggtcctctcgaatacgtttccggtagagcactctcactggttctcctccattgtatctgcattttagaggaaagtccgtgtacatcggtcacctgtcagtttttcttcttctagacctattctgttcccattgtatttttcagtcattattttgtttggtgaatgatcaaaggcaggagataagtcttccttagaaagttctttccatcgtttctgtatactagaatctccctttatacattttgctccttctattatagccatgtatgagaatctcagttgatctggggtctgaataagacccattcggtattttctcatgttcagtaacacttgttttatgttaatatcatctcctttttccatcaaaacaagacaagtgtctaccagagagaaggtgccagagcgcccaatgcctgcactacagtggatcaccgcaggcccatggtcagggttcaaggagccagattctctcactttaaacaagaaattgagaaatgaagctggtgattcagggactccaaaatctggccaggtagtataatgaaagtgagatattgttctggtttcaccactattgatattttctaattgtagtagatgtactgtataatacgacttcacatcttctgacaagagcttcacactgaatcctgtttctttaaacagcatctcttggtcatctgttggccagtactgtgcacatttaaccgattctttctccacaatgcggttcagcatgacaactgctttggtcttctgctgccaaaccataagccagaaatggcagcatgtgttaggaagtggaccctgtgttaagatgtaactcctttgtgcctcttctatgtcaactaaactggcattaatataatcattctcagcattttgcagtttaacacgactgtgatcatatgggcttacatctctg

SEQ ID NO: 320371 - DNA, 1639 bp, Homo Sapiens
gttgaagaaattgaacatgacctgttgccttttatttaaaaactgttactagccctgcctggggttcctatacaaaaacaaaacacaacctaaaataaggtttcttcctgaccccagagactaggggaggggtagggagggtggggtggggggcaggactggggctcaacaaatggaatgtgtgccgggaagggccacctggaagcccccactccacccccacccgatcctcaggatggcgctgggctgtcccctcgcctctgtccttgccagaagatggaggagaggcggcccaatcttctgagatgctccgtgggagccgtgtgctgatgggctggttaccaggccggggcgttgttggcaagacggctcatccgcctcgtgttcctgtcctggtcgcggatcttcttctccatctcagcgtctgtcagagtctccagcagtgggcagagggttctcgctgaaggcgtcggtcttctgatgccagctcagctgtccccggatgctgtatgcgatggtggtgacaaactccccgcccaaccccagctccgagcacagcttcagggcaaacttctctggtgagttctccttctctgacatgtcccactcaaactggtccaccagggaaatgtttcccacatggatgttcagcttgatgatgacgcgctggtctgactggtcctccaggatgctgtccgtggggtaggactcgatctgctgtctgatggcagaggcgatggctggcacaaacgtcagcgggttcaaatccagatcgtcacagaggatttctgaaaacatctcaggcgtcatcaacttctcattcatgttccaggtgaaggcgtctcgcagcttctgcccatcgatctccatgtccagccggatggggaccagcacctcgggctgagatgcgttctcatggatcacagctgggtcatggtcatcaaagcaaagggggaaggttctcttcttgtctcggcccatgcggttcctgttgatggttgtggagcatggcacggcatctaagtggtgggagctgttgggcagggtgggtacccactggctgttcctcttggccttctgttccctgaggtaggtggggggctctgtgctgatggacacagccttgtacttctcatcgttgccatccagaatctcttccacttccgaggcttttaacagggtcacactggtggctagagtcgtgtatccgtgatcatgtgacgatgcaactattttcttcctctcttccacagtggctagtcgcctccagagtgaggggtatctcttgtacagagaacctcggaacatacggaggtagtttcccacttcggagccgatcatgtagaactcgccgtcgtcctccggctggaacttcacgggcttctgcccgaaggtcttgctcagcgccatcatcatcattgcggcggcagaggcgggcggccggagccgggctgcgagggatcaggagggctggggcggggccggggcgtgctgggccgagggaaaccgaagccggaaggcgaaatgcggaccgggccgggtactggcgcctcagccgggctcctcagccgccgccgccgccgcagacgacgaccaggcccggacgcgtgggtcgacgatatcccgtaattccggaccg

SEQ ID NO: 320372 - DNA, 906 bp, Homo Sapiens
acgactcaaaaatgggaaatgaataacatccatagtgtttagagagaaaaaaataaaccaataacctacctactgacaagtaaatttatacaggactgaaaaccgcctgaaacctgctgcaactattgttattaactctgtatagctccaaacctggaacctcctgatcagtttgaaggacattgataaactgtgattttacaataacattatcatctgcagttactgtttacaagactgcttttaccttaaactttgtagatgtttacatctttttgttgtgttttaagatgatgttggtaatttgtgcctttagctctgttttattagacagagttaaagcatgttgtcttctttgggattacactcaggggtctgaaaggcagtttgatttttatttttaacacacttgaaaaaaggttggagtagccagactttcatatataacttggtgattatcaacctgttgtgtctttatttaattttacatctttttgaagcactgccacaggttattagccaaggtggccttccttcacagtcatgctgcttttttgaaaggtgaatttcaacacatttagtgcctctttcatttctcagtatatatttcaagagcttgtgatgaaatctataggatggtaatgatggacttgtcacctgtatggggaatacttttactactcagaaatgaatttatgtgctgccatttgctataaagttgaactttgtatggcttgaaaaagaaatgacaatatggaacatcccaaggctgtcccatagggttggaagttgtgtagcattcactcccttacctactggcattcccagtgccctctgtccatacctacttctaggattgcaaaggagtcttccaactagagaaaaattgtccactgacatttggga

SEQ ID NO: 320373 - DNA, 1072 bp, Homo Sapiens
  misc_feature (549)..(549): n is a, c, g, or t
  misc_feature (584)..(584): n is a, c, g, or t
agtttcccttggagaggagaaggccccctttagggcccaaagaaaagggtggttcttgggaaagcagggccccaggccaagaggccccaggggaaagttttccacccgggggccagttggaaccatgagcgaagttttgggcccccttggccagtgcagaccagccccaaggtcccggagttccaaggtgcagggggggcctttggtgagtgggtaagctgtgccccctccttttttgagatatcagggcccagcccccgccttccgggaggttaagggggggcacacctgggggttggaggagtctgggaaggaaaactcagctggaaaatgttttaggcctcagagcccacatcttgtgggaggggctgtcaaggggcctgctgtcccggtcctgtcgcagtcctcaaagatgctagagtgacagtcctctaggggtagagatggtcgtcctcccaggaggaaggtggcccggagacttggaggtgggatcaatcctgccagtcctggatcaggaggcctctgtcggggcgccgcccccctttcttncctccatcagcaacaggcggcgccggccagccctncatagtcagcctcatccacactgaccagcaggcgaacagcctcccggcccacagcctctcgcagggcctcagtcaggaacacgccccgcagggcctgcagcagggcgccactcaggtagtcgccccagaaggcgtccagataggagagctctgagaacttgatgtcacaaaccacagagcccaggtcccttgagcgcagcactgcggtggcctgcccaaacacgtccagctgccgcgccagcgcctggggccgccgggatgccacgccctgctccaaggctggcccatgctcgcagtactctgctcgaacccggagccggatgtcacaggtcactttgccttcagaggaaggtctggcgggctctgactgctgctggggtgcggctggggcccctctccgccgccgtctggcaccaccactgggccggccccgactccgccgctgccgcttggttcctcgtgccgaattcgccacccaggcctcgcta

SEQ ID NO: 320374 - DNA, 996 bp, Homo Sapiens
  misc_feature (330)..(379): n is a, c, g, or t
gttcggcggtctctgtgtccttttttgcccttgagttttgactcctttttacgctgttgtttctctacgtcggctctccccctgtttggctagtaaacccgggctacggcctgagttccccaagctccaatggggttggctgtgtcccaccccagccggtctggcccgccttcggggctcccaaaagtcagctgcgcccacgcctgggccccggatccacgccgctcaagcttgccaggctccaggtcctcctcggaaccggacccgatgtcacaggtccttcccctcagagaaggtctggcggctctgaactctctgggtccgctgggnnnnnnnnnnnnnnnnnnnnnnnnnnnnnnnnnnnnnnnnnnnnnnnnnntccgcttgttgggggggacctgtctcccactgacccctgctgagaatttgcagaactgcttgactgccggacggcgacggcagctaccctctgtcctctttgaagagctggaggtgccatagctatagcgttctggagacactgccggcccgcttgcgcgccaggtcggcagcagtcgtggcggccagcacgcgcaggagttgccccagcagccgcaggttgctctcgtcgcactgcccgcggcgctccagctccagcaggagctctaggccgctgcgggcccgggctaagcctccggcggcgccaggagcctcatccagcagaaaggccaggagctccagctcgcactcggtcagttgcccgcccaccacctcgaacatacggtgaagcgacagcatcccgtagtagtccaggcactcatcctcctcccagcaccgggccggggtcgacccggatagcgccattcccgggggagggaggcggaacaagctcagaacccggccagattctggcgtccgatgactcctgggcgacggccgcagccacttgttttggatctttctggcaccttctctcgacgcgtgggtcgacgatatcccggcattccggaccgtacc

SEQ ID NO: 320375 - DNA, 321 bp, Homo Sapiens
tctttttttagctgtcaactcattttcatctgttttttgaagaaaaatggaaaaatgtaaaaggcagcccctccccaggctttgtgagcctggcccaagccagtaacaagagggcctggggcacgatgtggtcagccaggaagcataggatgccatttcttttatagattccttggtatttctggtggggtaaggggcaggccagggctgttcacgcccatgagggaagaggaaagtgccactgggcaaggtgtcccaccctcccctcctgaccctcctacgaggcttatcctggcaatggggtagtcactgccacccttc

SEQ ID NO: 320376 - DNA, 547 bp, Homo Sapiens
tgaggcacttttccagggcatcggctagcgtgaggcggcgctccagcaagaagtcggggagtaggcgggacgctagggccaggcgcaggctctcaagagcaccctgccgggtcttggcactcttgtctgtgagacagtccacatagtccttcagcttttcctcaaggtcttcctgctggccctgctcatccacgacatcccccccaaggctgtcctctgcagtggtgctgagaaggctggggcattcactggcggtgctgcgggcactcactggctgcctcatcgtcactggaacccgagtcagcttgggcactgctccgggcacctcctccacggcgctgaccacccttccggagcgtgttgcccttacgggcgcgaggcatgccgggaaccgggcgcggggggcgcggggtcagggacccggtgggtgtgggctccaggccaacgagacgccggccggtgcgctgcgctgagacttggccagacgacgggagccacacgccgcgcgcgccaccatcttcgcgaggcgccccgccctgccaaacag

SEQ ID NO: 320377 - DNA, 1954 bp, Homo Sapiens
aagaccacagaaggctgacccgttctgtttaattatctgtaataatccttaaaaatcagcacacaaatccattccaggtagctttgccaccccacctgctgtggtggcatttgtccagatgccaccacccccctaagagtgggtcatcctgggggagcaaggcctgagaaaggaaaggaagggaaaggccccctagtgcctgccccacagccctgaggaaggcacatatttagcctggcctgagacaggacaggaaggggccacagggctgagtgcagggacaaaggggtcagggtcccaagtgtccgggcccccagctacccaccccatgtctgtttttggttttgtcattaaaaaaaataaagtgacaaatactggtggagaccagttgttgcactgtcttctgttaaaaatacggaccaagggcatagaaagtctcctcttcagcaggtcctgcttcacaggatgtctgcccgcttgtcccgcacacggcttcgagccttggtccgggctttgaaggcagcagcattgtacaggtgcttctcaaagcgtggaaccttgcaggccttcagggcagtggcatccagcaacagcacagggcccaggccaaagatgtcacggagtagctcattgttctggaggtggtggtgcatgcccgaacccagcacttccttgaaggcagcgtagatccggtgccgagcccagctgtccatgtagagcacctcaaagccgaagcgcactatctcttcttcgcattcaccgccctccacggagtgcagcacggcgcggaaagtagagcgctggcgccgacgatcagccttggcacggtacttgttactgtcagtggccagagtgcgcaggacactgcagagggcctccatgtcctcgtaaacaaactcctcctcaaggtcccgggcaagctcaaagagcagtgcaatggtttcaccggcagcgatccgcaggttcacactttcactggacaagagctggggcagccggggcagctgcctgtcaaggatgtggctgatttgggtgctagggcagatggtgagcagcaatgcccaggcctgcagggcagcagagagcaggccgtgcaggctggcaggaaccacaggacttgtggagctgccccccaagccatagaaccggctgaaaacactttctaagcaggcaaggcaagagaccaggtcctggatgtcagcggcagccacgtagcagcccaggccaagggcagaagcacagtggagccgggcagcagggctagctgtgctgtcactgagcacagagaccagcagaggctgcaggctgtggaacagctcctcacccttaggtccagggcccagctgcacgcagagcaggcctagcacagcagcagccagggcttgttcctcgcccttccctttcttgaggcacttttccagggcatcggctagcgtgaggcggcgctccagcaagaagtcggggagtaggcgggacgctagggccaggcgcaggctctcaagagcaccctgccgggtcttggcactcttgtctgtgagacagtccacatactccttcagcttttcctcaaggtcttcctgctggccctgctcatccacgacatcccccccaaggctgtcctctgcagtggtgctgagaaggctggggcattcactggcggtgctgcgggcctcactggctgcctcatcgtcactggaacccgagtcagcttgggcactgctccgggcacctcctccacggcgctgaccacccttccggagcgtgttgcccttacgggcgcgaggcatgccgggaaccgggcgcggggggcgcggggtcagggacccggtgggtgtgggctccaggccaacgagacgccggccggtgcgctgcgctgagacttggccagacgacgggagccacacgccgcgcgcgcccctcgtgccgaattcgccacccaggcctcggacttaga

SEQ ID NO: 320378 - DNA, 540 bp, Homo Sapiens
cagcagggtgtcccctcgggcccatctgtgtcccatgtcccagcacccaggcctctctccaggtctccttttctggtcttttgccatgagggtaaccagctcttcccagctggctggggactgtcttgggtttaaaactgcaagtctcctaccctgggatcccatccagttccacacgaactagggcagtggtcactgtggcacccaggtgtgggcctggctagctgggggccttcatgtgcccttcatgcccctccctgcattgaggccttgtggacccctgggctggctgtgttcatccccgctgcaggtcgggcgtctccccccgtgccactcctgagactcccaccgttacccccaggagatcctggactgcctgactcccctccccagactggcttgggagcctgtgccccatggtagatgcaatggaaacctcaatgccagctcaatgcctggtatctgcccccagtccaggccaggcggaggggaggggctgtccggctgcctctcccttctcggtggcttcccctgcgccct

SEQ ID NO: 320379 - DNA, 1089 bp, Homo Sapiens
  misc_feature (791)..(791): n is a, c, g, or t
  misc_feature (852)..(852): n is a, c, g, or t
  misc_feature (868)..(869): n is a, c, g, or t
  misc_feature (945)..(945): n is a, c, g, or t
  misc_feature (955)..(955): n is a, c, g, or t
  misc_feature (1036)..(1036): n is a, c, g, or t
  misc_feature (1050)..(1050): n is a, c, g, or t
ccttctacaccaggaccacgagcgcctcttcgagctcatcctcatggaagagatccgcttcccgcgcacgctcagccccgaggccaagtccctgcttgctgggctgcttaagaaggaccccaagcagaggcttggtggggggcccagcgatgccaaggaggtcatggagcacaggttcttcctcagcatcaactggcaggacgtggtccagaagaagctcctgccacccttcaaacctcaggtcacgtccgaggtcgacacaaggtacttcgatgatgaatttaccgcccagtccatcacaatcacaccccctgaccgctatgacagcctgggcttactggagctggaccagcggacccacttcccccagttctcctactcggccagcatccgcgagtgagcagtctgcccacgcagaggacgcacgctcgctgccatcaccgctgggtggttttttccccctaactttttacttagcctttttggtttgtgtccccacccccacctcctcaccccctttccagttcttcttcaggcccctcccagacgcaccccagcggcccctgcagcccctgcctccagcctccagcctcacctttgtgcccagactcgcatttggaagactccacctcccgcccaggcctgggctgttgggcggttggagattcaggttttaatccacacaagccccagtgaggggtgaagcatggcgcctggggcctgcctgagtttctggcctgggtgtcgtgctggtgtctgcctccgcgctgctgcatctggacgaaggctgnccttctggtgggacgcgacacccggcagacagtggtgctgccttccaggccccgtggctanggctcggagtggcagnncacggggcggtccaatcccccacccgctgtcccccctatggggggcagaaaagcaataatgtccaggggcaggcangggcccttgngagctgcaaggcctgggggtttagggctgctccctgggtgaatggagtcagatcctaggatctggtacatgggggaacccngaagtggcccgggnctgggtggccgcccttcctggtcggggcctccttcccac

SEQ ID NO: 320380 - DNA, 1808 bp, Homo Sapiens
gtctgtcaatgtgcgttttatattaaaaaagccaaaataacaatggggtgagaacaggaggccactataccagtggccaagagttcagatccttggaggccgtctttggagaggctcaatgggactcgtattctggcagcagcacagcaccgtgtgggacacaggacaccctccccacacctgagctttcacccacaggcaagggatgtggcgagaactgacgggcacacgtgaaaacagtcagccctgcccggcgctctttgaaggagagctctaaggaacacaagcacacagggctgagtcagcttttacccagcttttttaacttacctaatttttaaaaaattgaaaatggctgggttaaaagactaaaaaacctcggttgttgcaggtcaagactgcctgaaccctgcacaccaggactagggccagctaggccagcccccgaatgccactcggacagcacgtgaatgcctgtaaagcattctcaggccctgtgtttcacacgactcaggtagggactgtgaatgccttctgagagaaggaaacagggatttctagcgaatgaacgcaacgtgtcttatgttctctctgtggctacaataactgtcaacaatcacccaggaggacagtgtggcaagatttaattgcaacggcatctgaaaatggtgtgtggcgtcgcgcgcgccagctatcgtcagtgcctttattgccattgggtttgtgactgttgatatagtgacgacctcaggagcaacaggtgggttaaaaacccgtggctgggcagttcttccgaggagagggaccacatgaggagccaagaaggactcagaacctgacgaacgtggcatcgatctgccgcacggaggggagggcgagcatgaccttccgccggtactgggggtccttctgcaaggggttccgctccaggtacactgtctccaggctcctggctcccttcagctcgtcgaggtcgctccagctctcaaggagattgtcgttcatccagaactcttgcagctctgttagatggctgatattttcaatctttttgattctatttgatgcaatgtccaacatcgtgagtttgttattgttctccaggccctcgatgacctcgatgccattgtgggtaaggtacagctcccgcaggttcaccaggttctgcagaccctcgatcttggtcagccggttgctctgcatactgaggactgtcaggttggtgagcgcatccaggttctgaagtttagtaattttgtttttccccaaaaacaaactcctccaggttggttaaggtgtcgatattttcgattgcccggatgcggttagatcccagctctagcatctgtagttgatgtaagttgcttaagttctcaattttactgattttattgttgaccaagaagagttttttcagtcgtgtcaacttgtcaaccccttcgatgtttctcagcagattaaaagaaatatctagaatctccagctctgttagcgcctccagattctcaatcttcttgatctggttgtcgtaaagatccagctctcgaagactctgtagctcctccagattctcaatgcatttaattaaattttggcggaggcagagagtcttcactttcttcagtacctcaaatccttcaatcttccctatgcgatagtgattcaaatcaacatcctctgcatctctgtccaggttgatggtttccatgtccacaggcagctcatgttcttcctccatcatctcctgcgactgttgctgccccgcgccgcgttccgccgccatgttggctgctcttcccctttccgga

SEQ ID NO: 320381 - DNA, 964 bp, Homo Sapiens
ttgaatgagaaaaagtcttttatttgtcttgaacaccgcactggggcagagagggtgagctggaggcagctgaggagggtgggggctctgtgacacacttcccctcagtacgtgaggctgtcctgcacattgttctccaggccctcgatgacctcgatgccattgtggctaaggtacagctcccgcagtttcaccaggttctgcagaccctcgatcttggtcagccggttgctctgcatactgaggactgtcaggttggtgagcgcatccaggttctgaagtttagtaattttgtttttcccccaaaaacaaactttccaggttggttaaggtgtcgatattttcgattgcccggatgcggttagatcccagctctagcatctgtagttgatgtaagttgcttaagttctcaattttactgattttattgttgaccaagaagagttttttcagtcgtgtcaacttgtcaaccccttcgatgtttctcagcagattaaaagaaatatctagaatctccagctctgttagcgcctccagattctcaatcttcttgatctggttgtcgtaaagatccagctctcgaagactctgtagctcctccagattctcaatgcatttaattaaattttggcggaggcagagagtcttcactttcttcagtacctcaaatccttcaatcttccctatgcgatagtgattcaaatcaacatcctctgcatctctgtccaggttgatggtttccatgtccacaggcagctcatgttcttcttctgggtcctcctccccccgctcctccccatccttcaggctctgttcactgaggtcggccacgatgccactgctgtgtttcttcccttcttcatcgccggattcttcagactcgacccgcctgtcaacctccatcatctcctgcgactgttgctgccccgcgccgcgttccgccgccatgttggctgctcttccc

SEQ ID NO: 320382 - DNA, 1145 bp, Homo Sapiens
  misc_feature (31)..(31): n is a, c, g, or t
  misc_feature (427)..(427): n is a, c, g, or t
ggccgacagggtttgggttttttatgggggnttgggttttacggaaatcaaatcttcaatgaatgaaaaactcagtgccatctggggccagggggtcaccggaccaggtggaaagtcagccagtatatgatgaggggctggaaggctgcagctcccagagtcaggtagagctggagacgctgccgggggacggggccccccatgctgtcggggcccagggctgctgtccgcaaagagcgcacaatgaagtacatgagcgccgatgaggtccaggccagcgccacgtagtagccatcgctgccgaacagcagccccgtgagcacactgaggatcattcccacgtatttgtagccactgtaggccagcaggtgaaaggtgctcaggtcactgcgcacggtggccaggtagaggccccgggagcagggcnagcacctccattcaccacccccacaccagcgctgtgcttgcacacaggcccagcacctccggggagaaccttttctgaatgcccagtgccatcccagccaggagcacgtaagtaatgaaggccatcgtggggatatagaggtcaggggcgttgaggtcttgccgggggggcagaggagcatcacgactgtactgcacttcccagttctggtgtgtgtaggggaagaccagcagccctagcttcttggccacgtaggctgtgtccacagcaaaaaaatacttgagtttgctcacagacacaaaacggtgcagctccttgtgcaccatgtccttcccatgggatgcgatggagctgccataggccatagccacattggccattgggtccccaagcaagtggttgacactgaaggccacgtctgctcctgtggctgggtatcccccgggctggctggaataaccaccgcttgtgtcatcgaagaggggagggggatccggggctgcccgggccctgtgcttggagccgtgggctccgtagcccgagtgataagccatggccgcgacgctcgctgtccccgagggcccgctgcgccgcctcgtgggtacgaatactaatgaggcagctgctccgcgcccagggtaccgaccgaggccacccggccgcgcgacacgtcccccaccccgccggtctcggccaccatgtccgtggcgtcatcccc

SEQ ID NO: 320383 - DNA, 461 bp, Homo Sapiens
  misc_feature (36)..(36): n is a, c, g, or t
  misc_feature (380)..(380): n is a, c, g, or t
  misc_feature (413)..(414): n is a, c, g, or t
ggaaaaaccaacaacccttaacttcttggccaactnagctttgtcccacagcaaaaaaaatactttgaatttgctcaacaagacacaaaaacggtgcaagctcccttgtgcacccatgtcccttcccatgggaatgcgaatggaagactgccataggccatagccacattggccattgggtccccaagcaagtggttgacactgaaggccacgtctgctcctgtggctgggtatcccccgggctggctggaataaccaccgcttgtgtcatcgaagaggggagggggatccggggctgcccgggccctgtgctttgaccgtgggctccgtagcccgagtgataagccatggtcgcgacgctcgctgtccccgagggcccntcgccgcctcgtgggtacgaatactaatgaggnnagctgtccgcgcccagggtaccgacctgagccacccggccgcgcgac

SEQ ID NO: 320384 - DNA, 874 bp, Homo Sapiens
  misc_feature (31)..(32): n is a, c, g, or t
  misc_feature (41)..(42): n is a, c, g, or t
ctggtttctcccctttcccccggcagcttcnntgctcctcnntcctgtccgtcggggatgacaagctggttctcgctcagggccctccatctctggattttcctggctcactgacagggcagcctgcacctgtggggtctggcccagttctccggctcccccgaagcctcttccacctacaggtctgtcttccaccacctgctcccggcctggctcctgcggcagcctgtccctctgaggctcctcattcactacctggatctcattggtttcctctttctcaacttgtctctttgaatccaaaaccacttcggaactgggggctggtgtctgggacttgctgttaccaagcacgtttcccttcccttgtggcacctctgtgtgtggcaggcctgctgcctgcagcctgggctgaggctcactgagggcttggagctgctgtctctggtcgttgttttcactcaggtctctggaagctacagcttcattcccctttttggtgacctcttctattcgctcctcacactgttccttcacctccttcatctgattgatgcactggctcaggtcgtaggagaacttcctctccaggttggtctggttcttctgaaactggaggacatcctgctgcagcctgccgtaatcctctgcagggtctttaactggtcttgcagcactcggatgagcctctcacctgtggtgatgttattcaccaaaaccgccttttcgtcctggtacagcttgttgacgctctccagctggaagttgtggctggactggattttgtcaagctgctcccgctgcttctccagctctccctggaactcgttcttcttcagctccacggcgcctctctctgcagccgccctgcgga

SEQ ID NO: 320385 - DNA, 262 bp, Homo Sapiens
tgggccactgcgcctagccagctgggtccttgttctgctgcccaagcttggccctggttccgtgtgctggttctactttttgttctcccatctgcctcctgcctcctcccctttgagcttagccccgccctctcagcctgatttctgtttcccaagtccagcagtgtcgtgggataggttttgctttcttttactgtctccatcctacttacacctccctgatcctggggtctggggactccccatggtttccttccttctg

SEQ ID NO: 320386 - DNA, 1239 bp, Homo Sapiens
  misc_feature (130)..(130): n is a, c, g, or t
  misc_feature (156)..(182): n is a, c, g, or t
aaattcccaaaggccctttgttcaattggccccgggattttcccttgggaaaacaagttaatggcccatgttcactttaccctaatggggcccggcgcgcccaaacgaatgggtctagaaaagcttctcngaggggccgaggcggccgacaagttnnnnnnnnnnnnnnnnnnnnnnnnnnnggttctccttaaacaattttaatgtctgggttggggaagcaggtagagcgcgtagaggcagctgctagaggctggttgctgactccaggccgcgttccaggaaatatcggtgggaagaacggggacgggcttgggacccttcattgaggaagtaggatgtgatcttcctgagtccctcctgattctcggatgctgagtcctcccatataacatcttccgcctctttctccaggatggtctgggccgtgcgccagctgaaccggacaaactgggggaagccgaacacaggctccacgtgctccttcaaccacgcttttgtcttgggatcattggggtagcctgagccataatcagtatccaagtcctgcagtttctccacgaactgccatttcttcacggcctggtcccgggccaccttggcacagatgctggcagcactaaccaccgggtagagggcatctgctttggccttgaccgtcacctcaatcccgggaaaactttgctgcagccgcgcctggtatgtctctggcatccctacggtgtccacgaatacctgggtgacgttcacgccctggtccaatgcatactgtataagcccagtggctgtatcatgtgacagggagttcaggttgtatttgacccgcccaagcatgctggtagagatgaggtttggagacagcacatccagcgcccagccgacaaagtccgtgtcctccattttcgcaaacagcctttcccgctcgctctccaatagggtctttgagtctgccactttcagcgcctccagatctgccaggcgaggcaggggacaataacagatggcgtagaccatggggcccagcacggggcccctgcccgcctcatcgacgcccaggacgcaaggctccttgcggcacaccgcgggcacaggcgaactcaggcgacagcggcctgtattgtctctctccagctcgctgagatccatgccgcctcagccgccaccaccagctgcaagaactaatactgcaggagcgggtctcggcgcgcgttttccgcgggcctcgaagcggcgcctccc

SEQ ID NO: 320387 - DNA, 613 bp, Homo Sapiens
  misc_feature (20)..(20): n is a, c, g, or t
cttgtaccgtgcagcccagnaaggcagcttttggcaaagctgatgacgacgatgttgtagtgaaaaccaagtttgtggggggcattgctcagatcatcgccgcccaggaagaaatgctaaagaaagagcgagaactggaagaagcaaggaaaaaactggcccaaatccgccagcagcagtataagtttttacccaccgagctgagggaagatgagggctaaaggtgcgagcccagatggcgagccccaggggatggccctggctgaactggacagacagtgttcctgagaggctgggcacttagctgggaaaccgcccacctccctcccgggtgagcctgggagccctgcgttgcttgttcttcacatctcttgtcccgttcggcactggctgcatgatcgtgatgtcacacggtacaatgtcctacccacaactcctctgccgcctcccctcatgcctcaccgtgtctcaggagagaggggtgcacgtttcatggactgttaccaacaaagaaaagtcagtattatgttgttctcagacactttggcttttgttggtccttctcttaggcctgctcctggacctctttatgatattgtgatagggaaaaaat

SEQ ID NO: 320388 - DNA, 3026 bp, Homo Sapiens
  misc_feature (132)..(158): n is a, c, g, or t
  misc_feature (179)..(296): n is a, c, g, or t
  misc_feature (1550)..(1550): n is a, c, g, or t
  misc_feature (2263)..(2271): n is a, c, g, or t
  misc_feature (2692)..(2692): n is a, c, g, or t
  misc_feature (2708)..(2708): n is a, c, g, or t
ccttttatgtaggccacggggttttttgggggaaaaaggatgggctcgttttttcttttctcttggggggccccggccccaacaaaaagttgtaaaaaatttttttgtggggggggcgggccccaaaaaacnnnnnnnnnnnnnnnnnnnnnnnnnnnaaaacattctgaacttaggannnnnnnnnnnnnnnnnnnnnnnnnnnnnnnnnnnnnnnnnnnnnnnnnnnnnnnnnnnnnnnnnnnnnnnnnnnnnnnnnnnnnnnnnnnnnnnnnnnnnnnnnnnnnnnnnnnnnncagcaggagaaaaaagaataaagttacaagattcttttaatattttcacaatgttaaaactaaaactgagctctaggctatgtgtgtaagtaaatctagaacacaaaagggttaaataagattttctcttttaaagatacaagaatttaagctttccttacatttaacaaacttcacagaacagatactgcaggggaacaagccccaccccccacgccccccagctctaagtcaggaagcgaacatgggcttcgctcccccaggccagctcccctgggctccttcccatggctgcctccacgcagcaggcagaggagggggcggggggccctcggggagtggccgggaagggttcgcacagcctcttcgggaccagagcttggcggaagcctatggggggctgcctcactgaggatggcccgtatggtgccaagggctttggcttgacagcagttgtaaacgcttggcagaccttgcccctctgccctgggttgccctagagcaagacaccggtctgggtcctgaagcaagaattaaggctggggattttgcagccgggtttccactcttggtgggtggagggtgggaagagcatgacttcctatttcagtacgtcggatcaaaaaacatttgcagttgcaggtgttcagctgttaatttgcagacagagttgaaccatttgttgttttataaaaaggaaagttgctgggttaaactattccagtagcctatgtgtgggcagatccacgctgcctccgcaggggcctcctgccctcacccacctggatctgatgcggcactaggaccactgggactgctcaccctgcctgggctttcaagggaatcctgatcctgtccacccagccccagccccacctgactggtagtgatttcctaacatggggcaaccaggcccacccccaccgttccccacctggcgtgcgcagttgcagctgctgaaatcctctgtgaacatgagggggcacaggtggagaaatgtaccctcaggccctcacctaccagagcaaatatcactctcggagctgggccacagccacaaaccgctgttctagacagatccgaacccactgtcctgggacgtatgctgccttcccttactaaacttgctatatggtagatgtggactgggtgtccttggactatggggctgcatagaaacgaagaatggaggcccacgaacatcatcctcttggccccctggaggcacgggcggctccagctggaaggggcagnagcccgtgggcggcagcttccccagctgctgctcccagcacttctactgattcttgttggctatgaaatgtctttttaaaaaactcccactatagaaatctggctgcagaggccagtgtgcagacccagccaccgcgctgtgctgccattcgccacatctggtccgtgccagatccctgcactggcgaatggcagaccagagccggcggaggcggggcactctggctgcttctcgtgaccttggatcctgtgtagaaaaggcgggtctcgttcgtggactagtcttgagtggagctaattttcaaagtgaggttactgtttctcttcttgtgtgatgagttttttcatagcaagtcaggtaaaaaaatttccgtaagaatctgtcccccaccccccatttccagctctgtgggagagtgaggccaccacccagcccagccacgtggccaatctcagcagcctcccgtggccaaggcacacgtggccatcaggtatcttggctactgggactaaggataagtgaagaggtgaaaggccgatcattaaacagagtttctggcaaagccatgtgcgtcgtgggaactttaacaccagcttctactcctctattaactcagagtctccgtctggaacactttccacttaaggctttttataagtttgactccagcagtgacaggtatgtgttgttttaaatccactagccatgctcnnnnnnnnntattcttcatgttttaattttatacaatggctagcaggcaccttagtaaccagccagaaatcaatttcaaccaccatcaacccctaaactacagtaccaggatggctggctaaagaaaggaaacggactggctgcagtctgacgcgtgcccagtacaaggtgtctggctgactttgtcctaaataaggctaacattagtgaactaagaacagcgtcacgtggtggccatgcctgggcttcaggagcacccctccccgatgcgctggcaggagcgccccacgtttccggtccagcttcaccatgtttcatgatggcttcctcccggccacggcccatgtgggtcgaatgtgcagtcgtgctgctcggggaggcgatgtaacatagcagagacacataaccgcagcgacacgatccccaattncctgctgcaccagctnccagtttggtttggcagctggagagcaccgacgtcgactctgtctgtgttagagtcgactggtttcctcggaccgttccgtattctcaagtagtgcgtggccgttttactggtgaagcctcattctcagactgtgaatgctgtaccagcaggatctttttgttggtgtgattaatgagacatgagctgtgtctgtgcatggtccacactcctctttactcggtgaagttacattcagttctgtcggaagcggctgctggctgggactaagagttggcgtggttatcgaggtattgttgttgtcactggtggtctcttc

SEQ ID NO: 320389 - DNA, 764 bp, Homo Sapiens
tggtggtgtttcagggctgtccattccccaacctttattcacaaatctggtgtctgtagaaagctggggggtcagcaggctgggggcggctgtccagactcccctgggccccatgccctcagggagggagcggcagatcacggagatgcgccggccccggggaatccggcgttccccaaagaaggactcttcatcccgaaggatctcatgggagaagtcataacgggctgagcccctaaggatgtagagggagcccggctccagcaagagttccagccactcccccggctcctgggtgtgcaccagccgcataacgctgggagacaggagagacaggccggcgatggtggccccgcagaacttgatgctgtccacgtggggcttgatgtagccgcgggcttccaggtccagcacgtgcacggaggagagcagggtctggccggggccaaaggcggccgcctgcacgcgctgcaggatggcccggctggcttctgaccagcgcgacttctctgtctctcggaagccgtggatggccgcgtcccagtgatcgtattcgtagcggcggcggcgcagctcgggctccagttctcggctcagcgtctcctcctctgccgtgctcaggaagccaggccgcaccacggccgcgtcctgcaggcggctcagcacggaagggcccgagcctcgcacccagctgggcactggcagcgtccgcagcgccagcagcccagtcccggccataatcccggagcggggtcatgagagag

SEQ ID NO: 320390 - DNA, 455 bp, Homo Sapiens
gtgaagcgggtcacctggaacctgcaggagtcggagagcagcgcccccgccgaggacagccccccgggcaccacttcacaggccacagaagccccgagaaggagcctgggacatggaggatgtggcccccacaggggtcaggcaggtgttctccgatctggcctttcccagtcacgtgcttccggaacccgggttcccagacacagacccctctcaggtttacagccccggcctgccgcctgccccggcccagccctcaagcatcccaccctgcgcactggtcagccagcccacggtccagttcatccttcaggggagcctgccgctagtgggctgtggggcagcacagaccctggccccagtgcccgctgccctgaccccagcctcagagccagccagtcaagccactgcagccagcaactcggaggagaagaccccggcccccaggctagctg

SEQ ID NO: 320391 - DNA, 606 bp, Homo Sapiens
gtcgcccatcattgccaaatgtgtcctccagaaagcgcagcccaagtgtcatctggtccacgatggcaccgtagtgggtggctgcctcatcgttcatcacccagccaccattggcgaactccaggcgcccctggcgcacaaggtctcgcacgacttcctgtgtggcatttgtctgctggtgccaccaacgggagaagaaggcaatctccacgtaaatgaagcgacgggtgggatctgccagcaaggcagagatgaccgagtccaggatgtactgcacaccggcgtgctggatgtcattcttgattccataaaagtactggtccacggttttgagccagcccacgtcatcatgtgtgtgaggcagcaggtgcacgttcagcatgttcggctgcactgtggggcatgtctcgtatcccccggcccgagcaccggcagccgccagcaacaaaaggaaaaagcagagaggcgggagcggtggccgcagggcgcgggacatggtccaggggcctgctgagtccaggcagccgcgagcgcagacccccgaagcccgcgcgtaggcgcccatggctcagcagcttcctcctggggttccccggccctggaagg

SEQ ID NO: 320392 - DNA, 1469 bp, Homo Sapiens
  misc_feature (1014)..(1100): n is a, c, g, or t
  misc_feature (1300)..(1313): n is a, c, g, or t
ctctcccttcggcttctctctttcggccggcgccgccagttcctgtggcacacccagatgtccccttctcgccgccgcctgcaactgcgatggtagcccggggccgcttggagtcgcccggacctgagaggctgctgcactgggcctcagccagccctccggatgctggtgctgccatccccctgccctcagcctctggcattttcctccgttgagaccatggagggccctccccgtcggacttgccgctccccagaacctggaccttcctcctccatcggatctccccaggcttcatctcctccaatgcccaaccactacctgcttattgacactcaggttgtcccctacacagtgctggtggacgaggagtcacagagggagccaggggccagtggggctccaggccagaaaaagtgctacagctgccccgtgtgctcaagggtcttcgagtacatgtcctaccttcagcgacacagcatcacccactcggaggtaaagcccttcgagtgtgacatctgtgggaaggcattcaagcgcgccagccacttggcacggcaccattccattcacctggcgggtggtgggcggccccacggctgcccgctctgccctcgccgcttccgggatgcgggtgagctggcccagcacagccgggtgcactctggggaacgcccgtttcagtgtccacactgccctcgccgctttatggagcagaacacactgcagaaacacacgcggtggaagcatccatgagccgggctgccgggtgccccaggtaccacaggactttgcagggagcctggactcctgtccagacacctggtgagagcctgaggctggtgttcacggccctggacacagacacagagcagccgcatctcaaaggcagacccctgcctgaaggaggaacccgtgagtaatcttccagccccccctgcttctggagcctcagaagcgcacgaccccccaccccaccagcgagcccctcccccgccaatatatccccctgannnnnnnnnnnnnnnnnnnnnnnnnnnnnnnnnnnnnnnnnnnnnnnnnnnnnnnnnnnnnnnnnnnnnnnnnnnnnnnnnnnnnnngacgcgcccacctacgcgcaacaacccgcccaatctcccctcacgctcacgctcgcgcccactacccccgaggtgccaaatgaactgcgtttacggtccccccgcccgcttacaacccccactccgggtcgtcgctaccccttcgccactctttcccccaacccccgcctgcacccgacccgacgcacccgctggaccannnnnnnnnnnnnntatgccgtacgccttcccgctccccgattccccttgcccgctctccgatactatcccgcccccgttccacgctcccaatatggcgacgcgtacccccggcaccacgcccttgcaaacactccgggtgacacaggcccaaccaaaccccccgccacc

SEQ ID NO: 320393 - DNA, 2112 bp, Homo Sapiens
tggaaacatggggggaggtttggcccagactaccccttcccccaggaaatccttcgggggcaccttcctcctcgggctcccccgcctctgggaaacttgctcagaagttcagcagagctggggcagcgtgtggcctgtggggcagccaagcactggagggggaccgacagcctaacttcctatgagagcagagggaggggtggtggcacagcgaggaggggcggtggtgtgggcagcgctgaggcactattctttagttgagaagcaaggggcagtcatgggtgtggagagggcagtggcccaagcaaccctaggcagcatctacgagaagttcttgaagatgtccaggtcgaaggccgtgtccaggaggcgctgcagctccgtcaggtgggtcttcttgttgccggtggctggagcagccgctgggtcccggccggcataccagacgggcttggcgcggctgatggtggtccgaagtcttggcttcacgtagtcatagtagccttggttcttgtgctcctcctggcaccaggccagctcagcattggggtacttctgcacctccttcagcaggaggtcaaaggggaatggcgacagctgctcaatccttgtgatggccacctgccccaccatgtcgcgtgctttgcgctcccgggtgaggtcataatacactttgccggtgcagaagagaagccttttgacattttctgggttctgagctgcagggccatcttctgggatcacccgctggaagtgggttcctggaagcatctcatcaaagctggatctggcctcggggtggcgcaacagggatttgggggtgaagataattaacggcttccggaatggcagcaggatctggcgtcgtagcacgtggaagaagttgccaggagtggagcagttgacaacaacccaattgcagtcatatagctgattgatgtcgaagttggcttctttaaggtctggcaggacatctgggtcatcgttgcacatctgcaagaaccgctctgggcgggcggaggaatgttctggacccatgccctccatgccatggggcagcagcaacacgatgccattctgccgcacccacttggcttgtcccgggcagatgaactggtcgatgatacactgggccgtgttgtggaagtcaccaaattgggcttcccagaggacccagggcattaggactggccatggcgaagccccagctcaaaaggcccagcacgccgtactcagacagtgagctgttgcacacagtataggggggcctgattggcccagagatggttcatggggatgcaggttctcttgtccacattctggtcatggagcacatggtggcggtggctgaatgtgccccgctccacgtcctggccgctcagccgaatgtggatgccctccttcaggagcgagccaaacgccatgtactccgctagagcccagtccacagtccggttcttcaccatttccccacgagtcttcaagatccggctcagccctccatgaatagtaaagttttccacaggcacagaactagccacattcccgatgtgtgtcagaatatcctccgtcagacccgtggaggggcaggacatgctcctgggctgcccgtccagggtgaagaagccaggccagggagagtccagccagtgcttaatgtgcaagatcttctcatctttagatctggcaaaagcttcctcacagatcttatcatacttggaaatttcctcctcatactcaggctggttgaccacaccctgcgacaccagcagctcagcgtacttctgtaacacaggcttctgcttgcggatctgcttgtacatgagcggctgcgtgaacatgggctcatccatctcgttgtggccgttgcgccggtaacacaccaaatcgacaaccacgtccttgtggaaggtgctcctccactcggccgccactttgcacacgtacatgacagcctcggggtcatctgagttcacgtggaaaatgggggcattcaccactcgggccacgtcagtggggtagggggaggagcgggccatccgagggtcggtggtgaagccgatctggttgttgcgccacccaggatctatggcgtcggggaacgaaatgtgc

SEQ ID NO: 320394 - DNA, 713 bp, Homo Sapiens
agcaaagctttctcaaactccccttaataataatacaaagttaatgtgttacagaaaaattcatgcaatcactccactgccacacagaaatccatttgaggacaccgcagggaagcaggtgccaagagaaaggacatgactatgagtaagcaaacttatctcctaccagccccattccagccttggggtcagaggtatttgggcggaagggtgtgtcatgacagacaaggacactagaggccagaataagggtctgtacacctgaacaagggctgcagggcagtaacagtgggaggaggagaggaagaccaaatcagcccacaattttaaacagagaactgcccaggtgaggaaatggaagtgaagcattttctagtggcacagattttctcactaggaactgctgcagtatgtggtgtctgctgagtaagctcttggctgacagtgctgagcaggaggatgaatgaaaactgaagctagacattgaaagagcattccatatcccacccatattcttgaacccagcaacttacagctgtctatcaagaactgggagggtattggtaaagtcacaaatgaaactatcccaactgaaggctcctggctagaggcctctctggggacacacagggaaagcgccccaaaaggaattttgtttctagaagtcgggaaggggtgctccctttcacacgcacatttacacacgttcacac

SEQ ID NO: 320395 - DNA, 552 bp, Homo Sapiens
tacatttatgtttgacttctgaattatagtctctgaagttttcagttgtgttggtccagtaggcagttctgatcagggaacttacgcagctttcaattctttgcttaactcactggccaggaaagctggaaatgatcttgagtttctattagtagtggtggtaaatatgaggtggtggtggcaaacaaactgaacactcattggagaatgcctggaggggtgtgtcaactgtgaagttttgatttgaagagcgtgctctcattagattgactgcataggatccaggccttaacatggataagtgggcttggatatgccaggctgatgaattccagatttaccttaactggggagttaatgtggcctaagttccacatgtggaataggagcctttgtcacctttttggactgctggcttatattaaatggcctcacatctccatagcaccttgaatggtgttaaatctatagtagcagcagaaataatattagctgacatttactgctttgccaggtcctttatgttccattatctcataaatttataagatg

SEQ ID NO: 320396 - DNA, 1590 bp, Homo Sapiens
  misc_feature (1315)..(1344): n is a, c, g, or t
ccgttcttccaaggtgggcagctcatggtatcgaggcatttcctgctcagtgcatgaggcgccagcatcaaagtagggggtcttgagtgggctgtgctccgaggcccccagagtgaagagctgggagggcatctcctgtgcctccagcttcgcttttggggtcggtggcttgtaggagggaggtccctccaggtcttcgtcctcctctgccccctgcagcgtctgctccttccgctgctgccggcagataaggatgcccgtggcagccacagcagtagcaatgatggcggcgatgatgcccccgatgatgccgcctgtggcccctgcgcctgctgtgttgggggtctctcggacaaagatgacctgctcagcgcggcccatgcccacggcattggtgactgtgcagacgaaggtggtattgaacagactgtccactgcgtggatgaccagctgggagccctgggccactgcggaggtcgggaaggtgcctgaggtcgtgctccagtcatagcccgtgggctctgggttgctgcggacgtcacagctcagggtggcatcagtacggccgaggtaccagttgtcatcatagccggagatggacacttcaggagggtagcgtacagagagggtcacaggtatcagggctggttcctcgaagctctcatgctccactttgcaggtgaccgtgacaccatctgctcggcccgagggcaccaaggtgaagcggctggtgacagtgacagttccggccagggtccctgacacctgagtctctttggcttcccagtccagggatgagagcccaggagttccggggcaggtgggcggccctctttggagatgcagagggccactgtcgtagggtcctggctgaacgtgaccttctgggcctcagcttggttcttgggcttggctatgactctgagccaggtcatccctcggacggaccccttggggaaggtggcaaactcgcaagtgtagttgccctcgtcctccaccgtgagcccgtggagggccagcgtggcgtcctggagctctgcctctgtgtcttgcccagtgctctgcttggcagagacgaaggacagccgctcgctgccaggcttcgggctggggaagctgggacccatcttagggtggaaggcggccacattctggtggttcgcaggtgcatctgggcgctgccaggtcaccagggagatgtacagtccaggaacaggtggcagcaggtggcacggcagctccacggtgcccccgagctggcctcgcacctcgggtagcacttgaactcgcacatcctgggctccggtttccaggnnnnnnnnnnnnnnnnnnnnnnnnnnnnnnggcgtcggcggcgatctcgacggcaggagggcagcggcccgggccatggagggcccgggaggggactgggcccggccggaggcccgcgggccactctgtgggggccgatcggctgggcggtttagtaggtgcctgtggggctccggctccggctccgggccggttcccgctgcgctctagcctccctgttctgctctcccggcccagctctccccgcccggctcggcacccccggcctctcgctca

SEQ ID NO: 320397 - DNA, 416 bp, Homo Sapiens
agaccacaggacaatcaggagccaatcatttgagctcagaccaaagatccttctccacagtcctcacactgctatctaaggaagcagaggctgtgcagagaggaggcagccaagagccccatgaggatgcgctgtagcccagagcagcactcagtgagttaggcagggaacaagcagtgtggtgccaagtcaaagcccaacacacaggcacggagacaaggtctctgattcttgaccctcaacttcagagctattctctggtctaaattttctacacatatcttccttttataatggggaaaattataaccccaaagcaaacccatactctgagcccactgcccccttagcaacacaggtacctgtgctaaagggacacagttttgcctctggaacttccaaaggcaactggagaa

SEQ ID NO: 320398 - DNA, 1656 bp, Homo Sapiens
  misc_feature (149)..(149): n is a, c, g, or t
  misc_feature (807)..(807): n is a, c, g, or t
  misc_feature (884)..(884): n is a, c, g, or t
gaattgcggccaggaaggatggtgggagcccacggaagagggcagatgcagagggtgcaggtggtatggtggtgcggcgagcccctggatgggcccgcaccagcagggaaagtgaggatgcacagcagcagggcagaaggagtgacagncgccagtcccacccctggtgatcagggtcagcttccagtcctccacgtcataatgagccataaggatcgcaaagctgctcaggtggctgcattggcaggtggtgctgccgttcttgctgcccagcacctggcagccctcggtggcccagtgccctcccctgtcgctgtcactcttccagaaggcacagagcagctcctgccgtggcccaggcatcacgtccttggcaggagggtctcttcccgcctccccatcggaggactcaaggtgggagaaggcgaaaaggatgggggagttgagttccttggtgttgttgtggctcagaaagatggagttgacggcagagaggcgtctgagttggacaccacggatgctgctttcatatatctcctccagttcggcttgcttcttggaatgcaggttcaaggaggcattggccagcaatgtcgtcatgttctggatggagaggatgcccgccacggcggggcctggatcctcggctccagctgccacagcccaattcagcttcatgcgtgcgctgctctgacccatagtgacgttcttgtccccccgctcctggatcatcagggtcagctctgtgttcgaaggggaaatgtaggtgaagggggcttttaggcaggctcttggccaggatcctcnatgatatcttcaagggtttgagagcagctgggtggctatgaggtgcgggacaggtggcgccagggcctctacgtctnccaggagcttccatcagttcatccaccaattttgatgacattctggatggtgacctcggctgagcttgtcttggagtctctgcccaggtcctggactttgtcgaagaatcgggaaagcgtctggctgtggactccagggggcggggtccaggtggagaaagtcatatcttcacagacagtgtccttttggttattcgggattccgtgtctgggcttccagcctgggcggcagcggcagctgtatgaacccacggtgttgaagcagacggtggagctgtcacactgatgctgcccggagctgcactcgtccacatcttgacaggtgttctcgctctcatttttgaatgtttttgccccagaaacaggctcatatcccgggctgcacacgcagtcgtagctcccctctgtgttccagcagtccgagaattttccgcatgacactttcgacggtgttgcacactcgttgatgtcgtcacaagtctccgtcggggtggtgatgatctcagaaaaagagctgaaccctggattgcagcgacaggcggtggcattgacacacgaggagttctgagggcaccaccgggcacagcccctggagtcctgggtttcagctcccggcagagtcagccagacacagaatgcgagaaagacgcggcctcccatggttggagctgccggcaggagcggcaggggaaagagtgagtgggacagggctgtcccgtctccacaggctaggcagctgtgcaggctgtcccgaggccaggactttatgaag

SEQ ID NO: 320399 - DNA, 1008 bp, Homo Sapiens
  misc_feature (23)..(23): n is a, c, g, or t
  misc_feature (62)..(70): n is a, c, g, or t
agtggggagagctcacaccccanagccagggagatgtggggggatgaacaacacccatcccnnnnnnnnntagaaatatgttcaggcgggaaaaggttttcgcccacggaaagagaagggcctaggaggccgagacccctgtcaggggcgccaggaaagccgaaacccccaagctcctatagtttattataaaggaggcagggaggccaaaggcccttgagtggccccccggagaaagccgagtcgcaaaaggtggcccatatccacgggggagggcaagaaagggcgcgtggggttccaaaaatgtttatgaggcttatgggaggataaggggcaaacggaaggccggggactcccgggggaaacttcctggaatggagttcaggggcccttccttccaggggtccatcatggaggggcagggtccaaggggcacgggagcctaaaaaaaggggcacccccggcggaactggggccaggttccttaaccaacggccacttgaggaagacggctggatacaatccggtgcagtggggggcaaggtgaagcccgtgcgtattttccacgagttggcgtcagaccgcaaagcccgtcttcctacagaagggcaactcgacgcctcaagtccccccacggacgcccgcttggggcgtggtgaccacgagggcccccaggggctggtagggacgcagggcttctatggtggccatgtgctcatcggaggtccccgggggcgtgtccaccaccaggtagtccagctccccccaggccacgtcggacacaaactgctttatcagcgcttcttgcctgcatggcgcagtgccagggccagctccgtggagatggtgcttttcccaacgcccccctttcctgagaggaccaggatgatgtgcctgacgccggccaggtttccaggctcggccgccgcctccatcccgccgcctccaggagctcgcggctgcagtccgcttacgcccgcgggccgtcagcctcccagctagagcgaa

SEQ ID NO: 320400 - DNA, 1054 bp, Homo Sapiens
  misc_feature (51)..(68): n is a, c, g, or t
  misc_feature (952)..(952): n is a, c, g, or t
acggtagcgaggcctgggtggcgaattcggcacgaggaactagtctcgagnnnnnnnnnnnnnnnnnngtcgccacagcagcggacacgtttaatggcaggcgcctctacagttacaagacatgcctgaggtcagttcgcccccttagggggcactccccgagctaaacacagatgacagcgacccagggtgctggaggcccggggtcacctgaggactgcagaagtcctgcgctccgctaactgtgtggacacgcggctgccaggggcacaggtaggcaacatggatgggaagagagcccaggccgcccccgtctcacagctgcagagcacgcagaccacggcactgcaggccaaccaggcagagctgctggtgcgacacatcctggggctgggctggtcggggagaagctctcccgctgacgctgcctgggcctgcccctgcagggcccgggaaccgagcccaggcctctgtttctctgagaggctggagcagagcccttggtggccctggaaagcggctgcaaggtggccttagtcaggggaggcacgcgggcgtcgcgtccagaatcttctgggctatggaggtgagtgcagcgaaggcggggctcccggggaactcctggatgaagtcgtggccctcctccagggtcctcatgagcgcagggtccaggggcacggagcctaagaagggcaccccggcgagctgggccagctcctctccgccgccccctggagaagacgctggtgcactccgtgcagtgtgggcaggtgaaagccgctcatattctccacgattcccatcacccgcaagcccgtcttcctacagaaggtcagctcgcgcctcacgtcccccacggacccgccctgggggcgtgggtgaacacgaggggccccaaggggctggggtaggggacccaaggccttctatgggtggcatggggcctcatcgnaaggggccccccggggggcgtgttccccccaaccaggtaagtcccggctcccccccaagggccaccttcgggaaccaaaatgggtttttattcaccgccccg

SEQ ID NO: 320401 - DNA, 507 bp, Homo Sapiens
gcatgttcatagacggacagacttctactttcagtcgctagaaaagagatgagtctggcgtcccctcaggcggccagctgcagtcatccacagcacagcattctcctagagcgggcaggctggaatccacaggactttattttgttcttgattgaccattgccaagatttgagtgcaaatgcttgacagggctcctccctggatgacccctgtgaagtacctgctgtactcctgctcaagcttctgtgccgcctcaaactgctctttggaatgcctctgagtcaccttgtccctcaggtagatggggtctctctgctccttgatgtgcttggcgctcttgtagtggatgaagatgacaatggggtagatgtgcatgtggtggagccgctcaatagcgtgcggagcgatgtccaggaggcagtgtcggttcttttctgtgatctcctttattgacgccacagtggtcacatcgaaatggccgcttctccgcttatagtcgacaaacag

SEQ ID NO: 320402 - DNA, 866 bp, Homo Sapiens
  misc_feature (109)..(146): n is a, c, g, or t
  misc_feature (677)..(677): n is a, c, g, or t
aaaaaaattattctgtaccatcacaacttttcacaacgatggcgagccttatgtcttgggagcctgttttgctaggcaaagttacaagtgacctaatgggagctcaaannnnnnnnnnnnnnnnnnnnnnnnnnnnnnnnnnnnnncactcaagacctctaacagcctcgaagcctggggtggcatcccggccttgccattagcatgcctcatgcatcatcagatgacaaggacaaccctcatgacgaagcaacatgaattagggggcctcttggccttggtccaaaattgtcaatcagaaatgaacataaaggactccagagcagtgggactgtctgtcaaaagactctgtatatcttttgtggatgagttttgtgagagaacagagagaccattgtacctggcacaagggctgttcatgaaaagggagacttactgggaggtgcaagacagtggcatttctcctctcctcttgctgctcagcacagccctggattgcagccccgaggctgagaccagacaaagcccgggaggcagaaagatgctccaagaaccaacactatcaatgtctttgcaaatcctcacaggattcctgtgggtccagctttggaactgggaaacctttcttcggatccgcactcattccactgatgccagctgcccctgaaggatgccangtactggtggtgtgtgagtctcagcagccgcccacacgctcctaactctgctgcatggcagatgcctaggtggaaatagcaaaaacaaggcccaggcctggggcccagggcccagaggggaaaagccctggaattctccactcatgtggagatctttgaatctcttttcttttgttccggtttggttta

SEQ ID NO: 320403 - DNA, 1049 bp, Homo Sapiens
  misc_feature (814)..(839): n is a, c, g, or t
  misc_feature (975)..(1000): n is a, c, g, or t
cagtgaatggagtaagaaagaacacgcaagagttgtctccaaagtcacaccgttctcttttgacccgttttaacttgcgccttaaaagttgattgcccgcatattggcccctttttcgttttttgttatgatgaggttgtttgtgtgggtagacaattgaggaaagtgcccccgtgaaagatcacctcctgatgggatagaccaaggtcatttaagagatatttctcagccaggaaagacctggttatagcctaattagtagtgatataacagtagggactagtcagcatggaacacacacaagaaacagagtcacgttgccaggggagatgatcaatctgggactagaataattccagtcactttaaaataattttgttacaaagcaggggtggtttatcaacttcaccacggcctaaaagaaatatgctcatgcattaaacctctgaacaggtgatttggtgtgcagagtgctttggctttgctgtttagagagaagaacactggaaaacaggtgggtgtaggtgttgtcaatgaaaagaaagattatcctttgtaaattaatgagatggtatcctgatttatgcatatgtcccttctgttctgagtctgtttattaggagtaagtttccctttctctgatcaactcaagattgactttataggtatgaaaaatccaaagcaaaaccctcagcaatcatgacctaccaataaatgaaatgacagtttaggaatccttctgatcccccaaaaccacaacagggcaaagttcattggtaaacagcaaaaaaaattacatgaacactataaacannnnnnnnnnnnnnnnnnnnnnnnnnaaaggaataatagtaacaaaaaaacaagagagctcataaaaagtattctgagtataaggaacataatcttaatattccatactactcatttttcaaagaatatatccaagactttgaaagtggaatcagaaatggnnnnnnnnnnnnnnnnnnnnnnnnnnatagtgaagagaatccagaaataatttggtggcaggtttttattttatt

SEQ ID NO: 320404 - DNA, 986 bp, Homo Sapiens
ttccccacagcgccccccgggggacaggggtttttggaaagggtgggtttcccatctccagaaaaaaggaccctcacgtttttcccggggagagccagggccccccccagggctcttgtgccaggttccaaaaggtcccttgtcaacccactagcccccttgagttccttcaagtcctggagaaattcctgttctaagtccatgtccatgtcatccatctgggagtgggggtcagtggggggcctccccggacggctcccaaggggtccagttttggatcatgagctcagcgcagaaggcaaagtcaccgaagctcagatactgcagttttttctttccctgtctcaaagcggttgttagcaaagaagacgatggctgcatagtccctggccaaccgttcagagaggaggaagtgttgctgaatattgtccaccagggagccccgcatttcctctaccaccttgaagacccgtttaaagttgtcaaactgtctccggcagctcttgagggtgatgcctgttttggtgctgatgtcatccaggtctttcttggtgcctttggacagcttcttgcccagcacctcccgaacaaaggcctcatcaaaggcatagtacctctcgatgagtagtgcctgccgggagggcggaatctggaagatgagctggtgcagtagcttgggcggcgcatgcagcagccgctcgagcatgtggaaggtgcggtaatggtccatggtgtcgctctgcagcaccgctgccgtggcgccagtctgctccaggattcccgagcgcacccgcagggccaccgcgtcggtcaccgagtaaccatcgagccagaggcgatacacgtcctcgtcgataagggtcgtgttccccacgaagatgtccagctcactggtcatggcgacgcccggggccgcagcgccccgagcaggagcgagcactgctcgggactggcgcgcccctcgtgccgaattcgccacccaggcc

SEQ ID NO: 320405 - DNA, 2301 bp, Homo Sapiens
  misc_feature (145)..(145): n is a, c, g, or t
  misc_feature (590)..(590): n is a, c, g, or t
  misc_feature (1094)..(1107): n is a, c, g, or t
tcggggggcttgtagaaagcgggcgtgtcggcattcacccgtcatccctctccggggggagagggggaaatatgtctccccgcgggggaactgatatttgtgccttcgtcccgcaagttctttaatactggaacccacaagagangtaactgtgagtcgccgggaagatgagttcttcgacgcgccggggtggtgtgttgtcgcggtatgtaaaaagaactccctacgtggggcccattgagtgtctgtcctcccccagaaagaaggagcggtctcttgcacgctgtctcgggcccaactttattctcgtgtcgctttgtacagttggtctgcccacgggccgcataatgtacccccctcccaggacgccgtgagagatttgtaacccgccccaccacaggggcgcggtgtaaccgagagcggggggacaaaaccggcgtgcgggcgccaccgaaatataatgaggggggggagagaagaaccgtttattttcttttcggcgacacccgtacccccgcgcttgttggttcaccgccgccaaaagggagggcacggaactattatctccatattacgggacataatgagtngcccccgacggcgggccgcgaggaacttcgcgtccgtggggccaactgtccaagggtccgcgcttcaatcgccccggtttgaggggaatagggatttccgcaaagccggggccccaaaccgcctttaagggtaaatttgcgcccgcggtccgccccgacttaagacttcccacgggcgggggggcgtaatttcgaatcctaagcactgctctgggcctcccggttgattggggtccagttaatgagccttcgggactcccattttgagtttgttccgggcgcgtaggtgggccgcccgggcggtttttgttgtggggaatcccagccctagtcatggccaggttctcttaggaaacaggtatagccagggtcacttacctattgggcccggggggcaaacgaaaggtctaggaagctttttggagggccgagggcggccggcaagccttctaaggttctgtttgtgtgtttttattgcctctctctgttgatgtgttgtttggnnnnnnnnnnnnnnccaaactcagagcaactttattgtcagcgtgggcggacgttgggaggcacctcagtcatgatacaggcgcaggaggcagccgcggagggtgcccatgtagcggtcccagaggcctggtgtcggaagccatcgagggagtggacagacgctgaatactgattcaggaagaaccgcacgtcgctgagtggccagtggtcggagcggcagggttccacaaacttctccacgaggtccacaaacaggtctctgacatctttattgtgggtcagcttggcggccacgttcaccagcccccgggacaggttcttgaagttggcttccatctcagagaagacgcccagctttccccggagagcagtgcacaccaggctcttgtgcaggtccagaaggtccttgtcagccactagcaccttgagctccttcaagtcctggagaaattccttgtctaagtccatgtccatgtcatccatctgtgagtcgacggctccaagggtccagttttggatcatgagctcagcgcagaaggcaaagtcaccgaagctcagatactgcagttttttcttccctgtctcaaagcggttgttagcaaagaagacgatggctgcatagtccctggccaaccggtcagagaggaggaagtgttgctgaatattgtccaccagggagccccgcatttcctctaccaccttgaagacccgtttaaagttgtcaaactgtctccggcagctcttgagggtgatgcctgttttggtgctgatgtcatccaggtctttcttggtgcctttggacagcttcttgcccagcacctcccgaacaaaggcctcatcaaaggcatagtacctctcgatgagtagtgcctgccgggagggcggaatctggaagatgagctggtgcagtagcttgggcggcgcatgcagcagccgctcgagcatgtggaaggtgcggtaatggtccatggtgtcgctctgcagcaccgctgccgtggcgccagtctgctccaggattcccgagcgcacccgcagggccaccgcgtcggtcaccgagtaaccatcgagccagaggcgatacacgtcctcgtcgataagggtcgtgttccccacgaagatgtccagctcactggtcatggcgacgcccggggccgcagcgccccgagcaggagcgagcactgctcgggactggcgcgccgccttcccc

SEQ ID NO: 320406 - DNA, 1322 bp, Homo Sapiens
  misc_feature (914)..(938): n is a, c, g, or t
gttctgtgtgcacatttatttcttacaaagattgtttgtgttccagccacatcttctccaaaggaacccacccaagcccgtgtgcaggcttgctgcagggctgtcttcggcgtttaaagtgctactgaggaatacaatcattgtcacgtaagttcatcaccgcactccagcgtcaggccaaacctttccgtggacctgggaaaacctgccattttcttctctttttacaatgcagtttcaacataacattgggtaggagtaaacaacaaaccacaagccttaaatgatggaatgggtgcgctgctgcccagctgctaactgagagaacgaggcagtgtattgtgtttcgaatgcaaacggtcatggacccaagttaacctgagtttgctctgcaggattccgcgggggccttgccctgtgcaggctgctttggtcttcgtgtctaggccggtttggggcaggtggggagagggcctggcagcagggtttacgcccagccccgaggtctgttttccgtcagacagagatacgtgtcctgccttccaccatccaccaatttgtactctgaagtttccagatcaagagccgtgagattactacccaggaaacacctgccttcggtggccagcagtgtaaattaatctttccctctctgctcaaagcaactttgcaactctcgtctatagaggtggcagtaaaacccaagcaaaaatctaaacgggcaccaggtggccactgagtggcgactggtcgagtagcagttggtcataagggatcagggctggttttgaactcagacttgaaacttgacgaaaataaagtgctctgtcaaaactctcacagcaggttttcagctggaacaaggagatggctactttttgttattgctacaataacacacgcgtgtgtgcaannnnnnnnnnnnnnnnnnnnnnnnnttaaagctccatttcactcctccacaaagaacagaggcacctccttaaacaaagcaaacggggaagggttgcaagctcattaaaaccaacatgagcacccagttccagagatacagacacaattaatcttagtgttcatgaggaattgtttttaaaacacaactgggcaaaactttcatccagacaaaagccaaaaacaaaagccctcaagccacaaaagcttgtagaagaggtgaggcgataaaggtgatttacacatcagtatttttagcatttggtggataatcttaatttatctttaaccttcacaacatttactttgtcataaataccctacaccatgaaaaaacaaacctgcctcgtgccgaattcgccactcaggcc

SEQ ID NO: 320407 - DNA, 1709 bp, Homo Sapiens
  misc_feature (26)..(26): n is a, c, g, or t
  misc_feature (32)..(32): n is a, c, g, or t
  misc_feature (44)..(44): n is a, c, g, or t
  misc_feature (228)..(228): n is a, c, g, or t
aacaccctaaacacaatgctgaactnctgtanttgcctcaaatnaaacatccaactgaaatggaatacatgaaaaagaaaggaaacaaaagaggtgagaaaggcaagagggaacaaaaagctgaaccccccagggccccccatcacagaccccctggagaaaccagtgtgaccagcacatgcttccgtggggaggatgggcaggggagaggggcactgcagaggaggnctgggcccaggggggacccacacgtgttccagcacgtgcacctgcaggtctcccatgcacagctgtgcatgtggtgggcgcagagtgccctgtcttcacttggggcagggagggaaaaggccagtattaaggctagagcaagaggaggaaggaggggaaaggaaacagcttctagactccaggagatgttgaggccgcactgtccctgtctgagaagaaaagattctatgcaggtggaagcagggctgaacatgatcactagtgtatcacggccattggagaaacaaggccggggtgactatgcatcgtgtctttggtgaaataaggcagggggtcagtcagtctgaatattgcatcttttggagaaaaaaggcagccagatggtccacgcagcactggaagaagagggtggtgatgtggtcagtatactgtgtccctaagaaatgtatgtactgtgaaataaggcagcaggcaggatgacttagagaactaaggttgtgggtggtctgttcattgtgtctataagaaaaaaggcagcaggatgacttgggaatcatgtccattggagaaataaggctgcacagtggtctgtgtatcgcatcctttggagaaggagcccacctgtcagagcaggatgcatctgttgggggcagggctcacagtgcagccccattgcagccagagggtaggagctgtagggaggggtagcagctccctggtcctcatggtcaggctatttcttgtccatcatcttctttgctgtcagagtgtttcagaggctgcagggctgtcttggagccttctccctccccatcctggtcctcagctcctgcattctcctcctcacagctctgtttgatctttctccagcacacgaaagccagggccaccagcagtgcaatgagacagacagacagccccacggtcacccacagggcctctggggggaatgtcataggctgccctgtgatggtgacagagccgtgcgcatcctgctgcagcacggggttgcgcaccaggcagctgtaggtgccattcgcacccagcaccacccgcaggacgctgtgcacatcaaacaagccctgctcgttggccatctgcgacgtggtcacgttgccagtcaggggcacaccctgcccatcctgccagaacacctcagcctcagggtagccccggtagctggagcacgtgatggtcaccgtgtccgctggccgcaggtccttgttgggctccagggtcatgctgggcttcgagtagggagcggccacctgcaggctgacggcagcgctgccgaaatcccggatgctcacgaagcaggtgaagctgccctcgtccgccacacgcacgcgctgcagcctcagggatgcattgccttgtgccagcaggtccgggaagagggccgtgcggttggcataggcgctgccctggtcccggccttcggtgaaactgtgcaccagctgtttggtgtctgtcagctgcca

SEQ ID NO: 320408 - DNA, 1959 bp, Homo Sapiens
ctttgtcctgaccatttattggggactttttgctcagcactgtaggaggaaagaaggaaggagggatggaagcctcttcctctgcttctcctgtccctagaaccgtaaagcccagacgtcctgcttcccactgggaccctcaatgataacagggtcagtgactgactctgaggcagcaaggacagaggagaggtggaccccgtggtccaggggcccgggcgtggagctgacaggaagaacacagatgtcaggacgggctcaggaacacaggtcccaggtgtccggggtctcctgaactccaggaagcagtgacacccccgagggctgctgtgggtgggttcttagcttacagcaggctggccaggcagcccaggcttccggggctggttggggccgatgtactggagaggcacgtgggtaggggctgtgatccgatcagtgccgaggtaggactggagggcagggggcacgagcactgagccgtccttctgctggttactctccaggagcgcgatgagaaggcgggggacagcacaggcggtggcgttcaccgtgtgggcaaactgcagctccccagcctcggtctggaacatgatgtggaggcggcggctctggaagtctgtgcagttggaagcactggtgacctctccaaagcggcctcggcctggcatccaggcctcaatgtcaaacttgcggtaggcggggaggcccagttcttgggtgggcatatccaggacccggaagtgcaagcccagctctgtcaagatctccatctgaagggacaggaactcctccagcagctgtgagctctgctccagcccagggcctgtcaccccaaacatctccaccttggtgaagtggtgtactcgatacagcccccggggttcctgtcccgtgtttgtctctgcccggtagcaggtgctggagcaaaccatcctgactggcaggtccctgaaggccacggtgtggtccatgaagtagcctgcaagccccacctccgctgttccagccaggttgagatctttgaagcgggcagggtcgatgttgtaaatttgggatgggttggcatttggtgtcatcccacagccttcaaacactgctccgcggagaaggtctggcccccgtcatgggggtgaagcccccggcgggagaaagcttgttgaatgtgaagttgaccaggcccgtgctgcaggagggctccagccccggcgccaggtaataggaccggtggccagacacgtgggacaggcgcttctgacggatgatgtcgagtttctcgccaatttccaggtggccccgaggttggaaggagaaaactggcttgtctccgaccatgtggagcactcgagcctggctctcatccccgacgggcacgtctgggtgggtctggttgggcagcttcagcgcctgcaggtagaactgctcctcaagctgggcctccctggggtacaggtgaacaagctccttccggatctcccggccacgtgcccgcagaccctggtacttggggtcctgctgcacttcaccactgtcctggtttgccagcagggcccgcactgcctcagtcacagctgccttctcttcctccaggctccggatctgctcctgcagctgcctcagctcctgccatgtcgagatgatcgcgggcaggtccgccgagcgcagctcccccttgcggagctccagggcgtgtgcggcctcttctgggcatgcgcagaaccgctctatgtccagctgagggagtgcgctgtagccctcgcgcgcatactcgtacaggaggttccggtttcgtttctctgtagtgaaacttctccttggactatcgttggagatgcagcctccccggggccggaacccccgacgagtcagcaaaggccacaagcgccgcgccatggacgcagccatcttggaccggggcgacgcgtgggttcgacgatatcccgtaattccggccggtac

SEQ ID NO: 320409 - DNA, 336 bp, Homo Sapiens
  misc_feature (14)..(14): n is a, c, g, or t
  misc_feature (23)..(23): n is a, c, g, or t
  misc_feature (51)..(51): n is a, c, g, or t
  misc_feature (56)..(56): n is a, c, g, or t
  misc_feature (90)..(90): n is a, c, g, or t
caaaaaagaaaggnactggaccnaagtttcccctgctgtgctggtggcccnaggcnagaacctgtgggaaggcaggcagggaatagcganagtgtgggacctgcccccagcttctgccacgctttatgcccttgcctctctggacgctctgcaccaacccccaggctactgagccaccttccctcctcatgccttccctgagctttggtgcatctcatctggactatgggttgtactgtgaccatcccaacacctcaccctctgtctacaaggaaatgggaggtggagcctcctggctgagaaattgttttgcaaatggatctatttcaaaccatg

SEQ ID NO: 320410 - DNA, 1219 bp, Homo Sapiens
  misc_feature (1157)..(1157): n is a, c, g, or t
gggagaccgacttggacggagccgagctgaggctcggcttcctgctgatggtcagggttttggcaactccccggtgtgagaggggtagggagtgctcccggcggcgacggggccgagttcaccagccgccggggcagtagtcgaaggcccggcgcggcatgtcctgggtgccgcggtgcgggcagtgaacgcgcgccgggcgggatgggtcggcgccgggcgccagagctgtaccgggctccgttcccgttgtacgcgcttcaggtcgaccccagcactgggctgctcatcgctgcgggcggaggaggcgccgccaagacaggcataaagaatggcgtgcactttctgcagctagagctgattaatgggcgcttgagtgcctccttgctgcactcccatgacacagagacacgggccaccatgaacttggcactggctggtgacatccttgctgcagggcaggatgcccactgtcagctcctgcgcttccaggcacatcaacagcagggcaacaaggcagagaaggccggttccaaggagcaggggcctctaccaaggaagggagcatcccccgcagagaagcaatgtggaggggaaaccccgcacgaggggcttgaactcagggtagataatttgcaggcggtgcagacagactttagctccgatccactgcagaaagttgtgtgcttcaaccacgataataccctgcttgccactggaggaacagatggctacgtccgtgtctggaaggtgcccagcctggagaaggttctggagttcaaagcccacgaaggggagattgaagacctggctttagggcctgatggcaagttggtaaccgtgggccgggaccttaaggcctctgtgtggcagaaggatcagctggtgacacagctgcactggcaagaaaatggacccaccttttccagcacaccttaccgctaccaggcctgcaggtttgggcaggttccagaccagcctgctggcctgcgactcttcacagtgcaaattccccacaagcgcctgcgccagccccctccctgctacctcacagcctgggatggctccaacttcttgccccttcggaccaagtcctgtggccatgaagtcgtctcctgcctcgatgtcaagtgaatccggcaccttcctaggcctgngcacagtcactggctctgttgccatctacatagctttctctctccagtgcctctactacgtg

SEQ ID NO: 320411 - DNA, 1371 bp, Homo Sapiens
ggggtctcagttcactctttccttgtttattaaatatcaacttttcctgcctaatgggctgaggttcattttcccattcctccaaggtaagggtagactacctaggaacttattgcatctttaggccagctggcttagtgctacccatctgaacccccagattactacccaagtcttccttttgccccttcctgccctaacagcaagtaccaggccagtcccttccccagcaaatgccaggggcttcatgtgaagaggaactggccacaaggctgaggggaggaggagaaactgtttctgcaggaaggacagcagtgcctccaggctcttgggcatcttcacatgtttctagataaaggacaagctcaactctggagcctctggtaggcagaagaaaggaggcagggagtatggcctgggcttcagataccgctgttctggatggatccacagatgacgaaggcaaggttcctgggacctggagtcacacagggccatagccaagccttttcactagaagggcaggcagtgcccattcatcttgtcagaggcaacctcagctgttggacccgaatggagtgagcaaagggagtccaggcctccactctgctctagagatggcagtgtccaggctcctgattcccaggaagcagggaagctaaaggaaacctggaaaggcactctggagcagcaggatggtcacaataataagcccgacacacagcaggagcaggagccacacaggaacactccgccgtgagggcaacagatgcagctggcaacgactgtccacagccacagagaacagggcagtttcatgggacccaaggagctctggaccacgacccttctcaggtagaaaggccacatccgtcaccacaatgccatgggcctccctcacgtagtagaggcactggagagagaaagctatgtagatggcaacagagccagtgactgtgcccaggcctaggaaggtgccggattcactgacatcgaggcaggagacgacttcatggccacaggacttggtccgaaggggcaagaagttggagccatcccaggctgtgaggtagcagggagggggctggcgcaggcgcttgtggggaatttgcactgtgaagagtcgcaggccagcaggctggtctggaacctgcccaaacctgcaggcctggtagcggtaaggtgtgctggaaaaggtgggtccattttcttgccagtgcagctgtgtcaccagctgatccttctgccacacagaggccttaaggtcccggcccacggttaccaacttgccatcaggccctaaagccaggtcttccctcgtgccgaattcgccacccagcctcgctaccttaaaccgtaggagtactggcc

SEQ ID NO: 320412 - DNA, 437 bp, Homo Sapiens
tttttctggcagaaggcggggttctcctctgtacgctgcggagtctctgcggggtgtagaccggaatcctgctgacgggcagagtggatcagggagggagggtcgagacacggtggctgcatgtctgagacaatgctgctccgatgtagtagctctcttgcctggatgtggccattcattcctggagtgctgctgatgagcgatggcccatctgggggtctctggaagtcggtgcccaggcctgaatgatagccccccttgcgcttccctgtgctgcggccggccttctcagaacgaagggcgtccttccaccccgcggcgcaggtgaccgctgccatggcttttccccatcggccggacgcccctgagctgcctgacttctccatgctgaagaggctggctcgagaccagctcatctatctgctggagcagcttcc

SEQ ID NO: 320413 - DNA, 448 bp, Homo Sapiens
tggatgtgcatgtccgagggcaggttcagcttcactgaatggccattgttggtcaggagaaactgcttgttggcagacagattgtagcattggaactcgaggggcgtgtggctggcgtcatactggaggatgtcactgtgcagctctatgggggactgcagcaggcccccacacgacgggtactttttggaccagctattctccccatcaggaccaaaataagtccacttggaaccgttcactggggccgggctggaaggctgttcctttaagatcaccagcaggagcacggccgccgcgtgcagtctgcgccggggcatcttcgcgggctcctgcggggcgggcgcgggctgtgccgggggctcccggtggccgctcgctctccagctgcacaccgggaccgcgtgcgcgcagcctgggtgccgtggcgagtacgtccgcccttcgc

SEQ ID NO: 320414 - DNA, 464 bp, Homo Sapiens
  misc_feature (31)..(31): n is a, c, g, or t
tatccaggtaaaaaagcttattttgggggtnaagtgggagtagggggatattcagaaaccttgaaaacgagaatccctagaaacaggtgtagatctctccagcctggactgaacgtggctagaagtcagaaactacttctatcccagaatagagaataagaaaaatgcgcccagagtaaagcaatgctaacacaggactgctaaggcaagcaaccacagccatggctggctaataactgttcgtgactatgatgagtcatgccagccgtttgatcatggaccaacgcccatagcagtgttcccacttaaaaactggcacttagctggtttaagccaactccactccacattatctatgaatgcatgggaaagagattcccaaatggtctgtctgctgaacataattgctgggctcattactagccttcaataataacaacatgatgatactcttactaatgatg

SEQ ID NO: 320415 - DNA, 506 bp, Homo Sapiens
gtacaggatggctgtgactttgtctgccgttctaaacctcgaaatgtgcctgcagcatatcgtggtgtgggggatgaccagctgggggaggagtcagaagaaagggatgaccatttattaccaatgtagattgcactttatatgtccagcctcttcctcagtcccccaaaccaaagctacacagccagatttctcaagcagtctcaactccagtccctcatctcacccttactattgctcttgctttccagtttgcttttgatttgcatcttctcactagtaaaactgccttccctttgttccttattttctgttttttctctagagaggtacagttgtaagtcagagttaatataatagggcctgtgaaaacagaggcttttgcattgtctcttgacatcagaagttacaataggcatatgggccaaatggtgtggcaggctcactggccgtttgttttttaaacacattttcacaagtttttgagacactggatttctttaatt

SEQ ID NO: 320416 - DNA, 781 bp, Homo Sapiens
  misc_feature (639)..(706): n is a, c, g, or t
  misc_feature (712)..(712): n is a, c, g, or t
atgctggagtggccagtagaggtggtggagcagagcagccatcttttaagtggggctgtatcaggctgggtttatttaaaagcaacaaaatgttttggttaagaaaattattttgctttcagtgtaaatcttcgcagtgttctaaacaaagttcagtcttctgctcgcccctttccctcactgatgtctgcacttggttgaggtctcctggagcctcacaggctctgctgttctccacttctcacctgccatccacgccctgcaagctcatgcaaacaccctttcttcctcctgcggcagagttgttcaggttgcctgggcaggggcttaaacagtgccagcccctgccatcccaaagctattgttaagccccccaggcgtcctccacccacgcccactagcctgccatgtccacagttccttgggctgctgaggggctagtgcagtggtcctgacctctcttatcaagagcacacttctttgctggttgctccttttgagcatatgcgtgtgattatttggaacagttagacttgccacgttgggtcagttttagaaattgtttctagctagagggactggtgtccttccaagtctagcatttggggtatggaaaattgttgtggtgtgtggtagggnnnnnnnnnnnnnnnnnnnnnnnnnnnnnnnnnnnnnnnnnnnnnnnnnnnnnnnnnnnnnnnnnnnnctccantggccaagcttgggcctcaacctcatgtcatcccttctaggaaggcgcctgccccatctttgtctgccc

SEQ ID NO: 320417 - DNA, 528 bp, Homo Sapiens
aggggtgacgacctcacccattggtggtttcagctctggctggatcctggctgcatccagcagttcctggactctccggaggatctcgtgctgcaggccagcttctgagacgcccaccttggccaggtccactgggctcatttggctcagcaggtccagtgagaggcggtggtgcgcaaagatgggcaggtagtgctcagccgacagctcctccaggagggccaccagctggcgctccatcccctcttcttgcagcttcaaggacaagggcttctggttcaaaagccgttgatactgaatcagccagtaattttcctgcctggtttcacttttggcttctaactccgtcaggatttcccggagctcttcctctcgctgctgcttctctttgagcagctgctggagcagggagctgagggcccagcgctgctccgagatcatctcctggagtgactctgtgtccagggacttcctctttaactccagctgtgtcagctgcaataactcagtttctattaacttaatctg

SEQ ID NO: 320418 - DNA, 986 bp, Homo Sapiens
  misc_feature (15)..(15): n is a, c, g, or t
  misc_feature (21)..(21): n is a, c, g, or t
  misc_feature (98)..(98): n is a, c, g, or t
  misc_feature (140)..(140): n is a, c, g, or t
  misc_feature (143)..(143): n is a, c, g, or t
aaatgtgacttgaanaggaancggctccccgaggccgccccttcactggtctccaaagtcgaaaagccctggccccagttgtgtctcccgcctccgcnattctgatcagcagctcgcctcatgctagcagggggcacacnaantcctgatactcctcctctccttactggggcagccagcggtacaaaaaactgagggtgtggatagaaaatttcttcctcccaaagtcccattgggtatctgaacattaggaaaaaataaagatgtccaaccagatttccaataagctcattgattaccgagcctccgatgatatagttgaatccaaggataacccagggtaaatagcaggccttaaatcgtgttccaaaccaaaatgatacaatcatgtctctgttcagctgggcccagacataaagtactgacatgatcagaggaatcatcagcaactgcatatccattgctaagccagtaatcacgatgcaaatccagttaaagaggagcatgaataaatagtctgctggcctcccatcaaaagctcctgtttcaagtcgcgtagaatactgatataagaaatataaattgaccaaataaagaaatccagttcctggacccacagggaaataaaaggtggcagtgattggcctccaaatctgaaagcgataaaggaaggcttcgggccagaggaagaggtaggccgggctgatgaggccgagtttgccgaccaagggcacggcgacggtggcggcgaaccaatagcgcgtgatcgccgggatgctcctgaaccagtctccgatgtccgacatcttcgacccacaggtagccaagatgcacaagaccgcccgactccccgtgccgaccccctcacgacgcggccggctccgcgactgttaggtgtctaggtggaagccgccgaagccgcgatgcagaaggcggagacgggcggacgtggcgccaccgaattcggaccagcgaggcagcattct

SEQ ID NO: 320419 - DNA, 962 bp, Homo Sapiens
aaaggaggcctgggtggcgaattcggcacgagggtggacagtcatggcggcccggcgcggggctctcatagtgctggagggcgtggaccgcgccgggaagagcacgcagagccgcaagctggtggaagcgctgtgcgccgcgggccaccgcgccgaactgctccggttcccggaaagatcaactgaaatcggcaaacttctgagttcctacttgcaaaagaaaagtgacgtggaggatcactcggtgcacctgcttttttctgcaaatcgctgggaacaagtgccgttaattaaggaaaagttgagccagggcgtgaccctcgtcgtggacagatacgcattttctggtgtggccttcaccggtgccaaggagaatttttccctagattggtgtaaacagccagacgtgggccttcccaaacccgacctggtcctgttcctccagttacagctggcggatgctgccaagcggggagcgtttggccatgagcgctatgagaacggggctttccaggagcgggcgctccggtgtttccaccagctcatgaaagacacgactttgaactggaagatggtggatgcttccaaaagcatcgaagctgtccatgaggacatccgcgtgctctctgaggacgccatccgcactgccacagagaaggccgctggggggagctatgggaagtgacccaaggttgcccactggagacgccttttccttgcagttcccccgagaggttgggagactcgcggaaggccctgtccccagcggagtccagaccccacaactttaggagctctttcccggcagcaaaagatctgcaggctgcctcttctggccccggagctgggggtgcactggggaacccccgtgggtgggggaccttgggcagtgtgggacatgaagcagaaacgatgggaccaatcttcctgcccttctccccctggcctgaatggcaactcga

SEQ ID NO: 320420 - DNA, 610 bp, Homo Sapiens
gccgccaagcaaggtgaacgggctcggcagggtggagaggaattttcaggtcgttttttactagtgtctggaagacatttaggagaattccaactgattaccatttacagtgatcacaatgaaactgctcagagttatcactgaacttcagtaagaaaatacaacagagtgccatcaggacaggggagagggcaggagactgctccatcgctctgctcatgtccacactgccaaggtccccaccacgggggtccccagtgcaccccagctccggggcagaagaggcagcctgcagatctctgctgccgggaaagagctcctgaagttgtggggtctggactccgctggggacggggccttccgcgagtctcccacctctcgggggactgcagggagaggcgtctccagtgggcagccttgggtcacttccatagctcccccagcggcttctctgtggcagtgcggatggcgtcctcagagagcacgcggatgtcctcatggacagcttcgatgcttttggaagcatccaccatcttccagttcaaagtcgtgtctttcatgagctggtggaaacaccggagcgcccgctcctggaaagccccgttctccc

SEQ ID NO: 320421 - DNA, 507 bp, Homo Sapiens
gagaagccatggtgcgggttgtccagcaccgcgcgggagatgaccggctccagctcctgcaggaggatctcctcgcggtcccgccggctgcgccacgcctccaatgccacctggttgatctgctcgccacccgtgttgctgatgaagatgaagatggctttgcggtaattggtcccgtataccacccaggaggagcccaggaaaggccgcaggacttccatcaggcctgggggcatcttgtccatctcatcgaagaggaagagggagcggccacaggcagtgaggttcccttggacccagctcttcagatccttccggcaagtcgggccggaagtcgcattcgcaaaaggcgcccaaggtgcagcgcagggaagccaggtcccaggcggcggccgcggccgagaccagcccgagcagcccgaggagcgagccccagggccggcagccgcgcgtcgcagccgccatccgggtgaggcccgagctcgttgtggggcagtcaactgcctc

SEQ ID NO: 320422 - DNA, 1974 bp, Homo Sapiens
  misc_feature (52)..(53): n is a, c, g, or t
  misc_feature (58)..(58): n is a, c, g, or t
  misc_feature (63)..(63): n is a, c, g, or t
  misc_feature (71)..(71): n is a, c, g, or t
  misc_feature (1503)..(1612): n is a, c, g, or t
  misc_feature (1621)..(1634): n is a, c, g, or t
  misc_feature (1659)..(1669): n is a, c, g, or t
  misc_feature (1673)..(1838): n is a, c, g, or t
  misc_feature (1854)..(1863): n is a, c, g, or t
tcacttctgtttattgagttacaagttgagatgtgcaggttcggtggcaccnnccccnttccncccccctnggcaaaaatagctcccagcgccgaggaatggggggtaggaagggtctcggataacgggatggggcctcgagggtccctgtgggctcgtgggtcccaggatcaagcacggctgacacggaagacagcggggtggggggcctgccttggccgtggcgttggggggaaggtgagggagagcttctgtacaaggtcatcttccgtgagggtcccggctgcggccccaaaacgccgatgggcctcgcgggacggaagcggagagcggaatgtccgctgggctccctcggatgccacgccccgcccaggcagcctgggggcgtctccctgacctggccccgcccaccggagcgaacggcccgcccaggttgtctgcgctgcagacctggcgcaggctcgggcctcctcctgctgcggctgtgctcaccaagcgatgccccgccggcccagcggctacttcttgtcttctggaggcgccggcagtggctccggtagagccttgggcgagggctcgggctcccagagcaggaattcgtggagcagcgtgttgaccgtctcagggcattccagcatcaccatgtggctgccctcgtcgatgagcttcaggaatgccaggagcaggatctgcagaagacgcagggctcaagggctggagcggctctgggctccggaatcgcccgcagccggtactgcgggacccactgcggatatggctgtcttggctggatccctgttgggccccacgagtaggtcggcagcgttgctgggtggcaggtggctccagccccgggcctggctggggttcccagacgcctggggcctccccaccccgcagcaggcccggggcaaggctcgcgggaatgagtatcagccgagcaacatcaaacgcaagaacaagcacggctgggtccggcgcctgagcacgccggccggcgtgcaggtcatccttcgccgaatgctcaagggccgcaagtcgctgagccattgaggatcgcgacgcagtcggcgggaccctcatggaagcatcgccctcgcctcggaccttgcctggcgctatttttgcagggagctggggagcaggaacgcctcggacctgagtgctctccatattgtggggttgaagtctggatgggagcttgccaagtccctttttaggctttttaattaggaagcatttcgaacctgcgcaacagaccaaagaacagtacaaagaacatccgtgtacccagtaccctgactaccgactacctacaacccgtccctgccccatcctgagttcttttgaagctgatctcaggcatcggattatttcttctgtaaatatttcagaatgtatctctcccagatgagagctcattaaaagataattacaaagcttatcacatccaaaagaattatcaataattttgaaatattattaacggtgtaataaatgttnnnnnnnnnnnnnnnnnnnnnnnnnnnnnnnnnnnnnnnnnnnnnnnnnnnnnnnnnnnnnnnnnnnnnnnnnnnnnnnnnnnnnnnnnnnnnnnnnnnnnnnnnnnnnntttgggggnnnnnnnnnnnnnnaaaaaatttttaaaaactttttttnnnnnnnnnnncccnnnnnnnnnnnnnnnnnnnnnnnnnnnnnnnnnnnnnnnnnnnnnnnnnnnnnnnnnnnnnnnnnnnnnnnnnnnnnnnnnnnnnnnnnnnnnnnnnnnnnnnnnnnnnnnnnnnnnnnnnnnnnnnnnnnnnnnnnnnnnnnnnnnnnnnnnnnnnnnnnnnnnnttcaaatttaaattannnnnnnnnnggccccttttgggaaaaggggtggaattttttaaactttcgccccacggggaaccccccccaaaggggttgagaaacctgaatcccccggggaatcacccccttggcccct

SEQ ID NO: 320423 - DNA, 1647 bp, Homo Sapiens
tttttctctaagatttgcactgtttaatatgaatgtagggttttgacagaaaaatacaatttcaactaaaacaaaattatttgtgttatggaaagtcaataatccaaaatgcagcgacatctgaacagaactccacaagatttctggccatctccatctacttctaggtataacctccaaggtggccttttggggacacttttctcatttctgggttactagcagcaagaactccactggtgacttcttgaaaatctgctctgtggccccctacagttccccacgattgcttgatgctcacctgcttgggcccaccaagtgtgcacccatgggaaacccccgtgtccaaggggcctcctccccgctcccccgcacggagctgacctgtgctcttatccaggaagtccatggactcctcgctcgcactgaagtggctcgacgtggccttcttctcagcatcctgctccacgtcggagcccgtgtgcacagaagagtttgtgctcatgggggagcgcggccatatccgaacaaggaaatccggcggcctgtgcccccactcagcacaggcttgctcatcaggatcttgggggatgccgtcatgtcaaagttgagcttgaccttctcctgcttgtctatcttggcagtgccggcgctggggttggtgggatcgagcagcatttgatactggctgttgggtgtgtagggtgtcctaaatggagagtaattaaaaaccccaaacttcctgcggatgttctccacgtaaacctccatctcttgcatggccctgtggaagatgctcttagtctttttcacagaaaaaaggaatttctttagacatgaggtaggcaattatttattggaaccccaggcccctgtcatgttgtccaaagaatcgggcatcgacctgcccgtctttatcccttagagcttttgcaggccagaatggaaaccccttcagtttggcccagaccaaagggatgtggattgctacaaggctcacaaaaccagttatctcgtttttggcaagcagctagataacattctggacatacttcgatttcattcatctcatgttcacagattttgatgactactttcgctatttgcgtcaatttgtgatttcccccattataaatgatgcagttgtgcaaaatccactttgcatcagccaggaaggcttctgtgcagccatacattttctttttcgcattcttttccaatgtacaaaggtccattggatggaagatgtattccgcatagtcagggtgctgttccaatggaacgggcttctggaatgcatctgtccctggctgtttcattttctgaatggcaaacttgagcaggtaggataactgttcaatggtgagcattgtcatggctttactctgggtctcgatgcattctgctactgtaattttctcacattcaggacaaaaccagtccccctctggttccgatgtcagtctcagacacttagcgtgataaacccggggacagagctcacagcaaaggacttggccttcccggtgacaaacccagcagtagaaatcattccgtccatcctgctccttattgttactgttcagtaagccaggttctttttctttttaatgcctcgtgccgaattcgccacccaggcctcgctac

SEQ ID NO: 320424 - DNA, 374 bp, Homo Sapiens
  misc_feature (20)..(20): n is a, c, g, or t
  misc_feature (152)..(197): n is a, c, g, or t
ctgtctgccattttggggtnagattttcaacatctcgatgtaactaagacacacttcccacaagagccactaggataaccccactgaagcgcttcatggagtaaagtgatgtaagcgaccagcaagcagtccactgctcctatagattgggnnnnnnnnnnnnnnnnnnnnnnnnnnnnnnnnnnnnnnnnnnnnnnagaagctacatttttgtaatctctggagaagagcacgagatcccaaccccctaaagtgtgggacggtggaggaacaatggtgggaatgggaagaagtctccacctaaatgcagcagccgggattgaggctggtttatctttgttcttttgtgatgaggaactaaatttgggagggga

SEQ ID NO: 320425 - DNA, 1078 bp, Homo Sapiens
  misc_feature (73)..(81): n is a, c, g, or t
  misc_feature (261)..(306): n is a, c, g, or t
ttaactcgaacttttcataactcaggggattccctgaaaaattacctgcaggtggaatatttcatggacaaannnnnnnnnctcccctcccaaatttagttcctcatcacaaaagaacaaagataaaccagcctcaatccccggctgctgcatttaggtggagacttcttcccattcccaccattgttcctccaccgtcccacactttagggggttggtatctcgtgctcttctccagagattacaaaaatgtagcttctnnnnnnnnnnnnnnnnnnnnnnnnnnnnnnnnnnnnnnnnnnnnnncccaatctataggagcagtggactgcttgctggtcgcttacatcactttactccataagcgcttcagtggggttatcctagtggctcttgtggaagtgtgtcttagttacatcgagatgttgaaaatctacccaaaatgcagacagatactaaaaacttctgttcagtaagaatcatgtcttactgatctaaccctaaatccaacctcatttatacttttatttttagttcagtttaaaatgttgatacccttccctcccaggctccttaccttggtcttttccctgttcatctcccgaacatgctgtgctccatagctggtaggagagggaaggcaaaatctttcttagttttctttgtcttggccattttgaattcatttagttactgggcataacttactgctttttacaaaagaaacaaacattgtctgtacaggtttcatgctagagctaatgggagatgtggccacactgacttccattttaagctttctaccttcttttcctccgaccgtccccttccctcacatgccatccagtgagaagacctgctcctcagtcttgtaaatgtatcttgagaggtaggagcagagccactatctccattgaagctgaaatggtagacctgtaattgtgggaaaactataaactctcttgttacagccccgccaccccttgctgtgtgtatatatataatactttgtccttcatatgtgaaagatccagtgttggaattctttggtgtaaataaacgtttggttttatttatc

SEQ ID NO: 320426 - DNA, 529 bp, Homo Sapiens
  misc_feature (23)..(23): n is a, c, g, or t
  misc_feature (36)..(36): n is a, c, g, or t
  misc_feature (90)..(90): n is a, c, g, or t
ttgccctgccgtttttggaatcnagtcccccccatnttaataacagctggccaggtgttgcacccagcgcccttggtggaaggctccctnatccctctgtctcccaggacgtcccggggcacgggcagcagggacaggaaggcaggcttggctcatgtgcctggatctcccctagccgctgctggtgctgaggctccgacatgtggtcctggaactcctgctggctggagcagctggccttgcagatgtagcagaagaactggagggcctgcttagagggagtgctggtagccgcaggggtggaggagacggagtcactggggcgggggacaggtgtcaggggtacagtgctaaaggcccggctgtcactgctctgcagaatggtgaccttcagggagcccccggcgccccatacccctggcatctctctcgctctgttttcacattctcccacatctaggccacaggccgactcattctgaatctcttccatgctgacttgggtgcccacaggctctggcaaggtctt

SEQ ID NO: 320427 - DNA, 476 bp, Homo Sapiens
tgggcaccagagatcctgccttttatcaggagccactcctgtgctaacagcgagaacgctttggtgaggacggagccctcacgacctcagcagtgttgcgttggggatcaggtttccgatggtgaacttggggacacgtccacaccacagcacgtgcctattgtgtttctcggtggctggtgtgtttgaggatggcgcgtgcatgcgttttccagctttctttgtggaggaagttacctgtgggtattaacctgtccccagccatcctctcactgagcttgggttgcctgggcctgggtttcctgttgttgctggaacgaatgaccacagacagtggcattagacagcgcaggcagacatgacctcctgggcttctgcgggtgccaacactgccgctccttctggaggctcagggaggctcttgagggcattgggacatcgtgctgccggccgccgggcagagccggtttgtttat

SEQ ID NO: 320428 - DNA, 986 bp, Homo Sapiens
ttatgtacacttgtcaggcagaaaaggtagtgaccggcccggcgtgggcacacagacagcccgctttgttctttcatttcctccagcactttctttccgcctgagtccagcccaaggccttttattttgcgctgtgtaactgctgccagcttctctcttggccctgctcccagatggcggtctcctggcagcctcccctcagtcttcctccacccgctcttccttcccagcctgcctgcatgcatgtgcacccttggtcttcgctccatcgccttgaaagctctgaagaggccctgggttgccgcggcagcagtggtctgtttgatgctgccgtttgccgctgccggcccctcctcagactccgcctttgggagcacacctgctttgccttgctgcctgtgcaaatgttggacaagcagacacactcacactcgtccccagcttagcacagagctggagcgcccatttctggaattttccgtttgggaatctccacttctggggtttacctgttcggcctcctgtctatcagtgaggcatctctgactgtttcttctactgcttttcagttcccttccctgctgttctatttcctttgagtgtaaagactcacaggtgacctgctatcgagatagccagagggtcaggagagaatgggggaggaggcggtcaggctgctgaggaaacaccacaggctgaacgggggaggaatgcacatgccacgctgggtgtcccgggtcgcggggaggcagctcagctcttaggagcaagtgtgggggcttacaagaggggccaggcttcctgggaggggtgactgatgtggcctgaagcaggggtccagggcaggtaaggctgcagccaaggagctccctggcaccgcagggactcgtgggactctggccttagaattgacaaccacaactcacaggcaaggcactgcaacgggtctacagggactgggaaagcaacaggacgggccaaggtga

SEQ ID NO: 320429 - DNA, 898 bp, Homo Sapiens
ttcctcaactttcttgggtttctttcaggatttttcttctcacagctccaagcacgtgtcccgtgcctccccactcctcttaccacccctctctctgacactttttgtgttgggtcctcagccaacactcaaggggaaacctgtagtgacagtgtgccctggtcatccttaaaataacctgcatctcccctgtcctggtgtgggagtaagctgacagtttctctgcaggtcctgtcaactttagcatgctatgtctttaccatttttgctctcttgcagttttttgctttgtcttatgcttctatgggataatgctatataatcattatctttttatctttctgttattattgttttaaaggagagcatcctaagttaataggaaccaaaaaataatgatgggcagaagggggggaatagccacaggggacaaaccttaaggcattataagtgaccttatttctgcttttctgagctaagaatggtgctgatggtaaagtttgagacttttgccacacacaaatttgtgaaaattaaacgagatgtggaaggagaacctcagtgattttattccctagtgaggcctctgagggcctccacactgcctggcagaacataccactgaactagtatgtgctagaggagggcacaaacatccgctccttccctaggcctgctggctctggttttctatgcagatgattcattggattgggggtgagtgttttgtttttctgggggcagtgtgagctttgagggttggaatattgggaggcattccttagtttcctcaactagcctggaaagttaggagtctagggtaattaccccccaatgagtctagcctactattcactgctttgtgtgcatttttttctccctctttaaaaaacccttt

SEQ ID NO: 320430 - DNA, 1151 bp, Homo Sapiens
tttcgggtggagcgggtacttttatgaataccacagggacaaaggaaggctgctcttctcacacactgctgaatctccggatctccgcaaggtcatagccagtcacagcaaaggagttgcctgaggaatcacaaaatcgagcaccacacagctgggtgtcggcgacacactcaccatgacagtgttccacctcaatgtagccactctctgggtttctgctcagcttccagatatgcacaaaggtgtcctcacctgcagagagtagcttgcccacctcagaagccagttccagggcgcagatggcccgggcatgggcattgatctggacatgtagatttcctgtagtggcctcatatagatgcacttgtcctttcccatagcctgctgctatgatcccctgccacagctgcacagaggggcacggaactccaaatcctggaatgcgggtcaatgatgtgaattctggccctgaccgccagacacacagcaagcctgagtcatctgccgtcaccatgtcagccacacaatcctgtccctgggcaggctcggtggcaatgtctgtgattggcatctggtgcccagccagctcctcgctcagtacaatgttgggaccctttgctgggatgtcaaacaccagcacccggcctgaccacgttcccacacagatgaagtggccactggcagcaattccccgggcaaacacagcctgtactggggaggcatctccagagtccagtgcatgccagtagaccatggtgtagccattggactcgtacatctgtattcctcgatgtgaggtgagtaccagcagcactcggaaggggaggacacaccagtggacctgagtgataagtgggggactcactccagcaccctccttagcgtggagctggcgctgggccaagggcacaccctcaggagcagcgctgagaagctgggcgcttggtccatgaaccacgccaaaatacgtgaggttgcgagccggcagctgcagcacactgaggttgttgcacagggcggcggccgagcctcgcaggggaatggagcgctcccagcggaacatcctgcagccccagatcggctcgcctgactcctggttcgtagggtccctccaaatccgccgccaccatagagacgacgcacgtacgcac

SEQ ID NO: 320431 - DNA, 982 bp, Homo Sapiens
  misc_feature (43)..(43): n is a, c, g, or t
tgaagcgtaaagccacttcacagacggtggccacagcggcacntcggccagagccatgcggccatcagagaccctgggcggccgggcagagggcttggttgaggcaggcgtggcagcgagggtgcacaggcagacaggtctgttggccgaagcccaccaagagtccattgatcctcgtgccacagctccctaggcagccactccctccagggcggcgcgggtctccctctggggacttggttgccttcttggtccacctcagcctgttggcgattctgtgcacatgcgtgtccactgcaatgcctgacacagtgccccaggccacagccatagccaggtgtgccatcttgggcccaacacccggcagcgccaccagctcggccacagaggctgggatgtccccaccgtagtgctgctgcaggatggcgctggtctgcttgatgtatttcaccttgctcctccagaaaccgacggggtagatgagcttgcccagcgtggcatcatctgtctgcaggatgctgtccaccgtcaggccccgcgcccgcagtcgctgcatggcgcccgccgtcacctggtctttggtttggctggagagcatcagtgacagcagcacctggtacctgcgtacctttgggggggcactggagtcatagcagtgctcagtccccagatggtccacaggtgcatcctttttgttcctcatggcacggatgttgaccagctgttgctgccagtcctggggctcccagactggcaccttgaggggctcagccccctcacctttctcactgtccgagccctcataggccacacgcagtctctgtgctttccgcggacgcttcacggggctgtggcttttcctcgcttctgctgcagcctctcttctccggagaggcccgggctcctccctacacccccgcggcccagccccgggtcccaggctccggctccgggtcagcatcctcgcgctcaaggcggtcat

SEQ ID NO: 320432 - DNA, 2197 bp, Homo Sapiens
  misc_feature (305)..(339): n is a, c, g, or t
  misc_feature (422)..(714): n is a, c, g, or t
ggggtgcagtgctgggatcgaagggagggcgggctggaaggagaaggcgcggggtacatatgtaggtcagattgcgtaaagacgcgtggccgtcgcataggggggaaaatcggaagccggcggggagggaggtgtgcgggccgaagctcaaatctttggcaaggcgcgggttcaggaggggagtagggatggggaggtgaacggggagaggatcgctggagatgcgtgcgaggacgaggcggatgtggggaaagagtaggggcagtaaggagtcgacgggcccgacatgcgaggcgagaaaggtnnnnnnnnnnnnnnnnnnnnnnnnnnnnnnnnnnnccgaggaagggggccgggtgggcgtcacgaggagttacggtttaggcagggcgggcatggaggcctcggggttgtattgtagnnnnnnnnnnnnnnnnnnnnnnnnnnnnnnnnnnnnnnnnnnnnnnnnnnnnnnnnnnnnnnnnnnnnnnnnnnnnnnnnnnnnnnnnnnnnnnnnnnnnnnnnnnnnnnnnnnnnnnnnnnnnnnnnnnnnnnnnnnnnnnnnnnnnnnnnnnnnnnnnnnnnnnnnnnnnnnnnnnnnnnnnnnnnnnnnnnnnnnnnnnnnnnnnnnnnnnnnnnnnnnnnnnnnnnnnnnnnnnnnnnnnnnnnnnnnnnnnnnnnnnnnnnnnnnnnnnnnnnnnnnnnnnnnnnnnnccaagttttaaaggattaaagccctcaaactctcaggcttaaatcaattcctaatgtgggatatgttctccaagtatgcctaccaaagccatacaagaataaagtgagcagcagcagcagctagggtcaggcagatttctgaagcatgattgttcaaaggcgggctgtgccccatcatcctgagccatcggccttgccaggggcctgtggagccccagagggcaggacgggggctctcacaccatagcctcgggaagtacctgggagcttaccaacccacaactcctaaagtaacatgcaaccagtttctggtctgtggtttgaaaaagttaaacgcaaaggaagctgtagcttttcttggcccaatcactcaatagggcattcaaccctatattactggcataacatgaaaataaaattaccccttaagcactaccacttaactctaaaaagaaaatgcctttcaaaaacaggtatgctcaaataaggtattctgagagttgcacaagaacagtcttggaatgagccagtgcccccggagagtcaacatttgaacaaaatagcacagttcaaacccttcttctgtggtacttatgtggattagtacaattatgacatcactactttcaaaggaatgattaaaactattattaaaaacttttgtcacaaacagaaatgccctgcaaatcatattattgcacacagggttatcagaagctatgcacatcaagaccttgaggcccctagaagacccaaaatagagaccctaaggccatgcccgtggctgctcctgccagcatgcccagtgccaggtcgctgtcgttgtctcgatagcgctctcgaatgatgacttggttagcaggctgctgtccataaagtcctgcatatgggtactggtagggcacggcatacgcctgcccattcgcagcgtagacaacttgagttcctggcgggtacgcaccaccgtatggcccatagccataagcctgctcaggggccggtgcagcataggccgtgtatggtggaggtgaggaaaccacggatgtctcatcggtcatgactgcagagcccacatacgctgtgtttgtcctagaatcttggagtgtaaatttccaggccaagcaatcatctgtgctttctgcacaaagactaattgttttcccatctcgacaaacaatctggagcatgcagtcttttgactttccatccgggggctgagtatcccgacattcctgccccgtgcggatgttgatgcagtccattggcatgtggaccttatcctcgatattctgccgagtctggtcatcataatagatcaggtgaccatccgaccacagatcaaaccagttcttcttccagcgcttcaaaatagtactctgtcgcagcaaccagccactcttcacaaacgccatctcttcacctgcgaaccagcgtggagaacaccaagacgccacggcgattcctcgcctgctcgcctgcaatt

SEQ ID NO: 320433 - DNA, 900 bp, Homo Sapiens
caaaggaaatgattaaaaactattattaaaaaacttttgtcacaaacagaaatgccctgcaaatcatattattgcacacagggttatcagaagctatgcacatcaagaccttgaggcccctagaagacccaaaatagagaccctaaggccatgcccgtggctgctcctgccagcatgcccagtgccaggtcgctgtcgttgtctcgatagcgctctcgaatgatgacttggttagcaggctgctgtccataaagtcctgcatatgggtactggtagggcacggcatacgcctgcccattcgcagcgtagacaacttgagttcctggcgggtacgcaccaccgtatggcccatagccataagcctggaggctcagggttctccctacctcaggggccggtgcagcataggccgtgtatggtggaggtgaggaaaccacggatgtctcatcggtcatgactgcagagcccacatacgctgtgtttgtcctagaatcttggagtgtaaatttccaggccaagcaatcatctgtgctttctgcacaaagactaattgttttcccatctcgacaaacaatctggagcatgcagtcttttgactttccatccgggggctgagtatcccgacattcctgccccgtgcggatgttgatgcagtccattggcatgtggaccttatcctcgatattctgccgagtctggtcatcataatagatcaggtgaccatccgaccacagatcaaaccagttcttcttccagcgcttcaaaatagtactctgtcgcagcaaccagccactcttcacaaacgccatctcttcacctgcgaaccagcgtggagaacaccaagacgccacggcgattcctcctcgtgccgaattcgccacccaggcctcgttgttataa

SEQ ID NO: 320434 - DNA, 542 bp, Homo Sapiens
gggaagctcttgacacagtgctcctcgtcctcccccaagggacagtccagctctccgtcacacagctgcttcctcgggatgaagtggagaggctgcccgcagaggaagtagtatttatccaggatcaccttgatgaggacaaccacaatgatgatactcgccaggctcagtagtgctatgatgatggggatccccacctttctgaaggtctccatggggatacggggtttgcgcaggggtttgacatcgaggctgttcagaggttgatcactgtcaggatcctgtaacatgctggctctgtgatcctcccggtctccctgtagcctggagctgagattgtcaccccaaggcagcaggagggcctccccacacaggtcctggctggccagcaggtcagaagtccctggtcagcactggctggaggaggcccgagtgcagggcaggccttggtccctcacgcccagcatccttgtccgctgagcaagctgctgcctctctctgtgtattccaggagtgattgggggactttgggcagcttgatt

SEQ ID NO: 320435 - DNA, 571 bp, Homo Sapiens
tcggcacagccagaatgtttcttttctcaccaggttactgagatccggctcaaatattttgatactgtacccgttgctgctgccatgtgtgtgcttaaaacagggttcctttttgtagcatcagaatttggaaaccattacttatatcaaattgcacatcctggagatgatgatgaagaacctgagttttcatcagccatgcctctggaagaaggagacacattcttttttcagccaagaccacttaaaaaccttgtgctggttgatgagttggacagcctctctcccattctgttttgccagatagctgatctggccaatgaagatactccacagttgtatgtggcctgtggtaggggaccccgatcatctctgagagtcctaagacatggacttgaggtgtcagaaatggctgtttctgagctacctggtaaccccaacgctgtctggacagtgcgtcgacacattgaaggtggctggtgaaggtgctgatcaccacagatgagtttgatgcctacatcattgtgtctttcgtgaatgccaccctagtgttgtccattggagaaactgt

SEQ ID NO: 320436 - DNA, 1743 bp, Homo Sapiens
  misc_feature (1559)..(1559): n is a, c, g, or t
ttttttcagccaagaccacttaaaaaccttgtgctggttgatgagttggacagcctctctcccattctgttttgccagatagctgatctggccaatgaagatactccacagttgtatgtggcctgtggtaggggaccccgatcatctctgagagtcctaagacatggacttgaggtgtcagaaatggctgtttctgagctacctggtaaccccaacgctgtctggacagtgcgtcgacacattgaagatgagtttgatgcctacatcattgtgtctttcgtgaatgccaccctagtgttgtccattggagaaactgtagaagaagtgactgactctgggttcctggggaccagcccgaccttggtcctgctccttattaggagatgatgccttggtgcaggtctatccagatggcattcggcacatacgagccgacaagagagtcaatgagtggaagacccctggaaagaaaacaattgtgaagtgtgcagtgaaccagcgactagtggtgattgccctgacaggaggagagctggtctatttcgagatggatccttcaggacagctgaatgagtacacagaacggaaggagatgtcagcagatgtggtgtgcatgagtctggccaatgtaccccctggagagcagcggtctcgcttcctggctgtggggcttgtggacaacactgtcagaatcatctccctggatccctcagactgtttgcaacctctaagcatgcaggctctcccagcccagcctgagtccttgtgtatcgtggaaatgggtgggactgagaagcaggatgagctgggtgagaggggctcgattggcttcctatacctgaatattgggctacagaacggtgtgctgctgaggactgtcttggaccctgtcactggggatttgtctgatactcgcactcggtacctggggtcccgtcctgtgaagctcttccgagtccgaatgcaaggccaggaggcagtattggccatgtcaagccgctcatggttgagctattcttaccaatctcgcttccatctcaccccactgtcttacgagacactggaatttgcatcgggttttgcctcggaacagtgtcccgagggcattgtggccatctccaccaacaccctacggattttggcattagagaagctcggtgctgtcttcaatcaagtagccttcccactgcagtacacacccaggaaatttgtcatccaccctgagagtaacaaccttattatcattgaaacggaccacaatgcctacactgaggccacgaaagctcagagaaagcagcagatggcagaggaaatggtggaagcagcaggggaggatgagcgggagctggccgcagagatggcagcagcattcctcaatgaaaacctccctgaatccatctttggagctcccaaggctggcaatgggcagtgggcctctgtgatccgagtgatgaatcccattcaagggaacacactggaccttgtccagctggaacagaatgaggcagcttttagtgtggctgtgtgcaggttttccaacactggtgaagactggtatngtgctggtgggtgtggcccagggacctgatacttaaccccccgatctgtgggaggggggctttcgtctatacttaccagcttgggaacaatggggaaaaactggagtttttgcacagactccctggggaaaaggcccctgccgggtattggccccattccaaggggaagagtggtttaattcgc

SEQ ID NO: 320437 - DNA, 1087 bp, Homo Sapiens
  misc_feature (479)..(479): n is a, c, g, or t
ggggcggttgtgtctgggaaggagagaaaatggcggcggagccgaacaagaccgaaatccagactctttttaagaggcttcgcgcagttccaaccaacaaggcctgtttcgactgcggcgccaagaatccgagttgggccagcatcacgtacggtgttttcttgtgcattgactgttccggggtgcaccgctccctgggcgtccatctgagcttcatcaggtccacagagttggattccaactggaactggttccagctgaggtgtatgcaggtcggcgggaatgccaatgcgacggctttttttcgccaacatggatgcacagccaatgatgccaacaccaaatataatagccgagctgcccagatgtaccgggagaagatcgggcagctggggagtgcggccctggctaggcatggcactgatctttggatagacaacatgagtagtgccgttcctaatcactccccagagaagaangactctgatttcttcacagaacacactcaaccccctgcctgggatgcccagccactgagccttcagggacccagcagccagccccgtctacagagagcagtggcctggcacagccggagcatggccccaacacagacctgcttggcacctcacccaaagcctcactggaactgaaaagctccatcattggcaagaagaagccagcagcagctaagaaagggctgggtgccaagaaaggcctaggggcccagaaggtgagcagccagagcttcagtgagattgagcggcaggctcaggtggcagagaagctccgtgagcagcaggcagccgatgccaagaagcaggcggaggagtccatggtcgcctccatgcgtctggcctaccaggagctccagattgatcgtaagaaagaggaaaagaagctacagaatctggaagggaagaagcgagagcaggcagaaaggttgggcatgggcttggtatcccgaagctctgtctcccactccgtgctgtctgagatgcaggtgattgagcaggaaaccccagtgagtgcaaaatcctctcgctcgcagctggacttgtttgacgatgttggtactttcgcctct

SEQ ID NO: 320438 - DNA, 1985 bp, Homo Sapiens
  misc_feature (1062)..(1078): n is a, c, g, or t
ttttcactcagaccaacagggagccaggccctgcagggtctttattttgacaccactttgtttcaatacaaacagtccagaaagaaagtcaagtccctctgggggaggggcaaggggaagagtggtctgtgttgcttgggagcccaacctacaacccaaaggtgggggctgggctgagactgccggtgcggcagggcgaagatggcaccaagaatgacagtgcttggctcagctgccagagggtgaggcccacagctctcactggcgggtgctgtccaggccaagcccagaatgatgcagaggaaggagctcagccccaggagcctgcctctgcctctcacatcctctgcttccctggccagcatcaagctcacagcatccagagtcgaatcacagcagacaagaccctccatggccaccaacccggggaagaagggataaagaatgtcacagagggtcctgcattccacagcagatggtacagagggaccctgagacaccctgaaacaatcttcccaagtgcttactgtagaaaggggtggtgagacgggagaaccccaggttctccgttctgataccaaatgagaccttttaggtaccaggtaacgtttctagctcttggtaacgcccagacaaaggtccttcccctctcctggcacccagaagacgccacctggtagcagcagcagcagcaagtccgcagcctctttccccatgggacgggtctacagtgaactccttccaggcctccccctggttccagaggatggggacccaaggcctcgaactagaagaaccctagagccagcaaaaaaagccttctaccttccgctttccctacctggggaaagtctggacccagaataagccatcgtggggggaaccccctttcccagtatggcaggataagtgagcagcagctgtgggggcaggacagaaggacaagagtctaacacacggagggtggtgtgagagggaataaagggctcagtccacaggcagaggacaagggctggtactgaccattcccctcacaggagtgagcgcctcaaaggccacccnnnnnnnnnnnnnnnnntacgaagtaacaaatcctccccagcttccacaaggcaaagcatccccagcctgggaactgtggagttcttgttgccgtcaccatcgtaagcctgagtcacagagctcggatcagtaggaaccgtagcgatcctgcaaggaattcatcacaccattggccagcacagccattttcccagccacagacttgacaccctgcttaaactgggcaatgtccgctgtaggcagcacgttccccagagatacacttcctgctccgtgagctccatccatgtccccaaagaggtctgaagagctgatggcactgctgcctgagagctgctgcagccgagacctggcctcatactccgcatccacctcccgcccaaagaacatgtcagatgagatggctttggctcctgcgaatttctgacgcgcctcactagactcgaggcctgagctccggctctccacttccctccggtttgtggctctttctgaaataggccggatgcttgagatggtcacttctggctccttctcctctaccctgtccataccccaggcagcatctgtatcccagcgggagccaaagctttcccctaaggaaaagggattgtccttgtactttgggggtccagaggcgaaagtaccaacatcgtcaaacaagtccagctgcgagcgagaggattttgcactcactggggtttcctgctcaatcacctgcatctcagacagcacggagtgggagacagagcttcgggataccaagcccatgcccaacctttctgcctgctctcgcttcttcccttccagattctgtagcttcttttcctctttcttacgatcaatctggagctcctggtaggccagacgcatggaggcgaccatggaccctcgtgccgaattcgccacccaggcctcgctac

SEQ ID NO: 320439 - DNA, 445 bp, Homo Sapiens
  misc_feature (263)..(279): n is a, c, g, or t
ccctttctacctttccgcttttccccttacctgggggaaaattctggaccccaaggattaagcccatccgttggggaacccccctttccccaattatggcaggataggtgagcaagcaagctgtgggggcaggacagaaggacaaagagtctaacacacggagggtggtgtgagagggaataaagggctcagtccacaggcagaggacaagggctggtactgaccattcccctcacaggagtgagcgcctcaaaggccacccnnnnnnnnnnnnnnnnntacgaagtaacaaatcctccccagcttccacaaggcaaagcatccccagcctgggaactgtggagttcttgttgccgtcaccatcgtaagcctgagtcacagagctcggatcagtaggaaccgtagcgatcctgcaaggaattcatcacaccattggccaagacaa

SEQ ID NO: 320440 - DNA, 997 bp, Homo Sapiens
gcaggttttcaatcatgatctgccaaaaccgatcacccatgttcacctgttcgtagtttatgaacatggctctctcaaaactgttggctgcccacttcaggaggtttgcggactgctctggagtcatgtaaaccagcacacattcagctatcaggagtgttggcaattgtgtattcatgttacatttctttagcttctcttccagttcagacaggtctcggagatctgctccaataacggcatatctctttgaatccagtatgtgtccatttgatactgtgcagctttctcgtgacaatcattggaaagtcaacctcaaaatatttacttgggagaagatcttcatcctttaatctccagaaggtggtatccatgcctgccccaaggttgacaatttgacaatgacattctgtcttccgtagaaatgcctttataagctgactgacaccatggactcgagcaaaatatcctctgttgatttcaggggctttcctctctttagacagtctcacaaagtgctgtatgtaagggtcatgccagtagccaatgcttactgcaaacctcctcccactccgcaaacccaggtgactgcaacaggtttccatgggctgtaggaagaatgtcctcactgttgagcctttcagggtggttcctctctttagagattttccaccacagtgttgttctgtgaggaggtgagtgctgtcgggcgctgcttattggagttctcttgcacaggggaaagccatcttcggcaggtgccgcgcacgccctcgtcgtctgcgtcgcagctcgaggtggaacagcaggaggtgatagaggattccctctgccatagtggccatgggcggtggaggttcctggggagctgtgtccgccagggacatggaagcggggtcgacgggcggcgggggacggcgcgagccacagggagaaagcaacagaagagggtagggccctacctggctcagctggcgcggctcagtgacgccgcccc

SEQ ID NO: 320441 - DNA, 1063 bp, Homo Sapiens
tttcattcccagggaattccaaggtgatttctatccttgctcactttcagcttcgaggtaaacctgttgtacaactccatcatgtcgacggccgatgctgtttccccccccattcgacgggagccgttctttttgtgactctaatgaacttgcaggtttccccttcccgccaggtccacactggcgtcttccgcaggttttcaatcatgatctgccccaaaccgatcagcccatgttcccctgttcgtagtttaggaacatggctctctcaaaactgttggctgcccacttcaggaggtttgcggactgctctggagtcatgtaaaccagccccacattcagctatcaggagtgttggcaattgtgtattcatgttacatttctttagcttctcttccagttcagacaggtctcggagatctgctccaataacggcatatctctttgaatccagtatgtgtccatccatctgaagtgtgtcctctgaatgcagttctagaatggggctggataggggaggcttgcatttgatactgtgcagctttctcgtgacaatcattggaaagtcaacctcaaaatatttacttgggagaagatcttcatcctttaatctccagaaggtggtatccatgcctgccccaaggttgacaatttgacaatgacattctgtcttccgtagaaatgcctttataagctgactgacaccatggactcgagcaaaatatcctctgttgatttcaggggctttcctctctttagacagtctcacaaagtgctgtatgtaagggtcatgccagtagccaatgcttactgcaaacctcttgcacagggaagcatcttcgcaggtgccgcgcacgccctcgtcgtctgcgtcgcagctcgaggtggaacagcaggaggtgatagaggattccctctgcctagtggccatgggcgtggaggttcctgggagctgtgtccgccagggacatggaagcggggtcgacgggcggcgggggacggcgcgagcctcgtgccgaattcgccacccaaaccgggggagggcgcgcatcggggcggagaa

SEQ ID NO: 320442 - DNA, 801 bp, Homo Sapiens
attttttaaccacttgctcagtttggagccactgctcacctcaaacagtacaaagaaagtggttccatattttacaaacagaagagtagcatcagagccctgacctcctgtctttgggtgtaaaatggtgagaggccggtgtccggctccttcccctgtggtttgggctggtgaactgagcccaagtgtattctctggcctgggccccttccagaatcagtgcgagcgtcctgcagaggcatggccttcctgccactgcagagtgggaagcttcctgggggacctcagccagctccggggctctcatcttccactcggatctcagattggttcgttgtggatgctctggctaggctcggcggccttttccaggcttcaggcctgaacaaaacaggctgtttgctgtgaggagctagatgacaccaagacacagacacgtactcttcaccggctccttttgcttctccttcctgcaggacgtgagttatgtctggtcccaaaacccttgagtaaactagctgagccattgcaaatgaaggtacagatggattgaaacataaaattgtagcttttggtgtccttctgaagggtcagaatatgtaattatttgataaccaaggaagtcaagtcagatggctaagtagtaactttccaatatgatttctccgtggtacttcacctgggtgggcacttttgggggggcaatgttaacaactattcacattttacttcattcaagttttcttttcattttcgggcagttttaaaggacacaactgtgggggctttttggagggcgat

SEQ ID NO: 320443 - DNA, 1145 bp, Homo Sapiens
acgccttggaggacttggaacacctgtaacaggacaaggagttctgctcaggcacgtggccacagaaaactacttaggaagcctgtggtgagaacaacaacagtgcctgagaatcccacggctctggggaagtgagccccgaggatgaggctgctcgcctggctgattttcctggctaactggggaggtgccagggctgaaccagggaagttctggcacatcgctgacctgcaccttgaccctgactacaaggtatccaaagaccccttccaggtgtgcccatcagctggatcccagccagtgcccgacgcaggcccctggggtgactacctctgtgattctccctgggccctcatcaactcctccatctatgccatgaaggagattgagccagagccagacttcattctctggactggtgatgacacgcctcatgtgcccgatgagaaactgggagaggcagctgtactggaaattgtggaacgcctgaccaagctcatcagagaggtctttccagatactaaagtctatgctgctttgggaaatcatgattttcaccccaaaaaccagttcccagctggaagtaacaacatctacaatcagatagcagaactatggaaaccctggcttagtaatgagtccatcgctctcttcaaaaaaggtgccttctactgtgagaagctgccgggtcccagcggggctgggcgaattgtggtcctcaacaccaatctgtactataccagcaatgcgctgacagcagacatggcggaccctggccagcagttccagtggctggaagatgtgctgaccgatgcatccaaagctggggacatggtgtacattgtcggccacgtgcccccggggttctttgagaagacgcaaaacaaggcatggttccgggagggcttcaatgaaaaatacctgaaggtggcccggaagcatcatcgcgtcatagcagggcagttcttcgggcaccaccacaccgacagctttcggatgctctatgatgatgcaggtgtccccataagcgccatgttcatcacacctggagtcaccccatggaaaaccacattacctggagtggtcaatggggccaacaatccagccatccgggtgttcgaatatgaccgagccacactgagcct

SEQ ID NO: 320444 - DNA, 1535 bp, Homo Sapiens
  misc_feature (1495)..(1495): n is a, c, g, or t
tttattttaagtttcattttattattgcttgttagttgattaaagtaattcttcttccacttaatttttaaagacagtaattgctacactgaatgaaaccttaatgaagtttcattataagtatctattatcatttgattattttctacatagaagcatgcaaaaagtttaaaattcagtttcatttgacttagccttgactgtaatggaggactctatgaagaggggacacagtgcttatgggctggagtcccagcaactgcttgggtggcagagtcccagtcgttccccagttcaagccgtgggcagataggatggggtactgtccttcagttcttcttacccattcacttgcttgctttattgcctcaaaagcccagggaatattcctggaaatagaagggtcatccattttcatcagtgatttgaacactattccctctttttccaacctggtgcgaataaactgtagtaccagcattgtggcaaattagttccaggagacattctgttccttttacacctagaggattgaatgcctttttgtttaagaaaggctgtgcaaaccatttgtattaagatttaatataagtcccagttctggtgtaagtttccagaagccatcctctgtctgtagactgaggagttctgtccaaggcacagcatcctgccagtgttgtgtgcacactatttcatcctcttcttttacttccagaaagcacgggatactgtcatcttttgtatcacattttatttgtaaaaagcagctgtcttgaagtacttctgatagctcatcactttctgtgtcagaactttgaaaagcaaagacaggacatcgacttccttcgagactgcctactgattcttctagaagacagagatctactggggtagtccgggactgactgcaaagagcctcaggtaaagcagaggccattggcagcctaaggttggcagtcaaagaggctgcggaaggttgaaaatgaaaaggagagtaagcagagggatgataagacccaaaacctctgatgggatcagggtctgtaggaagagagaaatgaagctggggagaatccagctcagggaaggtgccagcagaaggcctggtagtaaagcctccaggatgttgcagtggagcagactgtgcagagcttaatgagctccctgaaaaaacaatgccacaatagggtgcagaaggtgggttctggggaggtcctgtgggacaagacgccgactgtgggatccagtcagcacaagtgccaggcacagggccttggctgaattgagattcatcaaactgtctgggaggagcagctgaaccgaaactagctacctgacgatatgaggcaaaagacaaggaagcaggactgtgagcgcgggcagtcggggtaagataggaaccaacggccggagccaaaataggaaaaaagctagaagtagatgtttcccatggactgactttcttaaatagtggttcagttgctgttggtttacnatgactctgtccaacttaaatccaatagcttttccctcgt

SEQ ID NO: 320445 - DNA, 405 bp, Homo Sapiens
tttaatttgttaaagttttattttagatgcagaggtacacgtacaggtttattacatgggcataccgtgtggtgctgaggtttgggcttctaattgtcttgttgcccaagtagtgaaaatatgtttttcaacccttgccccactccttcccccactacgtaacttcttatgtgataaaatgtgaataacataacttatttttgtttccttaattttgtaggatggcttctggaaacttacaccagaactgggacttatattaaatcttaatacaaatggtttgcacagctttcttaaacaaaaaggcattcaatctctagggtgtaaaaggaagcgaatgtctcctggacctaattggccacaatgctgggtactacagtttattcgcaccaggttggaaaaaga

SEQ ID NO: 320446 - DNA, 401 bp, Homo Sapiens
ccttggtatcatccatatgctgtttggagtcagcctgagtctgttcaaccatatctatttcaagaagcccctgaatatctactttggatttattcctgaaataatcttcatgacctctttgtttggctatttggttatccttattttttacatttggacggcctatgatgctcatacctctgagaatgcaccaagccttctgatccatttcataaacttgttcctcttttcctacccagagtctggttattcaatgttgtattctggacagaaaggaattcagtgtttcctggtagtggttgcactactgtgtgtaccttggatgctgctgtttaaaccattggtccttcgccgtcagtatttgaggagaaagcatttgggaactctcaactttggtggga

SEQ ID NO: 320447 - DNA, 956 bp, Homo Sapiens
  misc_feature (146)..(146): n is a, c, g, or t
gcagaggaagcggtgggccttaacttggaaacaaatttgggccccttcgagtttggccttccagccaccttggggggaccacgggggcggcttttgctggcccagggcctttttctttggaaacaccctttccccacccacactgnccctgggtctgggagcctcccacccctgctgaagtcaattccttaagggagaatctggcggtcgcagccccaacctggggatggacagggagtggggaccccagggccccccaatctgggaagggccccctcccagccattgtgggaacaataaatactgtgtgacggtggcagggagtggggggttcggccactggctggcgggcaagggggagctggccggcctagccgccctgccctgccccgaggccaggcctgggctccccaccctcactcagtgcggaggatgatgtggatgccggaatccgtgaacacgggcccgctcatctcccccgtccgcagcgcaaacgaggcgtcttcaaatggcttctgcatctgacctctgctgaaggcacccaggtctcccctggccttggctgagctgcagtcgctgaactgtgaggccagagactcaaagtcctcctctcccgacttgatcttctggatgtagccgttgatcagctccagggcctcctccttggtccgggtgatcttctcctgccgccaggacgagggccgccgtgactggctgtgcttcaccagcaggtgcgagcagcggaccctggcaggctccccctgcccgtttttgccaccactgctgctgttgccgctgggccgctcccactggctggcgttagtgatgtggttgaagtagtacactcggcctgagctgcggctcatgcgcttctcccagccgggcggcagcttctcctcgtccgccatcttcccggacgcgtgggtcgacgatatcccgggattccggaccggtag

SEQ ID NO: 320448 - DNA, 559 bp, Homo Sapiens
tggcggaggagatgcttcatctggacggcagcagatccgatgagcagcagggagtctccgtcccagacgtcaatctgcagggtctgcacggccaggtagcgggcaaagcagcgccgctcacctggcttcaggaacccagggcccaccatgtacctcagctggaagccaggagacccagcatcaaaggtgccatctctgctcacaggcacgaggatgtgggtcagggcgccagagctgggctggccggcttcatccagctggaccagctgcagtcgtggcgtcgttgcgggtgggaagcggtagaactggaaggtgaaatacacagtctttggccatgatgttcctcggcagtcctgggccactctgctaaaggcaagaaactgtagcaccatctcgttgctttgtagacaatctgattcttccttctgagggttaaacgtcacaggttctgtagcgctgacagcctcggctggctgtttattggcatccagaatctcgggaaagccggaggactgcaggagcaccatggaggctctcgagggctgccctgcagagctcc

SEQ ID NO: 320449 - DNA, 1020 bp, Homo Sapiens
gaataaaggcctgtttcgtttttttaatgggtgagggatccctccaaaaaaaagtcccctgggggaaggttgtcccccctgaggaagaaacccaagggcgtgtccctccggaagtccacccccggattctttccgtgggaaacctggtttgtaaaaggttttctcttcggcaatccgttaatactctggtttaggttgcccagaattggttctgtggtgaggcggaaggagacttccccgaagggggatggctccatcgggagatacttctgcgccgagccggccgcagcggagaaggagccggcggtgcccgcgccccccgacaacggggagggcagcggccgaggtgggcgccgacaatggcgcacatcgcctgcgcttcggggacgccgggctcaacagcgggtcgaaatccagagtccttttcagagtggctccgcacgccatggccgggggcagctgaggcgccgggctcgggtggggtcggggacgggtgacgaaagaagagggtgagggaaggggtgaagagcgggaactcgaggagagcctacccgacgggctcaggagccaagcgggtcgcggagcgccggctgtggaaaggagagccgctgccgccgctgcctccgcggcaggggcagtggccagggacggcccgggtgagagcgggaggggcggtggcgggcagaagcacacgccagtcgcgtcaggggggttcttccgcctcctcaggcgcggctcccccgagagaggctccggccgcccccgccgtccgctcgagctttgcgccgcgcctgaggcgcttctgtgctgaggctagatcctttctgaagtcgaaaacagcaccgtggggtgtgaggctggaacgcggctcctaatacgcccgagtacggtcagtagcttgcgagcggcgatcgatgcagagagattgcgaggtggctgccgcagcaggaacccaagcgaacacgtccaaccgcttcccctccctcgtagaactctcccacccgccgccggccccaatat

SEQ ID NO: 320450 - DNA, 1179 bp, Homo Sapiens
aaagtgttttgaaaagggttctcgggggggaaaaaagacgggggcaatacagaaaaaggttgaaagcattgggagggtcggtcggcgtaagagacccaaaagaggttttgtattttggaacataatacccttcagggaaggaaaaggaggttgtcattcctccaaattttgggaaatgggagaaggaaataggttaaaaataagataaaaggggtcccaggcaccagctggtggaatgggttccaggcctgggggttcacaggaaggcccagtggcacattcagttcccagggttgcagggagcccacccaccgggccccatagttgggttttccttcccttgagggcaggcaccagcttgtaccttggggacacaggagttcgctttcaaagtacttggagcaagttagcaaaggctcactcccccactgtcttcgattattctgtgggacaatgtcttatcaggctctggagcccgaagatataagccaggcatcctgggccctcatgcaccacggtgtcctcgccatacagcctgcaggtggtgtgtgcaaagtcaatcatgcgcacatctacagagctggcgccgatgggtttgtaggcataggccccagcagactcatcagctgattcctctgacaggtcctccaaatcctcagcatctgagtccaggaccacttcgggccgctccttgccatcataaatgaccagcagggagcttgagtagaagcggtaggactcctgtcgctccaacactgccttgagctcagtcagcttcttgagcacagggcccaggagttcacggcgcaggtaccgcccattgtggaagaactggaaaagtgcctccttgaagccctgcaccgatagcttccgtccatggtacttgttcatgaacatgagctgcccactgcctgcttggtacacctgcatgccacacacacgcacaccaatgactgcagatgtgctctgctgacattttcggatctggttggctgccttctcctctgaagcatcatcaccatgttgtaaagagcccatcttgaggtcaaggacacaaggcacctcatagcgggaagtcaggttttccagtaagataaatttgtactggttccgatgctttgcattctccttcattctctgtaactgttgctggtgacatttcatgctccaagggttata

SEQ ID NO: 320451 - DNA, 903 bp, Homo Sapiens
gcccagcaccgagctgctccttttggaaccaaggctcaggggtccgtctccggggttggcttcccactgggggcagcgggatgacacggcgccggctcagggtgtgtctctctttgccttcttcatcgatgtcatctacctcatacttgttggtggcatggctgtaactgaccacctcggccaggatccactgctggtccccatccacgggcttccacccgggcagccactttgtctccaggtctggccacgtagtctcctgaggcaggggatggccccacagaggggtggggggcttgtcaccaggcttcccgatccacaggggcagggtcatggccgactgctgcagcagggtcatcagcacccctctgcgcatggtcttccggggtggctccgagtcattgtagagaccggcaatcttggccgcaatccgcttctcttccaacagagacttgatttccgcgatcttgtccagagctttccgaaggatgttgcactcagcctctgcatcggccttggcggttgtgtagaggccacgcagctttgtccggtaatagggagaaatcttgttctctgtctgcatccgctcatgggtcttctggatgttcactaagttgtgttcgctccgcgaacgctcttcctgggtttgtttgatcagctgatggagctctgtgagaagttctgcaatgcgggaatcggcagacacgagggccattgtctacaggggcaccgagtccgggacaaaacaagctcgtcgggctggaaactgcgacgaggggagcaggcgcgttcctcgaaccctttttcggagtctgcggatgatcacagacctgcgttcgaagattggcggcacgtcgagaaccgcacacgctttttttccttttatgagcgtagtcgcgcccc

SEQ ID NO: 320452 - DNA, 520 bp, Homo Sapiens
ttcgcgggtcccctcctatcccaccggagaacggggtcctcactcccagcttcagccgagccctggcccttcgcgggtcccctcctatcccaccggagaacggggtcctcactcccagcttcagccgagccctggccccgcaactgcctgaaggcacgccccctgcacctggtcacctcaggtcccgcctccagcccagtggccaagatcgcgggtctctacaatgacttggagccaccccggaagaccatgcgcagaggggtggtgatgaccctggtgcagcagtcggccatgcccctgcccctgtggattgggaagcctggtgacaagcccccacccctctgtggggccatccctgcctcaggagactactgtggccagacctggagacaaggcggctgcccgggtgaaggccggggatggggatgagcagtggatcctggccgaggaaacctggagacaaggtggctgcccgggtgaaggccgtggatggggatgagcagtggatcctggccgagga

SEQ ID NO: 320453 - DNA, 686 bp, Homo Sapiens
cttttggggacagatcccgaagttcgagcatccctcggataggccgggtgtcaggcctggtctctcaggcccgtccaggcccatcttgacgattccaagaccacccccttgagcaagaatgccatcccctctgggtcccccatgcctgcccgtcatggacccagagaccacccttgaggagcctgagactgcccgcctccgcttccgagggttctgctaccaggaggtggcaggtccccgagaagccctggcccggctgcgtgagctgtgttgccagtggctgcagcctgaggcacactccaaggagcagatgctggatatgctggtgctggagcagttcctgggcacactgcctcccgagatccaggcctgggtgcgcggtcagcggccaggcagtcctgaggaggccgctgccctagtcgaaggactgcagcatgaccctgggcaactgttgggctggatcacagcccatgtcctgaagcaggaggtgctccctgcagcccagaagacagaggaaccacttgggagcccccacccctcagggacagtggagtcccctggggaaggtccccaggacaccagaatagaggggtctgtccagctcagctgcagtgtgaaggaggagcccaatgtcgatggacaggaagtggcaccctccagccctccacttgcagcacagtcccctg

SEQ ID NO: 320454 - DNA, 768 bp, Homo Sapiens
agctccagttcagagtcccatttcttagtgtgcacagatggcgcaaccatcatagactagattctttgggaggaaagtcaacatttgtcaccattgtgaccactgttacaatgtcctctgtggtaataatatttgttagtctctgcatctgggtaattctttcacctacacatccagctgataacctggcttctgcgtcgtgatcccaacattcttcaatggtttcacagagcattgccattccagcatgtttctgccaataatctcttaaaacaggcctctttttttatgcacaacaacttcctgcatgtcttcaagagatggatgctggccaatttcctcctcaaatggcaacatgtattcatctacaggtccatctgcagcagtacagcgagaagccagttcccataggactaatcccatggcatacatatctatcctcaaaaatgcatccctttggaagtttatagcaccctctaatacctctggagccatgtacctccgggtaccaacctgtccatgggtatcgcctgcagacttgccagcctcaaattttaaggccaacccaaagtcagcaatgcaagctgtcaggttgtttttcaacagcacatttttacttttgatgtccctgtgagatggcaggtttgtggccatcttttaggccaggtatatcctcatgtaaatatgccaatcctctaggcatggtttctgcaatatgacacagttcattgcaagggagcacattagcatgaggaagtcttatagtga

SEQ ID NO: 320455 - DNA, 902 bp, Homo Sapiens
tttgggcgatgatcactttctggtttgggcttcccgtcttggctgcctggggcctcaatttgccgcaagacatctaggccttcggtgacctctccaaaacaccacatgcttgccatccagccagtctgtcttgtcacatgtcaggaagaactgagagccattggtgtttgggccagagttggccatggatagtagaccctggtcccgtatgcttgaggataaagttttcatcatcgaacttcttcccatagatggacttgcccccagtgccattgtggtttgtgaaatcaccgccctggcacatgaactgggggatgatgcggtggaagctgcttcccttaaagccaaagcccttttcatgagtgcacaggcagcggaaattctctgctgtcatgggcacgacatcagaacgcaggagcatctggatgcggccagccggcttgttcccaatcttgatgtccatgtacacctgaggatttgagcgggcctttttagcaatgggctctccctcctgggtctctgctttgggaggctctgacccttcttcctctttattctcttcaagcgtcttcccagaaaacttcttcaaccagtcatcatctgaccaaactggcctggaagagccttccttaattctcattggtttggccaaattgacacgaattgtacgtccaaaaagctcagattcattcatgttgtcgatagctgctgcagcatcctctgccaactcaaattcaacaaaagcaaatcctcggtgcttttctgtttcataatccagaggaatctgaatatctgtgatgtctccaaaaggaatgaacgcagcatgaagaactttgtcgtccacttcctctgccagtccacccacgtacaagacgcgcttggtggtggccatcttgctcccc

SEQ ID NO: 320456 - DNA, 883 bp, Homo Sapiens
attgctcaaaacacccaccatggttttgcccttccaaggcccagtttgttttttgttccccaatttccaggaaaggaaactgaagaaccccattgggtcttttcggcccaggaagttgggccaatgggataggtagggcccttggtcccgttatgcttgagaggataaaagttttccatcattgaacttttcttccccataggatggacttggcccgcagttcccattgtgttttgtgaaatccccgcgcctggccacatgaactgggggatgatgcggtgaaagctgcttcccttcaagccaaagcccttttcatgagtgcacaggcagcggaaattttctgctgtcatgggcacgacatcagaacgcaggagcatctggatgcggccagccggcttgttcccaatcttgatgtccatgtacacctgaggatttgagcgggcctttttagcaatgggctctccctcctgggtctctgctttgggaggctctgacccttcttcctctttattctcttcaagcgtcttcccagaaaacttcttcaaccagtcatcatctgaccaaactggcctggaagagccttccttaattctcattggtttggccaaattgacacgaattgtacgtccaaaaagctcagattcattcatgttgtcgatagctgctgcagcatcctctgccaactcaaattcaacaaaagcaaatcctcggtgcttttctgtttcataatccagaggaatctgaatatctgtgatgtctccaaaaggaatgaacgcagcatgaagaactttgtcgtccacttcctctgccagtccacccacgtacaagacgcgcttggtggtggccatcttgctcgcgcgcttttcccccggaagccagcccc

SEQ ID NO: 320457 - DNA, 510 bp, Homo Sapiens
ccctgggcaaatgaactgggggataatgcggtggaagctgcttcccttgaagccgagtcctttaaatgggtgcacatgtagagaaaattctctgtggtcctgtgcacgacgtcggaacgcaggagggtttggatgcagccagccggcttgttcccaatcttgatgtccatgtacacctgaggatttgactaggccttttttagcagtgggctctccctaggtgcagaagaaattgctagagagctccctgatgccccaagtaggagtgcgagtattctacacacccacccagaacacaactccagtgagtaggctggagcaagtgctgatggggaaggccttgggccctgacagggctgcagaaggcaggagccacggccgtagcacccagctggatgcccagtgacgggagacctcagcactgtctaacctgaggcccacacacaggcatgttatctcatcagactcaccctcagaagcatcagtttccttctcctgccccgcagtccc

SEQ ID NO: 320458 - DNA, 856 bp, Homo Sapiens
atgggggccttttttaccaaaggaacaggccctggctttcccatttccaggtaggtgttggggaaaaggttcccttccttgggcttaggcaataccccctgaggaccttgttcaggtgggctgtgtctctcccctgggatgctgggagcacccaagtgtggccgagctagggctgctgacttcctctgggagcctctgggctgcgagggtctcttacaggaattgaggccctttgctgctccaagaaatgctgaggctgtgggcagaggggtgtacccaaggggactcttgctctgtgtctgactttgggggatccccaggtgggcagggcaggaaggaagcggctcccagcactgcaaaggggcagcagcattacagctcagccttccagacattgtagatccagttgagataggctgagaccttggtgtatactcctggggtgctcgggcccccgcagccatagccccagctaacgatgcccaccacatgccactggtcagattggtacatcaggggcccaccactgtcaccctggcaggtgtccacacccccttccgggatgcctgcacacatcatcttctcggtgacttccccctggtacgcatcgtctgcattgcaccgtgtgctgtcaatgacctggactgacgcctgcagcagtatgtcagacatcttccctccattctgcttcgtaaagccccatccaatgatccagagtggggtggctggagtgagctcctcatcaaagaagggcagacagatgggcctgactgtgcctgagaaagtgagtgggaactgcagcttcatgagggcgatgtcattgtctttggggtacatggggttgaattcaatgatg

SEQ ID NO: 320459 - DNA, 1344 bp, Homo Sapiens
  misc_feature (58)..(58): n is a, c, g, or t
  misc_feature (122)..(122): n is a, c, g, or t
  misc_feature (219)..(219): n is a, c, g, or t
ctgatcccgaagacccccgtgtcggctgcaaggggaccacaccaaccagggggtaccntgtgactagctttttgcatagctgtgagatgcggcactcgatttccccagccaaccacagaaanctaccatgcccagtgtaagccagcttgtcaaaacttaaattaacaccagggattctaagtcagcaacggcctcagactcgagtatgacacgacagtntaaagaactacaagccctcagactctacctagcggcggcagtgcccgcggtctgctatacgatgtactccattcggtttaagctctgggcactttccaagtctctgttgtcctgtttgtttgtccagtttgggtgttttgtcggcgtgccgttggggggcttctcttctctgtctaccagcgtgtacgccggctgcttggcaaaccgggctttctgctggtgtttgtccatgtcgtcctcttctacttcagaattgtgtgtccttattttagacattttggagttcttgttctcataatccttgatggggaccgtgttggccccatgtttctcaatggggtttttgatctggttcagctgctcccgcacgttgttggtggtgttgtcctcagaggctgagtgtgtgtggctgcccggcttccgccgcttccgcaggcaccagtagaaggccgtcaccaagcaacagatccaagccacagttaagacagagctcagcaagggaacaaggaaatctgttctgttcttcagaggccgcctctgaactcttacttctgcaacggcagcaatcagcgagctgtttccatcacgtttactaacaagatcgattattttgtcagtgatttccttgatcgggttcccatcatcccgtatatcttcagcagaaatggccacatgtatttcattgttcgctgaaggggaaggctcgcaagcgatgtagattgaatattcagcggaaacattcttcaaaatattcaaattcctcaattcactgcaaatgtgctccgtagtaagacctggtgacatcatctccttgttaaaggtaaatgtgatgttcgcacagttatcctggtaataggagtcagaggtgcactttgtcttcaccggctggagactggaagaccgacactcgcccacaccagtgcaggggtggacgaagcactggtcgtccaggatggggatgcagctctgcccgctggggcactcgctgtgccctttgtggagcaggcaaggtcgagggccacaccagacctttgagcaggcgatccgtccattcaggcactggcaggtattacagtcatcatcccattggccccatcatcccgggaatccggaccggtccagcct

SEQ ID NO: 320460 - DNA, 1266 bp, Homo Sapiens
ttttctgtatcaagcaaatttatttgctcaaaacatctttaccatttgaaaacacccaacctcctacaacaaccgagaactccagagctggcatctcgcaccctggtggcttgagcgcgtgcacggctgtgaatggagtaaagagccgaggccgggcgggggccgccacgcatcagggcccccgagggagggaagacgaggggtggaaggccgagggcccaggaggaagcagtggctggtgggagacccggaccccaaacccccaacagaggggacccagcgtggtctgggtgaagacccggcaccagctgcccccaggtgacctccctctgggggccttgttccttctgaggctgcatctcgcacaaatccacaggtgaatggggcgggctgggccacaggaagcctcaccccaggacgggagaacgtgggtggaggccacctgccttggggagtccagaggagcagcagccgtgagagctgtgggggccggattctggcagggcaggggcgtttgtcctgcagggatgggggtcgctgtgtgtccgcctctaggggctgtcaggcggtagctactgcaccagccggtaggtgatgtacctgccagccgtctcactgggccggatgatcttcaccacctgcccacgctttatcccaaagtagcgcgccacagggtcccccgcctggatcctgggcagctggttctctcggagcttatatcgggccagcagctctgtcacctcctccttggtcatgacgacgtgctcagggactagctcgtgctccgtgatgttgatgagcagctcctgctgcagaaactgctccaggatgtacttgggggccatgtcgaccagggactgcttggcggagggtgtcatgccctgctgcaccacgatgagagcccgtgtgatgttctcctcctgcatgcgctggcagtacaccttgatggtcttgatgcccaccttgggctcctctggaaagaacacaaacatctggtcggtggggtcatcgttgtgggccaccagcacggtgaggtccgtgcgccgcggccgcccctcactcggcttgtccccaaattgggctttgaactcctccagggtctggtcaagctcgtcctgggtcaccagatagccacggtcgtggcacagctgcatgatggtcttgcggattttccagagccggtacgtctcctcctcgtcgtccatggcagcctccgccgccgccgctgctcgcaccccttctccgtgcgagaacccgcgcggactt

SEQ ID NO: 320461 - DNA, 460 bp, Homo Sapiens
  misc_feature (17)..(17): n is a, c, g, or t
  misc_feature (70)..(129): n is a, c, g, or t
  misc_feature (148)..(167): n is a, c, g, or t
tggtggcaacacacccngtagtcctagctactcaggaggttttaggtgagaggattgccttgagtcccannnnnnnnnnnnnnnnnnnnnnnnnnnnnnnnnnnnnnnnnnnnnnnnnnnnnnnnnnnnaacaagaccctgcctctcnnnnnnnnnnnnnnnnnnnntctgacaaatagggttgttaactgtgagcctgaggaaaagtatagattttagtgtacttaaacaacttgtctgttttctttaaatcttttcccttaggttagataatgctgctcatgattgtgagagcacagaaagttcttttgttttctagaattaagtctgctcacctggtttcattctgcatctgcctttctttagtgcagggtagtgtcagtcccactgtggcccaaagtttgcattctgcgttaaccaagtcacaattaatgaggttttactataggcacaaatgctt

SEQ ID NO: 320462 - DNA, 1389 bp, Homo Sapiens
caattcccatctggactgactgccaaaagacacatggcctccactgttcctgactgaggctggaaagcatgcaggtgcttgaagcttcctcctgacagctgaacaatatgcagagctccttgatttgatgctacaaagagctttgttgaatcttcagaaaacaaaatctgaagggcagagcgaaggaatgctggcattttggaaacccttttgaggcttatgttgtcatgttcataattcagccgatagagaaaaaaccgagaaactgtagaataggctatccaacttccacatggggagatacagctacagataatgttctcaggaccctttgtctttaggtgcagtaaatgatctgcatttttagagagtggaagagtatccccattcttgcctgttgcaactgtggatcccagtcgccaaagttctaagtgatgagcaaactggaagaggagaagctgcctctttttagaacaggagatgagacatcggtggggaaaggtgatttttcggagagcggcatcgtaattctttacttccaccttctccatgagagggacgaaagactaagtgggtgtcagtgcctccagatatcagcgctgttgggctgtgggccacagtgcgcacgtcatgagtgtgatgctggaacggttttgtccgcacccactgcttctcactgctgttagatgtcacagggaccagctgaaaatggaagactgttccctcggctgtgcccaccacgaaactgtcttcttggtcagctacagcaatggactgcacgtcagcattagcgatgagatggctcttcacaagcgtcccagtggctgagtcccagaactgcaccttcccagcagagtccacacttatgatagtgccatcggacaagaaggcgacaccccacacgatgcacttccgcttagacacgcccatatactgcctgtccacaatcatcttatgaacagcgctgcctgatttgacatcaaacacactaatgtagtctatggaaccagctgcaatgtgggtaccagagggatgccagctgagactcaggatgcgacttttctgccgatcaaaatttctttcaaactggattttgtctggggtaatttgaaatagtttcacagatccatcttcacaaccaaccaaaagttgagagccactggggctggcagccatgctccaaataggtcctccaaaggcatccatagcatacttgatgtttaacgcctgtaaatcatactccataatctcgccattgagcccagcactaaagagtcgctgtccttctgcccagcacaaagcttctgtagcccgagactcatgacctgggaaaaatttctcctgaaagtagtttgcctcgtgccgaattcgccacccaggcctcgcttc

SEQ ID NO: 320463 - DNA, 989 bp, Homo Sapiens
  misc_feature (26)..(26): n is a, c, g, or t
aggtcaggtcctcccagatttcagcnccgttgggcttgtggcccccagtgcgcccgtcatgagtgtgatgctgaaccggttttgtccggcaccccctgtttctccattgcgtttgatgtcccaaggaccaggtgaaaatggaagactgttccctcggctgtgccccccacgaaactgttcttcttggtcagctacagcaatggactgcacgtcagcattagcgatgagatggctctcacaagcgtcccagtggctgagtcccagaactgcaccttcccagcagagtccacacttatgatagtgccatcggacaagaaggggacacccccccaggatgcatttccgtttagacaccgcccatattctgcctgtccacaatcatcttatgaacaggcgctgcctgatttgacatcaaacacactaatgtagtctatggacccagctgcaatgtgggtaccagagggatgccagctgagactcaggatgcgacttttctgccgatcaaaatttctttcaaactgggattttgtctggggtaatttgaaatagtttcacagatccatcttcacaaccaaccaaaagttgagagccactggggctggcagccatgctccaaataggtcctccaaaggcatccatagcatacttgatgtttaacgcctgtaaatcatactccataatctcgccattgagcccagcactaaagagtcgctgtccttctgcccagcacaaagcttctgtagcccgagactcatgacctgggaaaaatttctcctgaaagtagtttgctgacaagttataaatttccacagtgccatctgttcgtgaaacagccaatctgtttgactggttattgtaagccacacagcggattcctgatggaacataattaaagaaacgtactcgatggaccttaaattcacccattccagcggccccacgctccccttcccggtgctcgcctctctccgccccggccccacgtgggg

SEQ ID NO: 320464 - DNA, 781 bp, Homo Sapiens
ctcggctgtgccccaccacgaaaactgtcttcttggtcagctacagcaatggactgcacgtcagcattagcgatgagatgctcttccacaagcgtcccagtggctgagtcccagaactgcaccttcccagcagagtccacacttatgatagtgccatcggacaagaaggcgacaccccacacgatgcacttccgcttagacacgcccatatactgcctgtccacaatcatcttatgaacagcgctgcctgatttgacatcaaacacactaatgtagtctatggaaccagctgcaatgtgggtaccagagggatgccagctgagacctcaggatgcgacttttctgccgatcaaaatttctttcaaactggattttgtctggggtaatttgaaatagtttcacagatccatcttcacaaccaaccaaaagttgagagccactggggctggcagccatgctccaaataggtcctccaaaggcatccatagcatacttgatgtttaacgcctgtaaatcatactccataatctcgccattgagcccagcactaaagagtcgctgtccttctgcccagcacaaagcttctgtagcccgagactcatgacctgggaaaaatttctcctgaaagtagtttgctgacaagttataaatttccacagtgccatctgttcgtgaaacagccaatctgtttgactggttattgtaagccacacagcggattccagcggccccacgctccccttcccggtgctcgcctctctccgccccggccccacgtccc

SEQ ID NO: 320465 - DNA, 1508 bp, Homo Sapiens
  misc_feature (126)..(126): n is a, c, g, or t
  misc_feature (233)..(233): n is a, c, g, or t
  misc_feature (284)..(366): n is a, c, g, or t
  misc_feature (519)..(607): n is a, c, g, or t
ttaatgtgttcccgtaggggctgggtgtctcggccaccggcaaattttttttatgttgcgggcgcacgtggggttttttctcccgcgtgttcttttaaccgaaggagagagggttgtgtttttttnttcccccgggcatttcacaaaggaatacgggctccccgcttttttgcgcttttcccaaaaaaagaatttgggggtcttacattgggggctgttgccctaaaagtggnccgagggattggttattttttaaaatcttataaaaaacccccgcaaggggnnnnnnnnnnnnnnnnnnnnnnnnnnnnnnnnnnnnnnnnnnnnnnnnnnnnnnnnnnnnnnnnnnnnnnnnnnnnnnnnnnncgggccccccggaacgttttctaaaatgtgccccccccggatcagctttttctaaggtttttgtccccacccccccgcctttttgaagtggataattccaagccagggctccagggggggaacaaaaaagcttaggtccctagttcgcgacannnnnnnnnnnnnnnnnnnnnnnnnnnnnnnnnnnnnnnnnnnnnnnnnnnnnnnnnnnnnnnnnnnnnnnnnnnnnnnnnnnnnnnnncatctttgccttttaatataagatttggtttcatcatttctgagtgtaacatatttcttctaaaaatagagctctctgcttgtctgaaacttcttagcgttcactgggaggtgaaggggaataaggctgaccgtaattctggggtgacgttgccagtttcatagtcatagataaacttctcaagggctcctggatgctcacagcaaggatgagttcatttcaaatccatggtactgaagaagcatgacaaagcgtttcaaggccccatctgtgcctggtgtggactcctgaacgcattactgaccaaaggcaatcaatcacagctcacagggcaccagacagcagcggcccctttcccaggaggtacaggagacaggatgaccctgcacacatttaccagaagacaacagggtgctctcctgacacgctgcttaagaacgtgtacagacacaagatgtaggaatgcagggccgaagatgttaaactcttgccccgggccaatgcagacctggatttaatatcatggaacttgctgggattttctcacaatacagattaagagtcagaatctcccccgcccccgaggaagagcctggttagctcctgaatccaaagatgcccttgatgtatccagtgaggccactcttggtcttctgttccaacttgtcctcaaggggtgggaaagccacatggttgagggccaggtcaaagaacaaaggcttgcagggaatgggctggaagcctggtgggaagtgcacaaggttggcttgcttggtgacaagggaagggtccaggcagaatgtctcaaaccgttcaaccagaggcttattgtccttgacttgggaggaggaggtctctgtttgatcctcgtgccgaattcgccacccaggcctcgctcctt

SEQ ID NO: 320466 - DNA, 2242 bp, Homo Sapiens
  misc_feature (27)..(27): n is a, c, g, or t
  misc_feature (127)..(127): n is a, c, g, or t
  misc_feature (1568)..(1568): n is a, c, g, or t
  misc_feature (2138)..(2199): n is a, c, g, or t
gggtgggacttcccggaccgccatttnttggcccaaagggcaatccaatccacaggtccacaggggccccagaacagcaggggcccctttttcccaggggggacagggagacaggatgcccttgccnccatttaccagaagacaaccagggtgctctcctgacccgctgtttaagaacgggtacagacccaagatgtaggaatgcagggcggaagatgttaaactcttgccccgggccaatgcagacctggatttaatatcatggaacttgctgggattttctcacaatacagattaagagtcagaatctcccccgccccggaggaagagcctggttagctcttgaatccaaagatgcccttgatgtatccagtgaggccactcttggtcttctgttccaacttgtcctcaaggggtgggaaagccacatggttgagggccaggtcaaagaacaaaggcttgcagggaatgggctggaagcctggtgggaagtgcacaaggttggcttgcttggtgacaagggaagggtccaggcagaatgtctcaaaccgttcaaccagaggcttattgtccttgacttgggaggaggaggtctctgtttgatgagcgtcgtttgcatcaaggatggctgcggcctgcagggagcacttctctgaccgcacttgagtgatgagctcttgcacatcaggcaggtcctttaggctgttcttgaaggcgccagcatcagaatttacttcatttgcatatttcaggactctgtcatacaggacaagggcttcgctccacttcttcaccagcacataggactgagcaatgaaaaaacacctgtaagctttgaacaccagagtcttgaggcctatctctttctggaaggctttgtcttcctctaaaccaggaagctggagcaattccaccagattctgtaagatgatgtcatagagtcggatcaggtcctggggccggggtgagcgcttgctgtcatcctctggctgctgctgcagcagagccctctgcagacctttggccatgttctcattacgcttgattgccgttgatagcttgatgtaagtcaggtagctatgcaagtattgaagattagacaccttccctggctctccttcaaggatataatctctctgtttctgatctggcttgagctcctcccgaaccacctggatggcgtcccgacactcgctgagcattgattcaaacaggcgctccttagtttcttcgctttcagcctggacaatagctgcttcgttatcagccagtcctaataagaaaatgcgcactttgtcaatcttcactggaaccgttctccctctccactccactttactcatggtagctgcctgtttggctcgagtctgagtgatcaaagcctccaatttttcagccaagagaccttcagtgcccccagacctcaatctcatctgcatgagttcattgatggctgactggtccccgaatattatatgcacaatagcggatgttgggtgaaatctcttccacacgttggttatacagcacagcctgctcctctgtgaaagccactggctagcttctcnatagatagttttgcatttgttaaaagcctcaaatggcagctttccattcttgatgttcaaaacgtagcattcctgagaggtaagctgtgtaagcctgagcctctaatttggtcttggcatccacgcgattgctctcacacaagcgttccaattcctctgcatgcttcacggctttgcgtaggcgagataacaagtgaaaccgttttcggggttcagtgttggcttcctgtttcagctgcatggcgtagctccaggctctttcagcatccatcagaaccagaagcaagtatctattatcggtcagaagctcttcagtcactttcttccctgtgaatttgtgtctgttacccatcttgaagttgagtgtttttcgaagacgtctttgtctacgggaacagtagcccctgtacctctgaaaatctccatgccgtaaaccatgctgctgctgggattccttaataatctgaagaatctccaaactcaggctatccccaaattctttgtttgccttcgatccggccgaagggcgttcgttttctttattttcttcccctccggcaccacgtccannnnnnnnnnnnnnnnnnnnnnnnnnnnnnnnnnnnnnnnnnnnnnnnnnnnnnnnnnnnnntgggacctgcttctcagcagccatcttgcccctgcgccgcccc

SEQ ID NO: 320467 - DNA, 950 bp, Homo Sapiens
cctggggggggactcctgaaccccatttcgggcccaaagggcaatcaattcccaggtccccagggcaccagacaagcaggcgccccctttcccaggaggtacagaggctggattgcccctccacacatttaccagaagacaacagggtgctctcctgacacgctgctaaagaacgtgtacagacacaagatgtaggaatgcagggccgaagatgttaaactcttgccccgggccaatgcagacctggatttaatatcatggaacttgctgggattttctcacaatacagattaagagtcagaatctcccccgcccccgaggaagagcctggttagctcctgaatccaaagatgcccttgatgtatccagtgaggccactcttggtcttctgttccaacttgtcctcaaggggtgggaaagccacatggttgagggccaggtcaaagaacaaaggcttgcagggaatgggctggaagcctggtgggaagtgcacaaggttggcttgcttggtgacaagggaagggtccaggcagaatgtctcaaaccgttcaaccagaggcttattgtccttgacttgggaggaggaggtctctgtttgatgagcgtcgtttgcatcaaggatggctgcggcctgcagggagcacttctctgaccgcacttgagtgatgagctcttgcacatcaggcaggtcctttaggctgttcttgaaggcgccagcatcagaatttacttcatttgcatatttcaggactctgtcatacaggacaagggcttcgctccacttcttcaccagcacataggactgagcaatgaaaaaacacctgtaagctttgaacaccagagtcttgaggcctatctctttctggaaggctttgtcttcctctaaaccaggaagctggagcaattccaccagattctgtaagatgatcctcgtgccgaattcgccaccc

SEQ ID NO: 320468 - DNA, 683 bp, Homo Sapiens
atgggccggtgaagggaaaggaaatagctctacgagcggcatcctgcctgcgttagcggcggtggaggaggaggcagagaggagtggagggcggagtagacggaggaggctgctgcagagaagaaagtgtcagagccgctccctggactgtcggaagcggagttgtttgtaaaggcaaatgcagacgcctcctcctcctgtcacttcgggacaagttaacaatcttcagattcgttattaaagcctcgtgtaccctatgtgatctatcaggttcggctttagagtgtggtgaagggtacttttcatggtgcatggaaggaaagccaatgcgcaggtgtaccaacattcgaccaggagagactggaatggatgtaacaagccgctgcacccttggagaccccaacaaactgccagaaggggttccccaacctgcccgcatgccctatatctcagacaagcaccctcgacaaaccttggaagtgattaaccttctgagaaagcaccgggagctatgtgatgtggtgctagttgtgggcgccaagaagatatatgcccatcgagtcattttgtcagcctgtagtccctacttccgagctatgtttacaggagaattggcagagagccgtcagacagaagtagtgatccgagacattgacgagagggctatggaattactgattgac

SEQ ID NO: 320469 - DNA, 869 bp, Homo Sapiens
aaacaaccggggtttttgggggcgaccagggccggggtgtccatgggtccccagagaatgggatggaggacacgatcgggatgcccacagctgcgggggagaaggccccaggagccctgcacagttgccttggtcaagaggctcatgaatcaggttgggccacttttcagaggcctcgaaggctgtgggaagcacctcccctgggttcagcactgtataaatttcatgcatgttcatgaccgaggaagatgggcggatggtgcccaggcggtagcgaatgccctcatccagggtcatgccccagaaggcgctgtggttcccagcctgccagccatagttgccctggttgatggctttgatcatgtctggatccaccaggcatggttcttggtcacactgccactgcctgttctcctggcaggtgcaacggttacagttgtcccagtacgttcccaagactggatagatacgacctccatgcatacatccttggatcgggggaaaagggggtggcacgccgaggcagaagtcccagaagtcagggcagcagtcggagaccgtgcggttgcagaagaggtcacagtaacagatggcgcccaggtagggcagggcacagtcgtcggcacggccgcggcagcacaggtcctgctcctggcagtaccggcctcccgcgtcccggatgccccgcaggtgcagacccggtgctagctcccggcgcccacgaccctgctgggcacccagagccaagtggccagccagcggcagcaacagcagtagccccagtggacatcgccacatggtggctcctgggccctggtgaaggtgtgggctggggcccaggctggcccgcgcgcctccgcctcctggct

SEQ ID NO: 320470 - DNA, 1189 bp, Homo Sapiens
  misc_feature (1087)..(1087): n is a, c, g, or t
caggaaccgtttatggccccacccgccccactcagagctgctgagcaatctgctctatcctcttcagcgtctcctctgattctagctgctccaggctgagcagggacaggcccagctgatcctcccggtggaagggctgtgccttctggccgcaggaagtacgttggccacctggacaccctcgtccacggtcaggttgaggtttggcatctgtgaggtgctcctgggatccaagcggggcagcttcccccgcttgtccccacgggcaaaccgcttgtcggcaaagaccatgaggccgtagtccgtcttgcccctgatggcccgacccacacactgggccgcgtggcgcatggcatcgaaggtaagaaagtcattctcacgaatctggaactggtcccgcaggtattccagccgcgccttgagaatgcggctctgtgtgtagacgtaggggacgccaaacatgatgacggcccgcccgtagtggtgcacaaagtcgattccctcggacactttgccccgggccactgacagcaggatggccccgcggccattctcgcaggcctcctggtacttctccagggcgacactggtttcggcaccatcctgggtctcaataaagagcagcttgttcctctggatgttctcaaggatcccctgctcataccaggaggccacggtgctctccatgtactggtagctggtgaagaaggccacgatgccatcagggaccacagcggacatctccagcaggaggttcccatagttccggatcacagcaatatcctcccgggtctcaaatttggagctgatggccacctggtcattgccacggccgatgatcatagggcagaggcagacccgtgccagcgtcatggtgaaggttgccatggtgacggggtggaagtccaggatcttggggtagatgtccagcggggacagtgtcccagatgtgatgatgacagactggaaacgctcaaatacgggtttgatggccagcgaggcgtccatgcagctgaagtgcaggatggggttggcaatggtcggggttctgtcgtcaaagggctcgatgatgatggtgaacctttgncgtaggtgctgacaagggtggcaaagttagcaaggagggtgagcggggagaagtcagcaaggtcggtgatctccagagtatgcagcagggaccggaggcgtt

SEQ ID NO: 320471 - DNA, 578 bp, Homo Sapiens
gctgagttggcccagaggctggaagatggttttgaacgcggaagtcagagagtgaggccatcagtctatccagctccagagtggctgaggtggcagaagcctttgggaggccaggagacgggctggaagggaggctgggtcttttcttatcttcagactggtcctccttctgctctcctgaagccaccttgctagatgggaactgagacatgatttcatctgtgatgttgaactgagtggcattaagttcctgaagcaaccgatctagctcacagggcccggtacccaagacaccgctggaagaggagaatggaggggccgccggggctgcaggctttggggaccgaggcttgcataccgtgctgtacaggtggtccttgtcccccgaggctcctgaagactccccagaccctgtctgtggctggtggccataggatgggggaggggtgagaggctccgcagggcgctctttgggagcccctgaccttggcatgtgcgaggtggtagtctccaggtcagagagcagggcatccaggtcctccatggcggggcgcgggccggtggcgcggggcgaacag

SEQ ID NO: 320472 - DNA, 482 bp, Homo Sapiens
cggcagctcatcacgccggtgacagccagtggccaggcggtacaggtaggtccgggacgtggctgcgtgacgagcgtggaagtcgctgggcactcggaaggcccgcaggaccttgatggccgggtgccgcaggtgtgtgttgagggcctcggccaggacctcgggcgggaagggcggccggcctgagcggcgctggacgtccaggtgcgccgcgttgctcagggcgtggaccccggcgtccgtgcggctggagatggtgaacctgaccggctccacggaattcagccgctcggcggcctcctccaggtagttctggaccccgacggcgcgctgagtgcccctgacggccgcgaccccgttaaagtcggtgcccacgtactggaagtacacaagatagcgcgcgcgcacggagcctgaggccggcgccgaactcatggcggagcccagccggtggcgtcagaggcggcctccagcgcaggaat

SEQ ID NO: 320473 - DNA, 576 bp, Homo Sapiens
  misc_feature (143)..(170): n is a, c, g, or t
aaccaaatgtccaagttgctgaactgatgatcactggagaaagagaaactatccaccaggacagctgccacctctaaaccaagtagaattctctgtgaaatgggagcgccgtagaattttaagtaatttaattgcaaacctgnnnnnnnnnnnnnnnnnnnnnnnnnnnnaattcttgaggaaaaagctggaaaatagtaatagggctatttaaattttgtaggtacttttggttttcagggcgtgcatttctgtcactatctcactgagtctgatagtgtgttggaaggttggccagttggggacccctggcccactgactcctggggatggggtcctgtgtgtgcccctgctctgcccagttgggctgagtgggtttttttcaccaagcccctgggcagtgagggccattgggtcccttggagctcacctcattgcatcaggaaggacccctccgggagtaacggttgcatttcccagcttccctctcctgaaaaggccccccaaaagtgctggccccaacttttctctattttgggccatctgtggtacccgtcccaagggcacttggtggtg

SEQ ID NO: 320474 - DNA, 1148 bp, Homo Sapiens
caacaagggaaatcattgtgagtggtttgggttcccggggaaaggagccaatttatgaaattaaataaagtccacaaagggagtgagaaattcgggctcaggcaccccaccccggctgggcccagcactgctggagcacagcgcaccaggcacccccactgtctcacccctctcaagagggggcttaaataggccaggccccagcctgtaggccgggggtcccggggcctagggcggacagaagtcggagaagtaggggtgctgcagggcctcttctgctgagatacgctggacagggttacacttcagaaggttctgcagcagatccctccctgtggcattgagtttgggcacgacgttcaccagggatgttgtggccgggtacatcggatagggcttatagtctggcagcttggtcatagagggccactgctcctcggtgggcgtccccagcagtcggaagatcctcttcaactggtcatcgacatcattgccgggaaaaagaggccgcccagcattggccagctctgcaaagatgcagccggctgaccacatgtcgatggacgtggagtacagcttggccccaaagaggacatccggtgggcggtaccacagtgtgaccacctcagctgagtaacagcggacgggaatcccaaaggctcgagccaggccaaaatcagccaatttcagctccccattcctgtttattagcaggttctggggcttcaggtccctgtgtagcacattgcggctatgacagaatcccagcccttttagtagctggaagaggaatgactttacaatctcaggatcgaggtcaccattgcaactgtcaaaatacttcttcaggtcctggtcacagaattcaaaaaccaaagtcagcttcttgtcgctgtgcaggacgtcatgaagcctgacgatgttcttgtgcttcagctccttgagtaggcagatctcccggagggcggaactcggcacaccctcatcatcgtcatccagcctcacccgtttcagagccacgatctcatgagtctcccggtttttggccttgaacacagttccgtaggtgccttccccaatcttttccagtttctcgtatttctgcatcgcggcggccgcggggacccctgcgggccctcggttttaag

SEQ ID NO: 320475 - DNA, 467 bp, Homo Sapiens
  misc_feature (36)..(36): n is a, c, g, or t
  misc_feature (49)..(49): n is a, c, g, or t
  misc_feature (63)..(63): n is a, c, g, or t
  misc_feature (103)..(103): n is a, c, g, or t
  misc_feature (172)..(172): n is a, c, g, or t
aaaacgtggaaataacaacttggcccccaaaaaagnaacatccggtggncgggtaaccaacantgtgaacccacctcaagctgaagtaaacagcgggacgggnaaatccccaaaaggctcgaaccccaggcccaaaatccacccaatttccagctcccccattccctgtttnattagccaggttgctggggcttccaggtccctgtgtagcacattgcggctatgacagaatccccagcccttttagtagctggaagaggaatgactttacaatctcaggatcgaggtcaccattgcaactgtcaaaatacttcttcaggtcctggtcacagaattcaaaaaccaaagtcagcttcttgtcgctgtgcaggacgtcatgaagcctgacgatgttcttgtgcttcagctccttgagtaggcagatctcccggagggcggaactcggcacaccctcatcatcgtcatcc

SEQ ID NO: 320476 - DNA, 529 bp, Homo Sapiens
agttcggcacagaatttttgttaatatcaacagcaaaagcctagtgcattgggagatgtgcaacctccctgaaaatcttttctgtttctggagtacttcaggggtggcctctgcccaggagcctttgccacagtgctcccaccagcccccacctcatccgtctgtttgcagagcctcatctacaggtccccacgctgccttctttactcactctgcgcttggccgttttgttatttggcttagtctacattgggcggaagtctgtgtgcacagagtggggtgttccttcgagccccttccactcagagggccacacccagcgatgccagtgaaggtggcacagcctctcttcagtttctcctgactgtgatctcactgggggtagaattcccctgagagaattccctcactcacggctccctttgccagagtcagttcaatcaggtctgatgtgagcaatttacacacttgtctcagaaagtccctcagggtttgtagaggactgcaggggggcatccgctgcagactc

SEQ ID NO: 320477 - DNA, 962 bp, Homo Sapiens
  misc_feature (387)..(387): n is a, c, g, or t
cccgaaaaagggtgggtgttcattttctccccccatttccatgggggaggtatcccctttccttagggggctccccgtttcagggaaaggaatcccgacctggcgaaaaggcccctttcggttttcgtcttggatcccgctcccggatccctgtccccgttcccggttctcgatcctcgatccccgatccccgatccctgtcccgctctctgtgtctgtttcgatccgggtctcgatcccgctcccggatctcggtttctgtcccgggttcctctccatggctgcggtcccgggctggggtttcggggaggggaggctgaggagtgggcacccactgcgttcttcatagccccagtcaaagcttcgaggggggaccatcaccagccncctgggccctctgcctcttctccatctggtcctagttctcgaagtcgatcactagaagacacaaagctctcatacagagatttcctctggggacgtctggatgactcttgcaggtcatcatcagcagatatgctcctctggaacggctggaaagtggggactggtcccttctcggggtcctttaacttcccctcaagggttcgagaacgcttgaagcctgagttcttggtctcagccttgatggcactgatggctcctgacttcaccagctgctttgcctgctctgttgctgtggctgtgtccatgacaggctgctctgatagtgagcgtttgacaccaccttggctggttgtgctgctgctactttgcttcttcagagccagcaatgcctttttctttttcttgagcttgttgaatttcttctgcagagcctcctcttcctcgctcagtccggggggtatcaccaacatggtggctcccgagggggcggcaaccgggggccccacggtctccggccgcgcccgcgctggccgctgatagcgcctcgtgccgaattcgccacccaggcctcgccc

SEQ ID NO: 320478 - DNA, 781 bp, Homo Sapiens
  misc_feature (63)..(63): n is a, c, g, or t
  misc_feature (565)..(565): n is a, c, g, or t
tcggtgaccagggggccccggggctgttcttccccagcagggactgtccttccctccagggcntctggcaaccccaagccctggctgcaggcagggcccagctcccgggtactcaggttctctgtggcctgggcaggagccccccgttgactggcccagtgaaggcaccccagtggccactactcagacagcagctgcaaagccaacacacaaatgccacaggcagggaagacacccccccgcagacaccaagccttttcctcctgcccaatactgttctctagattcagaaataaaataaaaccgttgggagagcagcagtcccggccagccctcggcagcaccaggaccaaaggatatgtacaaccattaggtgagatagttacattacagtcaaacaccaagaacatttacaaaatcggcagacttgcaattaagataaaaatctgtgaagagtctgtacacttttacagtttttgcactaggtaaataaggctctcggcctgagagctcacccaccctgcaagggcagctggcaccggccacagcgggtagcctccgagcnccgcctgtccaggccccgggagcctccctgtattgctaggggggctctgtccgaggtcactctacgaggcagcggtgggagggggctggggagagaagagcagggctcactgggcaatgggaggatgagactggaggccaggccctgcctgtgtggccaccctggtctcaggcacgaaggcgcatgggtggggacaagacagaagagtgagacagg

SEQ ID NO: 320479 - DNA, 428 bp, Homo Sapiens
aggtcggtgaacagaaagacgtggcgcagcttgcgggccccctccaccagctccaccatgaagctgtctttcagcagctgccggtgctctcctttcttcaccgtcatggactgccgtcggggtgtgatctcctcattgatgctggacaggaagttctgtgagatgcggagggcgtcctgcagcaaggggtggtcagggtggctggcaggagtgtgcttcagcaagtcatggaggaccagcgtgctcctcgtcacacggtccacaggcttgtagagcagagtttccagagagttcttggtcgttggatccttggcatctttgttgcttctggctctcaggttctcggagatttctgcaaactgagcattggcctgacagcacttctcagccatttccatggcaactccgtagttgtccacgaaggcccg

SEQ ID NO: 320480 - DNA, 1044 bp, Homo Sapiens
  misc_feature (78)..(120): n is a, c, g, or t
  misc_feature (124)..(133): n is a, c, g, or t
tttttgcccaagattcatcgtaggtcattcaattaaactaaattaaaattgattttagcagaaagtagaaatgtttcnnnnnnnnnnnnnnnnnnnnnnnnnnnnnnnnnnnnnnnnnnnactnnnnnnnnnntgcatgtcactaaaaaaatttttccagtcttttcccttctacccaggaaaattttacatgatgtcaccaacatgagcccttggtgatcttctgaagtcttccaaagattacacctttgcagacttactggtgatctccttcaactcgtctcttacgcactaagtcattgttttttgttatagcattagctgctctggttcgtggtccctgctgtgtaaactgatatccaaatttaaggatatttgtattttcctcaagcatcttggccatttccaattctacagctgtccccaactgctgcctctgattgtcaatcttgagctctgccagggtttcattatctcttaacgcatcaatcagtgccagaatcccaactcccgtgataaagttggactccacatttaagctcttcaaagttttgttcactttcagcatttctgcaaaagcagtagcaacagggtcattgctccgggtggctgcaagactgaaacatttcacatgtgtgttggtttccaaagcctttgcaaaatcttttagggttggaattgggatattctttatattattcaaattaacttcaacaagatgagcatcgttttctttagttctcttcaaactctcttctacattggttggatttggtggctcatcaaataccggaagaatcttttcacctttgaccacatttgaaaaatgttcttggtcaacaccattactacttcccattatattacagaactttgtattcgttatcaaattgtgcatcccaagaattgctgcgaggtcacacaattctgtatcagaagcacttgtcaaagcttcttctaattctggatcaagagacactttttcttctgtaaaagtctgtacaggtttctgtttggggataaatattttcccttttttttctc

SEQ ID NO: 320481 - DNA, 477 bp, Homo Sapiens
tatgctcccaaagtgcatggtactcagtaggtgccctgatgatttcagtgcccgccctgctgggctaccttcaggaggtttgccgggcacggctgcctgattccgagctgatgcggaggaagtatcatagcgtgaggcaggaggacctgcatagagttcgcctgtctcgtcccgaggccgtggctgaggtgaagagcttcttgatccagctggaggccttcctgagccgcctgtgctgcacatgtgaagccgcctaccgcgtgctgcactgggagaaccccgtcgtgtcctcacagttctatggggctcttctgggcacagtctgcatgctgtatttgctgccattctgctgggttctcacccttttaaacagcacgctctttctggggaatgtggagttcttccgagttgtgtctgagtacagggcatctctgcagcagaggatgaacccaaagcaggaagagcatgcctttgaga

SEQ ID NO: 320482 - DNA, 904 bp, Homo Sapiens
  misc_feature (255)..(255): n is a, c, g, or t
ttttttcaagcaacccccccacaatgggcttcccctctggtgggccaaggaaataacttggagggccaggggttctttcagcctttaaaagccttggggatccttatgcattgtttgtttggggtagaatgggccgtttgaaggggtagcttctcttaaggggtcaaactccaccaaaagttcagaatcatgtccctggatcctgagtccatctcccccagaccagggtgccgctcaggtcaggtgctgtggtanctgcagcagatggtcccttagcgatggagtccaaggacatcatggccaagacccagagttttatatcaactgaggaaagtgaagaccagccagagaggctgcagtttagggaagccagaggctcctcccccaccgcgatgccaggaaggactatccccagggtgacggaaagaaaagcactggactccagcagtatgtccagttgattcaggtgtgctaggttcccagcagaggagggtgagggaggagatccaggggccctggcttagtcatcgtatctggtacacctttctcccccggagaaaattcttgcaaaaaggagaggatcctacacagaccaaaaatgctggtgtcagggcttttacaaagtacctctggtgctgtagaacctgtagcaaggtgctcttggcaggcacccggtatagttctgccctgtcctcatcctcaaagtagacctccaaattatcagggcaatatttttgctctaggtcccaagagggtgtttcaccaaacatcaccattagatgatcaataaacctggagtcctcatgaaaagcagagatgaagtccgactgggcatactctgggtacagaaagagcacaggccagctcagcctgccctggccatctagactcagcctggctccat

SEQ ID NO: 320483 - DNA, 474 bp, Homo Sapiens
gatgctgtttggcgactcgtcgccattcccggagcaggtcggcctcggcccaggggcgagtatccgttgctgtgtcggagacactagtccccgacaccgagacagccagccctctcccctgcctcgcggcgggagagcgtgtccggccggccggccggcggggctcgcgcaacctccctcgcctccccttcccccgcagcctccgccccgccaggcccggcccggactcccgagccccggcctcctcgtcctcggtcgccgctgccgccgggcttaacagccccgtccgccgcttctcttcctagtttgagaagccaaggaaggaaacagggaaaaatgtcgccatgaaggccgagaaccgctgccgccgccgacccccgccggccctgaacgccatgagcctgggtccccgccgcgcccgctccgctccgactgccgtctccgccgaggcccccgttgatgccgctgagctcc

SEQ ID NO: 320484 - DNA, 1630 bp, Homo Sapiens
  misc_feature (94)..(139): n is a, c, g, or t
  misc_feature (237)..(237): n is a, c, g, or t
gagagccccccccgcgggagagagagggtttaaacccttccttttttacaaagttttctcctttttcaagggggttttcaggtttcccagaagnnnnnnnnnnnnnnnnnnnnnnnnnnnnnnnnnnnnnnnnnnnnnntttaatttttcacaacttggggttgtgggggcccatttttcagtgcaaccgttgggaccaaagtcaagagggtgcctccctgaggcagacccactgcntacgccacactgacggtccagaggccccctcctgaggggcggcccagcaagggggcactgtggcagctcccactgtgcctgtcccagactgggtcagcaggtctctctggacagcacactgcaccaagtaggcccaccaaaaacgcatcaggtgtggccatggcccacagtaccttcttcattccctgcctctaacatgtgcggtctgaatgaattttgtcactcttctgccatttataaaggagaagacagtgatccaaagctatgcatgtttctgaagccctcaaggaagctcggtgcaggccatcacttcttttggcagaaggcgggctgtggtctctatgtacacacgcgagcccgccagtgacgtgcggcagtgcgtggcgtccaggctgggacaggggcctttcaagtctccccagggaccggtgttttctacaacagacaggtgctcccagaccgttggggtacaggccaggccgtctacaccacagtattgagggagctgcggctgtggcggccaccccctggcagtgcctctgcagctggggtgctcccgctctgggcagggtcagggggcacgagcagggcgctgctgctgtcggcagagtcttccaggtctgccagagaggcccccgcagtgggcagaggctgctccaggcgccggagtaatgcaccttcactccccaccatccccaggggctggcaggctgacctccacaggctcaaaagcatcatcgtctgcagggtcatagaacacactgtccgggtggatggaggcctcgtagggcggcggagggtcgtcgggctggctgatgtccgggtacttgtatgccgtgtagggaggtggagggtcgtggaaatggaaagtcccaccctctccgtcgtcagaaagatgcagcggcgtgaggcccgtgccaaacccgtctgggccgtaatcaaagccagggatcctgcggccgaggttgaagtggtgcaagtttgctccaatcagggactcgatgcgctcccggcgccgctggcgcagccggtggaccatgaagagcagcagtgacaggatgaggaaggaggagatgcagctgacgaccaggcgcatcccgctggccatggagtcaaacagactgttgccatctgggtccagacacatgaacttgcagcactctttggggtccttgcggtactgttggcagccctggggcctctcacagagagcagccacacacatctcaggctcccctccatggcaggtgcagctcaggcatgggtcgtcccccttaggggtgaagtagaacccttcatccaccacgttgtccttgatgtcaacacatgtttgacttcttttacacagaaatgaagacttctcgtagcagctctcggcgtgccagctgtggag

SEQ ID NO: 320485 - DNA, 1082 bp, Homo Sapiens
  misc_feature (498)..(498): n is a, c, g, or t
  misc_feature (1045)..(1045): n is a, c, g, or t
tgtcagtaattactttattgagcatctgcaaggtgcacatcattgtacatagcttgaaaatgtcaaattgagttttgtcacaccctctgtaaaggcttccctaatttccatggtttcgtggtttttcttcctctgttccaaggaacatgttattagtacctttactgcagcacttacttgtccttcatgtgttacgattgtaccatgtgttctctccactaggttttgaactcctcaaagatgaaatccatgcattgttcatctctgcaaccttgatgtccaaatacgtgtttgacagatgaacgaatgactgaataaatgaaggatggttcactttggttcctcctcccaactacctagtctgcatttagatcgaagtgctgatgctgagtgagaagacaacattcaaaaggcacaatggaaaagagaagtgtccaaaggcatagctgatccacagactagaaaatcagctccgtaatgaggaagaggctaatcccnaaggcctcagaacataacagagccacagcaagatctttaagccagaagttggggttcataaaccccaacctctacctcaaagcccagcgtagctcattaggaacaggccagcagtccagccacctgctgtggcttcacgtccaatgcagatggttctagagacccacaggcacagccacactagtagctcagggcagtgggtctcagccacctatccttactgatactttttgctttattgtcccatttttaggtttcaaaactggccacccaagaataaatagacactaaacaattggatgcgaaaaagaaagacattccccaatggttctcaagaagccgtttggatgctgtgctccttacatggtgctaaggggctcaagctgccgtggatgcccttttcggacctttcagtatgcaaatatgtgctaggagggaattaagtttccatgggatgcagtaagcataatgttgtacatggatggctaattgttttcatcacacatgccaaatccaactgctttgtcagggcctggagtctgtttgntgaatgaggaaatcttgccatggtccagagaggcaac

SEQ ID NO: 320486 - DNA, 1945 bp, Homo Sapiens
aagaaagcagtgttaaggttgtaggccacatggtaaaacacaatttttatggtcccgaatttctaccgattgggaagacaaagcaatttcctcctgcatatactttattcacacatgctaaatctcactaaacagatcacactgtcaaggaagatggctaaggagaagctagaggttgtcaaggtaatcctgtgcttcggccctgttttgcaacaaggtaataaacagccagaacagactggagtgaagcaggttaagggtgaggagagaacacagtgcagtgcagggtgtggaaggcagctcacagtcagggaggcagcagttctagccaatcaacactttatttttcaagtcaacacctgcacagatgttagtgtccacttcctaaccctagtagggggtcccactacacttggatcacccagaggagcagtaaggaagctcctaatctcaagagagagcacatgctcaccaactccagtgctggcgccatgtactgcgggatccctgctctccttgcatcatgaaaggccgggctgaatggggcaaggatgcagtgaaggttacacagactacagtgacctaagagtgtaactactggcctgacccactgccccaggtttactctttacttcccagaccaggagcctccctaaagcttggccagtgcccacgggataggaggagctggcaaaggatggggttgagctgctaaggacaggacacagcagggaaataaagcagaaaggaacacaagacaagagaaaaattataaagtgcctcaactaaacaaccaagtgggacatgagggcagagcagcacaggtccctgaggataggaggaaaaagaaagggccagaccaccagggcttggggcatagtggaatgagaatagagatgaggcagggaggcaagcgcaggctgtgggaaggacttccctagccctgttcacatccactaacccaaatggaaaattatttacaaatttaaaaccaatcctaggcacaggtactgcaccatgcccaggacagcaggcaggcaggcaggcagagggtggaatagctaccatccgacagccagcttccccacacactgccccaccccagagtggtaggcaaaggaggaaacagcaacactcctagccaggaagccctactgtgcctgcagctccttcctcaacggctggctcatggctctgccacggcctgagcttcttggtctgactgtaccagagaatggatgtcgggccccaggggtggagcatcagggggttttggcggtgtctctggctccaagcccagctctgcattcagctgctccagctccccctgatccagcaactcaaagtcctcagtggtgagtgcctcttcttcctcaggggcaggcaggggctggggtgagtcctggggaacaggtgggagaatggaaggggagggggctgggtcacttccaacaaggcaaagtggaggtgacagggtgccgggcagagcagtgaggccaccactcactgtctcggggctcagtgtctccactggtcctccaggggagcatttcactccatcttggggggaccctgccccattgaagtgcgtgttcacaaagtggaggggggatgagagccgcaacaaggtttccttagctgccacatcctcttcctcttcctccgagtccagggcttgccttgacagagcttgaggacggcctagtaggtcttcgggaggggccagctctccctcctctccctcccctaggtcccggcttagggtctcctctggttcacttggcaggctctgctggtccaaatcctcggagacatcagtcagctgcggagttgtggcccgggatacggagaagccaccactctccaagatagaagcctcctcatctgacagctctgagtctgttagatgcaaggccaatgctgttttcttcacatccacctggca

SEQ ID NO: 320487 - DNA, 475 bp, Homo Sapiens
atcaatcaacactttatttttcaagtcaacacctgcacagatgttagtgtccacttcctgaccctagtagggggtcccactacacttggatcacccagaggagcagtaaggaagctcctaatctcaagagagagcacatgctcaccaactccagtgctggcgccatgtactgcgggatccctgctctcctgcatcatgaaaggccgggctgaatggggcaaggatgcagtgaaggttacacagactacagtgacctaagagtgtaactactgggcctgacccactgccccagggtttactctttacttcccagaccaggggggcctccctaaagcttgggccagtgcccacggggatagggagggagctgggcaaaggtttgggggtttgagctgcttaagggacagggacacagcaggggaaattaaaggcaggaaagggaccacaaggccaagggggaaaatttttaaagttg

SEQ ID NO: 320488 - DNA, 1061 bp, Homo Sapiens
gcccttaacaccagtggggccggagggtcccggccagcccaggcagtccgtgccagacctcgcagcaactccgcctggcaaatctatctgcaaaggcgggcagagcggggcaccccaaagcctccagggccccctgctcagccccctggcccgcccaacgcctctagtaaccccgacctcaggaggagcgaccctggctgggaacgctcggacagcgtccttccagcctctcacgggcacctcccccaggctggctcactggagcggaaccgcgtgggagtctcctccaaaccggacagctcccctgtgctctcccctgggaataaagccaagcccgacgaccaccgctcacggccaggccggcccgcagactttgtgttgctgaaagagcggactctggacgaggcccctcggcctcccaagaaggccatggactactcgtcgtccagcgaggaggtggaaagcagtgaggacgacgaggaggaaggcgaaggcgggccagcagaggggagcagagatacccctgggggccgcgatggggatacagacagcgtcagcaccatggtggtccacgacgtcgaggagatcaccgggacccagcccccatacgggggcggcaccatggtggtccagcgcacccctgaagaggagcggaacctgctgcatgctgacagcaatgggtacacaaacctgcctgacgtggtccagcccagccactcacccaccgagaacagcaaaggccaaagcccaccctcgaaaggaatgggagtgggtgactaccagtctcgtggggctgggtaaaggcccctggcaagagctcgttttcacgatgtttgtggatctagggatctaccagcctggaggcagtggggacagcatccccatcacagccctagtgggtggagagggcactcggctcgaccagctgcagtacgacgtgaggaagggttctgtggtcaacgtgaatcccaccaacacccgggcccacagtgagacccctgagatccggaagtacaagaagcgattcaactccgagatcctctgtgcagccctttgggggg

SEQ ID NO: 320489 - DNA, 846 bp, Homo Sapiens
gcaacgttcagccccccaaggaggccagggccgttcaagggtgcccagcccaaatttggccatgttgtaccatcatagatcttggatgtaggccatcatctgaagcagtgacaaggagctgggagtccggggaaaaggtcaagggagcgaaatgggcatggcatggccttccagggtatgcagaagttttccagttgcaatatcaaaaatattgatgattccatctatggctccactggctaggtatttcccatcaggactatatgcaatactaagaatgaattttcctctcgtgtccaaagaatattcctttttcccactttccacaccaaaaatgttcactttcccgacatgagttcctgtggccagatactgggaatcaggagaaaaggccaaagtccaggcatccacaggtcctgcatctatggactttatctgtttgccattttccaagtcccaaagacgaatatgagcatcaagagagctggatgcagcaatgggcagggtgtggctgatgtccacagacaccactcccagctgatgtccctccagactccactgtaggtccagcctctcatcacgccatttccagaccttcaccaggtcatctagggagcctgtgaccactgtctcagagttttccttcttgtttgtcccccaagcaactgaccaaatggcatcatcatgggcttgctcttgtttgaagagaataccgtactggttggtcatttccttaaccaaggatcaaggacaaaaggccagacagctcactgcactgccaggctgcacgtcggaagccgggctccgcgcgactgcgacgcgcaaagatgagctatcgaagggccc

SEQ ID NO: 320490 - DNA, 456 bp, Homo Sapiens
aactttagggctttaatacagagtaacaggaaaacaagtgggaaaaataagctgctgttttataccaccatattgctattgctttcttgcctagaaaaaagtatttcccggactgcaactggagagttcagaagcaaaacctcagcccccaattttccaaggctgtatgttaggggagaggcactcaccatttccagaccttcaccaggtcatctagggagcctgtgaccactgtctcagagttttccttcttgtttgtcccccaagcaactgaccaaatggcatcatcatgggctagaatggaaagtgcttcatttataaagtcttcttgcatacgacttaatgaagccgagatactgttcaacaattgtgaggtaacatttatttgtatttgctttactattttacaaagtgctttcctatacagcttttattgaaattttggggccacatatg

SEQ ID NO: 320491 - DNA, 994 bp, Homo Sapiens
  misc_feature (827)..(871): n is a, c, g, or t
tttcaaaggcgggcgccaaagggtggtttccaggcaagcgggagtgggacgccaatggggaggggccataagcggggattgggggacctgggttattgcgggatggagggcaggtgccaggtttctttccaggggcctttaaagcccctgtttcccccaagattaagccgttattcccagtgggcaggaggagcttccattgccatctggagaccttggcagggacttgcccatccgatccacacaccagcagggacctcggcgctgcccctgggaggagcggcactgccgcttccggtagaagcctcgatggtcacaattgggcacgtagagtgtttgagcccctcggtagacctcagtctggagttgctgcagcactgagtccagatgtctacggcatgggcccatctcagtgtcttggacacccgcagaattgggctgggagggcgtggtagaggtgcctggattcctctgttggtctctgcggttcacatcctgtgggcgggcagtgcctgcttggggtttactctccttaggattctcctctgcaacagcaggcgcgcgggccggaaggcagcggcctcggccgagcagcagcgcccgcaaaggcgcctcgtcgtccttgggcggatggcactgcagtcctggggcgcagttaggggtgtagaccccgcactcctgcccctccctcctgagacagccctcagcttccgcgcagccctcggctggcgaccccccatcctcctcctccacgcagccccctggacaacccgcctgcaccccttgcccgcagcctgggcaccgcgccaaggcgcctcctgggctgnnnnnnnnnnnnnnnnnnnnnnnnnnnnnnnnnnnnnnnnnnnnnctgtggggggtcatggtcagggtttgtgccccgtcctctccttccagagcagtcgcagcgcagctgctgcccgccgccgcccctctgtcttaagtagccgccggccaggggccgggccctttt

SEQ ID NO: 320492 - DNA, 385 bp, Homo Sapiens
caccgacatgcttcaccagctgctctccttgcacggtggcagcacccccggcagcggcggcccccccagagagggcggggcccacatcacccagccctgcggcagtggcggctccgtcgaccctgagctcttcctgcccagcaacaccttgcccacctacgagcagctgaccgtgcccaggatgggccccgatgaggggtcctgaggaggggatggggctgggggatgggcctgagtgagaggggaggccaagagtggccccacctggccctctctgaaggaggccacctcctaaaaggcccagagagaagagccccactctcagaggccccaataccccatggaccatgctgtcttggcacagcctgcacttgggggctcagca

SEQ ID NO: 320493 - DNA, 991 bp, Homo Sapiens
  misc_feature (912)..(950): n is a, c, g, or t
tgggggagagagagagcccaaaaccccctttacagtgggaattctaaaagcgagcgagtggcttcttctttaggtcccacatgtgagaaagttccgaggactttctgggaaaagttcttgtacatgaaaaagaaaaatattctgcccactctggcccccacaaggaaatgcgtttcttgtcccaatcgggaatccttccgggggtacttaaaggtgttgaacggccgccccaaagcaagttttccaatctctccgcctttaaaaggagtagctgtcctgggggggctatcaggggtctcttaaaataaagattccgccttgaagatttccgctcaatccctcgcagttgccaggtctccgccaggtgttgtggcatagcattgctagcagccacggttcaggtgggccaggcgcccaaagatcttctcgtaccacttggccagcagaacgaggggatggttggggccatgcaccagacccatgatggagtagccatagttgtgccagtcaatgacgagcttgcttccacaaaggcagcccacgaaccagcagacagcaatgctaggcagacctggggggttctggagaaagatataggcacctggctccctccacatcaacttccacagcaagtacatagcctgaagtacaactttgactccgtactggaaaactcggggcccaactgcaagactctgaagttctgtcaaccccacaatctgaattctgttgttctgcaagagctcatcatggggtttggagttgcagaaccccaggagggtcaccgagaagccgtgcatggccaacgacagcgcgtggtactgcatacgggggctgcggcccacgtcgcccagcaccaccgctactacatgccgggccgcccgcccccggcgccagcgcttccatcctccnnnnnnnnnnnnnnnnnnnnnnnnnnnnnnnnnnnnnnngaccaagcatgaggccgccatcttggctggcccgcagcagt

SEQ ID NO: 320494 - DNA, 585 bp, Homo Sapiens
tcagagatcaatgttaatttcaaatttgtgtcttcaaagatcatctctttttcttctttttgtggccagtattgtgcgcattttaacgaacctttctccatcactctgttgagcatgacgacacccctgcttttctgctcccacaccatctcccaaaagtgaccgcatgtgttaggcaaagggccctgggtaagaatgtaactcctttgggcttcttccatttttatcaaactagcgttgatatagtcattatcttcttgatgtagtttaatccgactatggtcaaagggactgacgtctctgtacctatttcggtttttgttcttaggaagcttggccactctacatgggaagtcactggcttcatgtcggatctcctggtaaatggccgcccagctcccggacttgtcgatctgctcgaactccttttccatctccatgacgggccagggcggctgctgcgcctccttctcggcccactgcgccgtctgccgctctaggccgcgtcgcgctcttagccccgaggcccgctgcaatccccgacccctgcagctaccgccgccctagccgctgctgcttcttcat

SEQ ID NO: 320495 - DNA, 495 bp, Homo Sapiens
tgatggacaggatggagttgtaggaacatgtgttgagcgccacattcatggcctggatgctgtctaggcggtaagagtccagctcctcattggtctcaatgtccagcagctgcagccagccgtccctgacctgcaggatcaagtcttggctccacacccggccctgtgcatccatctcgaacagcttctgcaaggcatcctcgggccactggactctctgactcccctgcttgcatgtcatcaagtgctccaccctgtgctgcaggagggtgggctctgaggtgaggttctgggagtactccttccggtgcaagtaaatggctctgctgctgggccttgacatgttgacgctgctgaggacggctccctgggtgccagtgaaggccgggtgcctggtccccccaggaggctggtcttggagcaggtggtccggtgctggtggtggaaggacagcagcttctctgctagtggccacaggcagagcctgcctttgat

SEQ ID NO: 320496 - DNA, 1139 bp, Homo Sapiens
gtcaaggtaatattgccaataatcattcacatttcacgtggttttagacacgcaggttattcagacagacacagacaacaaaacaagcctcaaagccagaacataacataacagaacaaaatcgaacataggtataaaaggtaaaatatatgtacaaagtacacagtacgtgaggtatacacggcattctcacaatgcatgttagtagtttgcctaggcatagcccttaaagatgactgcctgtttttgtgccatttctcaaaatacagtatattttgtttacccgtttaaccacctgatttcagcactgtccaagacagttactgatatttcatctgaatttgttttttaatgaaagttgcaatttctccattaagctccatcttttgtaggggagtgagtttccatctctggacatatctaacagaggctggattcccacctacaaaagaagctgaagaggggatttctgccttgggaggtggcagaaagaggaaagagattggaccggatgatttttaaagttccttccaactttgaagatttggggtttgctgtttcactccagaagccgattatacagacgtattcataaaccacacatttgaaatattaacaacccaccatgcaaaactgcagatgtacacacaatgccaaaggcggaccatatctgggaggggttaaagtataattctggaagttagtctgagaatcacaagactatccaaaattcactctcttcaaagcacaaagatgtttaatgtctgctcttgggagaggtgggtgggagcctccttatctttcttctcttagacagaatgctccaccctgagatggtcttggggaaaaagtaaagggtaggtactaacatatttggaaggaacttaaaaagctaatagtttccaagcactcaaattattttttaaaatctggagtctctctgagctcagagttctgaaatcgttgggagatggaatcttttgtgatactgttccacgttcggctggtaagtgcttttatagctaaagggggaagtgtcaaggtcagggagaaggcattagtgcagatgaggtcttggcaggaaacagagaagagtctcggttcatggttccatcaggctcctgagcaacttaaaacag

SEQ ID NO: 320497 - DNA, 539 bp, Homo Sapiens
  misc_feature (324)..(324): n is a, c, g, or t
  misc_feature (446)..(474): n is a, c, g, or t
  misc_feature (503)..(503): n is a, c, g, or t
ttaaagatatatctgacaaaatacttaagagtatatagcacaggatttaatttctcaatctgttgcatgtgctaattatgagtattactagttgataatcagttttgtctaggtcataacataccatttgtaagtttgtttgctttttcaggtttatctttgcagtgaattatgctttgctttaaaacattccgctaaaatcataatgggacatataaattattaagctgttagaaatgcattcaaatttgttttttctgtgttctaagaactcaggcaattttaaggataaaaactaacattggccaccgaacccagccttantctgcttaaatttaacgtgttttttgacttcttaattaacttggtcatatactaaatgtgatctcctgtggattaccacatgcattaaaaaatttttcaagctgggcgtggtggcgcacacnnnnnnnnnnnnnnnnnnnnnnnnnnnnnaagaggccgattgcttgagcccaggagtntgagaccaatctaggcaatgtatgtgagtccctgat

SEQ ID NO: 320498 - DNA, 538 bp, Homo Sapiens
cactgccccacccgttggccccactcattagcctcacccggaggacaagcagagataaagctttcagcaggtcctcaggcctctcctcttaagaagagagggaaccagcaggagattagatgtttctcttaatcaggtggcagagcctgccatgaggaacagaacacctttggtgtgaacctgtcttggtgttcatggcagtaggaagagatgggtgccaggacagggaggtttccagccgtgtttctcatcttcttggcaatgtgggcttgtgaggcagagaactcagcccctggcaggtagagtgggagaaatagatcccctgggaccaggtgagtaaatctcccaggtctagggtatcaggggcagggaaagagaagatgcctcataggatgatcctaatagactcggataatgttcaagctgaaaggagctgtaggaatttaatgtaagtccctcattttacagatgggcgagttgaggtccaggtttagagacccatgtgctgtgggtgaggaccatggctctgatctccaag

SEQ ID NO: 320499 - DNA, 493 bp, Homo Sapiens
ttccagtcatcccggccagacggaaaacataccacaggatggccaggcccactgccgtcgtccccacagagtacagggcatttccaaagaatcctgttcgcttgtaggaaactgggatcctgtccttggcctcgatattcagctcatcttcagctgctcgaagcttctcttcaaacttgtcaatatttgcaacctgcattcggtacatcaaggctagccgaggccgcccaaacaccacggctccagggtgcaggtagacttccaccacgtcgctctcaggcaccacctggacgcgctgcacctcgcccttggccagcatctcgtggacaaagtcgttccaggaaatgctgcctccgctggtgctgagagcattcaggaggctcatgacaaccgcgatgaccagcaaggtgcgcagccgctctcggtacatctggtcgtcccgctcacggcgtctcctctcctcttcgtcctcttcaggcgccttccccttcga

SEQ ID NO: 320500 - DNA, 895 bp, Homo Sapiens
  misc_feature (576)..(799): n is a, c, g, or t
gcactgccccattgtctgaaaggggccacagcagccgtcccatagaggcactggtttcaacctgtcaagtgtcaacccataccctgcagaaggcatgggctgccactcggagccagcccgcaggtcccgtgaccgccctgccagtcaagtctgtgcggggatgcctgcccctctgaggctgcaggcgaggacagtgcaggctcaggacaaacccgggaaggaacaaagggcttccactgttttcggaaaacatatctctcttctaaatttgtaagatttgatttgaaatgaggtattttatgcagatttgtaatacaacaacaaaggcaataattagtagactcgtcctctgaggatgcatctggttttaggatgtccgccagcagcattagttaaacaccattccaaagacatttctaagtgagcgacccttgctcagctcccccacgccccatgcaccctcctgtgccgtccctacctgggacacacgtgcacacatccaggttccatttgcacccatcaggctttactgtttcagctgaagagcgctctccaggaggcgggcagcctgcgccnnnnnnnnnnnnnnnnnnnnnnnnnnnnnnnnnnnnnnnnnnnnnnnnnnnnnnnnnnnnnnnnnnnnnnnnnnnnnnnnnnnnnnnnnnnnnnnnnnnnnnnnnnnnnnnnnnnnnnnnnnnnnnnnnnnnnnnnnnnnnnnnnnnnnnnnnnnnnnnnnnnnnnnnnnnnnnnnnnnnnnnnnnnnnnnnnnnnnnnnnnnnnnnnnnnnnnnnnnnnnnnnggttctctcctggcatggccagcgctctcctctcaagcccggcctcagcttcctggccagagcgtctggcatggaatgtgctctgcagctttgtct

SEQ ID NO: 320501 - DNA, 1752 bp, Homo Sapiens
ggcaatgttcctccagcttcttgtccagtgccttcaggtcatcacaggaagcgggtcggggtgaggatgtgtgaggagccaatgagcacctcccacttgccctcggtggccttggtcaacctcgtaggcggccctcatctctgacatggccacaccgcccatgacatacacgatgagccgggggcccgcccgggcttctacgccagccttgttcttgtgccagtgaccgaagcgggcactgacagcggcctgggagctggccgtgggggcggggtcggatacgaagggccacaggttcctgtccagccggtcctccacggcgtcctccattacgtccttgatgaccggggtccagcgggacagctgataggtgggctccatgcgttctctcggctccagccggctggaggtccccgagcccccggggttggtgacagtgcctcccagctgctccaggttacggatgaggctgctgtgcgcctgtacattggcatgctggatcagcttggccaggttctcctcactcacaccattccgaaggaggatgtagagcagcaggacccggatcttgtcgtaggcgggcaccgccgcgtccagcagcaccggaacgatcagcttcatggagtccttgatcttctccccctctgcgtcggagcccatggccaggtcctgctccacactacacagcttctccaccgagcccttgaagtgcttcatacaatcatctgctagatgcaggtgcgtagaatacttattcagctccttctggtactgcggcatctttttcaggatctgggataggtctttgatgttcgccttgtccgtggtcagcctcttgctctcacagaaggtcctcaggagctccgtgaccttcttggacacatctgcgatatgcatgtggcgaagctccacccacaagtcatcgtcctcgtccagcaagacggccttctcccgcgcctcgctcagcccggtggtctcatacctgtatgtgtcctgctctatgtccagcagatcatacgccatggcctggaacgtgagctcatgcagtagtggggacacggggtcagctgcccggtccattatcagcagctgggagcgggttttctctgggccctcgcccagactgggagtgtctgccttgaaggcgttcagcttggccaggacggcgtgggccaactgggctgtgtcctctgggcccttgcggtagcggatggccgggtactcctgcagggtggcgcacagcgtggcaatctgctgggccagcacctcgagctgccgcgtgcgctcctctgcccggaaggggcagtagaggttgtaggtgctgtggggagcatcgagggagaacacctgggcctcgtaggggaggaaggcaaggtgaatctccttcaacgtcttcaccacctttgccagacgagagcggcctagctcactgaacaggggctcggggcaggtgtcggtgaagaagatatgggccgctttgtaggtgaaagtcggggtcccctggaagtctttgatcagggcctgaaccgacttctccgtggggctcagcaaataaatggcctccagactgggaatgggttcccgccgtttgttgatgtcttcaacaatggtgatgccctcagccaggatatctgacattttgcagcaggaagacaagatgcgcatgcttgggtgatccatgataagcaccttccactccccacacttcttgacactccgaatcaacatcccggaaattccggaccggtccag

SEQ ID NO: 320502 - DNA, 1013 bp, Homo Sapiens
ttcccgctttgtttttttcacaggaaggtccctcagggggttcccgggccctttttgggccacatttgcggtttggcttggggggaagttcacccccccaaattctcgttccttgtccaggcaagaggggctttttccgggcctggttcaaccgggggttttcatcccggtatggttcctgctttagttccggcagttcatacgccatggcctgggaccgggagctccatgcagtagtggggacacggggtcagctgcccggtccattatcagcagctgggagcgggttttctctgggccctcgcccagactgggagtgtctgccttgaaggcgttcagcttggccaggacggcgtgggccaactgggctgtgtcctctgggcccttgcggtagcggatggccgggtactcctgcagggtggcgcacagcgtggcaatctgctgggccagcacctcgagctgccgcgtgcgctcctctgcccggaaggggcagtagaggttgtaggtgctgtggggagcatcgagggagaacacctgggcctcgtaggggaggaaggcaaggtgaatctccttcaacgtcttcaccacctttgccagacgagagcggcctagctcactgaacaggggctcggggcaggtgtcggtgaagaagatatgggccgctttgtaggtgaaagtcggggtcccctggaagtctttgatcagggcctgaaccgacttctccgtggggctcagcaaataaatggcctccagactgggaatgggttcccgccgtttgttgatgtcttcaacaatggtgatgccctcagccaggatatctgacattttgcagcaggaagacaagatgcgcatgcttgggtgatccatgataagcaccttccactccccatccttcttgacactccgaataactccgctcagaattttttcccccaccaccgccttcagccccgagggcgccatcttccccgaggggccctcgtgccgaattcgccacccaggcctcgctacct

SEQ ID NO: 320503 - DNA, 989 bp, Homo Sapiens
gcccagggggtgcccattttcgtgggcccccgcctgtgtttggcccgcggggtgggtaccgtttcatgtggggcccagaggattgcttctgggaggtccgcttcacgcgtgcagggggcctgggttcgggcttggccttgctgggctgggctccaattcccggaacttggggcgggggggctcggggttagttgtgaggccagctgctggaccagaagggggtggggtggcacgggtggaagaaggtgttggatgacggggtgaccgctgcgactgggctccgggagctggaggaggagctgctccctggaggcccactgctcccccagtaagctggccaggccaggtccagtcagggcccccagccccacccagtcctccgaggccggctggtccgatgagctgcatgagctggctgtggctcatgtttcccagcaggctctgcaggccaccctcaccgcctagcgcagagagttcgtggccgctgcttccgctggcccccagtgccccaggcatcggggggttgttcagatactcgttgactttccggcaatgctcctcatcctggtctgtcttgggttcctgcatccagaagaaaagccgcttggaccctgccttgaacttcagcacgtagaccctcccgctggggcactgcggcacccgcttgaactcacagtcgtcagggaagatgatcaagtcgtcttccacgttcccggacgtcctgtccttccagcagaagtgaataagcgagtcgtccgtctgctgaatgtacaccagccctttccgcttatccggagtcacggtggtccccttcagggacatctttcccgcccgaaactccaccaagtacttgttggaggcgccccgagagcctggcaccaggcttggaaagagcgcgcctgaggtcgtcatcctgcctcgcgcccacactcgttcgagaggcgccgtccgggctcgctcttcctcctcggcgcctgccgggccccgcc

SEQ ID NO: 320504 - DNA, 963 bp, Homo Sapiens
  misc_feature (919)..(919): n is a, c, g, or t
gcctgggtggcgaattcggcacgaggcaaactcttagttgttctttgttacatttgagagcagttcagcgttgactttttaactactctgggaatgttgtttccagcacgtctcagaaaccccgttgccatctgaaaggcccctttccctgctctctcccccggccttgcctttcatgggctgtctctgaccctggcttctctgccttgtggagaccctgccagcgaggggtctggcggcttagctgccccttgcgcaccccacccggttagacccagggctcagtacgctctcctgagactgggcacagtgatgccatctgcgccactgactctctcttcccctggcttgccaggacttgatcatcttccctgacgactgtgagttcaagcgggtgccgcagtgccccagcgggagggtctacgtgctgaagttcaaggcagggtccaagcggcttttcttctggatgcaggaacccaagacagaccaggatgaggagcattgccggaaagtcaacgagtatctgaacaaccccccgatgcctggggcactgggggccagcggaagcagcggccacgaactctctgcgctaggcggtgagggtggcctgcagagcctgctgggaaacatgagccacagccagctcatgcagctcatcggaccagccggcctcggaagactggggtggggcctggggcccctgactggacctggcctggccagcttactgggggagcagtggggcctccaagggagcagctcctccctccagctcccggagccagtcggcagcggtcaccccgtcatcccccaccttttccacccgtggccaccccagcccctttctggctccagaggctggcctcagcaaactagccccgaacccccgcgcccaatttccggggaatgggagccccgnaacagacgcccggcccgaacccacgcccattcaagttgaggccc

SEQ ID NO: 320505 - DNA, 597 bp, Homo Sapiens
cattaaattcaattcactatttggtctttaaaacaaaatgttgccttatttttgcaataagatatcttttatcttttgtgtaggtttacacaagttatattactaatttttatttttaagctacagttttaaagtgcatctgtgctgttgctttgaaaaattatttttaatatatcttaatgacaatgcaaatttgtagatgggatttgtaaaactgggttttcaatctgaactttgcaaacactgtgaaactgcttggaaaatagtttatgtgtttatgtacatttttcggcaagacaagtctgtagctttcattaactactgaaaggaatctctaaccttcatccttgcaaagcaaataagcactgagataaaagaaaacacataactttacaagaaatctaattggataaaacttgaaatatccttgacctaatttttctcattataaaagatgacttttttcctgattatgtaactaatacatgtttaccattttaaaaaagttcaccttgttatgacaaataataatatgaatatatatcacaaaaagcacaacataataggtattttggaatttttcagtgtgcaggtcca

SEQ ID NO: 320506 - DNA, 1033 bp, Homo Sapiens
  misc_feature (404)..(404): n is a, c, g, or t
ggtgctttattgggggctgggactgggtccgggacaagggactggagccggggaccgggaccgggacttggggccgggaccgggaccgggacaggggaccaggactgaatttcaggctggacttcggggctcggcgtgcccgcagcagcagtgcttttttgggcacaaggcctgcagcctgcagcgtgagtgtatcgtcctggtagagggtgggcgggaatttgctgaagatctcaaaggcagaggcatccatgaccctggccttcgctagcagagctcgcacgtccccaatggtgttgtcaggctgcatcatcagtaggaaggcctgttccccattctcagacttgatgcgcagcatggagagcgggggtgccggcgtgttgggtgaactcctggctcctctnctcgctcagcggccaaggtgggcgtctccaccacaatctcctggaatccgggcaggcaatgggcagcagttctgcaaggtgtccctgatggggccccggatgtcaatcacctcgccttgccggatcacaaacttggggagcctgttcagaaatttctcagcagtcatcctggagcctgggtgctcctccaccctgtccaaggccttgtgcatccgctgcctgcccaccacacggccctcgcctgggaaggggtccagtccatcctccaggtagacctgattgcgcaagtcactcaccttaaaggggaccccattggggtacagtcgctggagctctgagggaaagaagccatccaatatgtctcggaggcagcgctgtgtggagggatcgtagaagggctggaagggcccgtcgaacatcatgatgccattccggtagagcttcagcgggatgggctcgagggtacgcagccgtgccccgccgggcactggtgtcacttgggtgtcaccctctaccaccagctcactaagatcctgcaggctggccagcagcctgtcaaagtccacctcagggggcgccaatgagtccccacgcagggccgctagccgtcccgcagcgccgccagccat

SEQ ID NO: 320507 - DNA, 865 bp, Homo Sapiens
tggaaggggaatgttctcaatagcagttccaggatggctggtattcattaccagcatcattcctgggaggtttcccaaccgaagaggagtgccagttccggaagcccgggattttccccttctcggatcagccaggaggaggccggcttcccaggtttggcaaatgaaggccccccggtttccttcttctttggtgctccaggtgttgggtaaattccagatgaaggccgttgtttcccgagaatcactgaggcaccccatggcaaatcatgaaagggggtcttttgcgttttcaccagggagggggaaacctggaccaaaaccccctgacttagttttccatatttcaggctcctcgtgtgcaaagagacagctccgtcagagaacactgcctggacctcagcactgataaggtccccttcctgtaagaaacctctcattgcaagctcatcttctgcagatcttctcctcagctctcctccaggaaggttcatggacgagagcagcaagaccgaatccagcctggagttggtctccaccttccacctcttctgttgaacctctgtgattcgtcccactacgatgtctcctacttcaccaatgtatctggttttcaaagctttcacacagatcaacttgtttactctctccacagagccagcaacagatgcaatgagcttctcttctcccatatacgttccatggccccgcatgaatcctgtgtccgtagtgattgtatcccccggcaccactagatgtttcttagtgtcgcggcccagtctctcgctaagaggcttgcgagccactggaagcctcatctccatcgccatcttggcgccaatgagttgcgcaggcgcagctcccc

SEQ ID NO: 320508 - DNA, 1811 bp, Homo Sapiens
gaaattcggggggagcctggattttgtaacccttttggaggaaggaatctgggtgaagatctttccccccaacacccccgccaagggggagggaggccacagtgggcaagaaagggaaagcttgcctttgggcattgggtgggagccccaggcccacctgccaagttgggccggcaccccccggttagccaggtggggagcccccagaggcgccagttttttcccccagccagctgtagctttgcagactgtaggagtagagcttggcaccacgctttgttggctagcaggtaagaagccagatgatcgaagcaaccggccagtaagggaggcctggaaggagctgtgtgaccggaggtcatggcacaggaagcctacagcgaagaccagcagcaacaggaggagccgcgtccagggcagccgaggaccctgaacctgctgcaacaggcccttgcaggccatgtcacaggtgacgacatcctggttgttactgctacccttcctcagcagctcctggttggtaagcttgagggactgaatggtttcttgcaaagacttctgtaccttcttgggaatctgctcccaggagctgagcaagtgctccagcagaaggctggactgtgacaggtgcttagggtacagctgcctccagacgctggcactgagggggtccaccgtcaggcactcagtcaggctgctcaggagctctttcttcatctcagggggacagctaggggtggctctggacaggaaagaagggaagtaggtatgcagggtggaatccggctttgctccaaatgccagcactttcagtcgggggtagagctgacacagctgctcctgcaggctgggtgtcagggagttgttcggcatataggcaaagtccagaagtgggaagaagtccttggggccaatcatgccgaagcccttggtaaggttgggatgcatcaggagcagccgatccaggtatgtgatggcaaagggagacagagacttgatgcccagcacaggcagcatgatccccagccacactttcagtccctcggtgaggttggcaaaacctgcttgacccagggcccacatgatggtgagacactttgctggtcggctctggtgggacctcagcagttccaggaacttgcctaggtttgccgtggcaatcttgggcttgtcttgcaggatggcctggatacagatgcggtaaccatgtagtgactcccctggtgtcttatccagctcttgcaacatggtgaacagacagtggtcaaaaaagagctccagagaccctgctgccttcgccagcagccctcggatgatcccacgtagctcccggctcaccaggctgtagggataatcatgagtatgctggctcagcgtgggttcacttagaggagcttgtagcttgtagttgagatagctggccaggtccttcaaccatatggatgggtttccagagaacacactctggctcttgtccagttccttctgcaggtctgccacatccagagctttcagtgcttcctccaggctgcggaagcggccctgcttctggttttggttgggaggagttgccaccttctttggctgcttcttgttcctggtttcttaggttccacagcagggggtgggacctgctccttattctgccgcttcatgatattctcaaagccccgctcataaagggtgcttgtggtctggattgcaggggtcaggtcgtatttccacactccgtttgcttccccgagcgccctgcggttcctgccgcctcctcggccgccggcgccggcgccgaccccaggccgccgaccctt

SEQ ID NO: 320509 - DNA, 845 bp, Homo Sapiens
tacatcgggttcatcgcgagctaccgcgacccctttggttcccgaggagaatttgaaggtttcgtagctgtggtgaacaaggccatgagtgccaagtttgagcggctggtggcgagcgcagagcagctgctgaaggagctgccctggcccccaacctttgagaaggacaagttcctcacccctgacttcacctccctggatgttctcaccttcgctggctccggcatccctgccggcatcaacatccccaactacgatgatctgaggcagacggaaggctttaagaacgtgtcgctggggaatgtgctggctgtggcctacgccacgcagcgggagaagcttacctttctggaggaggatgacaaggacctgtacatcctctggaatgggccctccttcgatgtgcaggtgggcctgcacgagctgctgggccatggcagtggcaagctcttcgtacaggacgaaaaaggagcattcaactttgaccaggaaacagtgatcaacccagagacgggcgagcagattcagagctggtatcggagcggggagacctgtgatagcaagttcagcaccatcgcctccagctacgaagagtgccgggctgagagcgtgggtctctacctctgtctccacccgcaagtgctggagatctttggctttgagggggctgatgcggaggacgtgatctacgtgaactggctcaacatggttcgggccgggctgctcgctctggagttctacacacctgaggccttcaactggcgacaggcccatatgcaggcccggtttgtgatcctgagagtcttgctggaggctggcgagggactcgttaccatcactcccac

SEQ ID NO: 320510 - DNA, 1445 bp, Homo Sapiens
  misc_feature (21)..(21): n is a, c, g, or t
  misc_feature (97)..(97): n is a, c, g, or t
ccctggccttcagctgggcanggtccaaagaaatccacagccaggggatcgaccgccagtcatccccaggaaagccaccagtcaccactgcttcgcnccggctccacaaaacatattttccgcagaaagcagccatagggggtaggctaggcagccgttcgaagaggcagctgcccattccatcccaggagggctttctccagggcccgtcggctgcagttgctgaagttcaggcctggtaggaagtctgtggaggcctccatgatgcaggtcttggctggggctggacctggacaggggcagctattcccaggcaaatcatggtccaggcccaggctgtggcccaactcatgggctatggaggaggcgactcccaggatgctggtggagtggtccatgttcacacctcctgagaagtcaggagaacagatggagttctgaatggccatgcccaccgtaggcccagagaatgaagtaccagtcaccagctgggcactgtcatggggcaatcgaggcagcaaatgtgccctgcgccagtggaggaagttttcgagggtgacagctgggtttgggctgatctccaccaggtcacgctgggtccaggcctccaggcccactagtgccactcgtacattcaggggccggaagaatgtgtccagcaagagggccacttccagtgtgcggtttagcaggtgctggaagtcccggtatttctgggcctccgagtgatcagccacaatcaccaactccacagtcttggtctctgttaccacatcccgcctccggcgaatgtggcgctgtcccagggggtgctctggtggcgtctgagtgtgtacagattcccgccagctcagggcacaggtgtggcctggcaggtggagatcttggattcgcgaaataatgggaggaccctgaaggtccccaggcccctgctccagggtatagcttctctctggggtcaggaccaccaagcctctgagcccagagcaggtgcagatggacacccaggagcctgcatatccccgcactcttccctggtagcagcagttctccaaagtgtgtccctcactgaccacccgagtgccatcgggctggtaccacaccagggttgggcggcctgggaccaactccctattctgtagcagctccaggatatgactgtcaccgtccagctccaacttgatcctcaggggctcaggcagactggtctgaagcacctttttgaggctaattgggagatcgtcctgaaggacctggggctccaagggctccctcggggccttctctgactctgcctgctgctcctcagtgccacctatatttgggagcggccaggaaggcagagggctgcccgcgcccaggagccccagggcccagagcagcgccagccgcatggcagcggcgctccgggccgggcgagggcagcaagtgcggaacagcgcgcg

SEQ ID NO: 320511 - DNA, 2203 bp, Homo Sapiens
  misc_feature (2045)..(2045): n is a, c, g, or t
  misc_feature (2147)..(2147): n is a, c, g, or t
  misc_feature (2169)..(2169): n is a, c, g, or t
ttttttgccgaacgaaatttttacctcacgttcatctcaccaaagtctcttcagaggagcctggtttacagggtgatgaagctgatgatgatacagtagtgtacacactgctaacgtgaatcagactggaaagcaagtcagtacttcagagtagccccgcagaaaaagagcgatactaagccttcttagtgtttcgtttgttagtagtgatgaagagaaaactgcttggaagcttccatgggtcactagttagggacagagcagcacaggtgatcagacagggctgagcaaacacctgactgaccaacagaaccagtctcctcagcagcttacattgcagtcaatacagagggttatggaatttattgatttctgcttgaaataaacaagataagcaaataggagcttacaacacaggtcccagcaggaggggtcacgctctgcatcaggccggtgtccacgccgctgccgtgtgtgacggatcctgataggcctggctgctgtagggcacctctcgatttctctctgggtccttaaccttccagtagcctctctgcagtccctcatcggctggcctaaccgtcctgccatagctcccaggtctcctggggctaagcagctcatggcattgttggggggcaggagtttatgtcgatctgtaactacaccattcctgcagttctgaaatgagtggcccccattttgaatctgcaggcattttaatatcgcaaatattgtaggcacttctgtagtaatattttgggaaaacgtcttccttcagtctaaacaaatcaagccccattttataactggctattttgtaaagactcaaaacagattagagatcttaatgaaatgatctcttaaatgaaatgatgttctttatttcacgaaatcatcaatcttaagcacgagcaggaataaacacctcccagaagaagcttaattcattcttcctggattttcactgtgtgttattaaatcacaaaaatgacagtccccacactgccctttcccactgacaccaagtccaaccgtgagcacagtgcctctgcgaagcatcctggcacccatggtgagcgctggcgaccaggcagtctctggccagcaacagggactgctcaagttaccgacgttggtaggagctgggctcgcatggccagaatggaaaccccctagactttccacacgtcacctgcctgaacgctaactacaaagaggaaaggcaacttaaaggtgttttctaggatgcaggcatcagttaggtccctctctttgtgctttaagggaaggatgctttgtgcttaacacattcatctgctgatgggacaagccattctaaagggcagaaatggatccatctttagaattaacactgactttgtaacacctggatgttaactgtcccaaatggcaaattattcatcgtttcctagggatacagttagctagctgtagcatctaatttttacttactttgatgactgaattgtaagtgttggttaagttttattagtaatataatgtttggcagatgatctgcttaaatggttaacacatctgtggttctttctttgaatattgctgtaatacttgaacatttcattacaagtcaaaactttaacgaaattaagaatgctgattcccacatggtggaaaacaaactctgaagtgactttggatttagcattgacataaatggaaactgttggtttctacagaaaagaaagaattaaagcatgatctgggggaaaggcaccgcactaccacttcacatgggacagaaaagttcatttatcatgtccttaaaatctctaagccctatatgaaactgtccaaatatacaaagctcaataaactactagcaacatatagtgtaaggtcaaagtagttattacatgggaaaggagacaacaggtacccctggagaccgactgcccgcaagccagcagtgtccacgagaaactgcaggaagagcctgtcttccctggcccagggctggtgctcttgatctgttcttgagtttcttgccccctgcctccacnggtggcgggtctcctgtcagttccacgtgtgacacctctggagtcctgagtatattctgacactcggcaacccagggcaccttctgaaggggtgtgtcaccntgctccgaatggagatgaaggnggtttctggggtcagtaccagctgttatttagtg

SEQ ID NO: 320512 - DNA, 452 bp, Homo Sapiens
attccagcacttccggcctgacccctgtccagcgcctttcctttctccagcttctgctctgccccaagagtggtcgccttcgtggcagggcacgactctctcccagctcgggtcgccgcccacattagtgtggggccctgcggcctagcgtccctcaccagaggcctccccttgcctagctggaccgccgagggacatcgacgagtatcctcctcctgctgtccccggcttcgcctgccgcccctaaccggccagtcaagatggccgccgctgggtgaggcaagctggcgcgccgcgggggcgtctgggagttgtagttcgggacggcgggctgacgcacttcgccgccggccgacgggcgccattgtgcggcgcgcgccgggactctgcccacttccaccagagacacattgagaaggaggaaactatggcctccaggcttccgacggcct

SEQ ID NO: 320513 - DNA, 477 bp, Homo Sapiens
  misc_feature (197)..(215): n is a, c, g, or t
ctccctagattctcaacctttgtggcagcaagagggacagagccctgtccatatgacaaggagggggtcaacagtgctgaccccctggatgcctgtcttcacataagctagacggcctgtggagtgtggggtcacccctctctttcctgcttattattctatgtaatgaataaatcctagactcatgaatttgaaannnnnnnnnnnnnnnnnnngcatttttttgggccacattctgactattataaagtttcctggcttccctctgacctgtcaggggccagtgaaagttaaggaggaagaagcagggaagggcatacctttgggtcatgcatcctataaggaaggtttgaacccaagtattcaaaaaaagtaaaaatctcttctcttccgcacattgtttcccctctgctagcacaggctctgggaggacaggggatcctgtccgttttgtgcactgctgatccccagtgcaag

SEQ ID NO: 320514 - DNA, 937 bp, Homo Sapiens
catccaggtcgggggggatgaaggggtgaggtggatacccccctgtttgtcccagggttttcctttcgcccctcgcccaggggtgtgggcgtttctcgtatagggtgtgggttcaacgctgccccgcagggcaaaataaaggacccttaaaattgtgtggaccttttttccgggcgaaagggaaatgcaatgggtccccctgttggcaaagggagttaaggaaggggtatgtgggttaaaaggaaaaaaggggaggagaataaggggaaacaatagtttttggccaagaacaatttgttcccatactaaagaaggctgccagggtgaaaagattttcctttattcatatatattggttattaaaggtcggtctcttctgattcaggggaaagagtgaaaatttgtggtatctagcactgagcgttaggacccaacttggagggatcacaagcttaggccaagtggaggatttaaaaatcctcggataaattattatacttaaagctcatgagcataaagctcacttgaccatgcagaaatgctgggaagcagggtgcatggcatgggaatacatctccctgatctttgagagagcctctctggatattctttcagagcatgagccaggatgtactgactactttcttcacacatcagttgccctttatgatctcagttcataaactctttgtggtatgtagcaatcaaaagtcatattacttctgtaaaactaacattatatagggtgtatagtcccagacaaattatatgaagctagatttttcttgccctggcccaatttatcattcctcctcctgcccacacctacctccctttaaatattttaggttgcagaagcacagctgaccagaaatttgctcttaaagataaatcctaaagatagaactcagtgctttatactgagtaatggctcaag

SEQ ID NO: 320515 - DNA, 519 bp, Homo Sapiens
aggatttcttgagctcgttgtccccatcactggagccagacagctgggacaggcggcttaggtcccacatggagcggctgggccgggccggggggccgctgggggtccgggcgcgctgcacactccttagaatgtcactgagtgccggccccggggtagcaggggagacgcggcaggcggccaggcggtgggccagcgggccgtcaggcggcggaggcgacgcgggggccacggagcggcggcgggacacgcggtgcaggctgcggccccgctgcaggccacctatgaccgagggtttctgggggggcgcaggtgggagcgggcaggaggccgcgtacagcgtccggaactcaaggctgaaggcgtcaacaaattcaccagtcagcagggtcaccaggcctcggtgcaggcgtgcgtcactccacgtgaagctgtaggatcctgagatgaccctctcgccgtccagcagcacaaacttctcccgcacggtgccgctcacctgccgtcgccagcggctct

SEQ ID NO: 320516 - DNA, 871 bp, Homo Sapiens
cccgctcgcgtcggtggcgtttttcctgcagcgcgtgcgtgctgcgctactgagcagcgccatggaggactctgaagcactgggcttcgaacacatgggcctcgatccccggctccttcaggctgtcaccgatctgggctggtcgcgacctacgctgatccaggagaaggccatcccactggccctagaagggaaggacctcctggctcgggcccgcacgggctccgggaagacggccgcttatgctattccgatgctgcagctgttgctccataggaaggcgacaggtccggtggtagaacaggcagtgagaggccttgttcttgttcctaccaaggagctggcacggcaagcacagtccatgattcagcagctggctacctactgtgctcgggatgtccgagtggccaatgtctcagctgctgaagactcagtctctcagagagctgtgctgatggagaagccagatgtggtagtagggaccccatctcgcatattaagccacttgcagcaagacagcctgaaacttcgtgactccctggagcttttggtggtggacgaagctgaccttcttttttcctttggctttgaagaagagctcaagagtctcctctgtcacttgccccggatttaccaggcttttctcatgtcagctacttttaacgaggacgtacaagcactcaaggagctgatattacataacccggttacccttaagttacaggagtcccagctgcctggggccagaccagttacagcagtttcagggtggtctcgtgagactgaggaagacaaattcctcctgctgtatgccctgctcaagctgtcattgattcggggcaagtctctggtctttgtcaacactctagaa

SEQ ID NO: 320517 - DNA, 1302 bp, Homo Sapiens
  misc_feature (59)..(67): n is a, c, g, or t
gaacaataatatctttaatataactgtttttgtgtgcatagaagtcatataagtaaatnnnnnnnnncaacaacatgagattacataggtggttataatacaaaagtgagaaaaaaagctagtgtctgagtattgcatcctggatataattcctgatatatggtaaagcataaaagagacctatttcttcaggagagtagctgacccacctcagggccatgactgctcttctctttccccacagccttagtactttttgccaaaaggcccagatttgagtaaaggggaacgccgtgagcgtaggatccgggcataagggctgcagtctgttgagctttggcaggttggtgttcggggaagtaaatttcgaaggaatggtttcttccctggtggttgttggttttgttgctgattttcctggttggtaccaatgcgctttttggcagagacctggtcttggagttttaacacagtatgatactgctcagcaatacatgctggcttcttccggagttccagtttcactagcaccatgttgttctgcagttcagccagagtctggtcctgtttgattaagatgtcatcacaagtggtcaagggcttgacgaagtttttcctgcccccagtgctgtggcaaccaagctctctctgctgattggagagactcaccaagtttctgaagctctgtccgcaacagccttatattcttctggccctcttctaacttcttgtccacatcaatggtgaagggcttggctgagggtggtggttctaacattttctgatacttatgcaactcttcagtggtagagtttagctctgctttgcactgctgtaatttagctttaacctcctgaagctgctgggtggaggcagaagctgccaacctttgtgaccgccgtagggccaattcagaccctgattgctgatgggccactgactgttgtctggcttcctgcaagagagcttctagctcttcaatcttttcatcccgctcctgaatctcttcttggtaaaaacttgtcagtgactccttgaggatatttagtttttcttcatacatttcctccaatagttccttttgggtgtccaaatgttcactgcaccactgttcccgctgttgcatctgttctaccatctcattgcaaatttcatctcggagatgcatctccagctgtagcttttcctgtcgttccttcaaaagcagtgtcttcatggcttccacaacttgtaggagctcctctttgccatacatggagatgtcagcttcattttcaatatcatcatcaaggcctgtgtccc

SEQ ID NO: 320518 - DNA, 471 bp, Homo Sapiens
  misc_feature (366)..(366): n is a, c, g, or t
  misc_feature (371)..(371): n is a, c, g, or t
  misc_feature (398)..(398): n is a, c, g, or t
  misc_feature (416)..(416): n is a, c, g, or t
  misc_feature (432)..(432): n is a, c, g, or t
atttggcattggttatctataatgagctttctgagccctgatattatgtgagacaaacaggagttattgatgttatacactcccttccattcaggattttctgcttggagggaaatatgttgaccttagagaattgtgaatattgttgcaattcttgaatatattaccatgtgaataatagagactgtgttgctctctagtataagctatatttatttttgattcatttgaattactagttataactggagaaattttgttacctctatcctgggcttgcctggactggctgtataataggcagcagcctcttttagagcatcctaatgaaaaccatggatgaaagggattaatggtgatatcctnaagcntgccgtagaaaatggcctttggtcccnaccgtaacaatttcctcnccatccacaattccangggttgtgggagagtgggacattcccacccggaacaccc

SEQ ID NO: 320519 - DNA, 572 bp, Homo Sapiens
atttttggcgccggccccagcctgagcggggacggcggccgggagggcgcggcccgggttcccgttccccgcggagccatgcggtacaacgagaaggagctgcaggctctgtcccggcagccggccgagatggcggccgagctgggcatgaggggccccaagaagggcagcgacgaggccgagcccgtcggagccctgctgctggagcgctgcagagtcgtccgggaagagcccggcaccttctccatcagcttcattgaggaccctgagaggaagtatcactttgagtgcagcagcgaggagcagtgtcaggagtggatggaggctctgcgtcgggccagctacgagttcatgcggagaagcctcatcttctacaggaacgaaatccggaaggtgacgggcaaggaccccctggaacagttcggcatatccgaggaggccaggttccagctgagtggcttgcaggcgtgagcgcagggcacggtggtcagcgtgcagcgggacgggactggccctgcccagccatgaatcgcttggccatgcctggatctgttttgttttggtttttggtt

SEQ ID NO: 320520 - DNA, 900 bp, Homo Sapiens
tggggtttgacaggcttttgggaaagtttttccccaaacccaaaaacccctcccccccgagaaaattcccaggttgtaatggccccggggtggtggcggcctcaatgccctttgaattcccccgctaccttgggaaagctgaaggcagggagggatcccttggagcccagaaggtccaaggtccccagtgaagctgtggccaccactgcgctctagcctgggcaagcccagtgaaaccctggccccaaaaccaaaaaccaaaccaaaacagatccaggcatggccaagcgattcatggctgggcagggccagtcccgtcccgctgcacgctgaccaccgtgccctgcgctcacgcctgcaagccactcagctggaacctggcctcctcggatatgccgaactgttccagggggtccttgcccgtcaccttccggatttcgttcctgtagaagatgaggcttctccgcatgaactcgtagctggcccgacgcagagcctccatccactcctgacactgctcctcgctgctgcactcaaagtgatacttcctctcagggtcctcaatgaagctgatggagaaggtgccgggctcttcccggacgactctgcagcgctccagcagcagggctccgacgggctcggcctcgtctgtccgaaagtagaagaggaaattcaccaccagcttcaccagccgccgcttcagcacgctgcccttcttggggcccctcatgcccagctcggccgccatctcggccggctgccgggacagagcctgcagctccttctcgttgtaccgcatggctccgcggggaacgggaacccgggccgcgccctcccggccgccgtccccgctcaggctgggcctcgtgccgaattcgccacccaggcctcgctacttta

SEQ ID NO: 320521 - DNA, 582 bp, Homo Sapiens
agaatttgaaaaggcttcaaaaattttgaaaaaacatatgtccaaggaccccacaactcagaagctgagaaatgatctcctgaatattattcgagaaaagaacttggcccatcctgttatccagaacttttcatatgagaccttccagcagaagatgctgcgcttcctggagagccacctggatgacgccgagccctacctcctcacgatggccaaaaaggctttgaaatctgagtccgctgcctcaagtacagggaaggaagataaacagccagcaccagggcctgtggaaaagccacccagagaacccgcaaggcagctacggaatcctccaaccaccattggaatgatgactctgaaagcagctttcaagactctgtctggtgcacaggattctgaggcagcctttgcaaaactggaccagaaggatctggttcttcctactcaagctctcccagcatcaccagccctcaaaaacaagagacccagaaaagatgaaaacgaaagttcagccccggctgacggtgagggtggctcggaactgcagcccaagaacaagcgcatgacaataagcagattggt

SEQ ID NO: 320522 - DNA, 938 bp, Homo Sapiens
cccaaaacccttttttataaagtagtatttttccccccaggcacccaggaggcacttaggtagttatttttcagaaagggtcagaaaaaattatttaaaacccccctaaagggcttacttataacttagatagtcatacttaagctattcagtgattcactaatactgccaaaacaagcttttcttctagagacagtggtttcttcatgttaactgggtaagaactggacgtatttaaaaagaaggggaaaccaattgatatctcagcatgaatcctaagcatatgtctggtttggggtatgctcctcagcggatttttcatcagaagtatttatcctagaagctaagtcttttgattttgagtttcccgaatctgaggtatctgtaccttcttggagaaaaagccaacgcctcacatcactctgtgtctctacgtggggcagggaggcgaggctggctaacacccctttagattctgtgttctagaaggaagaaatgaggaaaacaaacattattccagacttttctgtcatccaaaaccaataaaacacaattctgttttttatacagtactagccaaagaaaacaaaaattagagcttctaagagcagtctagtgctcacctttatacttttacacctgcgtgtatataagtataaaataatgacgtttggacaaagaagctttgtagttatttattttaaagttacagtactttaaaactcctcgataataaatagcgtggatgttcccagtcctgcttccaagcgtaagctacgggtgagctttgtttcaggctgtgagaatggatcaggggaactggagccggtgatgttctcctgctcagcccgatcccggtgtcaccagtgggcagcccgacactcagaactcatcgatcttcctctgcaagtactttaacatggagtccatccgcctgc

SEQ ID NO: 320523 - DNA, 541 bp, Homo Sapiens
gccagaccatagtttgactggtggcatggaatttgtgtatcaaataaatgcatttgcttatttgacaaaccatcagtgtccactatttgttaccagagttgggccactatcttttaaaattgctggtgaaaacttgccactagatggcagtgcctgtatagatggggaaaaaattgccaccattcttggtataatacagtgtagcttagatgaggtggtgaaataggggtatcagccgaatattcctaatatagtttctcttgaattaataaactgaagatttgtaggaaaatgagtgagcaaaatttgtttactgttgtgaatttttcctacagcactgtttttaatcttggtgttttccaactttctgtactaatagatacatttctgtgcataagattataaagcatatactcacagttcagtagttttcgttaaggatttactgtgtgagtactttactgtgaggaattgcagaaccttttcccctctactcttgtctaaaagttctgtgtggcacacagagatgcgacctactcaa

SEQ ID NO: 320524 - DNA, 1122 bp, Homo Sapiens
  misc_feature (543)..(543): n is a, c, g, or t
tgtctcagctgtttaagtcaatgccttttatttttagtttttctgaagacaaagctcttataagaatcacagatgaaagatcaggcacaaatcacattttcccccttaataacaaaatacaaatccaataattttagaaaatcagtttttagtgacccagatgcctggagaaaagctgccaggatttttctggtctatcgcagaattttctacatcaatgagaaggatgctgcatatcttggctgtattatttcctaccgtgagaaaagagacttagtatatggaacatgcttttttcagaaaattggcagtaactgactttgaaggaaagttggttaagttggacttgcagctggaacttgggaagcactgtcccctccttacccccgaggaaggagacacagaggcacacttccagtaagttcttggttcagtgggtcactcatgtcttcaacagccagatctcattgcgccgtccgtagggcttcatgggagggtcataacccgtgcagaagtagatgtccccccggtaggtggcttgtncctccagggcagcacgcagacgggtggcttgtgctacgtagtctgcttccttggcataaccaccaaactgcatggaatagacagtgatgccttcccgttcctcaatcttaacgcttttgtcactgggagctggtgggtcgctttgaaattggtttggaatccggaaccagacttttaatttcttctgcagagagccatcttcattggggaacacagcaaaggaaatagggactgtcatccccatcccaattcccttgtcattggtgccccccgcatactttgcgaccttgggcattgcttcccgtagagcctcatccacaggcttatctgtcacttctactgtggcaaatttgccgccttcacaggccctttcttcataggcaacttcttccttgtcccctttgcttaggacctgccaaggccacgtctctacgcttccgaacagcgagttcttgatcatgcccaacatgttgtagccgagacgctcccgacgcacgggaggacgtgaggtggcgggggcgacggagcaccacgggcagcgaccaccggcggcagggcggcagggcggcagggtggcag

SEQ ID NO: 320525 - DNA, 434 bp, Homo Sapiens
  misc_feature (22)..(22): n is a, c, g, or t
  misc_feature (61)..(61): n is a, c, g, or t
  misc_feature (340)..(340): n is a, c, g, or t
  misc_feature (348)..(348): n is a, c, g, or t
  misc_feature (399)..(399): n is a, c, g, or t
  misc_feature (419)..(419): n is a, c, g, or t
atgcctttaattttaagttttnctgaagacaaagctcttataagaatcacagatgaaagancaggcacaaatcacattttcccccttaataacaaaatacaaatccaataattttagaaaatcagtttttagtgacccagatgcctgggagaaaagctgccagggttttttctggtctatcgcagaattttctacatcaatgaggaagggatgctgcatatcttgggctgtattatttcctactgtgaggaaaaggggacttaggtatatggggacatgcttttttcaggaaaattgggcagtaactgactttgaagggaaagttgggttaaggttgggncttgcagncgggaacttggggaaggcactgtcccctccttacccccgagggaggggggncacagggggcacacttcccngtaaggttcttgggt

SEQ ID NO: 320526 - DNA, 373 bp, Homo Sapiens
aggacacacacacctggggtgtggggcactgtaggccgttctcagcaactgagatgatgttgctggacaggatgcagctgaagatgttgaagtacaggagatacggcttatctttgttctcccccatgccacagtaggccccagtagagttcctggggtagaggacttgccgggggtctccatacaaccaggccacaatccccaccacgatgtaacctagaatgaagagcaggaagaggacgcagcagatgacatctgtgcagcttctgttcttgatggggcctcgaaaggaggggtcgtatttgactggcttcccgtaggcctcgtcatcctcgtcccgctgctttccccccatggctcagtctccggagtg

SEQ ID NO: 320527 - DNA, 539 bp, Homo Sapiens
gggtacagggttttccaggattagaaggaagccaagtttagctgtttgggcactaggttggctgggagtgtagggagaaggatggggggtggtcacagcctctctcaaaagcaagaagggcttcctggcagaagaggctggaccctcgacttagcccactaccctcatgactccagcttgactttagtcagtgtctattgagggggtctggaggccaagagacccaaggaaaggaggtatcactgtgagggtgaagaacagggcagcagaggccctgtctctccccagaccagcatgtcaagcctgaaagcccaggagatcacagcacacggggtgcccaggaggaaaggaaggccccccaccccctgcctccctggggcaggactggggcagggcaggggaccctcctgccttccaggagccaaagggaagccgaggccccagcgccactctggcccaggcatgggcagggccccaggcccagcgggcaactaggccttcttgggtcttcggccgacttggtaatagtagtaaatgct

SEQ ID NO: 320528 - DNA, 1199 bp, Homo Sapiens
  misc_feature (52)..(52): n is a, c, g, or t
  misc_feature (194)..(194): n is a, c, g, or t
catgggtccttcctattcgaccacccagatcacttcttttcctctacccacnaggcttgctatgagcaagagacacaaccctcctcttcttctgtgttccagcttcttttcctgtttttcccacccctttagttctattcctggggatagagacaccaatacccataacctctctcttaagcctctttataacncagggtgcacagcacagactcctgacaactggtaaggccaatgacctgggagctcacagctggctgtgcttgagggcagggcagcaggcatgaatgcttctatgtgtaaggcaggactgcccctatggcaggggtgtggggagccacagggctctggggtatgtctaaaagtgggggcaaaaaggttcaggaagccaaaaacatgggcttatttgtcatagaagtccacgtgggctccagacttgaactcgtccttttccagtaagctcagcagtttctgggctgacaccttgcaatccaccagcttcccctttgccttcagctcctgcagcccttttcgcatgtctgggtccacggaggtctcccgggccaactgctgcatgtctgtgtccagaggacctggggcatagttcagcaccctcacattaggttcctccagcgccaggacctggaacagcatatcacgagcagcctttcctgcacagtacagcgcccagcctttgaaaggttgcagggcacagagggacgagatgttaaccacggttctgttgaggccaggactgtccgggaaggccttcaggacgctggaagtcaggcagagcatggaggtcaagttcagtgcccagtagttgttcacttgagtggagtcactcaggtccacgaagcctttggacacatccccaagagagcccgcgttgttgataagcagcagtcgctgcagccccttgggccgggggagctcgcgcagggcgccgagcagctgctgcaagccggcctcggcgcccaggtcggcgggcacccgcaccacgcgcaggccagaccgctcggcgcccagctcggcctccagctggcgcagtgcctcgtcgttgcgggcgctaaggacaagcacggagccgggcgacagcagcgaggccaggagcggggccagcgtccggccgaagccgcgggaggccccggtcagcaagcacacagcacgccccagcccgccctccatgctcctgttct

SEQ ID NO: 320529 - DNA, 909 bp, Homo Sapiens
  misc_feature (423)..(437): n is a, c, g, or t
  misc_feature (722)..(730): n is a, c, g, or t
attataaagaaggttgaaaggagcagggaaaagatccagaagcatgttagttcgacatcatcatcttttcttgaagtatgatgcatattgcattattttatttgcaaactaggaattgcagtctgaggatcatttagaagggcaagttcaagaggatatgaagatttgagaactttttaactattcattgactaaaaatgaacattaatgttaaagacttaagactttaacctgctggcagtcccaaatgaaattatgcaactttgatatcatattccttgatttaaattggcttttgtgattgagtgaaactttataaagcatatggtcagttatttaattaaaaaggcaaaacctgaaccaccttctgcacttaaagaagtctaacagtacaaatacactatctatcttagatagatatannnnnnnnnnnnnnnaaatattgtactatttatggtggtggggctttcttactaatacacaaataaatttaatcatttcaaaggcattctatttggtttagaagttgattcccaggagtgccatatttcagctactgtatttcctttttcttgtaatgtaagcagctcagataccatgtgctatcatttttgtatcaagttttttgcacaggatgtgaccactgtcagatcactgttcttttctttctttttgtgattgaaaagccctatactacaatttgaagtaaatttttgtttttnnnnnnnnntgtaaatggttgctttatttttattttaaaaaggtatgtctttggtttggcagaattcaaaaagggctatcaagtggtgtaaaaaaggtaacagtgtccataattaacgcttagtcatagagtcaaaaacatttaagactgattgggttgaagtttataataaattatattaacatgtc

SEQ ID NO: 320530 - DNA, 782 bp, Homo Sapiens
gtagtgcctttgttcttgggggttaagggagtcacggtcaacgtgcggccaagtaagggtagccggtgtggttcccctgggtagaggggaaaccacggaacacgtgtctgtccccttcggccaatgtttttcctgaagtccgctgtcagacgggcgggggcctcccgcaatacgtaatgtatgccacaggggaatatcaaaaagaagcccggtgtattgtgaagaaagcaattgccaaggtcccatgggtggatgaattgtgaatccgccccccagcccacccgacaagcatattgggccacaagttttgccagaaattggggcacgaactcttgtcctttttatcttgttcgggcgtatgggaaacacgggatcacggcagttactctgggatgatgacgctatcttgcaggcattgatcatgatgaggagttccatcaggttgtcgttaatttccccgcagccgctctggatgatgtagacatcttcccctcctcacgctttcaccaatctccacgctggtctcctggttgctgaacttcttcagtgaccaccttgcccagctccaggcccaggcggtcggtcacgcgctgggataggtcctgatgcgaagctgccgctgaacagcacgatgttgggcatggtggggcgcgcgaactccgaggggcgcgcggcggcggaggaggtggcggaggcaacagcgacagcgacgcgggaggctgctgctgcgggagcgggcaagcgcgcgacgcgtgggtcgacgatatcccgaaattccgggg

SEQ ID NO: 320531 - DNA, 978 bp, Homo Sapiens
ttaatggaggagaagaacaggggttgaccccgttagtttcatcgacggccccactggggcaacacaaaaggtgaagggtttccctgcccaataacccttagggccaccctggtgggcggagaaccttaggtaataatgtaaagaaggaagcccagttcttgaaccatccaattgtcttcttccccgttaggcaatccgagccggacctgggtgccaataaatttcttccaaaaaccccaatttttgaaaccggccatgagggcacaccactcattgctgagaaaatagatcagtttttggtacttctgatgattactggcaatttctccatggggagctgaggggttgaccagtggcttccaccaagttttccatcattcttttccttatttccaaaaggtccagctgcgagttcaaccatgatactctcaccattctttgtgatgaatggtgttatgaaaacaaaaaatacatcatagaggaggagaaggcctagaagtatcacacatgacttgaagttgggcaacttcagtgttttaattaaattcagacagaaagcaatccccaagatatcctgtaaaatccaagcccacctgtcttcatttcgaaacacagcccaaacaacagctactgctatgcacagtccagagagaaaaataagtctcacttccatgtttttgccacgacatgcaatcgtgcattgtccatatggtatcttatgaattagtgcagcaagacagttgtacagactcattgctgatgctatgcagaaaattgctatcataacataaaccaaccatttgtagaagaaataaagtaagaccatcataacacagcagatgaccacaaatattacaactgtaagaggactaaaagttaaatattcttccttctttttcctcatttctctatcttcagttgtcactgctttcaagttttccaattcaactagtccactccagtatccacctaatgcca

SEQ ID NO: 320532 - DNA, 735 bp, Homo Sapiens
cttcgcgccggcccttccgcgggtgatcagctggtctgcgctcccctgacgtgggctggggcacgtcaccgccgaatggcagcctccagaaagccaccgcgagtaagggtgaatcaccaggattttcaactgagaaatttaagaataattgaacctaacgaggtgacacactcaggagacacaggtgtggaaacagacggcagaatgcctccaaaggtgacttcagagctgcttcggcagctgagacaagccatgaggaactctgagtatgtgaccgaaccgatccaggcctacatcatcccatcgggagatgctcatcagagtgagtatattgctccatgtgactgtcggcgggcttttgtctctggattcgatggctctgcgggcacagccatcatcacagaagagcatgcagccatgtggactgacgggcgctactttctccaggctgccaagcaaatggacagcaactggacacttatgaagatgggtctgaaggacacaccaactcaggaagactggctggtgagtgtgcttcctgaaggatccagggttggtgtggaccccttgatcattcctacagattattggaagaaaatggccaaagttctgagaagtgccggccatcacctcattcctgtcaaggagaacctcgttgacaaaatctggacagaccgtcctgagcgcccttgcaagcctcttcctcacactgggcctggattacacaggcatctc

SEQ ID NO: 320533 - DNA, 1681 bp, Homo Sapiens
  misc_feature (43)..(47): n is a, c, g, or t
ggggcggccggaacaggggtgttttgttgtcggtgggtcgggnnnnnggattggcccagtttttaaaggaaggagccaaataattttttgaaagtttatttatgcttcttggtctttaatgagtcgcagctgttcttggagaatggcttagcagccagggtcgccgcagggcaggctttgccctatactaactgcccagcaagcaggcacatggggctgagacccagcacacatcctgcccactgagctgtccgcccaggccctgggcagcatgttcctttaatgtacccatgggcacaagtcacctatacaagcaggagactcaaacctgtcaactggacggtaaatggatgctttcagaatacttccagacttctgagttgcatcttttaaccaatggttttttgatttcttatcaaaatataagccacagcattttaggccatttgccttgcttgcctgcaataaaacaagcaaggacagtattgaacccagtaaacataatgtggaaatctcacataattctccaatctcaaagatgttcaatttattatatacttaaccattttttataaacacatgtcacagaaggccactgtgcctgattccgtgtgaaagacgcatctgcccatcactgcaatggtcctacctgcaggctattttccacaccagtaagtacaggcagcaagacagccgctggctcaagttctcccaaggactaaagtcacatggctcagtcttccgattgtttagctccttctctggctaatctgtcagcttcttcattgcctataaatcccgaatgaccaggaacatgcatccactgaatgtccatcccctgggtaagcctctccagtgccacaaagtcctctttgttgatcacctctttccctgcacttgtcttccacccatttttcttccaaccttgaacccagttagttataccatttatcgtaaacatactgtctgtatacagaaccagtttattgatgttttgagtctttgcttgttcaatggctttgcaggctgcatgaatttccgctctttggtttgtctgccgcccaggaagtctaatgcctacatttaaaggatggcccggcccccagtaaacgccgattcctgctcgcggccttctacgcccattactggagcagcagccatcagtgtagacgacgacgaagtctcccatgtaggaaaacgtgtctctgctaactggaggcgccggctccacgctcggcttcatgtgctttgcatacggctctgcgctttcatgtccatctccatccagtggctcacggagtcgcttgctggctttcgcctccgattcttgtccatgttgattttcatgcccttctgaaacttccgggcttgcagatttcctgacaaaggcccaggcctcatcctctgtggcaaacttcttaaatctggcagcaggaaaccggtccacctgtgctctgcactcattccaggtcagaaagaccccggtcttgcggcccctcctcacggcatagaacatcccgaacccgcgagagccgcggcggcagggcaaggcggccaaggcgactctgtgggccaggaacagaggccagctcatcgctcactcccggcaccgggaagcatttcgactcccggcccagcgtgggcgcgagccgccggcgctcaacaccgcacttccgtcccc

SEQ ID NO: 320534 - DNA, 577 bp, Homo Sapiens
aagctgctctcttttccttttaaaatcacttctctggcctctggtttctctctgctgtctgtctggcatgactaatgtagagggcgctgtctcgcgctgtgcccattctactaactgagtgagacatgacgctgtgcgtggatggaatagtctggacacctggtgggggatgcatgggaaagccaggagggccctgacctcccactgcccaggaggcagtggcgggctccccgatgggacataaaacctcaccgaagatggatgcttaccccttgaggcctgagaagggcaggatcagaagggaccttggcacagcgacctcatcccccaagtgggacacggttttgcctgctaactcgcaaagcaattgcctgccttgtactttatggggcttggggtgtgttagaatgattttgcgggggagtggggagaaagatgaaagaggtcttatttgtattctgaatcagcaattatattccctgtgattatttggaagagtgtgtaggaaagacgtttttccagttcaaaatgccttatacaatcaagaggaaaaaaaattacacaatttcaggcaaaa

SEQ ID NO: 320535 - DNA, 801 bp, Homo Sapiens
aagcgggaggcgtgcccggttcatccaaggcgcaagatggcgctgctttttgcacgttctttgcgcttgtgccgctggggagccaaacgattgggagttgcctccacagaggcccagagaggcgtcagtttcaaactggaagaaaaaaccgcccacagcagcctggcactcttcagagatgatacgggtgtcaaatatggcttggtgggattggagcccaccaaggtggccttgaatgtggagcgcttccgggagtgggcagtggtgctggcagacacagcggtcaccagtggcagacactactgggaagtgacagtgaagcgctcccagcagttccggataggagtggcagatgtggacatgtcccgggatagctgcattggtgttgatgatcgttcctgggtgttcacctatgcccagcgcaagtggtacaccatgttggccaacgagaaagccccagttgagggtattgggcagccagagaaggtggggctgttgctggagtatgaggcccagaagctgagcctggtggatgtgagccaagtctctgtggttcacacgctacagacagatttccggggttccagtggtgcctgccctttgctctccgggaatggggacctgctgacccatttcaggggcttgaaggtgcccccaggggccctctaggaatgtcccattacttgggaggtcccaaatcaccgccttttggccaacccctcttttttggaagatggctctaaagcccctttttactttttgccttcaagccaacccttcctaccttccccccaatatcga

SEQ ID NO: 320536 - DNA, 436 bp, Homo Sapiens
  misc_feature (384)..(384): n is a, c, g, or t
  misc_feature (403)..(403): n is a, c, g, or t
atggcgctgctttttgcacgttctttgcgcttgtgccgctggggagccaaacgattgggagttgcctccacagaggccagagaggcgtcagtttcaaactggaagaaaaaaccgcccacagcagcctggcactcttcagagatgatacgggtgtcaaatatggcttggtgggattggagcccaccaaggtggccttgaatgtggagcgcttccgggagttggcagtggtgctggcagacacagcggtcaccagttgcagacactactgggaagtgacagtgaagcgctcccagcagttcccggataggagttggcagattttggacattttcccgggattagcttgcatttggtgtttggatgatccttcctggggtgtttcanctattgcccatcgcaagtngtacaccatgtttggccaacgagaaaagcccca

SEQ ID NO: 320537 - DNA, 741 bp, Homo Sapiens
  misc_feature (319)..(328): n is a, c, g, or t
cacgaaagcaaagggaaaaagtcagaaaggaaaactctctgcctataggatctataggagttacagatattttcaaatcgatgatgaaaatagatcgtgcttctttgtagcaaataattaaccccctttatgaataaaacataaaatgtcaaagcttttactcactgaagtagtttgtcttctgggagagatttcaaactcaaaattactcatttcctattttttgcctgaacacaatgaggatcaaatagtacattcaaatcaggacacctgggtatatggacaaagatatcctacaattaaaatggaatagaagttnnnnnnnnnnttcagtcccctacaccacaggcctcaaacatgcttgctgatggattctgggaaggttttggatgaaggacggagatatgggaggaaagtgagaaaacagtggattccctttgaaaagtatgctagcagacaagcatttggttttatgaaagaggcactcttatagagaaagaagctagtatgtggtgtataaaaagcccctaaatcatcaccagaatgtctatccatgattgtactaaagctcaatatttgagaggcttaagggatttgtatggtacattttagtgtttgattgataacatctagtgtttccagaaaaaaattcatcttgttcataatgaagatcccttaacacctagtcagaagctatcaacaataatactttctccccctacttgggtcacctatttccaa

SEQ ID NO: 320538 - DNA, 638 bp, Homo Sapiens
ggaaacatcacttcatcaaattcataaccatgaaggaaataataattcatttgcttttgttataatgccaggattgggttccacaagtcagggtgaaaaaaaacaggtttacacctagcagcagatagggcagaagaaggtaatgcaaggacaactccagctcctgacagtagccaaatacttcccaggtgtactcagtataaaccatcccttgcaagaccaggtgcaggacaatgaaggtgtggtttctcgtatggaaaaggtaatgaagcaatccatgcatggctctctgaagacattctggaattatacaggaaaatatctgtgctcctcccctggccaggcctttcaagctatgggttttcgagcagacgcagataagaacaagacccatcagcaccgaagccaggtagaacaagaagaggaccagaaagtccatcctgcagatttctcttggttgggtaattttcagccggcagctctggcattcctcttcccaacattcacagataattcaaacagcagctcctcttgggcagcagtgtgtgcctggcatgaccagtagctgccggacatggttcttccaggagcctggatctggcgccagccgctgggctccggcgcctcccgggcgcgat

SEQ ID NO: 320539 - DNA, 962 bp, Homo Sapiens
gcctgggtggcgaattcggcacgaggccctcaggggcgccgtgctgatgtcacgagcccgcaggaagtctcgtatcgcgcccgggaggcgccggagcccagcggctggcgggccgccgtcccacccccacctcgccggagtccggggcggccccggtgtcccctccgagcctgctgcactccacgtccccctaccagggctccagcccccagggaaatctccgaccaggcccgcccaggagccagatccaggctcctggaagaaccatgtccggcagctactggtcatgccaggcacacactgctgcccaagaggagctgctgtttgaattatctgtgaatgttgggaagaggaatgccagagctgccggctgaaaattacccaaccaagagaaatctgcaggatggactttctggtcctcttcttgttctacctggcttcggtgctgatgggtcttgttcttatctgcgtctgctcgaaaacccatagcttgaaaggcctggccaggggaggagcacagatattttcctgtataattccagaatgtcttcagagagccatgcatggattgcttcattaccttttccatacgagaaaccacaccttcattgtcctgcacctggtcttgcaagggatggtttatactgagtacacctgggaagtatttggctactgtcaggagctggagttgtccttgcattaccttcttctgccctatctgctgctaggtgtaaacctgttttttttcaccctgacttgtggaaccaatcctggcattataacaaaagcaaatgaattattatttcttcatgtttatgattttgatgaagtgatgtttccaaagaacgtgaggtgctctacttgtgatttagggaaaccagctcgatccaagcactggagtgtgtggtacctggtgtgtgcaccgtttcgaccatcccttggggttggggggaaacactgct

SEQ ID NO: 320540 - DNA, 1018 bp, Homo Sapiens
  misc_feature (436)..(475): n is a, c, g, or t
ttaaacaagacaatgttttaattgtaaaactacctcgaggcaggggtgggcgggctggggctgcgctgaccgggcaggaacctggttcttcaggcagtggttctgccagggccaccccgcagggacagggaccatctgtcccccaataagggcaggggctagagtgttataaaatgacaatataaatagacttctagaaaagaggaggctgtccaggtgcagtagtcatttgctgcaggggctggagagggtggggggccctgacctgtctccccatccagccacagaaagggggcgcagggctacgggaaaaggccactcttcggacattcatgatcgacccccacaatggctcaggggggagagggggcttgggtgtcaggcaaggcgccagacaccccttgcgggctggaggacggggtggctggacctttgnnnnnnnnnnnnnnnnnnnnnnnnnnnnnnnnnnnnnnnncatacatgttcacctcttagtgttctctccacccccagcgacccccactgcagacttccagtgatgggagggccgctgcccttcctggagacagaagaacatgggggagggcctgtcccagagggtgggggtcctgggagcctcgcttgctcccacgagtccctgtgtttttctaaaagtcacgagatcaaaactggagttcagtagtagggtctcatctacccccagcaaggagggtggtgccacgcggagcatctcccgggctgggaggagtgggaggcctggccccatactggcctcagtggggcgggggtgacccggggggctctttggttgaggggaagggcgctgggcctcatctggtgcggttctggcgcatgaggggcacgatgctggcaggcggccctgcattggccaggaatgggtgcttcagcagctcggctgccgtggcccgctgggcagggtctcgcaccagcaggcggtccaggaagcccttcagggatggcgacacattgtgcaggttcttcagtcggggtggcagcc

SEQ ID NO: 320541 - DNA, 943 bp, Homo Sapiens
  misc_feature (16)..(16): n is a, c, g, or t
  misc_feature (27)..(27): n is a, c, g, or t
  misc_feature (70)..(70): n is a, c, g, or t
  misc_feature (93)..(93): n is a, c, g, or t
tcacccaattaacatnaaacctccctnccccaagcaacaacagcaacagaaaagcccacgaaaggccccnataggtcccctaagaaagagcanctggggctccaccctaccgagtcccagtggccttattttgaaaaagatttgcctttcccacaggtaaaggtgtcgccccgaattacatttccttgaagaactgccattggctcatcctgcatatgaggtagttctctttgcattttgcagatgctctcacttgcccagggggtggatgtcacgaatccgaaacctctggcttcacattcctactgggaatgcccccccagcccgcagtcacaagtcagtctccaatcctgctgcagactctttagctcttcaaatccaaacagatgttttcttcacccacaggtttaggttttaactggctgctcagtgttaaaaaggaatatctcaagccccctgccatgcaaatatttaaccctacaaagtttaacaaagagaaaatgtagtctccaccgattaatatcccaatgtaggcaagggatacattcttgatggctccaaccactgctgtcgtcagggctgaattgtaatagctgcacagaaccgtggagtacatcagcagaaaccccaaaaaacaggaaagaagaaactgtaggataaacacaacattcttccattggttgaattcagtagcctgttgcaggtctccagtggagacactaataataagagttgggataatcatgaagcaggcattgtagaaaagtactccgtatttccctagctcctttgggtccattttctgtttggtataaactccatttgctgctgtgaagatatcattcaggaatacaaaaatatagccttctaagttaaaagcaaggtcagacccagctgctatgaaagccccgagaataatggcaaagacactgaggatgatcca

SEQ ID NO: 320542 - DNA, 457 bp, Homo Sapiens
  misc_feature (42)..(42): n is a, c, g, or t
  misc_feature (441)..(441): n is a, c, g, or t
aaaaccaccaacaatcccacccccatgggttggaaattcccngtaagccctggttggccaggtccctaccagtgggaagaaccacctaaataaataaagaagttggggaataatccatgaaagccaggccattgttagaaaaaagttactcccgtatttcccctagcctccctttgggtcccattttctgtttggtataaactcccatttgctgctgtgaagatatcattcaggaatacaaaaatatagccttctaagttaaaagcaaggtcagacccagctgctatgaaagccccgagaataatggcaaagacactgaggatgatgttgagtgaatactgcttcccaagtatgatggtttccagaagtaaggtaagtggaatggtgaatttcctgagcacggtgaacatcggtaggcttaatttacttgtgcttgataantcacttatgtggtttc

SEQ ID NO: 320543 - DNA, 707 bp, Homo Sapiens
gggtgagccaccacacccagcctggagctaagttttgaacccagggatgtaactattcacatgcactatccaccatgctatagcagaaatctgagcacctgcctgcccacgaagacttggagtcctcgttattccttttgcaaaataattattaaagtagtagtcatgcaccagtgttggctcatatcccaaacgtacaaatatatttaagcattctaccatcggaaacagcaactgctaaggtatcatggaataataaaataaatcagcagacaaaggctttgtaagtctgttattattaatcaaatgccctaagaacttctcaagtaaagttgttataatgaagacaaacattcagtaagaaatgtaaacagttcactgctttttgtgaagaaaagctatattaatatcttgcaatgctctcttcatatattctcagaaattttctggccaatgtgggacccactttgactttcataggaacacatggggattccactaacttcaacagatttgtctcttgcctgctcaattcaacagcagccagatggaaaatgaaaaactgaggatggggctgggcctattgtcaaagacacaaagaagttattgagcagaaacagtccaaagtcttacccagctgctatgaaagccccgagaataatggcaaagacactgaggatgatgttgagtgaatactgcttcctgta

SEQ ID NO: 320544 - DNA, 496 bp, Homo Sapiens
  misc_feature (107)..(107): n is a, c, g, or t
tagaggatttaataagaatgcatgcgaaagtgcagggcgctgtgcttgatgtacagtaggttagagacaggtcctcctcccccacatcttattccataaatagctcntatgcccaacagaaaccaggtgcacagatctttccactttgggcctaggaggcagagggctgtaaacagccagaggtccagttttcagacccgaggtcattttctgacactgctcaacagcaatcttatagtaccgggggatatgggagacaagagctcggccccactctgcaagggagagaggctgccaggagccaggatgactccataggctgccttggggaagaagcaggtaagcaaacctagcccctggagcctgcctccggggaggtgatgacagcagaaaccttggacactccctccccacaccaccttccaggtcccctagggtggggcggccctccacttcctgtagccaacctccctttcagcctccctgcccccaccgg

SEQ ID NO: 320545 - DNA, 1242 bp, Homo Sapiens
tttttgtgagagctttaatggcacaaaatgtttatagctacaagttatacatgtattgtaaactgtatataacgatacaaagtgctaactaaaatagatgaagaatgcataatcactttggctcagttaattccaataatttccacaacgggttcatgaaaaaacttatctgactggctaagtcttcaattctcatttttttagaatagtaaatatttttactgcaatcacgggaacttgttgcactttccaatgtgcaagtttgtgcagttttgctcttgattctatttacaaacatcttgagccagttttcatcaaacatatgaaaaatgaagcctgcctttttgtccccaaattgtaaacaggtgtaaagctttttaaacattaacctcacaatttcaactattaattgttgaattctcctttccaaaccacaatgttttcgttcaacacaaatctgggtgtagcagtaaaacgttcatcccatgtgttagggctacagatacatactacatgctctcataataaattctactgtgatgatgtattcacgttttaagtaattttccataatttcactgatgctttaagaaaaagggcaacactatgtttctttttaacgctgaaagaaatcataaatatacccagtttcagtggcaccactgatagaactgctgctgaacttggaaagagcacaatgcactagctgtaagaagtcactttcaggtaaagtgtaattttacttttcccccctgtaataccaattgtaatagaaattgcatactgtagcagtttagctagtcagttctcctaactttccagtctttccaattttattcaggcttttcaaaaatcagtgagccatcagatttactttcttcccaaagaaattcaaatatgaacacttgaaataaataggttatagaaggcaaatcaagtgttaccaggtttaagagtaagacagaaacatggtctaggaaaaagatgtccaaaattatttagacatcaaatgctagaaagaaaaaagaaaattactttcaaaactaggatatatcatctttcttaaagatagccagctatattcttgaaaaaagataaaaattttgtttaatctatatgttattttccactataacacatcaattttacaaatgttgatgtgagaaaagagttagtttctgcaaactggcaaacctgtctgtcatagtgtttttattcaagttgacctgatgcactttatag

SEQ ID NO: 320546 - DNA, 1107 bp, Homo Sapiens
  misc_feature (270)..(285): n is a, c, g, or t
ttgcctgagtactgttgtcattctgctcagccaggcacggtcagtttcttggccagggacattgctatgtgctgtgtgcaagctctttagaagagagattggattttcttggcattatcagcactcatgctatttagtctacttctattttgactgactctttaaattagtacaatttttctacttgtcatataactcctggaacaatagtacgggaagccgtgatccttttccctgactcatgattttagtctttttccaaatcgctgnnnnnnnnnnnnnnnngctgctccaacgaccagcatgtgttggagcagatctccatggtaagccaaaagtggacttgtcagcctataactactctgcagctgccactaactctacaggcacagtaactacactttatacaggagcacatgccaaagtgcctgggaggtgccaataaaatcaagaaataagaaaactacaaaaaaagatacggtattaaccttggacataattttttttagggaggcagctttcccacttttataaagggggttgtaaatctcaagaggtcatttgttccccatagcagcatatctcatttttaaattgaagcgaattaaataggattttactactcaacattcattatactgttaatctttgctgaaatatatgctaacaaatgttaagcaagggaaactgaagacttagtcatgtggattgttagcagtgatctgcattctgtaaaagaggtactttcccatgatgtaggcatgaagtggtgccagtaagcgtagagcggaaatgttgactttagttaacattgggtttagcatttccagtgcagcattatcagtgggcctttaaaaatacttcgtaagtacattagctttcactttgttgttaaattatagcagactcattatagagaacaagtttgccttgattttgtttaaaatgacttctgctaagcacccagaagataaaattgacatatttttataatataagcatactttttttgtacattgtgttcattcttgaataaaatgagttctgtgttggcttgtagatactaaaaagaaagtattgattttgattcaataaatgttttctttc

SEQ ID NO: 320547 - DNA, 524 bp, Homo Sapiens
  misc_feature (396)..(396): n is a, c, g, or t
  misc_feature (406)..(406): n is a, c, g, or t
  misc_feature (418)..(418): n is a, c, g, or t
  misc_feature (434)..(434): n is a, c, g, or t
  misc_feature (451)..(451): n is a, c, g, or t
  misc_feature (456)..(456): n is a, c, g, or t
  misc_feature (484)..(484): n is a, c, g, or t
  misc_feature (492)..(492): n is a, c, g, or t
  misc_feature (512)..(512): n is a, c, g, or t
tcaggattgaaagaaaacatttattgaatcaaaatcaatactttctttttagtatctacaagccaacacagaactcattttattcaagaatgaacacaatgtacaaaaaaagtatgcttatattataaaaatatgtcaattttatcttctgggtgcttagcagaagtcattttaaacaaaatcaaggcaaacttgttctctataatgagtctgctataatttaacaacaaagtgaaagctaatgtacttacgaagtatttttaaaggcccactgataatgctgcactgggaaatgctaaacccaatgttaactaaaggtcaacatttccgctctacggcttactgggcaccacttcatggcctacattctgggggaaagttacctctttttacagntatggcggtncactggctaacnattcctcatggtcttnggtcttcagtttccctnggttnacctttgtttagcctattttttcggcanggtttacngtttatggttgttgtggtgntaaatccctttt

SEQ ID NO: 320548 - DNA, 387 bp, Homo Sapiens
  misc_feature (114)..(125): n is a, c, g, or t
ggccacaggggtcggtcacacagaagggaaggcaaggaggaaaacttaactaccaatccttggttcagattgagttatgcaggaatatatcttcctgatcagtccccgtgcccnnnnnnnnnnnngccacttggaattatgcactgactccaactatgtgataccagctatcagccttttgtgtttaaccattcccagaaatggacaccacccttggctttataggctccttgcagaacccacttcacaaaaatgctcttcaccaagaagcctctagtttccttttggtaggttataaaaacagaacatctgtcattaacagtagagtgttaaatacttttaaccactgacaaggcttcagaaagtttcacagtttcgttatgctct

SEQ ID NO: 320549 - DNA, 1413 bp, Homo Sapiens
gtattagacgcaacatcattggcccaggggagtccgagaagagctgccattggctgacagggcattttcaggctctgtcattggtcagggagcacaccccagcctgaagagtgatgccattggccagggagtggttttgtcatagccgttggctgtgaagtggaaggaaaagatctgggaatgaagccctgtggccaggaagatagacagggcagcaacttctgggcctccaggccctcttcccaccatagcaatgtgggcaaaactggtgtcaggccccagccagaaaaaggagcccaagccagagggcaagtgacaaaggatgtaccatgtccaatctcccacaccctggggctgcccttcccaatgtctttcttgatagccaagttgggctgggagcagctcactgctcctctagccaggagggtttctcagctcctggaggccgcagcttgatgttgaactgctgcagggtctgctccagctgtttctggttcccagcaaagtaggcggacacagcattgtggaagagcagcagctgcttgtgcatcaccttgatcttgttttcttccaggaacttgagcttgatggccacatctccccgcagcttctcatacttgtcccgatgggcctggaaagtggcctgggcactctcaagtcgaccacgtgtccctgcatcccgggggcctagactcagctcctctaagtctgttcggtaggcatcatattccagcctggcagcctcatactgtttcacagtcatgagcgtgtcttccatggtcttggtgaccaatgtgttgatgctagagacaaagaagttcacggctcctagcagcgtttccccattcttgcatagtagtttctgtgtctctgcattgtagccaaattcctcctgaagctctggggacttctggctgaggtcagcaaaggcatcacccagtgcatgctgggtctgcagcaggctgtagaggtgggctgtcagtgcccggcccagctgcaggacactctcatacttgcgcttcgtctcacgcagcaactcaatctgcagctctagctccaggtccacagtccgtgagcctcgaccaaatcgttctgataacagttgctttgtgcacttataggtgttgatgccccatttcttgacgatgtcaaacttttctccagcaatgccccgagccacctcatctccagggccagaaggagtggtgctgtgagatggatggcggccagaccctgtggggatgagtccatcaccagagcccccatagccaccagacacaatgctggtttcattgaggttgggtcctgacaccatcacctgctggaggtcctcgggccgggccgctcttcccctcagggcgccaggcccgggccgcgcggggacctcgggctccagttcccgtcgcgatccta

SEQ ID NO: 320550 - DNA, 951 bp, Homo Sapiens
  misc_feature (36)..(36): n is a, c, g, or t
accttgcatccccggggggcctagactcagctcctntaagtctgttcggtaggcatcatattccagctgggcagcctcatactgtttcatagtcatgagcgtgtcttcccatggtcttggtgaccaatgtgttgatgctagagacaaagaagttcacggctcctagcagcgtttccccattcttgcatagtagtttctgtgtctctgcattgtagccaaattcctcccttaggctgcctccacaggtgagtgctgctgggggtagggctgggcccaccctgaaggggttctccctgtgggctgaagctctggggacttctggctgaggtcagcaaaggcatcacccagtgcatgctgggtctgcagcaggctgtagaggtgggctgtcagtgcccggcccagctgcaggacactctcatacttgcgcttcgtctcacgcagcaactcaatctgcagctctagctccaggtccacagtccgtgagcctcgaccaaatcgttctgataacagttgctttgtgcacttataggtgttgatgccccatttcttgacgatgtcaaacttttctccagcaatgccccgagccacctcatctccagggccagaaggagtggtgctgtgagatggatggcggccagaccctgtggggatgagtccatcaccagagcccccatagccaccagacacaatgctggtttcattgaggttgggtcctgacaccatcacctgctggaggtcctgctccagcccatcatcttcaggaagctgcctggcttcgccgttcccgtggatagggatctccattgtggctgccttccctaggatcccgtccgtcatggctcgggccgggccgctcttcccctcagggcgccaggcccgggccgcgcggggacctcgggctccagttcccgtcgcgatcctagcagcaggtgagggactcggcggaaaaat

SEQ ID NO: 320551 - DNA, 909 bp, Homo Sapiens
  misc_feature (122)..(122): n is a, c, g, or t
catctcccccggcgagcttttccataccttgttcccgatgggccctggaaaagtgggcccgggcactctccagtcggacccacgtgtcccctgcattccgggggcttaggactcagctcctntaagtctgtcgggtaggcatcatattccagcctggcagcctcatactgtttcacagtcatgagcgtgtcttccatggtcttggtgaccaatgtgttgatgttagagacaaagaagttcccggctcctagcagcgtttccccattcttgcatagtagtttctgtgtctctgcattgtagccaaattcctcctgaagctctggggacttctggctgaggtcagcaaaggcatcacccagtgcatgctgggtctgcagcaggctgtagaggtgggctgtcagtgcccggcccagctgcaggacactctcatacttgcgcttcgtctcacgcagcaactcaatctgcagctctagctccaggtccacagtccgtgagcctcgaccaaatcgttctgataacagttgctttgtgcacttataggtgttgatgccccatttcttgacgatgtcaaacttttctccagcaatgccccgagccacctcatctccagggccagaaggagtggtgctgtgagatggatggcggccagaccctgtggggatgagtccatcaccagagcccccatagccaccagacacaatgctggtttcattgaggttgggtcctgacaccatcacctgctggaggtcctgctccagcccatcatcttcaggaagctgcctggcttcgccgttcccgtggatagggatctccattgtggctgccttccctaggatcccgtccgtcatggctcgggccgggccgctcttcccctcagggcgccaggcccgggccgcgcggggacctcgg

SEQ ID NO: 320552 - DNA, 821 bp, Homo Sapiens
ctgccttttatgaaaggtttattcctagtgctagatcccaatcttcttgggctctaagcacaattaaactgggtgggtgggtgagggtaggcctattcagatgcaaggccagcaatggggctccccattatccccacccctttggtcccagtccccttctctgcaatgggcacgcatagaggagagacaaagggtattagacgcaacatcattggcccaggggagtccgagaagagctgccattggctgacagggcattttcaggctctgtcattggtcagggagcacaccccagcctgaagagtgatgccattggccagggagtggttttgtcatagccgttggctgtgaagtggaaggaaaagatctgggaatgaagccctgtggccaggaagatagacagggcagcaacttctgggcctccaggccctcttcccaccatagcaatgtgggcaaaactggtgtcaggccccagccagaaaaaggagcccaagccagagggcaagtgacaaaggatgtaccatgtccaatctcccacaccctggggctgcccttcccaatgtctttcttgatagccaagttgggctgggagcagctcactgctcctctagccaggagggtttctcagctcctggaggccgcagcttgatgttgaactgctgcagggtctgctccagctgtttctggttcccagcaaagtaggcggacacagcattgtggaagagcagcagctgcttgtgcatcaccttgatctgggggtccagcagggtcagctaaggctggaccctcgtgccgaattcgccacccaggcctcgctacct

SEQ ID NO: 320553 - DNA, 728 bp, Homo Sapiens
ccaatctcccacacccctggggctgcccttcccaatgtctttcttgatagccaagttgggctgggagcagctcactgctcctctagccaggagggtttctcagctcctggaggccgcagcttgatgttgaactgctgcagggtctgctccagctgtttctggttcccagcaaagtaggcggacacagcattgtggaagagcagcagctgcttgtgcatcaccttgatctgggggtccagcagggtcagctaaggctggactcaggcgcccttcttgagggtctatgagcctgagcccaggcacagaccaggggcacaaggactctgctctgatggtgcttttggggtaggggctgaactctacccagggagtcaaaggagaagggtcagtatgatggaagaaacctcactggatttgtgggccctagggtttttgtaccccagctcagggggtgatttttcccagttatgttcctgggaccagcagccaaatcctccaacaggaaagggccaggaattggagggagggtgatctggaaaggcccaggggttgagggggtgaacactctactccccagctaggctgcatttcctcattcaataatggggagggtctgaggggaaggttagtgttacagatggaaaggtgggctagggtcaagggggtggggttggcaccttgttttcttccaggaacttgagcttgatggccacatctccccgcagctt

SEQ ID NO: 320554 - DNA, 1003 bp, Homo Sapiens
  misc_feature (215)..(215): n is a, c, g, or t
  misc_feature (249)..(249): n is a, c, g, or t
cagcatctgggatggagtggttccatgtgtggtgagccaggactggaggcaactttttgaccatgtgctcgtagatcacactggggatgatggtcagggtgacaacgtccccagccggtgcccagaatctccatgatctttgtccccttcagcccgatacatttctgcccgtttacctcacacacgtagtggtgtgagggagcccgttgcgggcngcagactccccttgacccagagagacaatcttcnccttcttgatcacgaagccgacgtggcccatgctgtccttgtgcatggtgacagtccgctgaaacgccctgtcccgaaccaccacgacaatcttatcgcctgatgccttcttcaccacctgatgggctttgtgcgagctccacccagcacagtcacgcccgtcaatctgcaggagctggtccccaaagcgcagccccacaagggatgcaggggtgttggcctggaccaactgcacaaagagcccctggtcgaccttccgcagcctcagcccggtcttgccgcgctcgtccttgcacaggtggatctcgcgcaccccgggcttgatctcagctcgccgcacgcccaggctgtacccggttaccggtgccaccatctggccgggcccggggcccgagaccgctgtactgtcaccctctggaatctgaagcaggctctcctggacttcttggctggagagggaaagacccatataattttccagttctgccaagtttgggtacaaaactggtggtggggaaatggctgttgcctggactggcagggctggcatcttgggtgaggctctgacctgggcctgaatggcttggtccacttttaggtcctctagagatgggtacagggatgacatggctgattctcagaacaccctgcaggcaaggtgctgctccacgaccttctccagctgctgccgctgctgaatctgtttccctccctgaaacgtagccctgtctctcagctggcttcctgatctggg

SEQ ID NO: 320555 - DNA, 979 bp, Homo Sapiens
  misc_feature (864)..(864): n is a, c, g, or t
actctgccgcaccccttgcagcgcctgagggtcccgcccccgcctcacggggcccgtcgagcccgtagcgtggcctccactcttgcgggacaacaacccccaggtggactggaaggactggaagatcggcttccagctgtgcaaccatgaacaaatcggactgcttctaccagacatactcatcaggggtggatgcggtgagggagtggtaccgcttccactacatcaacatcctgtcgaggctgccagagactctgccatccctggaggaggacacgctgggcaacttcatcttcgcctgccgcttcaaccaggtctcctgcaaccaggcgaattactctcacttccaccacccgatgtatggaaactgctatactttcaatgacaagaacaactccaacctctggatgtcttccatgcctggaatcaacaacggtctgtccctgatgctgcgcgcagagcagaatgacttcattcccctgctgtccacagtgactggggcccgggtaatggtgcacgggcaggatgaacctgtctttatggatgatggtggctttaacttgcggcctggcgtggagacctccatcagcatgaggaaggaaaccctggacagacttgggggcgattatggcgactgcaccaagaatggcagtgatgttcctgttgagaacctttacccttcaaagtacacacagcaggtgtgtattcactcctgcttccaggagagcatgatcaaggagtgtggctgtgcctacatcttctatccgcggccccagaacgtggagtactgtgactacagaaagcacagttcctgggggtactgctactataagctccaggttgactcctcctcagaccacctgngctgtttcaccaagtgccggaagccatgcagcgtgaccagctaccagctctctgctggttactcacgatggccctcggtgacatcccaggaatgggtcttccagatgctatcgcg

SEQ ID NO: 320556 - DNA, 1461 bp, Homo Sapiens
cttgccttgattctcctgttactgtcccgcgaacccacatccctacaaagcaggaaagtatgcttgggagaggccaagtgagtggggaatcagcccaaagccaggcgtccagggtctccctcacctgaagctgactttttccccaccttggacagagggcgggagatgccatccccactgaacccagtgctttcaccagccatattagctcccactcaccccccgtcgtggaagcctcggccgtcacacctgcagggccggggcgtgcatggcctcagggatggcctgttcagctgctgggtgactcgggtccaggtgcctcaccacctgctgagctctgtgtgatttctggacgcttctgctcgttgcctttgggctcagtgaagagtctggagtttatctggagtgaggtggccggttcttggtgggatctgagcagagtccattcaggagcaggaaagttcatctcagaccctaaatccagccacgtcatgccacgcttaacacctctaacaacttcccctggcacttaggacagcgtctggctccttccctcggctcatggccctcagaatctgcgtcacatacaccccagctctcccgataggtctctgcactcgctgttgcctctgcctggaacagtctccctcctggtgtcattgtctccgtggtgtgtccttcctgaccttccacctccaccagtctgtcccccttggggacagggactcgttgctcatgttcacccggcaggctggacacttcgtggagggctccaaagctggcagatcccggggccgcctctgtctctcccaggccctgcgtgttgcggtgagaggagcatttgtgtctctgtggtttgctgctggagctggtgaccgggagagaaacaagggagacaagggtgcccagacaggtgcggggctcagccaggaggcagaagacgtggacgtgtcccgggccaggagggtcacagatgcaccacaaggcactctgtgtggcactgggaacaggaattctgggagtcagtctgcaagggcggtgggcgttgctcacctgggagaagcctttagagtgggcgttgagcaggccattagctcgtgccctgaggaggtgcatgggcggcatgggctctccatggaaattatgtgggcgcgaatggatgtggctctgcgctcacctgggcgaggacttctggccggtgccggggcactctgcgtgaccctggcagaatcgagctgccctgactatgaaaggggaagcaagagcatgcctgaccctccaccggaccccacccctcactgctccacctggggcctgcctctgcgggtggcttgggtcctggctgactgttgtgactgttgaggccctggggggtggcgcatgggaagtcaggaaggctgcgccagttggggcccactattaccacccccgtgtcagtgcttctccttctccttctcccaa

SEQ ID NO: 320557 - DNA, 1277 bp, Homo Sapiens
gggtgccggtggagggtcaggcatgctcttcttccccctgtcatagtcaggcagctcgattctgccagggtcacgcagagtgccccggcaaccggccagaagtcctcgcccaggtgagcgcagagccacatccattcgcgcccacataatttccatggagagcccatgccgcccatgcacctcctcagggcacgagctaatggcctgctcaacgcccactctaaaggcttctccccaggtgagcaacgcccaccgcccttgcagactgactcccagaattcctgttcccagtgccacacagagtgccttgtggtgcatctgtgaccctcctggcccgggacacgtccacgtcttctgcctcctggctgagccccgcacctgtctgggcacccttgtctcccttgtttctctcccggtcaccagctccagcagcaaaccacagagacacaaatgctcctctcaccgcaacacgcagggcctgggagagacagagcggccccgggatctgccagctttggagccctccacgaagtgtccagcctgccgggtgaacatgagcaacgagtccgtgtccccaagggggacagactacagacaagaaaaccgatgaataaatcagacatcagcaggtggcattcacccacccaagagaagaggttactggggtcagggaagtgtcggcacctggtggaggtggaaggtcaggaaggacacaccacggagacaatgacaccaggagggagactgttccaggcggaggcaacagcgagtgcagagacctatcgggagagctggggtgtatgtgacgcagattctgagggccatgagccgagggaaggagccagacgccgtcctgctcagatcccaccaagaaccggccacctcactccagataaactccagactcttcactgagcccaaaggcaacgagcagaagcgtccagaaatcacacagagctcagcaggtggtgaggcacctggacccgagtcacccagcagctgaacaggccatccctgaggccatgcacgccccggccctgcaggtgtgacggccgaggcttccacgacggggggtgagtgggagctaatatggctggtgaaagcactgggttcagtggggatggcatctcccgccctctgtccaaggtggggaaaaagtcagcttcaggtgagggagaccctggacgcctggctttgggctgattccccactcacttggcctctcccaagcatactttcctgctttgtagggatgtgggttcgcgggacagtaacag

SEQ ID NO: 320558 - DNA, 1178 bp, Homo Sapiens
  misc_feature (461)..(503): n is a, c, g, or t
  misc_feature (573)..(658): n is a, c, g, or t
  misc_feature (929)..(929): n is a, c, g, or t
ggtagagggcctgggtggcgaattcggcacgagggtcactatctcccgggtgaacggagctttcgcagctggagaaggctcatccacctgcagacatggggcgcagaaagtcaaaacgaaagccgcctcccaagaagaagatgacaggcaccctcgagacccagttcacctgccccttctgcaaccacgagaaatcctgtgatgtgaaaatggaccgtgcccgcaacaccggagtcatctcttgtaccgtgtgcctagaggaattccagacgcccataacgtatctgtcagaacccgtggatgtgtacagtgattggatagacgcctgcgaggcggccaatcagtagcgacacagaggacccgccccctgagcagccccgcgtactgtggatccagctgttcggttctggtccagagacattccaggggtccagggtgtgggtcctgggctgtcacacccnnnnnnnnnnnnnnnnnnnnnnnnnnnnnnnnnnnnnnnnnnncaatagggtgtgcctggtgggtgtgggccgtcaattgaccggcggcctccccccttccagggacgcgaannnnnnnnnnnnnnnnnnnnnnnnnnnnnnnnnnnnnnnnnnnnnnnnnnnnnnnnnnnnnnnnnnnnnnnnnnnnnnnnnnnnnngaggagccgagcgaatggtgtggcagagtgggcggcctgctggtcgcctcggccgcccgcgagccagtccatatctttcccgcgcagcccgccggtacgcgacacacatcgccgcggtccactgatgcgtccgccgcgcggcctggggaggacgggcgccagtaccggccccaactgtgtagtcgccgtatatccctcgcacatgactgccgatagcgcccagtgcggtgttgccacctcgaggcggtcgcacaccgtgcccccatccgcntaaatgaggtgggcgctctgcagttggtacgcagacctgagcagagacccgtgttaccagccattgactcgacgctatagcggaacaggcccccccggagcctcgaagcgcgcgtcggcgtggttcggcgggcgctcgccgcgccgacccgcccagcgctcctcccagggcgcagcgacaactcagcgagtggaggagggagtcgctaagtccatcagggtggtggtcgactcgagagctacgtgcgct

SEQ ID NO: 320559 - DNA, 928 bp, Homo Sapiens
tcataaggccaccattcaagaagttcagcaaaggtgttgcattctttcctttacatattggagaccatgtctttattgaggaagattgtgtggtcaacgcagcacagattggttcctatgttcatgttgggaagaactgtgtgattgggcgccgatgtgtgttgaaagactgctgcaaaattcttgacaacacagtattacctccggaaactgtggttccaccattcactgtcttctcaggctgcccaggactcttctcaggggagctcccggagtgcactcaggagctgatgattgacgtcaccaagagctactaccagaagtttttgcccctgacgcaagctagcatctctgcctcatgtcttgaatctgcttgagctctaagatgaacctggggacaaagtgagccagtcagcacctacaaagagcttttgtgtctttgacatctaccaccctcctccttttaaaaaatttctttagaatttctcaatcttcaaggctctaagtgcttaagaattcactaacagacagaccatctggaggagctgtcttcaaatgctgtgcttacaccttatctatgaacagtcactttgtaccattatctgtggaacacagaatcatctgttcccaacactccagccccttggtcctgtggatggctggatcccgcctgaaacggacctgcagagcagcagcacccttccggtgtggaggctatgtagctggtgcgctgctcacggccattcactgcccatgctgagcgcctctcacacaggtaatgcccagcttttctgctgctaacacatttggccagttgttgcagttgctcatcatcttgggaaaggtgtttgtgacttttcagagcccagattcctgttgtctattaaaacttgaagggaggggtgaatagtgtttctctcttcttccc

SEQ ID NO: 320560 - DNA, 653 bp, Homo Sapiens
cagtaataacttgtatggacagattaaacagaacacagacttggtaaaaagtttgaagcgttacgtctcttaataactgagtggttgtaactaattacacagtgaagtaaatgaatggtagagatgaagaaccaaaggtcacggctcctatgaaaacattcagaggcattttctaagatgcttcctcaataaatgacgcttgatcagcctcttggctattgagataggaataatttagaactaactgcctttttaaaaattctgttgaaaggttaaagctttttgttttcagtttgatttaaaaaggacagtttacaaacctcagtacgtatatattttacatgttaactctagagcatttatattcctcttccttatttcctgaatatgatttttcatgaacgttttctgatctcatccaatgagtttccaatgagctggtgtttaatccatgatcacatctctttccagaaaatcactcccatctctgctgatctagatttagaaagtgcgttgacaagtgaatgttccattcttgttcatattcatctatatactctgatctctctcaggcgtattccttcttgatgttgatgtacaaaagctgttattcgattcgtttagctgttattcgatttgtttagctgttattc

SEQ ID NO: 320561 - DNA, 631 bp, Homo Sapiens
cccactgtgccacatggcggcgcccaggtcctaattcgggaaacgtgcaccttgactaattcggttttctgtggctacgagagcaggcttggcgggcggaggcgccagcggatgtctcatgcaaggatcgtctctgtggctaagcctcactttccgctccgcccgggtgctctctagagcccggtttttcgagtggcagtctccagggctgccgaatacagcagcgatggagaacggcaccgggccctacggagaagaacgtccacgtgaagtccaggagacgacagtcaccgagggggctgccaaaatcgcctttcccagtgccaacgaggtcttttataacccggtgcaggaattcaatcgggacctgacatgtgctgtgatcaccgagtttgctcgcattcagcttggggccaaaggaatccagatcaaggttccaggagagaaggacacgcaaaaagtggtcgtggacttgtcagagcaagaggaggaaaaggttgaactgaaagagagtgaaaacctggcctcaggagaccaacctcgcacagcggccgtgggggagatctgtgaggaaggcctgcatgtgctggaaggcctggcagcttcaggcctacgttccattcgatttgcc

SEQ ID NO: 320562 - DNA, 2374 bp, Homo Sapiens
tagagctgctgatgaagaagcatttgaagataattctgaggagtacataaggagagatttggaaggatctgatattgatactagacgcagggctgcttgtgatctggtacgaggattatgcaagttttttgagggacctgtgacaggaatcttctctggttatgttaattccatgctgcaggaatacgcaaaaaatccatctgtcaactggaaacacaaagatgcagccatctacctagtgacatctttggcatcaaaagcccaaacacagaagcatggaattacacaagcaaatgaacttgtaaacctaactgagttctttgtgaatcacatcctccctgatttaaaatcagctaatgtgaatgaatttcctgtccttaaagctgacggtatcaaatatattatgatttttagaaatcaagtgccaaaagaacatcttttagtctcgattcctctcttgattaatcatcttcaagctgaaagtattgttgttcatacttacgcagctcatgctcttgaacggctctttactatgcgagggcctaacaatgccactctctttacagctgcagaaatcgcaccgtttgttgagattctgctaacaaaccttttcaaagctctcacacttcctggctcttcagaaaatgaatatattatgaaagctatcatgagaagtttttctctcctacaagaagccataatcccctacatccctactctcatcactcagcttacacagaagctattagctgttagtaagaacccaagcaaacctcactttaatcactacatgtttgaagcaatatgtttatccataagaataacttgcaaagctaaccctgctgctgttgtaaattttgaggaggctttgtttttggtgtttactgaaatcttacaaaatgatgtgcaagaatttattccatacgtctttcaagtgatgtctttgcttctggaaacacacaaaaatgacatcccgtcttcctatatggccttatttcctcatctccttcagccagtgctttgggaaagaacaggaaatattcctgctctagtgaggcttcttcaagcattcttagaacgcggttcaaacacaatagcaagtgctgcagctgacaaaattcctgggttactaggtgtctttcagaagctgattgcatccaaagcaaatgaccaccaaggtttttatcttctaaacagtataatagagcacatgcctcctgaatcagttgaccaatataggaaacaaatcttcattctgctattccagagacttcagaattccaaaacaaccaagtttatcaagagttttttagtctttattaatttgtattgcataaaatatggggcactagcactacaagaaatatttgatggtatacaaccaaaaatgtttggaatggttttggaaaaaattattattcctgaaattcagaaggtatctggaaatgtagagaaaaagatctgtgcggttggcataaccaaattactaacagaatgtcccccaatgatggacactgagtataccaaactgtggactccattattacagtctttgattggtctttttgagttacccgaagatgataccattcctgatgaggaacattttattgacatagaagatacaccaggatatcagactgccttctcacagttggcatttgctgggaaaaaagagcatgatcctgtaggtcaaatggtgaataaccccaaaattcacctggcacagtcacttcacaagttgtctaccgcctgtccaggaagggttccatcaatggtgagcaccagcctgaatgcagaagcgctccagtatctccaagggtaccttcaggcagccagtgtgacactgctttaaactgcatttttctaatgggctaaacccagatggtttcctaggaaatcacaggcttctgagcacagctgcattaaaacaaaggaagttctccttttgaacttgtcacgaattccatcttgtaaaggatattaaatgttgctttaacctgaaccttgagcaaattagttggtttgtgtgatcatacagttatgtgggtggcttctagtttgcaacttcaagggacaagtattaatagttcagtgtatggcgttggtttgtgttgagcgtttgcacggtttggataatcttaaattttgacggacactgtggagactttctgttactaaatccttttgttttgaagctgttgctatttgtatttctcttgtcctttatattttttgtctgtttatttacgcttttattggaaatgtgaataagtaaagaattacttgtgttacttgccaagcagtgcacatttcatagtttcaaatctgtaatcagcaataaaaatcctaaaatatgtacctaagaacagct

SEQ ID NO: 320563 - DNA, 652 bp, Homo Sapiens
  misc_feature (15)..(15): n is a, c, g, or t
  misc_feature (21)..(21): n is a, c, g, or t
  misc_feature (35)..(35): n is a, c, g, or t
  misc_feature (49)..(49): n is a, c, g, or t
  misc_feature (71)..(71): n is a, c, g, or t
  misc_feature (82)..(82): n is a, c, g, or t
  misc_feature (107)..(107): n is a, c, g, or t
aaacccaaggcccanacacgnaacaataaaactgncccctgaagttgcnaaactagaagcccaccccacanaactgtatganccacacaaacccaactaatttgccncaaggttccaggttaaagcaacatttaatatcctttacaagatggaattcgtgacaagttcaaaaggagaacttcctttgttttaatgcagctgtgctcagaagcctgtgatttcctaggaaaccatctgggtttagcccattagaaaaatgcagtttaaagcagtgtcacactggctgcctgaaggtacccttggagatactggagcgcttctgcattcaggctggtgctcaccattgatggaacccttcctggacaggcggtagacaacttgtgaagtgactgtgccaggtgaattttggggttattcaccatttgacctacaggatcatgctcttttttcccagcaaatgccaactgtgagaaggcagtctggatatccgggggtatcttctatggtcaataaaatgttccctcatcagggaatgggtatcatcttcgggtaactcaaaaagaccaatcaaagactgtaataatggagtccacagtttgttatactccgaacgcgtgggtcgacgatatcccgggaattccggaccgtaccc

SEQ ID NO: 320564 - DNA, 398 bp, Homo Sapiens
  misc_feature (26)..(26): n is a, c, g, or t
attcggcacaggtgctttagtttttngtgtttactgaaatcttacaaaatgatgtgcaagaatttattccatacgtctttcaagtgatgtctttgcttctggaaacacacaaaaatgacatcccgtcttcctatatggccttatttcctcatctccttcagccagtgctttgggaaagaacaggaaatattcctgctctagtgaggcttcttcaagcattcttagaacgcggttcaaacacaatagcaagtgctgcagctgacaaaattcctggggttactaggtgtctttcagaagctgattgcatccaaagcaaatgaccaccaaggtttttatcttcttaaacagtattaataggaggcacatgcctcctgtaatcagtttgacccattataggg

SEQ ID NO: 320565 - DNA, 551 bp, Homo Sapiens
  misc_feature (511)..(511): n is a, c, g, or t
gctttgggaaagaacaggaaatattcctgctctagtgaggcttcttcaagcattcttagaacgcggttcaaacacaatagcaagtgctgcagctgacaaaattcctgggttactaggtgtctttcagaagctgattgcatccaaagcaaatgaccaccaaggtttttatcttctaaacagtataatagagcacatgcctcctgaatcagttgaccaatataggaaacaaatcttcattctgctattccagagacttcagaattccaaaacaaccaagtttatcaagagttttttagtctttattaatttgtattggcataaaatatgggggcactagcacttacaagaaatatttgatgggtatacaaccaaaaatgtttgggaatgggttttgggaaaaaattatttattcctggaaattcaggagggtatctggggaaatgtaggaggaaaaaggtctgtggcggttgggccttaacccaaatttacttaaccggattttcccccccantggatggggacactggggtattacccaaactgtggggact

SEQ ID NO: 320566 - DNA, 587 bp, Homo Sapiens
  misc_feature (534)..(534): n is a, c, g, or t
  misc_feature (544)..(544): n is a, c, g, or t
  misc_feature (550)..(550): n is a, c, g, or t
gggaaaagtcaccttcaaaaagttggcctaccgcctgccccagaaggaccctatttttgaaggcataaaagcagttgagtttctggagaatttttggatggtgattaatgacttgactggctgctcttcccagagctgtggcagctctcccgtagaagatggggtttgtattggcgcaccaagatctccaacagccagtgtgtgtttcccatctcttgtaggttccatcaatggtgagcaccagcctgaatgcagaagcgctccagtatctccaagggtaccttcaggcagccagtgtgacactgctttaaactgcatttttctaatgggctaaacccagatggtttcctaggaaatcacaggcttctgagcacagctgcatttaaaacaaaggaagttctccttttggaacttgtcacgaattccatcttgttaaaggattttaaatgttgctttaacctgaaccttgaggcaatttagttgggtttgtgtggttcctacagttatgttggggtggcttctagttttggcaanttcaaggggncaggtnttaattggtttcagtgtttggccttgggttttgtgtt

SEQ ID NO: 320567 - DNA, 448 bp, Homo Sapiens
gcgcacccagggtgaagtgcagcttgtgcagcacgatgcactcgaggttgcagagctgctgccgggaagaaggcgccgcaagcagagggccagaagctgcttcacgcgcggcgggtgcacactccacctgtttgcaagcgatgagcaaaggaggtgaccccaagcagctggaagcagtctgcagccaccggcgtggtggtgaggaagcggtccagagtgttcaccgtcaggcacagcgactcgaaggagaggccgaattggcggtgcaccgggatcagccagctgagcagcttacagcgggattccgccgtcacctgccgggaaggaggggggaggcgggcccgctgggcttagggtggagagggactgtggaagggaaggaagggccaagaagaatcggggagcttcccaggagaggggcaagaagatttcagaaagagatacgcaa

SEQ ID NO: 320568 - DNA, 585 bp, Homo Sapiens
catttccttttgggagtttctctttaaagtcttcagaatgcctcatactgtccatctctatgctgttaataccattcatttcctctttcggatgaggtatttcttctaccttagtaggtaattctgccacattttttgcttcttctttttttaggagttggcatgtttcttgaatgtttcccaaaatacattgtaatacttcctgtgcatcatgctgtagatatccttcatacatagggttgagttccctcagtgtgttaagcagtcgccttggctgagtggcaagttcatcagtatatttctctggatttaagagaaaactagcctggagctgttcaaccgaaatgattaaggactgtaaactgcatatcaattcataacttgccaaagaatcttctttgcaatttcccttgtctttttgattggcttcatcctttagagcttctttctttccttgaaataatattaaataagtgctttactccagatttaaaaccgggacaaaaatataatacctgaagtatactattaagatagcaagtattgccgagattattcagtcccacaaatggtaacaagttttct

SEQ ID NO: 320569 - DNA, 567 bp, Homo Sapiens
caatgttctgaccccattaaaatttctcttttgtggaatgaaaagctctgatttaacccatcttcaaggctggtttgatggaggaataggggctgagtcacctgcatttcccctccctgcacaaagtcctgggcccagatctggggtctgtctctgctgagggtggggtgaaccaggaagcacctccttcttcgtctccttgatgaatgggtataatggttgccatggaactggtgtttgtttgattacctggggctgtttgggcttctgagagtcctttatagctgattgtcttttgggagagtggaggttggagccccaccctgtctcatgagtcaccccaaaggtgcatgggcaggcaggtgctggggaatcggctactccccagagcttggcgtggccatccctgtggcccctctgggagtctggagcccattccctcacactggtactcactgcagctggggacatctgcactaggaagacaggacacggcatggaagctggcctctgcccagaagccatgacattctggtcaccagcctgatgctataaaacgagtgtcac

SEQ ID NO: 320570 - DNA, 1356 bp, Homo Sapiens
  misc_feature (975)..(1032): n is a, c, g, or t
  misc_feature (1048)..(1048): n is a, c, g, or t
ggggctgggactggatttacttcattcttgaatcccgcgtccccgtggctgggggctgacacatccctgggcaccactgtgacttcctgtgggtcccttcccttctgtccctgactctgtagaccccccacagggaagggtcctaggtagggggaggttcctcctcccttgaaaccctgggccactctgtcaaggcaaagcctctgggcccagcaccttgtaaaggctttgatgagaggagctctggcttttgctcagggcctttggcaccccaccctccagcccccaggaatgcaggcgctcaaagcctgtggctaggctgcccgaagcacgtgccgcagttcttctggagtgggagcagggggacagagctttgggtagaggagggtcacctgcaaagctggaatgccaggggagtgggcggtgcctccagctcctgggggccagggtgtctccatacctcatgggcctgagcctgggcaggggtctggagtgcacatagcccccaggcagggagagggcagtgacaggacagagccactcatctgtcccaaagctgcacccaaggggtgtcagcaaccccaacctactgacctactttgggaccacaggcccatctagtgcaaatgaggcccagaaaggagaaatgctttgctcaacagccacagtaggctgacgtaacctatgtaatgtagggtcagggtgggcctgagggatgagccaggtggtgggcaggtgacacaccaggtcccctcctggcctctgccccacccagccctctcctgcacggttaccagaagatgttccgggaagaccaggctagccctgagtagggagtgtggtcaggtgcagaggagggcaggggcccggatcctggcccagaaacactctaaaacagaatccgatcctgagatgatccaaatcaaacagaaacttgacggaaatagtagagtctgaaaatgatgcactttgcgnnnnnnnnnnnnnnnnnnnnnnnnnnnnnnnnnnnnnnnnnnnnnnnnnnnnnnnnnntcatgctttcggtctntggttacacacccacaccccccctactcctgtattcagatgccctccatggcccaccctcccacccagcagagcgccagagcctggtgccagggactcagtgccgactgctgacgtgaagggtgtagaaagcccagggctcagggacgtagatgacacccgggtacttcttcctgagaacagggtcattccacagccaggcgacccagagcgccacaagcaagagggtcagtgcgaaggaggagaagaggaagaggccgttgctgtccaggaagaggcgcttgcgcttctggtgcaggacgagggcca

SEQ ID NO: 320571 - DNA, 429 bp, Homo Sapiens
gtattggctctcattccctagccattggttctccccttcctgtaattcaggcctgcaatataatttcttagtcccccaaggaaaacagaactaaagacttctaacagaagatctcagtctactaacatagctaatagctattaaagctactcaggcatcggcttaataaaaaactaaagggctgcagcaagtgatcagattttcaccactcatctttgtgagatgggtctcagagggccccgtccctgctgacaccaaccattcttaccggtagcctgccaacacacaagcagttcacagtagaacactgcagactgcagggcattttcaggctacatagcctcaagttcctagaacaggaactgaggcttggaagaaggtcagtgcagcgcactcagcgaatggataaactgaatcatcatttcaccc

SEQ ID NO: 320572 - DNA, 942 bp, Homo Sapiens
agacattctctgggaaagggcagcagcagccaggtgtggcagtgacagggaggtgtgaatgaggcaggatgaactggacaggtttgtacaccttgctcagtggcgtgaaccggcattctactgccattggccgagtatggctctcggtcatcttcatcttcagaatcatggtgctggtggtggctgcagagagtgtgtggggtgatgagaaatcttccttcatctgcaacacactccagcctggctgcaacagcgtttgctatgaccaattcttccccatctcccatgtgcggctgtggtccctgcagctcatcctagtttccaccccagctctcctcgtggccatgcacgtggctcaccagcaacacatagagaagaaaatgctacggcttgagggccatggggaccccctacacctggaggaggtgaagaggcacaaggtccacatctcagggacactgtggtggacctatgtcatcagcgtggtgttccggctgttgtttgaggccgtcttcatgtatgtcttttatctgctctaccctggctatgccatggtgcggctggtcaagtgcgacgtctacccctgccccaacacagtggactgcttcgtgtcccgccccaccgagaaaaccgtcttcaccgtcttcatgctagctgcctctggcatctgcatcatcctcaatgtggccgaggtggtgtacctcatcattcgggcctgtgcccgccgagcccagcgccgctccaatccaccttcccgcaatggctcgggcttcggccaccgcctctcacctgaatacaagcagaatgagatcaacaagctgctgagtgagcaggatggctccctgaaagacatactgcgccgcagccctggcaccggggctgggctggctgaaaagagcgaccgctgctcggcctgctgatgccacataccaggcaacctcc

SEQ ID NO: 320573 - DNA, 676 bp, Homo Sapiens
tatatccctttcttggtgagtactattgctgttatgtaaattaaatgagtcgtcatccttctctgagccagcacggctttcatcttcatgttcctcttctactctgtctcttttcaatgctttcaaaaattcactcttcttatcagtgcgcattcgtgtcagtttggttagacgaggctgctgattaagtttgtcaacaggagaagaggaatttgagcgattacactctttcactgaatttgtagatggactaaagttcttggcagttgatttaaaagcattaaagttgccaacgccaaatgtggactcatgagggaaagaagttccaactttattttcttttgtttggcttttccattgtgtaggttttgtaggtggagcagcaggtttagggactaaacctttataaacacttggaccagttccattcttaactggctgtgacggaagatttcctactactgggaatccagatagctgtaagtcttttgtattacctttcttaatgaccagcatccttggagctctagatttaggattcggaggatattcccacacacctgcagctaaagacttattgtgatttggttctctctcatactcaggatttaaagacggaaaatcctcagcttcaaactgtttgcgttctctcttgtcttctttcctcccggtttca

SEQ ID NO: 320574 - DNA, 463 bp, Homo Sapiens
agaactgcgtctcgcgacccaggcgcgggtttccggaggacagccaacaagcgatgctgccgccgccgtttcctgattggttgtgggtggctacctcttcgttctgattggccgctagtgagcaagatgctgagcaatggtctgttttggaaacgggaggaggatgaggagaatgaacctctggcagtcgactcctggtggctagatcctggccacacagcggtggcacatgcacccccggccgtggcctctagctccctctttgacctctcagtgctcaagctccaccacagcctgcagcagagtgagccggacctgcggcacctggtgctggtcgtgaacactctgcggcgcatccaggcgtccatggcacccgcggctgccctgccacctgtgcctagcccacctgcagcccccagtgtgggtgacaacttactggcaagctcggacgctgccctttcag

SEQ ID NO: 320575 - DNA, 847 bp, Homo Sapiens
tagtttgaaatagtttttattggctcgtaagacctttgcatataaaaaaaatacccaaaacactatgcagtattaaatcacaattacatttttttaccaattaaaactacccagaatatacattttttaaagaaaagaaaatcctacagaactgaattctgaaatgacattatgacttaaatactatgacaaaatagataattccttataacattaattcattgcacaaagctgccaggtattttcataagcataaccgctgcaccgagtgcaaatgaacacaatttcaaagttacacatttattcgaaagaactgcgcctccacctatggaactcttaaatttctggcacaaaatgttggtctgttctaacttccaccaggcaaccaactttgcaatccactaactttctttctggccctcccttaaaaaagcaacatccttctgctgtcgtgccctgaggagtcagcacctcctctgcttgaagaaatctacccccctcaactcttcaggcaggtactcctgatccacaggctcgctgtacatggggttgtacttgtagcctttgccatagcccaaatccttcatcagcctagtgggcgcgttcctcaggtgcaggggcacggggggcagtggcccctggtggttcctcaggcaggctttgacgttgttgtaggcgctgtacacctcaatggactttggggctctggcaaagtagaccacacactgggccagaagcacctcacattcaggcatgcctataaaatgacagccttggtaggcagcaaccgcttgtgttaacgcagacgggtctgccagacctatgtcctcgctggcaaacctgacaa

SEQ ID NO: 320576 - DNA, 1075 bp, Homo Sapiens
  misc_feature (432)..(442): n is a, c, g, or t
  misc_feature (903)..(903): n is a, c, g, or t
gatccacaggctcgctgtacatggggttgtacttgtagcctttgccatagcccaaatccttcatcagcctagtgggcgcgttcctcaggtgcaggggcacggggggcagtggcccctggtggttcctcaggcaggctttgacgttgttgtaggcgctgtacacctcaatggactttggggctctggcaaagtagaccacacactgggccagaagcacctaccaacgacacagaggacacattttactagcaagatgccaagcttctgttctgcagagccccttctgatacacagctctaggtaattctgagaagatccccacatgcttttattatcccccttttgcgcctacagtctggataaccacctacgacagacagaagaaattctcatgaggtgaaacgagaggcaaaccaggtgagtggttttcannnnnnnnnnnaactgaaggactttttactacattaaatttttcttaagcccccaatatataaaagagatgaatatgaagctgctctgggggcgaacttgcagaggctttgctgttcagctcctttaacctttctgctccctggaacatatggagcatgtgctctgaaccccggaatcccgagaacagtttgaaacatgacctcgttgacacagaaggtttccctctctaggagtctaagagtctacaattggaattccaaagccaagcaggcatactcagtgggtccaatacaccaatggtgaaggagggacatttattcaaatctacaaagggacagagcacgagagagaaaagaagtgatttgcaagaaatgagctgattactttacctacattcaggcatgcctataaaatgacagccttggtaggcagcaaccgcttgtgttaacgcagatggggtctgccaggccntgccacacacagagacaaaggagagtttcagtcatgacacacactgtcctcctggcctatgtgcaggcgaccacagaccaccactgcttgtacacttggtgaccaaaacaatcccatgtagcaaaacagcctgacttagctctagtctctgatcccatgaacttatgcaaga

SEQ ID NO: 320577 - DNA, 980 bp, Homo Sapiens
  misc_feature (40)..(40): n is a, c, g, or t
  misc_feature (78)..(108): n is a, c, g, or t
tccctggcgggagtgttgggtccccggggttttagtattntggcggtgggcccataaagtgggtgctccccgtttatnnnnnnnnnnnnnnnnnnnnnnnnnnnnnnncaatcccttccaaaccggaagaggtaaggtgtttctgcaaaagaagaatgcaagttctccggtccactcatgtctgtccccagcccccatgagcagattctcctcagctttactggccaccttgcttgcaaaaggtactccgagaactttcttaatccctccttcatgcaaacccagcagtgggaagatcttgaagaagcgctccacctggggcaaatcaccttcccttggtggcaatggcaaacttctctgcccacaatggctttgagacgttgctcagcttcctgcagcaatttcaggttggcatcaatcatgctcccctctttgccctgtcggctgagctcaatgaccgacttgtccaggcacaagtagcgatgaatatgtgctgcagcctgctcataatcttcactcctcaaagcagtctgaactccatccatgcagaacttcaggtccaagatgtcatcagctctctgaatggcctgatagaggcggttcttggccaggtcaagctgacgaactttgctggacacattctcagccaggttgcaggtaaaggtgatcattccagccagctgctttgcatctccctcaatcagctgcagattaggacccattcggtggagagtgaccatcttactttcaatggtgttttgctgttccaaaagagcatccagctctctctccaccactttctcctcgccgcagagccgttcgtatacagcctccagctcctgcagctctgtcagggagcgaatgagctcagcggagatttcggagcagcggccacctcccaccccctcagacggctgctgcacccctgacagcttcggaggcgaatcaaggtccgccatcttggtccccattcggcactt

SEQ ID NO: 320578 - DNA, 456 bp, Homo Sapiens
aatccattttgtaaaagatactatggaaccttgagaattttccctccttcaatagtcattgtggcatcagttgttttaatccctttagcgcccaaatgtgcaaaaacactctagtaaaaaacgttacaatggcgttttggataaattcactatacattacatgacttgggaacaacgaagaaaaaagcccaagcttgactcaactatttcatatagaaaagcactgcaggagaaaactttgtttaaaaacattaaaactcaggtgaatataaatacatttttggttcatctgtgctatgtccatatagaaatcccgtcagatattcagtctaccgggtaattcagttggatttcgtgtctgactgaatcagtagaagaatatacacttgcatatacttacacagatatgcatttacatatacaattcagaccatgaaatttgttttaaatacaaca

SEQ ID NO: 320579 - DNA, 981 bp, Homo Sapiens
tcaggcacctccaaacatattttctttatttcctccagagaacaggctttagtactgaggtccttgtaaacatttaacaaaactggtttaagaacaaactaaaagcatctatatccttgccctgtgttgctggggtgagtttatacaaggagaagttggaacaaatgcagtgggcacaatgaccttcttactcagttcaaagtaggtcttgggatgagagttccacacggccagtacagctgactttctgtgatttccaaggggtgcccaagacattaaacgccatggtccttgggaaggactgatgatgtttctgctcattgttgatcagggtcaaaccttttcactaaccgggactgctctttccaagaagtcagaggtcagaaagctggtagcgtcgtacaagaccgtctcgacagcatgtgtagatctgcttctcccatgtggctaccttgtacacagggtcacagtcagccccagtgagctcagtgacatagtctaagtcttgctggacaataaaacagcttccatcaccttggctagcaatgaatccatctctgacacttagcagggatagaactggtgctactgatctgtggatgacttgtaccggagcccttggaattattacatccagctgataaatgtttccatcttgagtcccagccaatagcaagaagccagagagaaaagtacagcagttgaaagcgtctgagccaataaagaggaacactgggcatctgctcaggggagccaaggtttatggagttgtcagcagcacccaccgccactccattgatagaagaaccacaatctgcaaggactcccaagcaggctgagcgcccacaatcccaaagtcgtgctgtcccatctcgagaagcagacaccacattcctcccccgatcaacgatggctgtatccaggatacctcctttgtgacctttgaaggtcacaacgcagctagcatcttcagctgaccat

SEQ ID NO: 320580 - DNA, 1024 bp, Homo Sapiens
aatccaaacattcagtttattaaactaaggctagtgaagccatagcatgaaaaaaagctgcagtcattcgggacaagtggatgattttataaagctaaaatcaaaagacttaggacatggaaaaattcataagtatgaagtaataaaacacaaaagtgacacaagatttacaaatatatttaaatctcagacctgggaaatggactatacacagccttctaggggagaagagaaatgccttagatgttctgacagcactgcaccttttggcttgttttcagtggttggtggaacatgaataggaaccacattgttgcttggagacatgtcattttcgcgtctgtctgacatttgcttctgagaaacaatgcggtaaatctctgttaaaattgtctgaaaagcagcttctacatttgtagagtctagggccgaagtttcaatgaatgacaaaccattcttttctgcaaaagctcttgcttcatctgtaggaactgccctgagatgacgtagatcactcttattgcccacaagcatgataacaatgttactatcagcatgatctctcagttctttcagccatcgctctacattttcatatgtgagatgtttagcaatgtcataaaccaataaggcacctacagctccacgataatatgctgatgttatagctcgatatcgctcttgccctgctgtgtcccatatctgtgcctttattgtttttccatcaacctggatgcttcttgttgcaaactctactccaatggtgctcttgctttccagattaaactcatttcgagtaaatcgagacaggagattactctttccaacaccagaatctccaataaggacaactttaaagaggtagtcgtactcgtcgtcgcgggtgcccattgcgcggccgaggagcgaaagggcgggagcagcagtggtatctgtgggaccagggggcgtcgctgcaggggtaacccgagcgccgagcttcaactgccggactgggtgaagagcccctccctgccgctgcccc

SEQ ID NO: 320581 - DNA, 1438 bp, Homo Sapiens
ttgaatgttaagtaaacagattttattcaatctttcctagagtttataatgaacatttgttatttaatatggtagttatattacagttttaccttacgagcgatagaacatttggtgaataagattaacaaaccggaaatgatgataccctcgaagacactctctggaagcacaccagtcccactgactcatgttacaaatttaagttggcatccagctgatttgtagaatgtgttatcctgatgtttctgcaattataccacctgaagagggtccctgtcagtctctgataggataatatttatcttattctccaagtgagaatccagcatatctcgaaggtcagaaagaaagcctcgttcagtgttgctgtgttcacagaggatgacatttattccttgggaagcagcatccaaaatatcatgatgggacatctcacctgtgaggtaaaggtcagcctcaacaccctgcagaacgctgctcccagaaccagcacacagggccacgactttgacttgagactctaaggttctccccaccccaagggctaagcgaatatgagatagttttaggtgtctttttattcgatcaatcatggttgccagggagacagattcatccagtgtgcataaccgtcccattccagtatgtagaagcaaaggcttctccagtgacagaatttccgtcttctgataaagttgtttgttccgggaaagaaaatctaccacctgcatcaaagccttctgagtacaattcagattaatccgtgtttgttcctcattaccagtcctagcagaaaaagaagtgacagaaacaccgtcaattcctttcactgcagacatgactttgtccaggtcttgggtgtagttaacgttgaattctactcggtggtttccctctgtagggtagttgggagctttggaaggatgtatgggcctggaggtacaagctccaagccctttagccaaccagttgttgacgccctggggcgcagcatcataggctgtatgaggagagtagataccgactctgttctccagagcccggatcaccaggcgctccttccatgtgttccaggttatgcgcttcatgggtcggaagataggcggatggtaggagagaatgaggtctgccttcttttgcagcacctcctccatcacttcctcagtcaggtcattggtcaggaagagtgtatttacagtatgtggtgggcttggttccaccagtaatccaacattgtcccaactctcagcaaacgagagggatgcaaagtcattcaaggaagaaaggagagccttcaaatccatgaaggaacgggaagaattgcagatcagggaatctacaaaccggactgtcgtggggactgggcgtacgcaagatgacaacatacagaaatcaggtaaagttcaagtttcagtcccggaaacttctctgcccc

SEQ ID NO: 320582 - DNA, 523 bp, Homo Sapiens
  misc_feature (471)..(471): n is a, c, g, or t
aaccgtgtttgttcctcattaccagtcctagcagaaaaagaagtgccagaaacaccgtcaattcctttcactgccagacatggactttgtccaggtcttgggtgtagttaacgttgaattcttactcggtggtttccctctgtagggtagttgggagctttggaaggatgtatgggcctggaggtacaagctcctaggagaaaatattgtgggaaaatgggagttttggggggtgagagattaagatttaaaagtaaactattataggcaaaatttctaagaaatgactttttaaaaagattcattctcatgcttacataacatacacacatcccttagatatacatcaccagtccccataatctagggctttggcatggacatacaaaatcaaattattttcagaattattttccaaaagattcttaaatctctgaaaaacttggacaagaaagactgattcatacattnttcagataatacacagaatggtctactgcttggtaaatctagccatgtaaac

SEQ ID NO: 320583 - DNA, 955 bp, Homo Sapiens
  misc_feature (107)..(107): n is a, c, g, or t
ccctgggagttcatgattgaaagaatcttcgtaccacaaaactggcccaacagaaccacacccagaaaccaccagcacgttcaggatgggaccattgcccaaagttncaggggttgccaccccagccaccccctctgtgcaatccaccggggcaatgcagtgatgcagcatgaagtcgaccacgaagcggggtcacctggcctaggaagccagtcaggccatgctggtagacgtgtagggccagacggtagccgaagcccagaagagccaccacacggccccaattgatgccactctcaaacaggctggtggcaatcttggtgaagtactcataggcattctctgccgtgggctgcaggtgctgcaacatggtctggaactctgagtcatagcgtcggttgatgtcgtccccgatgatggcgagctgccgtcccacctgccccatggtgctgctaggttgcagaggtaaggtgaccatctctgggtcggcaggggcagccaccccttcagcctcctgttcctgctgatggcggtaaaaaacgtagctgcggaaaacctcctctgtgtcctgggctacctgctcctcagaagcagagggcagggcaggctctccgcactcctgcctgggaggacctgggccttgccccgaagccatttttcaggtctcagtggaggacgggatcagcctgccgggatcctggcccaacccgggtggctcagcagggtggagatggaggtcccgaggggctggcggctgctgctcccaggggctgagtgggagcccagtttccaggaatgggcgtcagtgcattcccggcatctggatgtagcctttacttgtccctgtgcagcccgagggacccgcgagactccagtgatcatagaggtgccagcggcacccggctccaatcagctccctctagaggaagttgctctgtggccaccggatgcagac

SEQ ID NO: 320584 - DNA, 1057 bp, Homo Sapiens
  misc_feature (506)..(559): n is a, c, g, or t
  misc_feature (697)..(711): n is a, c, g, or t
atatcgttctggctgaagctggaacacaggatattaatcctatattggccttgggccacaaaaaagccagaagtgaaaagtgaaaaacagtgaagtgagtttcttacggagaggagcggagcaggggctgtgggaaagcatcgaagagtgtgtgatgtgggggtggggtgggcagtggtgggtagtagaatgggggcaaaacagagatgattattgcccattttctcctaatctggaatgtgacttaacaagtttaaactgttctgcattttgtaaatatcacatcctgaatatgaaggacaaatacaactgtactatgttgcattaacatttgtactttacccattccaaattaggagacttgaaatcaatatgcaaatgatgcaaattgacactcccccatttaatacaaaattctgttaaactgcaggtttattttaatgttccttaaccatgacctaaatattatgtactcacgatttcttcagtcactagagaaggatttnnnnnnnnnnnnnnnnnnnnnnnnnnnnnnnnnnnnnnnnnnnnnnnnnnnnnntttagggctcattttccttcctttccagatgttcccttagccattcagaggcctctttccattagaaatttctagtgctcagacagcagtaatccaacaagggctatattttctaaaacaggaaaaatgtcttgtatnnnnnnnnnnnnnnnacatacacgtatgtgtaaagtaagatataataagatgatgtcatcctgttcagatgcctgggaggtcaaaacaggttgaacagaatgaacaatgtggcattggtgagcttttctacctgcaacagcagctgactatctagcactaggttaaccaggttgggagagaagaggaaaagagaagcgaccttgttctagtgtcaaactgttttccaagttatttacgttcaatttaacagtttctgtggtttcactccccttgctcccacagatgtagctcaaatcacccatcactaacactttccggacgcgtgggtcgacgatatcccggaaattccggaccggtacc

SEQ ID NO: 320585 - DNA, 852 bp, Homo Sapiens
ttagggcggggccccgggggaaccgggccccttcatgggcgtgtttggccaacttaatgggaggcccccggagtggatgggggaaggctggggggccctggccgggcggactcactgaggcctaccccaagccagtacattccaggtcctgtcattgggggacgcgtaaaatagactccgccctcagccatcctggccggtagggagcaggtggcaagcgtcaggactgagccctgccccgtaagggcggccccagatcagacgccaggccccgccctcattgatcaggcactaccctcgggacgagcccatttctctttaaccgtgacgacgcccaccttccagcatcacgtctggtcccatgaaagcgagcgcaatcctgagacggggccagggcccctgccaccacaactctagcagccaggccacaccccctagctcaggctccgccccattggaatgtaggccccgcccccggcgggtaccaagcttgtttagtttcagggctcccgccccgggcagccaggaggcccagtgagcagtgtaccgatgccagggtgcatctgtgcctgtagcggcccatactccacctgctccccgtccactgtgagcacgccgcgtggtgtgagcggctctaggcggaaggcacgggccgcggcgtagcccagctgcggacagcccaggctgaagtggctaccgcgctccatggccaagaaaaggcgcagcagcgcagcccgcgagatgccgctacgcacccagcacaggtgcaccaggccgtcgtcgaagcgcgcatgcggagctgccaccaggtcagcgcctaggtggctgggcgagatggccaacatgagcaca

SEQ ID NO: 320586 - DNA, 701 bp, Homo Sapiens
ggagatctattggatctgattccctcactctctcccacaaaaaacggcagcctaaaggtttttaagagatgggacatgggacattgctccgctcttatcaaggttcttcctggatttgagaacatcctttttgctcactcaagctggtacacgtatgcagccatgctcaggatatataaacactgggacttcaacatcatagataaagataccagcagtagtcgcctctctttcagcagttacccagggtttttggagtctctggatgatttttacattcttagcagtggattgatattgctgcagaccacaaacagtgtgtttaataaaaccctgctaaagcaggtaatacccgagactctcctgtcctggcaaagagtccgtgtggccaatatgatggcagatagtggcaagaggtgggcagacatcttttcaaaatacaactctggcacctataacaatcaatacatggttctggacctgaagaaagtaaagctgaaccacagtcttgacaaaggcactctgtacattgtggagcaaattcctacatatgtagaatattctgaacaaactgatgttctacggaaaggatattggccctcctacaatgttcctttccatgaaaaaatctacaactggagtggctatccactgttagttcagaagctgggcttggactactcttatgatttagctccacg

SEQ ID NO: 320587 - DNA, 529 bp, Homo Sapiens
aagtttcgaactaccaccggcgtgcgttcgcaggtagatcgcggtgccagttgccatggagccggccgggccctgtggcttctgcccggcgggggaggtccagccagcgcgttacacctgccctcgctgtaatgcgccctactgctcgctgcgctgctaccggacgcatggcacctgcgcagaaaacttctaccgtgaccaggtgctgggagagctccgcggttgcagcgctcctcccagccgcctagcaagcgccctacgccggctgcgtcagcaacgcgagaccgaggacgagcctggggaagcaggcctcagctccggcccggcgcccggcggcctatcgggactctgggagcggctggcgccgggcgaaaaagctgccttcgagcggctgctgagccgcggtgaggccgggcggctgctgcctccatggcggccgtggtggtggaaccgcggagccggaccgcagcttctggaggagctggataatgccccgggtagtgacgccgcggagctggagctcgcccct

SEQ ID NO: 320588 - DNA, 1209 bp, Homo Sapiens
  misc_feature (445)..(755): n is a, c, g, or t
tgtgtcgtcgtttgtgcgttgtctcgcgccgtctctcgtgcgctgtctgcatggtattggtatgtctagctgcgttttctttcggttgttcgtgcttcgtgttcttcttgttgttgacttgtcctttgtccggtctttgctctccttcgtttgtctgggttcttgtgtcgttttgctttctctgtgcgttctcttgttggcgtgcgtcaggctgtgtcggggctgtgtcttttttcgccgtcttgctctagcaacgggtgacgctgctgtttccggagtagtggcgcttccctttttggtcgcgccgtcaagctctaccacgtgggccaaggctacccttggttcgtggtacccgctagtggcccccaggtgcccagtttccgtctaccgcgtgttgtccggcaccgcgagatggaaactcctgggagtgtgtggtgtgatgtgnnnnnnnnnnnnnnnnnnnnnnnnnnnnnnnnnnnnnnnnnnnnnnnnnnnnnnnnnnnnnnnnnnnnnnnnnnnnnnnnnnnnnnnnnnnnnnnnnnnnnnnnnnnnnnnnnnnnnnnnnnnnnnnnnnnnnnnnnnnnnnnnnnnnnnnnnnnnnnnnnnnnnnnnnnnnnnnnnnnnnnnnnnnnnnnnnnnnnnnnnnnnnnnnnnnnnnnnnnnnnnnnnnnnnnnnnnnnnnnnnnnnnnnnnnnnnnnnnnnnnnnnnnnnnnnnnnnnnnnnnnnnnnnnnnnnnnnnnnnnnnnnnnnnnnnactaatacaaaggtgaagtggctcctcccaagtagcagtgctgccggggcctggcccaggcctagccctgggctcacctctcatgctcccaagccaaccctgatgctcctggctccagggtagaccttttccctttagaggttcagtgtccagggagctctatgataattgtgtgaatgaggtgagcgctgactccatgtgagtattttaaggcttggagtcaaagaattaacctaacatgcccaggcagagtccatgtgtcaatggcccgtctccagtttgttctaatttctcaccacgtgtctgtagatacaggaccgcagaccttcgctttatcatcataatcacatctaatgtccatcctaacttacgattcatattctgtgcctggaaacccttcgtgccgaattcgccacccaggcctcgctaccttaacaccgtggtagttactgcc

SEQ ID NO: 320589 - DNA, 634 bp, Homo Sapiens
  misc_feature (430)..(440): n is a, c, g, or t
  misc_feature (578)..(591): n is a, c, g, or t
taaatttttggttgaagtgtaaaagataccaaatgcggatgccatcgatagatgaaccaccttgtaagagcttggcaaaatcagtttccattacgtgtacagagtgaccttcagcaacagtgtaagaagacaatttggaaagagtaactcggagatcaggaagcagcaaccatggactttttgattaaagctgcagcatactacagaaataggaaggatggggccagggctaactgcaaacaaccatccttttgcaaaggtatatgacgcttatgtcaagataatttttaaacatcattatttgaaaaagtacaggaaaatgtccctttaaaaactccagaggttactgagcagctagaattagcttgtattgcaacatgtcttctccctgtatattgtaagttctgagttaatatctacacatagaggnnnnnnnnnnnaactcctaccttttatacctttcaaatatataaatagtattaacagttatattacaatgtttgtgtagtaaacagaaaataactttcaaagtgatattgcatgaggtctttgacaaggttttgtgaaagcacaactcnnnnnnnnnnnnnntccaaccatgtgggactgtttaatggccagtttaaagcatgga

SEQ ID NO: 320590 - DNA, 791 bp, Homo Sapiens
  misc_feature (248)..(268): n is a, c, g, or t
gagccctacagagtttcatcccttgtggataagaagatgtgtacttgggaacaaggctaaagccatggctgatttccccaaccttttatcgcgaagaactccagttgtaacttttgagagtttttttggcaaaaggaactacatttactcatgccaaatacctatggtcacttctcagtactctttggatacctttattaggagagcttgaattaacaccatggaagaaagcatgaagatgaatgagnnnnnnnnnnnnnnnnnnnnncccattcacactcaaataggaatctctggtagactcaaagagtccagctgatttgccatttcagagtgaaaaggctgcactgtctcaccctgcccccaaagtctaacctatcctattttaactggtattggtaaaaactatttttgcaattccttgccgaaaggaatcaaacggatccctttaacatgtacatatagttccattataatgcaatgcaggtaacactaacttgatttcaagaacattgtcaaaactggggtacacatccttctattagaaatggctgggggacagctgagaataaatttatggaattacaaattatgggaatactggactaagtcaagaatggttaccatgtagccatttttaccagctattctagagtcccttcacacataaacttgaccctgcattccgggaaaggtacctctgggttgtcactacagagtaaggctggggtcctgccaaccttccttcatcctttcttctagttcataatagggaaggtgagccatttcat

SEQ ID NO: 320591 - DNA, 1161 bp, Homo Sapiens
  misc_feature (354)..(354): n is a, c, g, or t
  misc_feature (1106)..(1115): n is a, c, g, or t
acatatgacatcaaagttatgtcacagttaacaaaaataggattcgttatcactaattgtggactacagggaaaataataaataatttctgtggtactaaattcttagtatttatcaagcctcctaattttgctctatttgaatagttacaataggtgggtaaatatagttctggatgaaaaggggatttcaaaaatctcactctgggaagcatgtcttatctacaggggctaattgagttgttgggttaaagagtttcacagtcagactcccagagggaaggacctggacctaatgtgcttcacaacaagatgaacccaggtgacagaacaagtgtgttcacacactccatanaaatagttttattctcagaaggtgcctttatttatatagatgctactgaatgctgcttcagggaactgaaaaacctggatctattttatggaagttgttaacagtctccaacttctaagaaacatctttaactagacttttaaaaagaattctgaaaatgtgtacaagttaagcagatgtttagtctccctttcttgtttttaaataagaaagttagttaatgtagctaaaagttaaataagatccagtaagtactgtctacacatttgtcctcatttgctgggcataccctacacaggttgtttttaaacacccaagcttgtgcacctgctaccagaagagttggtacttggactgtgaaactggtttcatgattaagtccctcacataatctatataatatgtttacttttcaaatatgtattatgtattaaagactaatgactttagtagtaggtacagccaaaatatccagaaatagttggtggtttttcttcaaagagcaataaacactatttccacatgcttctttatggttcataattaaataactgaaataaaaagggtgacctgagatgctgtaagtatacatcgaggttggataacacagcaggagatgaactctattgcttaaagtactttcttatttcaaacattcaattgtaagtaatatctttaacagttatttgaaacaacttatccagccaaattaaaataaaaagccataagaaagcatcaatattggactacannnnnnnnnnccttaaagtagtgatgtttgggggttttatttttaaagtgggacat

SEQ ID NO: 320592 - DNA, 1015 bp, Homo Sapiens
gttgttggtttgttggacttcttttctctttattccctttcatagcttctgccgggatccaggcagagagagcactaatgggggaaagggagcgagcgcttcccgctttccccagcgtgggccctcggagttgggtgtgggggcagcagggccagaggaaaggcacaggtggcgatttgccccagccctcccccctaagatgcagaccctcagaacacgtcgcggaaggtgagctccctgctccgagaggcagactcgggtgtaacgcaaagacggtttctttcatcaataaggtccccactgcctcacagcccctaaggccacccgctggttctggcattctagacgggggtgcccttggcccttcctttgtcttcctgttttgcagggtaatcccagggttccatgcgtatcctctgcacattcagcatgggctcctcggtgcttgtgtctccatttttctgtcgttctgcgataatcatggcccggaggagaggcgggtacggcacggaggccaggctgtcttccggcgccggcgtgaacgcggtgaaggcctcctcctcgtgcttgggcaccagccgccagtcatggtacatgacgtgttcgatctcccgcgcctcgctctcagtcttccctttgaaggtcaggatgccccaggccttcccgtggtccaagttctgcgccgtgtagtcgggccgcacccgcgtgaggcgccagtagcacggctcgtcgtgctgccacagccaggacttgcgcgtgaccaggcggcccaggccgaagagcgggaggcggccgagcagctgcaagaggcggctctcgcggcgcacgtcggcccaggcccggaccggcagccggcgtccagagaacggccgcgtcaaggtctcgtagtccaccgcgtagagctgggagtcgcgcggcctgttcagttgctcccgcagggcgcgcacgcggcgggccagctccgcgatcagccgcggacgcaccttcttccgcgccatggcgggtccgcgtcccc

SEQ ID NO: 320593 - DNA, 771 bp, Homo Sapiens
taaggtccccactgcctcacagcccctaagtccacccgctgtttctggcattctagacgggggtgccctggcccttcctttgtcttcctgtttgcagggtaatcccaggtttccatgcgtatcctcgtgcacattcagcatgggctcctcggtgcttgtgtctccattttttctgtcgttctgcgataatcatggcccggaggagaggcgggtacggcacggaggccaggctgtcttccggcgccggcgtgaacgcggtgaaggcctcctcctcgtgcttgggcacccagccggccagtcatggtacatgacgtcgttcgatcttcccgcgcctcgctctcagtcttcccctgatgaagaaaaaagagggcgtctttgaaggtcaggatgccccaggccttcccgtggtccaagttctgcgccgtgtagtcgggccgcacccgcgtgaggcgccagtagcacggctcgtcgtgctgccacagccaggacttgcgcgtgaccaggcggcccaggccgaagagcgggaggcggccgagcagctgcaagaggcggctctcgcggcgcacgtcggcccaggcccggaccggcagccggcgtccagagaacggccgcgtcaaggtctcgtagtccaccgcgtagagctgggagtcgcgcggcctgttcagttgctcccgcagggcgcgcacgcggcgggccagctccgcgatcagccgcggacgcaccttcttccgcgccatggcgggtccgcgtcctcagcggtccggccggccc

SEQ ID NO: 320594 - DNA, 892 bp, Homo Sapiens
ggggattcccaccttccctttaccttaattcccttaagattttaacgggggggagaaaaaattttggaaaatggggggttggggtccaccccaaaatggttgccccagaaggaccttcaaaattaatgcccccccgcatatttttaagcgtggggaaaggggctttaccggtgggccctgaatttttccttcaggggttcccaagtccccccattttaatggatttcccaaggccagaaaaccaccttgttttgtgacaacataagtggggccgctggaaaaattgtttagtcaaaatgagaccgagggtctgggtgtgggagaaaaagagaaatctggggaggagtcatttaaaggggggggcccagttgtcctcataaaaaaacactatcatcatcagggtgaccaaagccgacatcataggcagggggtggagtcagaggctctaatgtggggactgccgccaagctttgcagatcaggagcagtggacacagcccgtggtccccgaagccgaaggttgattggagctcttccagggcttccttcctgggccatggacccctctgaggccattcgcctctgttccagtttggctctcctggacccctctggatggctaggttgttcctcctcaggtgctgggggtatcacaacagtgctgtaggggggtggttggtccaactcttgggggcggcactgggattctagtcccaccacggcctcttcatagactggcacttcaaaggcttcattgtcccctgtctgactctgtcttttcctttcctccggtgttagcccatgctccaggtggagggagaaagtgcacacaggcgcaccaaagccacagggacacaactgtctcagaagttcgtcgctcacctgtctccccc

SEQ ID NO: 320595 - DNA, 760 bp, Homo Sapiens
gttccccagaatgtagcagcccatgatgtggatgacgttcggctctgggttcactttgctcatcaggcggctcagccgcttccagaagtgaatcatgtcctcttccttctccactttggcaaaggtggccactttgttcttgaggagatagaggtgtccaggacctccctggcagaaaatcagcattttccagatcttggctcccttgtggtagacgttcagcttcctctctatctcctcaaggatgtcctcgaaggttgcgtgctcatggtcgtagaggatggggatgatggaggggtcatcccggcggatgatagtggggatgtactcagccttgggcaccttggaggaaatgagcatgacctttggtggcacgaagccttcggtgtcgcaggccacagcctccaggcccttctcagtgtcccagtccaggtcctcgaaggcctcgtccagcgtgcagtgggagctctgcaggtcactgctgtctcgggagtcgtgggaagtgtcggctttcatgggggtggggtcgctccaggaccggctgaagctccgctcgcgccgctcagcgaacgtctgggccttcaccctccggctgccgaccatgcgcaggtgtttgcggaagttcctctggattacagacgcggaatcattctcccgtttccggcgcttcctctccgcgtagcccctgaacaccgcttgcatagttgtggttgctgtctggaagctgaaaagattttccttggggaaccaggtacgaata

SEQ ID NO: 320596 - DNA, 1533 bp, Homo Sapiens
ctttccccttagttgatgtgacctttttcgtttcaatccacctcctcttttttcttccacttgtctcgtttttccccaggcatgtccatttgtatcagttcacgcagtggtttcttctttttacacctcgtccggtcagatctgtgcatcttattgcacacctcagttacagtatctccatctcactaattccttgttctatccagtccatccacccatttcatcacacccattgctaccactggaacctatacctgataaagttctcaattcgtgccactagttcagagccccttggttctcggtgcacacaagttgtgacgcttcgacagcttttgacgtttgacttcagctcatcttgaggtgatgctcactcgcgttgttcttctttccaaggtctcaaccacgcgtgcctgcgttacgccaagatgtggatgtagtttgtgcttgtggtcctggttgatccgtagcccttggttgaaagagtgactgcatgacaggtccaggaaggctggaaacccggataagttcaaccggaggagggtccatgcttgtgaacatcttgaacaggacggtgatgtcagcagggttcaggctcctttggacagcatggccccgagagcctgtcagaccctcgtggtatggagggcacactggttttccccagggtcattggttgattcgagcctgggcttcaggccctttctccctggggcaaagcgctgcacttcctgggctgatcctgcgcacagcggagcccccctgctcctcctgggccagcacggacatcatggcctgggcaaacaggtacgtgtgctccccgtggcacaccatcttggcaaactcagggagatttttttcaaggttttcttctcctccatctaaaattgtagctagagaggtccggagcactctcgagaacacttctagctgctggcatgctgtggacacactggtgatctccccctggtaccctgcgtcagaaataagcttaacggtgaagttcagcatcaaacagtctggatgggcttcagccagtttataaaaaaggtcccgccacgtggtatgtgcaatcatctgttccagccacgctggggtctctccttcttcagtaaaaatagaatctgctttgcgggggtcaaaatgtttgatcagcaaactcttcaagtgattttccacagtttcctgaacctgcactggctcaacacctgtctgaatgagccactcggccagcaggttcacagtctgggccacagcggtgtagttttcagataagagctggataacattctctggagaccctcctgcctgaaaatacctcttcagagtgttgaagatggagggttccatgatataatcccgggtggaaaatttatgcaggcattcttgctgaacctccgcatcatcctctccttctccagaatcatcctcctgctggccgccgtcagcctcgtcgccccactcggccgcgctcccgtagtagtcctcgtccatgatggcgcccggcacggcccccgccatgccctccccccc

SEQ ID NO: 320597 - DNA, 973 bp, Homo Sapiens
  misc_feature (125)..(125): n is a, c, g, or t
  misc_feature (142)..(142): n is a, c, g, or t
gcagtccaaattgaggcttgagataatcccttatgctcccagacccccgtggttttctgatcccgtgtatcctcaagactctgtccaagccacaggaggctagtagagccttgaaagggtggcantgcaacccacggcacantgcctgccagccctttcagacagcccagtagacgcccttgccgaaggtcaatttctgccagctgcccatgagtgtttcccacaatcactgagttgcctcccggagtgagggtcatggctgttagtgggtactctccataggtggtctctaggactggccggcgctggggggatgctggatcataaacacggacctggtggtaccctgtgcaggtgacaagcttctgtgatcctgggagaaactgtatgtcctggtcccagatgggaacccgcaagtccagccagtcattccgcacgttcttggccctgaacacaggttcctcagagccgtgcaggtcccatatcttcaaagcattctctttcccacctgtggcaaccacatgggggtgtgctgggtcttggcgcatcctacacaccccagggcccactctcagttccaggagtgggtcagaggatgtgtccttgtccttgtcatgccagactctgagaatcccagaatccacacatgtgatgagggtgccgtcggcctgggcgaggccacggaacatgccctccccgcccgggcagtgtctctgaccctggaatatgccatcctcggtgctgaagtgcttcaccgtcctgtccgcgcagcccaccagcatctgggtctcgccgccggtgccccaacacagggcgctcactgcctcctcgcgccgcggctgtcctccggccgtgaagttcgccgcctgttttcgctgaagatttacccctttcaagatcccagtctcggtgccgacccacacatggttccagcgtgcagcagcagccgccatgacaaagcctggaggcagac

SEQ ID NO: 320598 - DNA, 796 bp, Homo Sapiens
  misc_feature (17)..(17): n is a, c, g, or t
  misc_feature (39)..(39): n is a, c, g, or t
  misc_feature (47)..(47): n is a, c, g, or t
  misc_feature (74)..(74): n is a, c, g, or t
  misc_feature (171)..(171): n is a, c, g, or t
  misc_feature (332)..(332): n is a, c, g, or t
  misc_feature (635)..(687): n is a, c, g, or t
aacaacactcaccgagnccacaacacacggtagagctantgctaacntgtactctcgggacaacgcgggcgcanggcggactgcaaggccaacaggcttttcccctctaacaatcctctttggctttttccaattgggagggcagattttgcttaacaggcaactagaacnggatctctgccccactaaaaaattatcccctatacatagagaaattactacagatgcctaagtagtcagaatgctaacattttctacaaacttgattacttattggccaaaatgaaagcaaacagccaatttttaacaacacattcacccacttgaaaacnaaacagccagcatttacattatatcaaagattcatttctacagaatcgtactaaaaaatcatttttcctgcaagatttagcatgcagcaaaaaatgatcttttcatcctgggaacacctttttactgagttttcggggggaaagaactaaagacatgacagttttgtgggtatttttctatttttagtattctggcagcaaatttgaggttgtacacatttcattatcaactaaacaaaacaagaagcaagcaaatactttaaggttttcacagcctttttcatcacagggaaggaaaaaacnnnnnnnnnnnnnnnnnnnnnnnnnnnnnnnnnnnnnnnnnnnnnnnnnnnnncgtctttccaaattcctggccacatcaatagtctagaaagtgcttatcaggacaccaaatatttctgtgttcctgagataggtctgaaatttttacccagtattgaatg

SEQ ID NO: 320599 - DNA, 1235 bp, Homo Sapiens
  misc_feature (122)..(123): n is a, c, g, or t
  misc_feature (125)..(125): n is a, c, g, or t
  misc_feature (127)..(127): n is a, c, g, or t
  misc_feature (133)..(133): n is a, c, g, or t
  misc_feature (143)..(181): n is a, c, g, or t
  misc_feature (1176)..(1176): n is a, c, g, or t
  misc_feature (1202)..(1202): n is a, c, g, or t
  misc_feature (1208)..(1208): n is a, c, g, or t
  misc_feature (1224)..(1224): n is a, c, g, or t
ttttgtgggtatttttctatttttagtattctggcagcaaatttgaggttgtacacatttcattatcaactaaacaaaacaagaagcaagcaaatactttaaggttttcacagcctttttcnncncngggganggaaaaaacnnnnnnnnnnnnnnnnnnnnnnnnnnnnnnnnnnnnnnncgtctttccaaattcctggccacatcaatagtctagaaagtgcttatcaggacaccaaattatttctgtgttcctgagataggtctgaaatttttacccagtattgaatgtatacctgaagtggtcaaataatacttcttataaaaaagttgttctacctaagattatagttttaactttaaattaaagaatggccacaattaaccaacatgcaaaaattctcagactaaacactgagaaattcttcatacaatgcatttgccaccttattgcatttttaaaatctttattctgtagtgaattggtattcccaatctgcctaagcaaaggcatgcccttctaacaagatttgcttagagcagaggtgatggaagaatccgaagaccctctggcatggcaatctgggagcagcacattgttgatggagtccaagtgagcacatttcacacaattcatttagtgacaagtgggcttgctcccttttcatccaggaaaaaaactactcacagaccactgcccagaatctggaataagaaccctcattttaaggtattcttcccaacaaataaatatctaaatattgaaagggggcatatcagaaaacttaaaagacacaataaccaaaaccaaaaccctcttcaaaacaagtaagcaatgtctgtatttagttcactctaaaacattcttagcttttcttgcagtttgttcctaaaagatttgattgggcacaagaggaacgaaattgttaataaaataaaagcttatttttgttttgctgtggataatcggtacaaaacgtttccagatctgagacttagatggatcttttaaggtgaaaggagaatgccaggttctactgaaataatatctgaaaggaacaaagagccatttgccatgtgctttttctaaggtgcccatgctgggaaaaaattttctcaataatatgaagatgctgggtacaacttttcctattaaaccaatgtcttacacaaccncatggcggttaccattttttgggccnggtttnccatttggggaggggnaaaaaggttcc

SEQ ID NO: 320600 - DNA, 344 bp, Homo Sapiens
  misc_feature (163)..(163): n is a, c, g, or t
  misc_feature (181)..(181): n is a, c, g, or t
  misc_feature (201)..(227): n is a, c, g, or t
ggccccattctttaatttaaagttaaaactataatcttaggtagaaaaccttttttataagaagtattatttgacccacttcaggtatacattcaatactgggtaaaaatttcagacctatctcaggaacacagaaatatttggtgtcctgataagcactttnctagactattgatgtggnccaggaatttggaaagacgnnnnnnnnnnnnnnnnnnnnnnnnnnngttttttccttccctgtgatgaaaaaggctgtgaaaaccttaaagtatttgcttgcttcttgttttgtttagttgataatgaaatgtgtacaacctcaaatttgctgccagaatact

SEQ ID NO: 320601 - DNA, 1024 bp, Homo Sapiens
gtggacggggtggtgcgcaccgcgacattgtgtgccttggtgagggagtgcgtgtggacgctatggggataaagtaagagttggtgggatgtccgcttgttggagactccagattgtcacagggaagtatccgaggggtaatacgtacaaggggggcccagttttttgagatgaggatggcccagcttgtggggcacgcccccatggcccaggatggtgcccaggggcagacggtgtagaaggtggcagttcactggtcccttggtgacatctgtggatcccactctccatgcggagcagctggttgctggcctcgttgtaggagatccagtgctgcagatcagcgggcagttcaggggggctccaccctgcgctggcacaggtgctgcacgacgcgctcgggtgaggtgcccagcaggtgctgccggaagcgcagcagcgcgcacacgaagccgtcccgcaggctgacaaagcgcgcctccaggtagaacgcgcggtcgtcccagcccagcaggcgggtgcgcacctcgaagggctccagcaggcgcagcgagcggcggtggcgcgcgcacgaggccgccagcaccgtgtgcgcccgcaactccctcagcgccccgagcaccccgcagcgggtcaggtgcgcgacgcgcgcaaagtcggcctcgcgcaggtagcgcgcgttgttcatgtgcagcagcaggtccaagtccgagggcagcacgcggcccgggaagcgctgctcagctagcaggtcacggacgcgcggctgcagcaggcgcgcgcgcagcacggcgcacggaaggcgcaccaggtaccagacgtccagcagcgcaaagacagcgagccccagggccagcaacgccaccagcagccccagcatagcggcggcggcgggcgcggggtcctgcggagtccgtggcgccggtgccggtgtccgcggcgctggttacggtgcccgccaggcctcctgggaactcacgagcgcagcgcgcccggagcgaaccacagcgcgagggcggccgag

SEQ ID NO: 320602 - DNA, 1402 bp, Homo Sapiens
aataaaaaaataaagatttttattaggtacgggggtgttctactctctcacattaccccatgtcttcatcctaccttctgtcctgatgagacgctgcttcctggctcacaaggcggggctccatagacaaggggaaccaaggtggggcagggacagggtaaggctaacacaaacaatagaaagatggttctgggcccaaagtcttcccgcgccccctccaattacaatctaatcaaatctggccagtcaaatatccaggtcgtcatctgggtcttcttggtccaggtcatcataagcatctggctcatagaagatgtggctggtagcctgccctggcctaggccgcaggagagcctgctgtttttcagaactgaactggaagggcaggatcaggctatctctggcttctctctctttcttggacaggtgaaggttaaaggtcaaatgagttgtgggatccaccgggggtatatgaggatcggagtagggctgggactctacagagggcccctcttggagatccaggctgaagtccggaaggatggagaaccactgagtctggtcagttgggcgctgtcggggcctccgacacaggatgtgggccgaggcctggcccatggtaccgcccagggtcacctcagtctgagcaaggctgctgagagctcccacagggcctggtccatgaagctcttcatgtagcaagcccagcacactcactttccccactgaggagctgtcaccaggacaagagtcctgatggctcacagcatgcaggacctggcagagtgtggtgcagggaaggcgaagtagcagccagctgagtgaatcgagagcaatggtgacaggaacaggatctgtcctcttgcacatggctctcaaggctcccagcggccccccaggaaaggcctcctcagtttttgaccagttgagagggtctctgaagaagtcatggtaaaccagccgattgttgatatcagagtcaaaaccttcacgaaactcttcctcgctcacttcacagcccaggatatgcacttgctccccacacagtgcagatttcttgacaagcgccttcaagagactgcgcccctcccactccacggaatcccgaagcagcaccaggccgcccaaggccaacagcgagtccaacatctccaactcgcgtccggtccctgctctggcgccctctgatggcgtcatgacccagtgtccttcctcctcggggtgaaacgggccgagcactcgggcgtcctcccaccattaagacctaacatagtggacaacgaccccgtctacattttcactgtgaccggggcgggaagagcagttggggcagttgtcagtgggagggggaggaggacccacaagccccccgcgagggcctcgtgcccgaggacgccaccca

SEQ ID NO: 320603 - DNA, 557 bp, Homo Sapiens
ttcttaagggtctgactggagaacccagatgtttattctagggtagaaaggaaaaggggcacactccttggcagagggagatgtatgaggggaaacaatgaaggaggggtctcaccaggacaagagtcctgatggctcacagcatgcaggacctggcagagtgtggtgcagggaaggcgaagtagcagccagctgagtgaatcgagagcaatggtgacaggaacaggatctgtcctcttgcacatggctctcaaggctcccagcggccccccaggaaaggcctcctcagtttttgaccagttgagagggtctctgaagaagtcatggtaaaccagccgattgttgatatcagagtcaaaaccttcacgaaactcttcctcgctcacttcacagcccaggatatgcacttgctccccacacagtgcagatttcttgacaagcgccttcaagagactgcgcccctcccactccacggaatcccgaagcagcaccaggccgcccaaggccaacagcgagtccaacatctccaactcgcgtccggtccctgctctggcccc

SEQ ID NO: 320604 - DNA, 842 bp, Homo Sapiens
tgattaataaagcaagtttattctgaagagggattgtcttatgtttacgcacagggaagaaataagaggaaaccctcttttcaacctcttttccccctcacagaaccgagtccccaagttctcagcaacatcatgcagtgcttcagcgcctttactggggaccaaagatgttaggatcgtgaagggtcagactggtcaccagctgttcaaagtcacccaggctccagggtgcaggtgacagattttcggggccaagagatgacctgttgtcaggggggggctgattgaaggtaagcaagagatcagtctggtactggggcagcctcagcaaggcctgatgaagtgtcacgtcctttgctaacctgctggttttccttagctatctgctgcttgccagagaggacccaggcttcttgacagcggcccctcagggccaggttctccaaactgagaggctgaacagactccacatggacagccctagccccctgcacgccaccaacatcctcaaagtggtaccgcgcagccgcttcgccccgtacgtgggcctgcagctcgagaagttccactatcaggctctggtccgtcacgggatggcagaaaacttcttgattgtccgggaccggtcggaggtcgcttacgtcaatggcccccatggggaggatggcggaaaaggcgcccccgaacagcgggcagtctctcgtgggctccatgggtctgaggctgggttatgggcattagaaaggtttaaaagaagtccacattgggtcacgtggcatcggctccctgggtttcgcagctgccaccgccacccgggtctggcttagctcccggatcctttt

SEQ ID NO: 320605 - DNA, 1272 bp, Homo Sapiens
tgtgtgatgatggcaaatcccggccgggtcatgaagcccataaacagcaagatgttgacatgtcgcgtcttcctgagcacctgcatctcattcttgaaagcctgggcctgctcagctgtgggctgggacaccttgagcaccttcacggccacatcgccatgccaccgccctcgaaacacggtgccaaacgagcccgtcccgatcctcttcagcaggctgcacctcactgggtggtacctcccagtaatagcctgagtcccggtaccccaggttcttcactttcttcttgtcatcggccaaggacttccgctcgcgctgctctgctggtgacttggaatgtggggacttcctccccgaggacacgctggctgggctggggctcccccggggggttccatcactacctcctctactaccggcagcatcagtgttgaaactctggccaagtgagctggatgaggttggagtccatgggggccgtggtgctgaccatatggacgttgggagtggacgtggagcggatgcgctgtaggggggcattggctggggcagggaaggggaagtgctccgggtcacagtgctgggtgcgggggctgggaccctggggggttagcaactcattcagggggcggttcgagggagcctcatgctgtctggagcctccggacaaatcctggaacactgtggtagaactgttggcggttggtactcatgtcaacacagactgtggggaccttggaggaacaatgctggtggaacttgtagccacaggtttggcaacggaagccatggaacagaaacttaaggcagaagtcacagaacgccaggctgaagaaggtcttccgtacaaaattgtgcatggtcagcgggacatcttcaaggacctcgacaatgagctcctcgccatccaggggagcaatggctgtgtcccaggcagtgaccgtctttcgtcccttgatgagtcggtagaccacacagcagtcctgatttagaccccgcaccttcagggccttgtctagagagtcgtagacactcatgccatcccggacagtcaccaccgtgcgttgcttgttgggcaggtatactttgacggtgcccactgcccgggatggctcggccccattggcaggggggccccgtggtggctccatggagccttagattttgtcaagatgggctgaggtggggctgggcaggtgccatggggctcctgtcacgccgctacagccgccgccgtctccatcttgggcctctcttcttgtttcctcacag

SEQ ID NO: 320606 - DNA, 266 bp, Homo Sapiens
gttggaatgaatggcagcccgggaccctcccccagggcggcaactcctaccttcccatgtcctcatggaggactacaggtgtgcaccatgggtgggtgtgcacgatgggcaggtgtgcacgatgggcgtgcagtgatcactcccaggctgccaacacccatgcagacaccagatggcgccttcgtgcagctgcagaggagggagcaacagagcctgaagggaaaaggcaatggggctgcaccaaaggatagaacccaggctgacac

SEQ ID NO: 320607 - DNA, 1133 bp, Homo Sapiens
  misc_feature (1089)..(1090): n is a, c, g, or t
  misc_feature (1092)..(1093): n is a, c, g, or t
accaggggagacgcgcctctccctcctcttccgaaccagcccaaagtgtaggtgggggaggggtaggccgtaacccgggtggggagtacccggggcgggtctctttacaggggttggcgcccaaagaatttacccgtgtggggtttccggcgtggccacttgggagggtggccctcgggggagaccccggagtgggaattcagagcagccccccctttattggggtaagggccctctttctttccccccaaaaaatcttccccccgttattacttgcgtccccaaaaaacacggtggaccggggcggccctccaggggttccccgggcggggggaaaggggtgttcttgtttttcccccccagggggccttcctggaaagtgggttcggccgttttttctcccatgatggcaagcgctgcattttccttgggcacgggatttttcccgggttcaggggtgacaatgcccccctgggaagaagatgggcccatccagcttccctcccggcttcccccggcggcttcccggggtccctcaattcaaaccccacccaggtcccttgcctagggaagccctccgggtggaaagccgccatttgagggtgcccgtccattttcgaggttcacccccgttcagggtggtctgggggcagggatctcattttcctccctgttgggtactctctcttcgagtggacgagtgggttggcaggccgtgcagacgcgtccatcagaaggactgcccccaggagccagagggcagcacggagccaggccaatgaggggaccccacctggacgccatcgccacccagggccagaccatgggggcgggctgcagggtgtgggccaggtgctgggaggggcaggggcaggggcagaggaggaagtgaggtcctggctccaatccaatccccgggcaccacggagggctctgtgtccccaggacggccgcaggatggggacaagcagctcacagtcggtctgcctccccgcgctcgggatccgaggaccggagcgaagcgtcagtgacgccgccaacgggcccggatcaggccaccctcgtgccgaattcgccacccagactcgnnannggggaaggtggagagggtgaaggggaaaaaagggaaggag

SEQ ID NO: 320608 - DNA, 1073 bp, Homo Sapiens
aggctttcagagtttcagaggttagatgagaaatggctgaacgtggacagtttttgagggggccatcattgcctccaataacggaaaccaaagggccttcacgttgctgctggttcaaattatgtgaatttctctggcaaaggagcaatggtctcccaccatagtatcttcaacatccttcaatgagggatcctctttggtattttcacccttgatgtgttacctcttgaagtttgctttgtagtctctctaacattattaggaaggcaccatgaatatctcctttcttttccaatagataagcggtgacttcatgaagttgatacttctgagtaatctgaatagtttcttccagacggtagcactcaaggacttgcagagtctctataacttgggttgggttgaactgacacaacagctcaatgaactgctctgtgatacaaggagatatttgcagtaattcttgatttacatgaataccttcccttgggtcaagaagactcctcaaaaatttgaaaagcaaaacctggttctgaagttttttaatgaccgtttcaatatgtccagaaaagtgggtggcaaccagctccgcagctttacaaggcttcagggacacgagttcctcaatatgatccattgctttctgccatacagactgcttctcctctgcactgtgtccgggaatggataagatattgtgaatgtaattaaagacttcttcctctcgcagagggtcacgtaagtagcaatcaataattttgtcatattggtgttctctttcatacataaattcacaaatttgatagaactcagctttttctgccatccggatgagtcgactctcttcaaattgaactatgcctccagcctgcagcaattctaaaaggacctgctgtctttcagagtgtcgggagtcatcgtcaggactacaaaggaattcaaggacctgatcaaaaagtgttctgtttgcaaacaaggtgttgtcaggctttgcaagctgccgagcaaggaaggtaaagagacatcctacttgtgagggggtaaagtctgaattctccaccataactttcaac

SEQ ID NO: 320609 - DNA, 1229 bp, Homo Sapiens
ggttctaatctctgtaacagtagtatctcaagggtgatacagtgcaaataggactgtctttccttttgttgagggaaaagtctccccgttctatttgagtctgttctcatgctgaaatgaaaccatccaaacacagctgctccgcccagcacaggatgtgtcttcagtctactttgggaaaaagtggtaggcagtagtctgactttacccagcagatcccttcctgatgaatggagaagggagaacagaggtttgcagatacacagggagcagggcagtcgaggacaccagaggggactagcttggcaccggaagggttcatctctcctacccaaggcccaccgcagagatgtttttattgaaatgcatgttatgagtaacacatgaactccctctggcccaggtgggacttcttccctcataggtgggtcaggcccagtgggacagtcttggtggtggtaagaagggagccaagtgacagaaggtctccaaggcataggagatggtgtccggtgagtctggggaaccgaggattatgaagcctgctggaagcctggtatggtatggttcttctcagctgtggctgcagatttctcttcattggctgcctcctctgaaaacagactcctcttttctgcaattaatcttttaactcctaccatccactgactgacctcagtcacatggtcaaccatgagggagcggtggatgtcatctgctgcgtcccaccggtggcttgaaagctcttgcaccagtagagccattctcttctttacaggtattgacaactttcctccagcccactgttcctgcagcagtgccaggcgtcggctgatgtcatcacatacctgcttccttgtgtggccacggcagtcttccaatgcctgttccaaaggtctcagcacatcctccatcacagcctcagactcgactgggaaacttgtgggctccacgccagaggcaggaccactccccacaggtggggacctgggagccttacttgaaggaggtggaggccccattgggggaggcccaggagaagtctctgatgcggggactctgggggatccatcctggggtgcggctaccctcttggtaagcagcgagcgcctgggtccgccggcctgggtctgcagcccgtatgagaactgcggcgggtcgttccagccgcgttccttgttgcccggcttcacgtacagctccgccatctccacttccgcttggccccc

SEQ ID NO: 320610 - DNA, 627 bp, Homo Sapiens
aatgcgagacggagcgttttggtggagacactcactggggcaatctgagcttgagcaggaggtggagcggcggcagcggctggggcaggagtcagcagctaggaaagccctcatcgcgagttcctaccacccggcacggcctgaggtctacgactcactgcaggatgcagctctggcccccgagttcctggccgtgactgagtacagcgtgtccccagacgcagacctcaagggccttctccagcggctgggtacagtatcggaggagaagcgcatctaccgggtgcctgttttcacagcgcccttctgccaggccctgctggaagagctggagcacttcgagcaatcggacatgcctaaggggaggcccaacaccatgaacaactacggggtgctgctgcacgagctcgggctggacgagccgctgatgacaccactgcgggagcgcttcctgcagccgctgatggccctgctgtaccctgactgtggcgggggccggctcgacagccaccgggcctttgtggtcaaatacgcaccgggccaggacctggagctgggctgccactatgataatgccgagctcaccctcaatgtggccttgggcaaggtcttcacagggggcgccct

SEQ ID NO: 320611 - DNA, 901 bp, Homo Sapiens
  misc_feature (203)..(203): n is a, c, g, or t
  misc_feature (209)..(209): n is a, c, g, or t
gggccaggaactcgggttgaggggccctctgtgggtgcccacccatgggggtaggaaagttaaagaggagaccctgggttccaggcctgggaacccagtgggtgccctgaagggagggggaggcctcagggagttcgggacaggagtgtgcatggtactgggcggcccatgggggctcctggcctcttggttcaggcaatccntgagcntggggacacattccatcttaggtccaagagacggaggtcaggagcatccctagaacgacctcccaggcaacgaggaaggcccggggcagggccgggcgcagcgtggctggcttcagtaccctcggggcatcttgactcctgcccctctgggactgcaaaggggatctgcgggcgcctctgctgagtcaatcgtctggtaggcactacggtcctgagaagacccaaggaaaccagtgtggaccaggagctcacccccgcgctcccggtacatgtggtagacgaagcagcaggagagcggcttgagcagcaagctgaggatggccatgcccacgccaaagcggcccgtgtccgtgaggctgacccgcgggtagaagatgctgatgtgcacgatgtccaggaagatggtggccagcaagccacccagaaacatgcttatggcgtcgatggagtcccgctgagccacagcccacacgcccaaggccaggatggtgaagttggcccaggcataggagcctgagaatacaatgcagccccaggttgtcagcagccagtgacctaggagaatcaccttcaggttcacagcaggcagctccatcccgactcaggccgagggcacctgcgccgcagccgcggggggctcctagggtccgaactcggggaacaaacttgcccggccccgccccgcccgttgc

SEQ ID NO: 320612 - DNA, 838 bp, Homo Sapiens
ggcacgaggtttgttccccgagttcggagcctaggagccccccgcggctgggcgcaggttgccctcggcctgagtcgggatggagctgcctgctgtgaacctgaaggtgattctcctaggtcactggctgctgacaacctggggctgcattgtattctcaggctcctatgcctgggccaacttcaccatcctggccttgggcgtgtgggctgtggctcagcgggactccatcgacgccataagcatgtttctgggtggcttgctggccaccatcttcctggacatcgtgcacatcagcatcttctacccgcgggtcagcctcacggacacgggccgctttggcgtgggcatggccatcctcagcttgctgctcaagccgctctcctgctgcttcgtctaccacatgtaccgggagcgcgggggtttccttgggtcttctcaggaccgtagtgcctaccagacgattgactcagcagaggcgcccgcagatccctttgcagtcccagagggcaggagtcaagatgcccgagggtactgaagccagccacgctgcgcccggccctgccccgggccttcctcgtgcctgggaggtcgttctagggatgctcctgacctccgtctcttggacctaagatggaatgtgtccccagctcagggattgcctgaaacaagaggccaggagcccccatgggccgcccagtaccatgcacactcctgtcccgaactccctgaagcctcccctcccttcagggcacccactgggttcccgggctggaaaccagggtctctctttaacttcctaaccccatggtgggcaccacagaggcccctcaaccgc

SEQ ID NO: 320613 - DNA, 1601 bp, Homo Sapiens
  misc_feature (134)..(146): n is a, c, g, or t
  misc_feature (182)..(190): n is a, c, g, or t
  misc_feature (206)..(439): n is a, c, g, or t
  misc_feature (1560)..(1560): n is a, c, g, or t
ccccccttcccttttaggggtccgcggggggggttaaatttatttcaaggtggccggaccctttatggaataacacaataaaaccctcaaacgccctttgggggttttttaaaaaaatggggtgcccccggggnnnnnnnnnnnnnggggaaccaccccagattccccgccgggtttttttnnnnnnnnnggttacccccggtccnnnnnnnnnnnnnnnnnnnnnnnnnnnnnnnnnnnnnnnnnnnnnnnnnnnnnnnnnnnnnnnnnnnnnnnnnnnnnnnnnnnnnnnnnnnnnnnnnnnnnnnnnnnnnnnnnnnnnnnnnnnnnnnnnnnnnnnnnnnnnnnnnnnnnnnnnnnnnnnnnnnnnnnnnnnnnnnnnnnnnnnnnnnnnnnnnnnnnnnnnnnnnnnnnnnnnnnnnnnnnnnnnnnnnnnnnntacagaattccccaaactttaatgctgtgctctgaaaagggaggctggaggttgtggtgggtcacagtgttgctgacacctctggcctccagccctgcatccctaggcaccatgtgaccaggcagtgagaaggacggggcctcactcccatgccagactgctcctcgggctgagcaggacctgaagctctcagggcttccaccaaagcccagcaaacttgggggaggcctgagggggcatcagcagtccttaaaggcctgagcttgcaacactcaggcaggactcggctgagggcctctgtggtgccaccatggggtaggaggtaaagagagaccctggttccagcctgggaaccagtgggtgccctgaagggaggggaggcctcagggagttcgggacaggagtgtgcatggtactgggcggcccatgggggctcctggcctcttggttcaggcaatccctgagctggggacacattccatcttaggtccaagagacggaggtcaggagcatccctagaacgacctcccaggcacgaggaaggcccggggcagggccgggcgcagcgtggctggcttcagtaccctcgggcatcttgactcctgccctctgggactgcaaagggatctgcgggcgcctctgctgagtcaatcgtctggtaggcactacggtcctgagaagacccaaggaaaccagtgtggaccaggagctcacccccgcgctcccggtacatgtggtagacgaagcagcaggagagcggcttgagcagcaagctgaggatggccatgcccacgccaaagcggcccgtgtccgtgaggctgacccgcgggtagaagatgctgatgtgcacgatgtccaggaagatggtggccagcaagccacccagaaacatgcttatggcgtcgatggagtcccgctgagccacagcccacacgcccaaggccaggatggtgaagttggcccaggcataggagcctgagaatacaatgcagccccaggttgtcagcagccagtgacctaggagaatcaccttcaggttcacagcaggcagctccatcccgactcaggccgagggcacctgcgccgcagccgcggggggctcctaggctccgaactcgcgnacgcgtgggtcgacgatatcccgggaattccggaccgtacc

SEQ ID NO: 320614 - DNA, 1217 bp, Homo Sapiens
ctggacatcttccattttatagaaagggaaattgaggccaggggttggggaggcctggcaaggaacatggtgcatggtaggtggcagaagggacctctgtgctcagagctgtgcctcaggacccatcgttcagatgggaagactgaggttggggaggtgtgtcttgggttaggaagctgggctcggggcaggggtcagcgcgggcatggcaggcacggtgaatgtgaacttctcagtctggacaaaggcaacgcccttctcatagtaggcagcctcgttaatgaacacggggtacaccgtggactctccctcatagagcaggtcctccccactgaacatctggaagatgggagcaccaggctgcagtggctggaagtctcggtcctgcagctgaggatgcacagtgcctgccaggtgcccggcctcggtgcgggggaagtccacgacgcccacgggtctataggcttccatctcaaaggcaggaaaggccgtacactggttgaagagttcgatgaagtccagaactgtggccaccagggtcctcatccttgagaaaatgtcagcccgcagcacaccctgtggctgggggcccagctccagacccagtccatttttggccacagagtccaggttgtagctctcctccccagaccgctggtacaggaagacctggcaggacagctcggggtactgcagctgcagatggcggcacaggtgcatggcaaagacttcgtgggaggacttcgcgattaagcaggtgcccatgttggccgtggtgttgtgcaggtcaaggacaaagtcaaaggcctggcccgaggccttgggccccagcagctggttcagctctcgggctcttgtcacctcatatgggtcgtccggggtgggcctggaattgaggaagctgctggtgaaggtgcggttgaggtcatggtccacgtagcggcggcagccggatgtggctgccgggttggccagcacaggcacagcggagaagctggctctctgcagctctgcgggggcatgcagccagtgccgggccaggtagacgcccgacatctcgttgccatgcgtgcccccagtcacagccacgcgacgcaggggctcccggggcacaggcagtgagcacatgctggtgtggggtgcagaaccgctgatgcggatctgggcttcccgggccaccaggactggcgtctaactcgcagacaggctggtattca

SEQ ID NO: 320615 - DNA, 1255 bp, Homo Sapiens
  misc_feature (351)..(351): n is a, c, g, or t
gggttattgctttggcccctgtgcctcccaaccccaggaagctacaagagacagctggtcctgtcccccacactctccctgggtcctgggactccctgttctgaggggctaaggttgcctgggccagagggccctcccccaggacaaccatcctctccctgtgtcccctgcccccccacactgagggaatgtctgtgtcccttgttcctctgccaggggccaactgaggctgccaaccctagggcggggtgccaggcttgtgcggggagggtggctcagatccctgcaaggaggcgtgctgcagggacagcacagcctgggcccccggcagacattaaggcacagtgtgcnggtcaccatagggctgctgggggcccttgccccggggcggcacctggcaggtgctggcatccggggctaggcacagctgtcagtgttgagacaggaggcatggtgtgtgcgggctggccccagggcctgcagtgcaagagagctgggagtggggaggccaggtccacaggtctctgccagacacaaggaggtccctctccccattctccctgcctgggagagcccaggggaggggcttgtgggcctgggcagagctcatggccagagccgagacgcagtcatggcaggcctggcccacagaaggcacaattgtggtgtctgggaggtcgagggtcagcccgccaatagggctaggcagacacattgacgtccctgagagagatggcactgctgggggcctcgtccccaagcagcagggcctgtgcgtccgagtctgtgtctgcttcagccttgcccagctccgtgcttgtgctctgagtcgggctctttgctgggagccctggccctgggtacaggatctgctggatggctattgctgcaggttggtgtgcagccggccctgcgtctggtagaagacctccaagcgcgaaggacttgagggcaccggtgcaggaggtcctcgtacagcgggatggtgtacatgcgtgacatctggctctccaggaagcgccgcaccctgtggaggtcaggatagttagtcgtttcggaccacaatctgcagccagcggatgcggatctcagcgttcatcgagtccaggcagggaggagtagcacttggacaggctcatcaccacctcctgcagcagtcgggacccatccaggagcccgacgcgtggtcgacgatataataggattcggaccgaacagccgcattattacccgactttctatatcaatatctgtg

SEQ ID NO: 320616 - DNA, 1234 bp, Homo Sapiens
  misc_feature (615)..(615): n is a, c, g, or t
gccagttatgttaactgcttaatttatttagtctgatcaatggcccagttcaggcccaccactcctacacttgctggggacaccaggaaacaaccagccacacaatgctgaactgtgctgctgctgggagtccagggctcagctcaaagcaagcttgcaaacttcacacataagtacagtctatatagcaagtaaactctgaccagagatgacatctggtcccacaactcatcaggtctatgtacaatatttcacataccacccaatagataagataatattaacagcaaccactctcctttatcaattccccctgctccaatacaaccaccacacattgcattaataccccaaacccattcccaatttattaaatatggtgcaagctcatagacacttagaagaggcaaatctagttgtgatgaagagttcctagagctctgggagccaagatggaggttttccagtacctgcacatgtggctcaggaggatgctgcccaggagctaatgagttgggagagcaaacatgggaggtagaaagtcaagatggccccaagctcagggagctatctctctcagcatctcagctttgagactctgccaccacctcttcnccagcccaagctgctgcctaaaccaggcattttgaagggtgagcagtggttgccatgaagccaagaccaagagattggtgagactcccactcgcctccctcagactttaggcctgtgacaagccacactgtcctccagaacccatcgagctttaggcaaaatgttttaggcatctgactaaggagcccacccgagtatgagtaacagaagccaagatctgagctttctagagggcagggcctctttctagtcccccagcctcttcctgtgcttgtgactgtttgtttcagacagaaaggatgttgtccgtaagttctcagccagtctccagtattaagtttgaaaacatgaggtggaggcttcctctcacattgatgtggtccctgggctggctagagccagtgagcaggtaaacagaagccagccctttctttaactcctggcctgttccaccacatattaagggacttttcaaaacctactccctcaaccttgctccaggaaggacaggatttggagtagaaagggggagcatcactgactttttcacaccctttgagccatcagtctttctttcgtccacacacttgaagtcctcctgcacccagctggactagcc

SEQ ID NO: 320617 - DNA, 952 bp, Homo Sapiens
  misc_feature (126)..(126): n is a, c, g, or t
  misc_feature (144)..(144): n is a, c, g, or t
agggaaaaaaaattttttaaagccccaggagggtattttaaagtgattttcttcccttaaggtgtttttggctaaatttcagtgggcccaagcaaactatggaatgtttattcttctgattggacnagagtcaagaaaacaaanccagatatattttaccaagggataaagctgatatgacccagcaacaatctgtcattacttcagctgttagtcggtcttctcccccccaacccagccccacaaaaaaagttctgctctgcttaagtgtacaagactccagtgaacttccaacagtttggcttcaagtgacctaggaatggagtgagtcatctgtaaagcctggagtggtccaaataacacagataacttcagtaacaactggaaacagctggctccaaatcagggagctacccaatcttcagtgacaaggaggaaacaaagtccacgcttctaaaacacgtaacgacaagtccaggaacgtggccggacataatccaaaaatgtgggatttttcagaggacagtgctgacgtgcataccattcttgagaataaaagcagagtaagactccattgcccaagaaaagagaagtccacatcagaacattccaaatcggctttttccgactatcattgacaatgaagttgaaagccattccaaagaacatgaagagcacgaagagcacgggatagaaaaagctcaagcaaacagccaaggcatattcgtgtactacagcagatacagcaaagacagctaacatggcagcagatttgaatctcttggagaaaaaccagagaaagtccttgtaagcatagtaatatagccagtcatggaccaccacattccaggttctataatagttggagtatgacgtggagttccaccaatccttatagaacatcctgtcaccaaagcgtaacatctcagcaaaggcattgagccagcagtgc

SEQ ID NO: 320618 - DNA, 892 bp, Homo Sapiens
aggtttttaacaggttcagttccgttcgggatttggcggtgggcccgccagcaagcttcgatccctctgctttgtcctcctcaaaatttctttgggcagctgcgctagatgctcccatcttgctctctcgatgctgccaggcgtagaagttgagcagctcttttcggctgcgcttccgttctctccctttccagcacccgcaagctggctgcctcagtccgggggagcacaggccgccggccccggcgggtcaccttcacccagccctcctcgtcagggaccccctcctcctccttggccttagcttcttcctcagcgatcttctggtcatatgcctccatgaacgtgtccacttccaccctcagggcctcagggtcgggcacagagtctgcgtagtcactgatccacttgtgaatgccactcttcacagggtggctctctgtggacaccagcagggggcccttcagggccaaggccgctgacaccccacttggcttctggaacaccacgtaggctacctggaaacccggaactggctttggatgaaaaaacttcgaccttgactcctttgggctctcagccaggtccggcttctcctgcaactctacagactggacgaggccacaggtggacaggaggcgggacaggctctcctctgtgcagtatgggggcacattgaggacaaaaagagtcctcttctgaggccaggtggacttggtgccttgtcgaacgccgtgtgctctcacatagaggtagtgagaagcctgttgcttttcagagaacttgattggaatagctgcgtagcccagtgggctggggatacggtcctccgggtcccgcgcggcgcacttcctcctgcgcgccaccatcttgccacccgggagcgcgcccc

SEQ ID NO: 320619 - DNA, 979 bp, Homo Sapiens
  misc_feature (551)..(559): n is a, c, g, or t
  misc_feature (792)..(803): n is a, c, g, or t
cctatgcagatgacaatagtttattattcatggcgacatccgctaaaacatcaatgaatgtaaatgaaatattcatggcgatagctaaaaaattgccaaagaatgaaccacaaaatccaggagcaaattctgccagaggaagaggagtagaccttaccgaacccacacaaccaaccaggaatcagtgttgtagtaactaaacctcttgtttgaactagctggaatagtcttctgcttcctaaatgttaataacaatggaattggagcctttaaccagcccagtatgacttccaaaagaagagacttatgatagagtcaagtttctaatacagaattattttaagtgttttgaacttaatttttaataacatgcatgggtccctctcactaatgtttcaacaatagggaaaaatgagaactatgtggacacttgtttcattggaaggttagggggaataatttctcatcactaggaatatagacaaatgactgtctgggcccacacagttaaccagcccatttctccacactggtacagtagtcacctgtgnnnnnnnnnttggaacttactaatttgggcttttcaaaaacattctttgtttagaaggagattctaaagttatttatgatgcttagccatagtattcaggcaaatgttcatttctcctggtacctgtatttaaaatgtacattccacattttaataaattaaccacaagaaaataatcccacatatacaaggtcaggggtggggaagagtattaatggtatcttaattatacccagtctggnnnnnnnnnnnnaaatggggtaaaaatcaaatgcaaccccatcttgttttaggaattttgagaactaataaatgcaccttaatggtcagtgttcctttcaaacatgtgagttctttaacaaaaatgaaataaaccaggtgtctgtgatttctaattaatcaccgctggccattacacaggttttgttg

SEQ ID NO: 320620 - DNA, 830 bp, Homo Sapiens
gggccaggaaggtttacgtaaaccacaaaatgtcctccccatgtcccttgactggaactgttcccatcagcaggaaaaattccagtaagaagaaagggaattccttttctttgtgactcttctaaagtagcagaagagcgttttaagtttctccggttttccttgatgaacgtccctcaaacaatcgattgaagttaatgtctgggtaactagaatactccgatttcatcttagcatttcgtcgtggaaatgtgcagaagaaagcattagctaaaagactggcaatctgttcctgcgacattgtgatggaatgattcatcttctgtttcaggagtggtattggctgggtgcaaatatttggcagacagagtgcaattttcaccatatcaggcaagatggactgatataaatgttgagcttctgcttcttcaagtaccttatcccagaaatcgatcaaagctgtaaagtcccatttcttagaatatgccacattgtatttcagaatagcatccttcaagttttggggtcgtgtaaatttgttgagaagtgcagtctgaatgagctcccaccggctccccgcagttcgctcaccattctcatcttccactgggtacaaattttgttctgaacaaggcattttaacatgcttgttatcccacaaatctttataatgtgttggaaaaggtttaggaacttctcctgctcgcaaaagatctacccgaatagttactgtgtgattggcagatggtctcaagagaggcagccggatcccacaccgaggcattcttctcatctcctcaatgggagttccaagccacttcttatctgcc

SEQ ID NO: 320621 - DNA, 988 bp, Homo Sapiens
  misc_feature (485)..(485): n is a, c, g, or t
  misc_feature (488)..(488): n is a, c, g, or t
ttcaagagcacgccccctgggcttttattcaccaggaccttctggaaccctccatggccccacaccaagcacggccccggcgcccaagctcggccacctgcagtctcctggggtggggctgtcggatttatggcatgctttctgggttctcattgctgagccaatcccaaagtaggggaaggggctggattcatcacccgcccctcggctttcgagctccagacaaggccgtcgctggggaggcgtctgtgctctcccgggctcctgcagctccagagggttcgggctctgaagcaggtgagggtgttgctaggctgctgtttcctactagctgccgccccgctcctgcttgtacagtctctgctcccggatggcttgttccaacaagggcaggttcatcccctccacacaggtcagcacgcgcgccttcaccacggagcctctgtcctgctgatgctggagctccccgaggacgatgtacaggnganccacctgggcatggaagggctccaccaacttggtacagacaagaacctggtgctgatcggatccgtgctgagccatcagtgttactctggactgaatcatgtcatagaggcacaacctgccaaatgttctcagcgtgctcccatcaggaacttggcctgcactaacctcccaggggaggtaataggtcccaggtttgggcagcatcatgggctcctgttctaggcgtcgccggtcctcggatttcttctttccgcctcgcgtggtcacgtgacgggggaggggcgggatacaaaaagtgctttattttcccactccccggacgcccagcagggcagtttcttgacattcggagcccctttcccgaggatccgctcgggagcctccactggccaggagcaggggattagtctgccccgcgaccggccccagccacgacgcggacatcgccccctctgtctgggccgctgtcactcacgcgccaaagggccacggagaaaag

SEQ ID NO: 320622 - DNA, 1244 bp, Homo Sapiens
  misc_feature (387)..(387): n is a, c, g, or t
  misc_feature (561)..(561): n is a, c, g, or t
  misc_feature (621)..(621): n is a, c, g, or t
tgtttgctctcattgtgaaagtcttggtgtgtcctgtagggcaatttccggcgtgattaaatgttttaagtgctggattaggcttttcgcccccctcgacatagctgtaggtcccatcaggggaccactttttttagctgagggatgacgacccccccttatatctgaacaatgtgagccgcgttttcagagagcgctcctctgtgtgagattgagagtgttgatgggctctgtttttccccggttaaagatttttatggtatatcctcccttgtccacgagtcggggttgggagcctgggaccagtagttttgcgaccagggtaggctatcggggttctgggagtgcgggaggggcaataggtataaaggccctcggggagaggcntatagaaatataacacggggggtatttccaccccgctatcaaggaatgtgtaaatcaacctgtgctgggttttggcccctattatattcgggcgcagcaggtccatgataacaggttttaaaaaaggagtagaagcgcgcaaggggttttgccagaattttattggggaggtgnccttgccattactgccgcgcatttgaagtataggggagatggctaccatcattgactccntaggaattgcatggatcgacggtggttgcttatagtggcgcttgccctcactcttgaattccatggagaggcaggaaatgcttttgcttagaccaatctgggccactagtagattgtgtccgatagcctagtgtccacatcctctgtggtgtccatgatggtgccgcggtaggtgatcccagctttgttgtcaagtatgtcgtcatagtcaaatcgctgcaggatctcagctgctgctgcacctatggccccagagtctgtgaggtcgaaggtcaccaagtaaggcttgtgtgtctgcaccttggtggcatgagaagcggtgagttctctgatgagctcttctagggccccaccattccggccacagagcaccagtttagcacccgcagcatagaagacttttgcacattctttgcccagccctgaggtggcgcctgtgatcaccaccacagcattccgcaggtaggccttcccgcgcacccactgcagcagccggaagaggccgaagacgcccaggcagccgaacagcaggggcaggatggctgtggaggtgatgaagtccatggccttcaccttcggcagactcttacctggtagccggagagaccatagtcaatcaactt

SEQ ID NO: 320623 - DNA, 1085 bp, Homo Sapiens
  misc_feature (233)..(289): n is a, c, g, or t
gaacagggcaggcagtggggcacagccgggagtcccagcaacgtaggaagcatgggacaggaggatcacgtggaggtcaggaggctcgagagcagcctgggcaacatagggaggacggcggcgccctgccgccatcgtctacagtggagtgtaaacaggtagccaggatttggtggcctgtggcctgtagtcccagctactcaggaggctgagatgggaggatcgctagagcnnnnnnnnnnnnnnnnnnnnnnnnnnnnnnnnnnnnnnnnnnnnnnnnnnnnnnnnngacggagcgagaccctgtctcgaagaataagagaacccaaacctagctgccagtttccccagggcttcatgcctcagcgctcccttcttgctttgagaagggaaggggagctcaggttccggagctggagggaggagtccaggaaggcctggggtaaaggagggcttaggggctaagctcggggtcggggccaagtggagtgactgcgctcctctgggggaaggaggctgggatggcccacgggaggacagaggggaactgagggcccacaagtgtcctgctccccaagtctcctggcagcaacaggcttgctcctcataagtcacaatgaggggtgggctgaggacaagaggagctggggccatctcagggccccagggttggagctcactgaagtcacatgaacacctttctgttcttcaggaggggcccaggcagccctcagcacccaggtgagaccagcgcctggtgaatgggctgagtgggccaagtgggtgggctggggggctggtactcccaccacctgactccagaggaggagagggctctgcaggggatgtggactggcactcgcagaaccccaaggcgagtgaggtgggccctcaggagcgctggatgcggattaggatgaagagcgtggctggtgacagtgaggccccgtcattggaaagcaggtgtatgtggcggtacacacttgctttaggctgctaagaggcagtgtaaactggcccacaaagtcattgggggaggtggcgtcataatcttccaccacaaaccggaccagtgccagctccgg

SEQ ID NO: 320624 - DNA, 801 bp, Homo Sapiens
  misc_feature (32)..(32): n is a, c, g, or t
  misc_feature (47)..(156): n is a, c, g, or t
ttcggcacggagaggattacaggcacatgcanccatgcctggctaannnnnnnnnnnnnnnnnnnnnnnnnnnnnnnnnnnnnnnnnnnnnnnnnnnnnnnnnnnnnnnnnnnnnnnnnnnnnnnnnnnnnnnnnnnnnnnnnnnnnnnnnnnnnngtgtgagccatcgcgcctggccaggacctttgtttcttatctacatattggaagatttggtcctgatgtcctttgaggcttctttagctctagttctctgacacttcagcctatatcacagctaacttcttcagtctcatctattccttatgctccagcccctggcaatttgcctcaagatgggggtttgaaaataaactttacctgactcaaggagtgtctggagcacctcctagtctaagtctgcaggctccagttcttgcctaaaaccatgccagtggccacccttggggcttcaggacagtctctggggccttttgaccacaaggccagcccctcgccctctctgtggcatagtcttctctgccccaggactgcagggcggcttcctccaaggcttccaaggctcaaaagaaatttggctccatccttgaaggctccagctcccctactggcccctggctcaggcccacacccctggccaggcccagagagtgtgtctcaggagaattcaatggctctagagagacacacagaaagtttggcatttggaaatttcaaggatgtatgtatgctcacgtatggagcaggttgtcctggtccctgggtgcagggaagtgggctgcagggaagtggattggaggg

SEQ ID NO: 320625 - DNA, 447 bp, Homo Sapiens
caacatcttcttcagcctgggcttcgacgtccgagaccactacaatgacttcgggggggacgtggcggcctacgtggcgcccaccaacgacctgaatggcgtccgcacgtacaacgcggtggacgtggaggggctgtacacgctgtttactgtggtggtggattaccgcggctaccgggtcacggcccagtccatcatccccggcatcctggagcgggaccaggagcagagcgtcatctacggctccatcgacttcggcaagaccgtggtgtcacacccgcggtacctggagctgctggagcgcacgagtcggcccctcaagatcctgcggcaccaggtgctcaacgaccgtgacgaggaggtggagctctgctcctcggtcgagtgcaatggcatcattggcaacgacgggcgccactacatcctcgacctgctgcgcaccttccc

SEQ ID NO: 320626 - DNA, 1066 bp, Homo Sapiens
  misc_feature (130)..(130): n is a, c, g, or t
cacacatgcttttggtgataaggtcaagccattgccactgaaataacgttaagaaccctgctgcattcaccagaaatagcgtatgggaaatcattatgtaattaaacaaagcatgaagctcattatcttnttctttttaacaaaaccttcaatttcacattttagtgtacactgtggtttccagagaaatatatggatctcctatattctgagtcagaccaaatttattgcctttattcttaccctagtctatggggtcaataaccgttttcctgaatgctgtcaaaatggtgcctgaaaatatctaaatcccagcaaaaacctaggcctcaactttggaacccagtcatagatctttctaggcagaaggcctctcaggggagtacatgccctgggcaaaggccatggactcggaagcaggaaggtcacgggatgatttaatggcatcgaataatcctttggtgagatggcctttgttgccctcagcacagtcgaggcaggttaatcatttatttgccacaacccttccttgctctgtaaagctgcagcacaactgggtggtccgtatagccttttctgccacagatgtttgtggacatttcacttccagactgtgacgtctgaagatgggcttgaatgacagcagccatcatcgctgccattagggaggtgcacacagccccctttgctcgatgcaaatatttggttggtaagaaattccagtgcagctaaacaagtcagcttggactgagttaagaaaagctgggccacttttaacatgagaagagcagatacttccccatgcttggcaatgccaatgccgtaaaaatgggaagtgttgagacaaacctcctgtggacgagaggttcccgtggacatttttaacaatcatgagccttcaggtggtggcatcagtcttcatgggtgacttctatggacagcataattttcttgcctctcctgaatctatactacttttctgaatgtgaaagaaggtctaaaaagtaatccctcgggatccctgcatcaggccaaccatgctaactgcagagggtgaggctggcag

SEQ ID NO: 320627 - DNA, 420 bp, Homo Sapiens
  misc_feature (388)..(388): n is a, c, g, or t
  misc_feature (401)..(401): n is a, c, g, or t
ggactgccagcctcaccctctgcagttagcatggttggcctgatgcagggatcccgagggattactttttagaccttctttcacattcagaaaagtagtatagattcaggagaggcaagaaaattatgctgtccatagaagtcacccatgaagactgatgccaccacctgaaggctcatgattgttaaaaatgtccacgggaacctctcgtccacaggaggtttgtctcaacacttcccatttttacggcattggcattgcaaggcatgggggaagtatctgctctttttcatgtttaaaagtgggcccagcttttctttaacttcagtccaagctggacttgttttaggctggcactgggaattttctttaccaaccaaatatttgncattcgtaggcanggggggctgtgttggcacc

SEQ ID NO: 320628 - DNA, 1911 bp, Homo Sapiens
  misc_feature (63)..(71): n is a, c, g, or t
  misc_feature (78)..(87): n is a, c, g, or t
  misc_feature (111)..(125): n is a, c, g, or t
  misc_feature (135)..(283): n is a, c, g, or t
  misc_feature (1843)..(1857): n is a, c, g, or t
gggggggatcaaacccctttgtgtggccgggttttttgtgagaaaaaattttcccctttcccnnnnnnnnnggggggnnnnnnnnnnaaaaaggttttaaaaaattttttnnnnnnnnnnnnnnncgcaaaaaannnnnnnnnnnnnnnnnnnnnnnnnnnnnnnnnnnnnnnnnnnnnnnnnnnnnnnnnnnnnnnnnnnnnnnnnnnnnnnnnnnnnnnnnnnnnnnnnnnnnnnnnnnnnnnnnnnnnnnnnnnnnnnnnnnnnnnnnnnnnnnnnnnnnaattcttctgtattttattgcactcaacatttaatagaagacatttacattatttttagaaaatccaccgatgttgcacaatggcacatatttgtaaagacaaggctcattaattcagatatttggaattcaaaaatatttaaagttaaccacagcataatgaatcctcaacgtccagagttctacaaaaatccagcaaaacttacttttactcattcatcagttctatgtcactccttagtttccctaaaaaaatatggctttataaaaagtagcttctataattcacaaaatgaagagttttattataatttgagtatcatctctgtatcaccgacagcacagctttagaaaattattgcttttcttattatcttattatttcaggtttcattacacatcgagtacccatgcaggactcactacattgtataataactatgatctatagtgataaaaatatagaagtatctttgattttaatcctaaaagcagggggaaaaagtcaccttatcttaatgttaacaaaatcaagagctacccctaatatatcgatcaaaccacttcttatggctttgcttatagttgctcatggtcctttcaaaatgatgtggtagctaccttcttttctgacaaaggattattttcaacagagcaattatttctgagcccaaaataaaccacattaaataagaagaaaatcttcagtgtagaaagaaaaaggctcattgccgtgaaatagcagcaggcatcgggctctgtgagcttttcacacatcctcaatcaacccagctcaaggcgttactgagttcatctagtaagagcactgagcggtctctagtgctggaggggaattactcaattagccaaaggcagaataatctttaagttatgcaccagtaatttatacaggttttctaaaatttaaacaaatgctgaagagactatagctattatatgattaatctgaggtgccaacaaagcatttttgcatgataataggtaggggccattctttttcccttgtgtgcttaacaaggaattttcagctttcccctctcattttaaaaaaataaattaaatgataatttaaaactttccctggaaatatttaattttttctcattaatcagctaaaagctacaaaaatttcaaaagtgttaatctgaacacttaaagctaatgtagaaatttttgataagaatatcagtgcaggtatatacaactcaaatcttcacagctaatgatgatctctgttagcgtttttaagagtgctaacacaaagtactcttaatagcttttaaatcatgtttaacacagtgtacacaagtcagtccaacagttagtgttaattactaataatatatgaaaaccctgccaacacaattgctgctacatcaccaatataattattaaccactgtcggaaaaacacacataaattcaggtaagactaaaagctgtctcacaaaaagaaaaaagaaatccaatggatccactaatgctatcaaaagggacatgcaggaatgtaacatgacatttttagaaatgtgtgtttctnnnnnnnnnnnnnnntacactaaaatgccagtggactataattcattcaaaacatctttagtgttcccc

SEQ ID NO: 320629 - DNA, 934 bp, Homo Sapiens
  misc_feature (354)..(376): n is a, c, g, or t
  misc_feature (648)..(648): n is a, c, g, or t
gggggggtgaaaggttgcgaagatggcgacggccttgagcgaggaggagctggacaatgaagactattactcgttgctgaacgtgcgcagggaggcctcttctgaagagctgaaagctgcctaccggaggctctgtatgctctaccatccagacaagcacagagacccagagctcaagtcacaggcggaacgactgtttaaccttgttcaccaggcttatgaagtgcttagtgacccccaaaccagggccatctatgatatatatgggaagagaggactggaaatggaaggatgggaggttgtggaaaggaggagaacccctgctgaaattcgagaggagtttgagcggctgcnnnnnnnnnnnnnnnnnnnnnnnttgcagcagcgaaccaatcccaagggaacgatcagcgttggagtagatgccaccgacctttttgatcgctatgatgaggagtatgaagatgtgtccggcagtagctttccgcagattgaaattaataaaatgcacatatcccagtccattgaggcacccttgacagcgacagacacagccatcctctctggaagcctctcaaccccagaatggaaatggaggaggttccattaactttgcgctcagacgagtaacttcggcaaagggatggnggagagttgggaatttgggagctggaggacctacagggggctttgttcggtctcaagctgttccgtaatctcacaccaagatgctttgtgacaacaaactgtgctctgcagttttcatcccgtggaatccgacccggcctgaccactgtcctagctcggaacctagacaagaacaccgtgggctacctgcagtggcgatggggtatccagtcagccatgaacactagcatcgtccgagacactaaaaccagccacttcactgtggccctgcagctgggaatccctc

SEQ ID NO: 320630 - DNA, 1510 bp, Homo Sapiens
  misc_feature (189)..(189): n is a, c, g, or t
  misc_feature (474)..(513): n is a, c, g, or t
  misc_feature (1474)..(1474): n is a, c, g, or t
gtcccacgtaatgcctgccgttggtgtgacgcgcgggcggcccgccaggtgtcagttttttagatataagggcaaccccaggggcggcagcagctgctgacaattatctaggctcatgtcgccgagtgtcccccgccgcgttccacattcgcgtgtctgtgtgattaggaccccccgccgggttatttngaccccgctccaggagtacaatcctcttaccgcgggattttctgtttcccagacccccccgtttcgcggctgtgggcccccaccggagggccgtattttttatatttttggttaagggaaatccctaagtccccttattgtgaatgggccaggggatcctccttttgggaaataccggttttatgggcccattttttcactgttgccctaggcgggggcccgcggggcccaaaaggaaagggttttaaaaagctttttcgaaggctcgagggcggccccccaagnnnnnnnnnnnnnnnnnnnnnnnnnnnnnnnnnnnnnnnnattgtccccctctctgacacgggttgttcttcagaacctttttattcatcatctaaccaacagaggtggttggctcgaactcaaactaaaatggcctcaaaaggcccacctcgttacgacatgacagggcaaaaccagaagtagggacagagtttagcctcagttctctgcagagaagaccaagcatgtatttacacacaggtgcctcattaagaactgattggcaatgttccaccagcacagacccagagtgtgcagaaatccgtgggggctctgtatatgtgtcattcagacaatccgccgattcctcagccataaacaagctcttgctttttgggaggagggtgatcagcatgttatcttgaatgatggcaccatttgtttactctggaactttgaaggggaggtgacaacttattttctcccctgaatctgagatgcagtggcctgtcagagtatctaaaaatgtgtcctggaagacaggtggtggtggttgccctaacagagagtttacagggtaattgtgttgggctctttcagtacttaatcctgctgtttttcagaaaccctttgcacctgggccccatggagccagcagggccccatggagcatcccacaggcctgtgagtgaagtgcctctcagagcagtcacccagggaagggaggagggcagggaacggggccaggggagatgcagggacagaaatcagcagaaacactccatgctggttctgactcgctccatctcgtgcaggaagctgtagaactgaggcaaggttaattctatatacacattttcggtttgatttcctttcttaaccaccaactttagttgtaaaaatatacttcccactttctccaattcgctgctcccagatgtcactccaaatttccactccatatctatgagctggttaatcatcagagtctgacctatggcccatcgagcaagggtggganattctgcttccactttaattataaagtaagtggctt

SEQ ID NO: 320631 - DNA, 1085 bp, Homo Sapiens
aatcattaagcgtttcagggggctggcaaagctgcaggaactgtgcagcttaggtgaaccctgggattctgcaagccccagtggagttttctcggcttctggaaccacaggccagagctgccggggcaatggggctcccagctttggtaagggctgttggcattaagtggcacccggtggctggaggggtctcccagggaggacggagcctgccccacactctcccacagtttcctggagtgctagaattggggttctcccacggcaggctcagaaaggcaccaggagttcctcctcttgctcaaaggacacactccctcctcccaggtcctccaagtggccaaaacactcagtggcctggaggggcaggagaggcaacaggactcctccaggagggcccgagtcactggggagccagggtgtccccggacccacctttcggccggcagatagtcatcggggtcgggctgctggacaggggtgagaagaggggccgcagcgtccccgagaaggggatctcgggaaagatgaatagcagtgacccatcggtggcactgtagaaagagagatgtccagcctcgtagtccagaaagatccccacgcgcctgggtgggtcccggagtggagccaaggcccgttccgaggaattgtaatagctccccaggaagaccaggatccagaagccgttgcccgcggacagctcgcccttctccttcctgttcacgttctccctgcacacccccagggcccagctggtgcggtccccaacctccacctcccagtagtggcggcctgaggtgaagcgctcctggcccagcacgcaggggccggggtcaaagcgctctgggctgtccggcagggcctgccgtaggtccccccgctgcacgctccgcctgtcttcagacaggatcagctcagggttggcggtgtccgggtccaaggtcacgtcccctcgaaacctccgcagtgtctctaccagtcccgggaccctgggtttcggtagcgctgggcgcgtaggctccgagcgctcgggggacgcgggacgtagggatcccgatcccgggaatccggaccggtccagcctc

SEQ ID NO: 320632 - DNA, 368 bp, Homo Sapiens
gaaaagccactctacagtaattatggcaaggctcattaatatgcagaggtaaagatttcatttgtatagaaacttagaatataatgtttgaaaaggaaagccattccatcaggctacatattttttgtatattaaaaattatatataaatatttcttgaattagttttatagtcaattttgatgcagtgtcattgagtggtgataaattttgagaggtatatgttaaacaaacatcatacttgagattatagtcttaggtaaacatttaatacacaatgtcaaggtagttccctttttaaaaaatttttgtaccaagtaagtcatacatttaatgttgacatttcttcttacctgtgtgcctcacacc

SEQ ID NO: 320633 - DNA, 777 bp, Homo Sapiens
aggaagggggaccatggccaagagaagccctaaatgacagaagctcattaaaaccaagtcccccaaacctcctgaaacatcgttagcaaggagctactgctttcctttcttaaacatgttttgggcatgaccacactctggaagtggtgaactgttacacatttggtgtgtgtgtacataacatcaaaaactactgtgtgaaacttgagaatgtctgattaaagatttcaatgtatatctaaaaactaactcaaatcgttgaccagcactttcccagtatcataacaatgcggctgaccctcttctgccttcactttacaccccatcatagcacattatttgtgcacaactagtgaggtctgtgcggctcatcatccccataaccaagtcggtctgtgttgagtcatatcattctgtgctggttttagaagtcaccataggaaacatgaagtcacatcctggtcaaaaaactgtccatttctcaaaaacagagaaaaacctgagatacgaggcagcaactagcgacacttacaggaagggaaagaacaatgacaacacccgcccagccccacccccaaaaagctgctgttgtgaattaaggcttcaaaagaggacccacattgtagctgataaaactcaagccaggaggatgtttgaaagccaatctgcactatcacttgttccagtgacctcctatgttcagctgccaggaccgattccatacagtgattgtaggttgaggactgaggacgcccctttgctctcgctccattttga

SEQ ID NO: 320634 - DNA, 963 bp, Homo Sapiens
  misc_feature (163)..(199): n is a, c, g, or t
  misc_feature (210)..(213): n is a, c, g, or t
  misc_feature (215)..(215): n is a, c, g, or t
  misc_feature (217)..(217): n is a, c, g, or t
  misc_feature (225)..(225): n is a, c, g, or t
gcccggttcattgggggggttaaattccccgggttctgcagccgattcatttatgccaggtaaacctggcttatggaaattaataccgactccctatagggagacggccagatcttcccctttgtacaagaagctgggtcaggaaacagttatggaccatgtnnnnnnnnnnnnnnnnnnnnnnnnnnnnnnnnnnnnngcctcgagttnnnntntntttttttntttcgtatttatgtataaacaggtaccagttttgattttatttaatcatttcatacattaacatacatgacacatcaaaatgagaaatgcacagtttaaccgttcaacagctggccttacttcaaaagaacactatattcatattaaacatttacagtctttccatctaactttacacatgtcctaaatcattttccagcacttctcacatagaagtctagttttgctctttaaaatcaccatctgtatcacccctagtagacgcgagggtttccccaattacatgctgaagagagccagccaccaccccacctaaagacatccaagcagctccagagcctgcctccgaggccaccccttcgccacggcagtctcgattccaagaactgattatctgacactagtgaaccagcactaaaggctgtaggatgtgactacatcacagttccagaaggaaggggaccatggccaagagaagccctaaatgacagaagctcattaaaaccaagtgccccaaacctcctgaaacatcgttagcaaggagctactgctttcctttcttaaacatgttttgggcatgaccacactctggaagtggtgaactgttacacatttggtgtgtgtgtacataacatcaaaaactactgtgtgaaacttgagaatgtctgattaaagatttcaatgtatatctaaaaactaaccctcgtgccgaattcgccacccaggcctcgctacctt

SEQ ID NO: 320635 - DNA, 804 bp, Homo Sapiens
aaggctgtacggtccggaatttcgggatatcgtcgacccacgcgtcgaggctttcttggggaagaggaccccaaaggaggtacttcctcctcactgatgccctcagggctgctgtgtgggtgtgttaagctgataaggttcagtttgcggcggaaactacctgctagtcttgtgtcaggggctgccagcctccttttgttttacttttgcccccttcttgggaacatttgaccaaaaataatcctcatttcatcttgtgtacagtcctttgtgtaccccgcccaggttgagaggtgaatcagcgtaattctccgaagctctgctgggcagctcagccatgttacattgtctatgcagaataagcaggcctggtgtctgcaaatgtaccagtccttctcccgcatctcctgggtgcccccttggctttgcctctcctgtgtcctgtctttctgcgttttagaagtgagagcctctccttcaccttttgagcaactgagtcatctcaagtcctgagctctgctctgccgcctgctggtgccttgtaaaggtatactcgttacaggccctagaggttctaatggtccagggttaagtgagaggagactgtactttgtttcaaaggatccttcaccctgatctgcagtgaggtggatagatcacctggaagtccctcgtctgtggtcttggaggcttaaattgtaaaaataccatccttatggaatctaaattctctagggtttggaagggccattgacccttgtaagtaaatggatggttatattctatctggattcattgcctgta

SEQ ID NO: 320636 - DNA, 2086 bp, Homo Sapiens
  misc_feature (82)..(154): n is a, c, g, or t
  misc_feature (169)..(185): n is a, c, g, or t
  misc_feature (203)..(349): n is a, c, g, or t
  misc_feature (2070)..(2070): n is a, c, g, or t
gcggcgtaatttcccacccgccattttctcttttgggcccgcgctctttctttgtgtgtaaaaagattcccccccgtttctnnnnnnnnnnnnnnnnnnnnnnnnnnnnnnnnnnnnnnnnnnnnnnnnnnnnnnnnnnnnnnnnnnnnnnnnnccggcaacggccccnnnnnnnnnnnnnnnnngctcctgccttcttttcnnnnnnnnnnnnnnnnnnnnnnnnnnnnnnnnnnnnnnnnnnnnnnnnnnnnnnnnnnnnnnnnnnnnnnnnnnnnnnnnnnnnnnnnnnnnnnnnnnnnnnnnnnnnnnnnnnnnnnnnnnnnnnnnnnnnnnnnnnnnnnnnnnnatgggaaaagttttaaatttttaatgaaaaagacttagaacaatgtattatttacatgtaaataagaaaagagagcagaatccccatatcctcttcaaaggaagggagacggcaggccatttatgagaagaaagtccatataaaccccattaagtagaatctggatctaaatacttccaaacaggagtacacagcaggtgaacagtctccctcatcccactgatctgctgcttcagataagatcagcaacgttcatcggcatctcatcaatctgagtggaatagtactgctcgatatctctgaggatgcggatgtcgtcattctttacaaagttaatggccacacccttccggccgtatcgacctgatctcccaattctgtgtatgtacaattctctgttattagggagatcatagttaatgatgagggacacctgagggacatccaaccccctggcccagacatctgtagaaataagcactcggctggcgcccgaccggaactccttcatgatggactcccgctctttctggggcatgtctccatgcattgaggatacagtgaagttggcttccctcattttctccgtcagccagtccacctttcttttggtgttgcagaagatgaccgcctgagtgatggtcagtgtgtcgtagaggtcacacagagtgtcaaatttccactcttccctctccactgccacgaaaaattgcttgatgccttccagagtcaattcatcacgtttcaccaagatgcggattgggtcggtcatgaacttgttggtcatctccagaatctcgtgtggcagcgtggcactgatgagaaccacctgtgtggctggaggcaggtacctgtatacatcgtaaatctgctctttgaaacctttattcaacatttcatcagcttcatccaaaaccaacattttgatagcacgtgtccttaggcttctgcgacgaatcatatcaaaaacacgccctggagtgcccgcgacaacatgctgtccgtaatccagcttcctgatgtcctcgccaacattggtgcctccaatgcaggcatggcactggacattcatgtagtcaccgagagcaagcagccccttctggatctgcacagccaactctcttgtgggagccaagatcaaagcttgagtttcacgaacctgaatatccaaacactggaggactgagatactgaaggtggctgtttttcctgtgccggactgagactgtgcgatgacatctctccctttgatgatctgcttgattgctcgttgctggattgctgatggtttttcaaaaccgtaagcgtagatgccccgcagcaggtcctcccgcaggcccatggtgtcgaacgtgggggtcacatccacctcctcgctggtctcgaattccactttagtcatgtcttcctctttgagcagccgctttcgcgccgagcccgaggtcgccatcgtggccgtggtcgccatgattcagagtccgcggaagagcacagcgcgcgccgctgccgacctcgctgccgctgccgacctcgctgtgccgctgccgacctcgctgccgctgccgacctcgctgtgccgctgccgacctcgctgtgccgctgccgacctcgctgtgccgctgccgacctcgctgtgccgctgccgacctcgctgtgccgctgcctcgtgccgaattcgccacccagacctcgctgctggggaggggaaagaggaaaaggangggggtgaggagaaaa

SEQ ID NO: 320637 - DNA, 461 bp, Homo Sapiens
  misc_feature (395)..(395): n is a, c, g, or t
aaagttttaaatttttaatgaaaaagacttagaacaatgtattatttacatgtaaataagaaaagagagcagaatccccatatcctcttcaaaggaggggagacggcaggccatttatgagaagaaagtccatataaaccccattaagtagaatctggatctaaatacttccaaacaggagtacacagcaggtgaacagtctccctcatcccactgatctgctgcttcagataagatcagcaacgttcatcggcatctcatcaatctgagtggaatagtactgctcgatatctctgagggatgcggatgtcgtcattctttacaaagttaatgggccacaccctttccgggccgtattcgacctgatcttcccaattctgtgtatggtacaattnttctgttattagggggggtcctagttaatggttgaggggcaccgaggggcatccaccccctgggcc

SEQ ID NO: 320638 - DNA, 437 bp, Homo Sapiens
aaagttttaaatttttaatgaaaaagacttagaacaatgtattatttacatgtaaataagaaaagagagcagaatccccatttatggacaagggttgaagtttctaccatagaatactcagggtagagctgaacaaggtacaaagaacatctgttttcatttctactgcttagctgttgagcagtagtgagtgtccggtatgacctccctgaagcataatgacgttccagaaatggatggaatgtcctgggagagccagtggccacctgtactctgagcatcttcacccttctcccttcctccctgggaggatgagtcctttggacaaagaattgtgcatacagttgtcccccttatcccagggcgacacgtttcaagactcccagtggatgcctgaaagtatggaagcaccaaatcctatatatatatactatgat

SEQ ID NO: 320639 - DNA, 850 bp, Homo Sapiens
ggcattgatactaaattacccagcttaatcaacagaatggtttaagtagtaccaggaagtaggacaagtaatttcaaaaatataaaggtgtttgctactcagatgaggccgcccctgaccttctggccagagagacattgctgccagccagctctgccttcccatcatctcctttcaggaccgtcccacaccttttacttgctcagtgctgtctgaagatgcagttgctgtttgcaaacaacaggaacaccagttaaactaattaggaaaagagggagatttccaggcctgggtaactatatactgtgaccattggaggtagagacaggtctcaacagttggaaccaggaactctgctgtcaggttgtgagttttgtttctcttccagcttttcactgtgtgggggtcttttctcttatgtcagctctttctatcacatggcagctgacctctcacgctccactctgcagcttggacacccagtagaccctgaatttcactctctctaaaaggttctgagggctcatcctgggccaggggccctcctgtgcactgttagctatggccacgggagcctccagagctgcctggtagcttcaggttgacctgcttatcaggcctacgatccttctgatttaagtacagctggaaagtattatctaattaagttcatgatagtgcttttgggagaacttgtcaaattacagccaatgagaaaataaaggacctagcataccgtggagaaccattaaaaatttgagaagaaacaacaagtattatgtcaacttacttcaaaggcgtagttttgggaatttgatgcagtaaagattaccctgttttatgattgttc

SEQ ID NO: 320640 - DNA, 1045 bp, Homo Sapiens
  misc_feature (126)..(178): n is a, c, g, or t
  misc_feature (990)..(990): n is a, c, g, or t
gccttgggtggggttgaccacaccacaggtggggtactggggcgtcctagagagcccgaaagtggggggtgcgtttgggccccgggggttttgagggggccaggtggtttccgaggcggtcttttnnnnnnnnnnnnnnnnnnnnnnnnnnnnnnnnnnnnnnnnnnnnnnnnnnnnngggcctggccattctttttcccgcggggcctatttccttcccgagataacgggagcccagcccgggttttttccacggtttgaattgcaggaaagttccgtggaaatgtccttttccaggcggcccgattccaggccaatggtttttccatgcccccttgtgggcggctgggagccacccatgtttttgcgtgagcattggtggtggtaggggcccaggttgtaggcggacccgttcctcgcaggacatgcttctgcttggtggagctggcggagttcccccgccgccgttgctgccttgcgaacttggcgctgggagtagggcagctgcagaaacactgttcctgtaacgtggatatagtgaggcttgttctcagcagggaagttaaaagccgaggcagaatatttatcttgtacaaacccaaacctgtgtgcaatggcttcctggaagaggtgcattcgatcccagtacgtttcgggttcaaagctatcaaacaggtgctcgctgccactccttgagcaagcagctgatgttgagtgggatgaagagctgggcacgaagggggtcgccatacaggtaactgggcagtgcaaaaggcccctccaaaactgggactaacaagaagccaccaggaggtggctttccgatgccacccttggaccatctcgaagagtcctgttgcggtccccgccatccagtgcagctcctctcaaacgcgcatttagagaaaccctgcgggggtaatcacaggtcgccgcactcccgtcggtctgtggggttgttcgcctcttttgtgaaaatccccagtctcntgctcctctacctacgaaatttccggcccggttacccaggcctggctttggggtg

SEQ ID NO: 320641 - DNA, 1109 bp, Homo Sapiens
agtgggttgctactgcatttcatgtttcatttttgttagatcatatacattagaaaagaatgatacattttagagaagaaatatgtacatacatagtatcagaaataattttcttgtattgattcatttaatatggttgtgcttatattcaatcagaaggtcaactcctttgctctaaggttcttacactgctaacaagaaatggcttttttcctgttgcaggtcatgagcagcacacagtgtcctttctaggcacataggatcatcgatcactgtgtggacgcaggctaatcagaattgcacctgaaatcacttgtgcaattagtgatgcaagagtgatcacaggaatcaagactgggagccaagagaaagaacaagaggtgcacaaagaagcagttcggatgggagaccaggaaagctgaggggaaaactgggaaacagattctggaaaactcacagtttgtttgatacccagggttaagagatgggactttgataggagtggtgcttatgaattaagggaggaagaaagaggtgagatccttaatgttggtaaaggtacagagacaaagggagccaaccaagtggtaagaaaatagaaatggaaagtaaaaatgagacttaattctttagtcagggaagccaagccaccaggaaaacttggtaaagagtaagagaaagagggagaaaatatgagataatattttggtattttgatatactagagaacaaaatattattctatagtataaaaagaacaaagtaagcaatatgatctattggattcctattcacaatgaaaattatcaaacaataatttgtctctcaggcaatgctactagaagttacttatatagttgccttattgttcatttaatttcagtttaactgaagcgattttgcccttttccttccttctacatggtcactctgctgttcaaagggtaagcaccatttgttcaggtaaagcaattggtgtttgaaatccttccgatagatacgccatctcagagggctgctaatataactaactgtacaagacacacataattttaggttggccattcttgtgtataggggtaatctaaagctagtagttacaccccaca

SEQ ID NO: 320642 - DNA, 694 bp, Homo Sapiens
aacaaataagttaacaaacttcaaaatacctgatttctgttgaatttgaaattgtgatgcattcattgctatgctgataattcttcaatgtctcttctgttataggtagaattgggctatttgctgaagcttcttggtggcccttgctagcccaggaagaaacttacattttgatttttttgtaccatggctttggttcacaaattgctgcgtggtacttattttctcagaaaattctctaagccaacttctgccttgtatccatttttgggtattcgctttgcagagtattccagtagtcttcagaaaccagtggcttctcctggcaaagcctcctcacagaggaagactgaaggggatttgcaaggagatcaccagaaagaagttgctttggatataacttcttctgaggagaagcctgatgttagtttcgataaagcaattagagatgaagcaatataccattttaggcttttgaaggatgaaattgtggatcattggagaggaccggaaggccaccctctgcatgaggtcttgctggaacaagccaaggttgtctggcaattccgggggaaagaagatttggataagtggacagtgacttctgataagacgattggaggcagaagtgaagtgtttttgaaaatgggcaagaataaccaaagtgcactgctatatggaactctgagctctg

SEQ ID NO: 320643 - DNA, 863 bp, Homo Sapiens
  misc_feature (180)..(215): n is a, c, g, or t
gccttagtcaggagattattcgaggaacagtaaagaactgaactaaggaagtagctactggcttccaaagccacacacacacaaaagtaagtttcaaactgttgtcctctctcagtgcaaacgagcaattggcggacctgtcacgtttcatcaatcgatacgaacacagcattcagtctnnnnnnnnnnnnnnnnnnnnnnnnnnnnnnnnnnnngcaaattcaagcccattaaataaaaccacagaaaggagagccagcccggctcagtgtcctcgcgcacggacgctgactcgtagcacaaaagcagctgaaaggcacgaggctcagatctcactgatcgtcctctctgaagggcagtactccgaggggcctggcgaggacatgtagaaagactgcgttttccttttcaatcgggcccttttgttggccaacaccagactgcgccggcttgaactgatgatttccgaaatgaacttcttgcagtccacacacacctccatggtgctccagtcctccatcaactctttgggaaactggagttcttcatctgatttgtccatagacttagattttgaggagaacctggcaatgctccgaagtggccgatgatgggcagtggagggtttttctgacctcatactactttcccctctttgcagagcagaaggtcccaatgaaaagataggaagagtggagtatggtttggagggcagccgcatctttttgcaacactgtgagcacaccggcctcttacagaactgacaggtataagaccaagtgaagaaggaaaacctcctggttcggcaacaaaagcagagctttccttttttcaaggcggtgtagatgtctttatactgtttt

SEQ ID NO: 320644 - DNA, 578 bp, Homo Sapiens
  misc_feature (516)..(516): n is a, c, g, or t
  misc_feature (529)..(529): n is a, c, g, or t
  misc_feature (543)..(543): n is a, c, g, or t
  misc_feature (549)..(549): n is a, c, g, or t
ttgtaatggtagttcttagttttattataaccttgtattttctggcaaaaatataaatctaaatgcatgatctctgggcacacagctcaagtatcagccttgagatgacctaagcagcaaaaatttggcctatttaattaaatgcacaggaggttgcagccgcatttattagaaaaatattatcctttggaaattcctttcttgaagattggctccagggcgttgttctttctgtttttatgcaattgcacttccttggcaggcagccaggcgctccggtgctcacaggccatgggacagtccagttccctgcagacccagcgggcatgggcggacagagccgcaccgtgaagcccgcctgttatttccatcgggtggtcctgggagacgacacggctgggggaaatggggtcaccgggaactccacgggcgggccagacgcccattccaattttgcctgcggggaacttcgctctttcacctttttctttcacaaatttcttttcttgggaagcntttggggattttnaagcgtttttccgncccagnttcccaaaggtgctttttccccggacctt

SEQ ID NO: 320645 - DNA, 1559 bp, Homo Sapiens
  misc_feature (850)..(850): n is a, c, g, or t
gaaaaatattatcctttggaaattcctttcttgaagattggctccagggcgttgttctttctgtttttatgcaattgcacttccttggcaggcagccaggcgctccggtgctcacaggccatgggacagtccagttccctgcagacccagcgggcatgggcggacagagccgcaccgtgaagcccgcctgttatttccatcgggtggtcctgggagacgacacggctggggaaatggggtcaccggaactccacggcggccagacgcccattccaatttgcctgcgggaactcgctcttcaccttttcttcacaaacttctttctggaagcgttgggatttaagcgtctccgcccagctcccaaggtgctgtcccggacctgcagggtagcttagcggctgaagatgtcaattctcgacaaagggtgacaccccggcgatgtagtcaggggcgaacacgttggttttctgccctggccttttgggagagtcgcagctgagggaagcgctgatcctcggtgagatgggggttgatggcgtatttgccccctttgggagtgggaagcgagtaccggaggccgcgggggttcagcaccttggggttgcgggagaagtgcatgtgcagggtgccgtcgtcgctgacggtcacggacactttcttcagggtcttgttcccacagtgtgagcagaacactcggctcatgtcagacgttgtcttgaaacagccatggcagcgcaagatgtagctccgggcctcacgaatcagcatgccgttcaccgccagcacgtgcagccccatctgcagcagaacattctgcatggcgaagtctgtggtcaggcagccaacccgncacttctcgggggacgtcacactgcttcagctcctgctggatctgcttgatgttactgggggttatccagccacccccgtcgtcatcgctgtcatcttttctgtcttcaaacccgttttcttcctcctcctcctcctcacttggaacgtcctcacctctgtcaatcagcagctcctgcagttcatgatcgatgttgggcaaagggtttctccagaacatgaaggaactaaattccaggttctcaggctcacaagctgagtgtcctttttctgtttcttgtgggggtttaggcttgtagggcagatggaaaccagaaatgtgcagaggtgtttctgggtgctgaatcgatgagctcaccttaaccttctgtggttcttgttttaggtgagacaccccaacaaactctgcttccaactggtatgtgagtgcaagcacttggatgtccgtggcagagaggctggggtagtctcctgttttgtttgaaaactcagtcaccagccgcacgtattccggtaagggctccttgaaccgcagctcgtagggcaggacagcgagccgcctgcgtgtggccttgtcccgaatctcagtgaccacctcccggatggtgtaaatgttcttcccgatgtcctgcagagccgcatgccgcaggaaagccccagcatccgccacaacgtgctccactggagccatgttggctgcgtgagagccc

SEQ ID NO: 320646 - DNA, 1043 bp, Homo Sapiens
ttttttgttttgtttaatgttaacatgtttatttaaaccagtacaagcaccatgcttaacaaaagactgtccaaaataaacatgcaatatgaactagcagagactgaaaccacagcttaaggagttgtgtcagttgttggttttgttaaacgatgacagagaactgttaaaattcacaagactaaaccattaatgtttcaagcctcctgaatgagattatcttggaccatctaaatcagtgggaactgccctggcatgttaatgatctcaaacaatattcaagtaattatatttatatgaattataatccaaaaagcaataaaatacaatttctatcacaagtttactgtatatgagcactgatttgaaatgtcaaatggcataataaaaacaaatttctcaagaatattcagcttgggagcattggttttaagcggtctagaagattactacattcttccagaaatacaaaataagatttgtccagaaatgtttgaaacacatcctcacaaaagttgtaatggctcaaactctataaattccagtattatcagtctattgaacaaatagggaaagcaaccatagtaagaatacttgaattgatagaatatgagttactctctacttccaccaaatatcagcatttaaactcttatgaaaatatctattcatcactagtccacatatggattaatgacattgctcaggttttaaaagcagtccaaacattttttaagtacaccttccttaatatctatatgggttggggggaacagccaaatttaatttggcaataaactcccctaactggaaatttttagctaaagtgtcagacaaggatacagtttatggctacatttgactcctgaaaataggagataaaaaaggagggaaaagtgctgacacacattttgccacacagattatttagtaatgacagtaaaaaatttagcaacacacacttaaacaagagtatgtttaactgcactaggcatttagtaaacttttagaactagacaatttgaacatttagaagtcaatta

SEQ ID NO: 320647 - DNA, 933 bp, Homo Sapiens
aaaaagaaagccccagcgctctagagctcagctgacgggaaagggggtgcgcagcctcgagtttgagagctacccggagctccaagacaggggtgggttccagctgcccgcacgccccgaccttccatcgtaggtgcgtgcgacgacctgggacgctggaaacccggagctgcgcgctgggcggaaaggactcctagtgggcccggctgagaaggcggaggtggcgcgcgaggggcgggctcgtgccaacgctggcctgggccgaggccactggtgcatatgttcccgggagggataagccagacctgccaacctggaagaggaatttccgctctgccctcaaccgcaaagaagggttgcgtttagcagaggaccggagcaaggaccctcacgacccacataaaatctacgagtttgtgaactcaggagttggggacttttcccagccagacacctctccggacaccaatggtggaggcagtacttctgatacccaggaagacattctggatgagttactgggtaacatggtgttggccccactcccagatccgggacccccaagcctggctgtagcccctgagccctgccctcagcccctgcggagccccagcttggacaatcccactcccttcccaaacctggggccctctgagaacccactgaagcggctgttggtgccgggggaagagtgggagttcgaggtgacagccttctaccggggccgccaagtcttccagcagaccatctcctgcccggagggcctgcggctggtggggtccgaagtgggagacaggacgctgcctggatggccagtcacactgccagaccctggcatgtccctgacagacaggggagtgatgagctacgtgaggcatgtgctgagctgcctgggtgggggactggctctctggcgggccgggcagtggctct

SEQ ID NO: 320648 - DNA, 409 bp, Homo Sapiens
aaagaatgataaagttggttttatttcaagaagtcgatcaaaaagaaagccccagcgctctagagctcagctgacgggaaagggggtgcgcagcctcgagtttgagagctacccggagctccaagacaggggtgggttccagctgcccgcacgccccgaccttccatcgtaggccggaccatgggaaccccaaagccacggatcctgccctggctggtgtcgcagctggacctggggcaactggagggcgtggcctgtgtgaacaagagccgcacgcgcttccgcatcccttggaagcacggcctacggcaggatgcacagcaggaggatttcggaatcttccaggcctgggccgaggccactggtgcatatgttcccgggagggataagccagacctgccaacctgga

SEQ ID NO: 320649 - DNA, 823 bp, Homo Sapiens
  misc_feature (94)..(97): n is a, c, g, or t
  misc_feature (105)..(105): n is a, c, g, or t
  misc_feature (107)..(108): n is a, c, g, or t
  misc_feature (112)..(113): n is a, c, g, or t
  misc_feature (115)..(121): n is a, c, g, or t
ccagttagggccccgttccacttacctacggggcccgcgcccccaaagaatggtttagaaaactttttggagggccgaggccgcccgccaaggnnnncctttttncnncccnncnnnnnnnatttcaaccttttattaaaccaaatccagtaacttttacaatgccttactagagggttgcctcataactgaaccttcatttctggcagggaagaaaccatggcttcaggatcatgactgaagtttggccatgttccatcattaatgttccaacatcaccagggacacaaagctcagcatgagggcttctacccaaatctccctacgacaggtacttcttcaactcttccaccacctcttgaggctcagggaatttgagtttgcgtgggggccccttcttaatcccagtccagagctccgcactgctgccgtccgggcgcagcagcgtcacctcgaagctgcccctccggggcttcgtcgggttcacctttactggaagctctggggcctccaggcgcagcgcctggctcagggccgcggcgttgcgcccatagacgcgtcagctagtgcaatgctcgataacaacggtcgcctcctccattccctccccgccgttcgccagcttctctcgcttctcggctacggcgaccaccgcggcctcagccttacgcttcctcccgcggggagccatggcgcctagagcccggccgagaatgcagcgggactggtgggtggggggcggagacgcgaccactgagcggaaactgggcaacgaagagcgcagcccggaagctctgctcctacagcggaaacctctctcccc

SEQ ID NO: 320650 - DNA, 1487 bp, Homo Sapiens
  misc_feature (243)..(252): n is a, c, g, or t
  misc_feature (390)..(452): n is a, c, g, or t
ccccaagggcggccaagggtgttaaatccccttgggaatttaaggtttctacaaaccccgtttggaatgggtttccaagttgggcaggaatggttaaaggaattcccccccgttcttcgaataaatgccaggccggggggttaatttaattttggagtccgctgggactcccggtggatgaatccagtaaggccttcagaattcctttggaatttgttcaaaacgttgggttccccccgggcnnnnnnnnnnggggggaatccaacccttattcatgcccaggttttcttaggaaccagttatgcccaggttcccttccctattgggcccgggggccaaagagaatgttttagaaagcttttgtgggggcggaggggggccgacaagggnnnnnnnnnnnnnnnnnnnnnnnnnnnnnnnnnnnnnnnnnnnnnnnnnnnnnnnnnnnnnnncactttaatgtttacaatttaataaatctcttcattgcagacatgtatggctgtttggtagtattcagaaacatcacagtaatggcagtttcttcaattggtgtgtagtcctcaataattatatatgaaattgctgtcaaaccagtaagactgcatttatacatccatcattttcaggattgttggtaacctgggcatattttccccaaataactttgcctccttgtgtcacaaggcccaattcgctcacatttacttcaatgacagtacctttggtaataacacccaaagttgtatacagtggggatgagggattcttctttacaccaagtattggtaggcaaaaggtggctttcagttcaggatgtgttacatgggctttcttgaaacgcaagcccattggcctgatgaatctttcatatttaggtggttttcttgtaaagccatctccaacaaagcacactttagtaaccattctcttccatgccttcttctttctctttcctgttcgaataacttttaatacttctgtttctccctgggcacgtactttaggcagagggacttcccattttcccgccttctcttttcttttctgtttaatcatattggaaagtactttagctcgagattgtccctctctgtccagcagataggcaggtactgctccctgtggtgtcttttcatcattcttttgtttggtgtttctcttttcatgcatcttgatagtctttttcatttgtattttctcagcatgacgctgtttatggtaaagcttagccttcagaccaatcattttctttgccttctttgaacgttcatgagcctctcgactttccttctttctctttttctcatggtaatccaaacggtatccatagcgtttacggtgtaattcaatatattcattctgtggcatggtgacggccgcagagccgccaggagcagccgctggagtgcgaaaacgctctcaattttcgggtctcaaagacccacaagcccacaccacgcaggccgggacaggaaagagtcccc

SEQ ID NO: 320651 - DNA, 1058 bp, Homo Sapiens
  misc_feature (527)..(527): n is a, c, g, or t
cctaaggaatgtttgaattttattgtactgttttttttaaagaaaagagaatatcataatcttacacaatttctttcaaatggataaacttagacaatttatcaatgcttccttacatttttacaccacgctgaactccaacaggtttttgttttaaggtaaaccaggtttttggtccttccctgtggagaagttactttcaagtcagtgaaagttcttggcccatgattaaaagtctttgccaattagtactcaacaacttcaattcatttttttctggttcaagatgagtaggagcctaataaggctgtgataaaagggcaaaaggcactgagagccaaaagcggattaatgagctcctccatttatttgtcttcctaacagctgaactgttacaactattgacactcttcaaaaggttcccgttctgaaccctgtcccgggactgcaggctccaatggacatcttcaaatccagagaatggaggggcaagagcttcccctgtgtgatgccaaaaccaacaaagnccccatggatcaggtaatgaaacttcagcttttccccctttgagatttatttactggcagctgacaaggggcaaattcagctcgaattgtgcagtcaaggccctgtcaagcttttagaggcacccttgtcttgaagcaccttcatgactggcatttcactcaaaagccctcggcactggtccttaacagcttatgacatcacaaaggacactcccagacagatgccctacatggcatcctgcagcattttaaaagagaattagtggttttaattatggtcgtagtatgaaagggaaccatgcaagctccacaggagacctttgatcagacccttttgctagtacaatgccacggaactgtgactattccctggtaaggggccttttcttgctgaatgactcaccagtgatctttgaatgcagacaagcttctagccctccctcttcattagtgagcatttctatacaggggcctatatagtgcttggagtctaggagctatacaattgggtctagatctctgagtccaaaa

SEQ ID NO: 320652 - DNA, 1206 bp, Homo Sapiens
  misc_feature (91)..(112): n is a, c, g, or t
gtagcgaggcctgggtggcgaattcggcacgaggccttcttcagccgcttcagtgcccgaggccctgcccatgccctccacccagctgctnnnnnnnnnnnnnnnnnnnnnnactgctcccggcccaacgccaccgcctctagctccgggctccctgaggtccccagtgccctgcccggtcccacggctcccacgctgccaccctgtcctgactcgccacctggtcttgtgggcagactgctgatcgagttcacctcacccatgcccctggagcgggtgcagagggagaacccaggcgtgctcatgggcggccgatacacaccgcccgactgcaccccagcccagacggtggcggtcatcatcccctttagacaccgggaacaccacctgcgctactggctccactatctacaccccatcttgaggcggcagcggctgcgctacggcgtctatgtcatcaaccagcatggtgaggacaccttcaaccgggccaagctgcttaacgtgggcttcctagaggcgctgaaggaggatgccgcctatgactgcttcatcttcagcgatgtggacctggtccccatggatgaccgcaacctataccgctgcggcgaccaaccccgccactttgccattgccatggacaagtttggcttccggcttccctatgctggctactttggaggtgtgtcaggcctgagtaaggctcagtttctgagaatcaatggcttccccaatgagtactggggctggggtggcgaggatgatgacatcttcaaccggatctccctgactgggatgaagatctcacgcccagacatccgaatcggccgctaccgcatgatcaagcacgaccgcgacaagcataacgaacctaaccctcagaggtttaccaagattcaaaacacgaagctgaccatgaagcgggacgggcattgggtcagtgcggtaccaggtcttggaggtgtctcggcaaccactcttcaccaatatcacagtggacattgggcggcctccgtcgtggccccctcggggctgacactaatggacagaggctctcggtgccgaagattgcctgccagaggactgaccacagcctggctggcagctgctctgtggaggacctccaggactgagactgggctctgttttccaagggtcttcactaggccccctacctacacctggaaagttcagaacccactttgg

SEQ ID NO: 320653 - DNA, 442 bp, Homo Sapiens
taaatcattaaatagtactttttatttaaatgtttataaggcagatctatgagaatgatagaaaacatggtgtgtaatttgatagcaatattttggagattacagagttttagtaattaccaattacacagttaaaaagaagataatatattccaagcagatacaaaatatctaatgaaagatcaaggcaggaaaatgagtataactaattgacaatggaaaatcaattttaatgtgaattgcacattatcctttaaaagctttcaaaagaaagaattattgcagtctagttaattcagacagtgttaaatggtatcaggataaagaactgaagggcagaaagaattaattttcacttcatgtaacacacccagatttacaatggcttaaatgcaggaaaaagcagtggaagtagggaagtagtcaaggtctttctggtctc

SEQ ID NO: 320654 - DNA, 927 bp, Homo Sapiens
  misc_feature (70)..(70): n is a, c, g, or t
  misc_feature (147)..(147): n is a, c, g, or t
  misc_feature (158)..(158): n is a, c, g, or t
gttttatttagggagctccagggaatgcggtgggaaaggagaggtgcagtgtcattgccgccctctcctnccacctagtgcattaatagtggatgggagcatctgacagaagtgagatcaggcagtgggtgtttgcacccccacagncgcatgttggnctggaacagcaaagtctatctgctgaggtttaggcaagttcaggttgcccatgattttgacaaactcctcacagctgagggtgagccgagggtttcagagtcctctcctcctccacggtgggacactgtggaccccatggtaatcgtgagcagggtagatcagacagtctcctgggaagtgtgaagatcttttcatggaccgagtggtacaaggtcttggcacagccttgctggaagtctgtccgcccacacccacggatcaacagggcatctccagtgaaggccatgctgtggtcattcaggacgaaggtgacacagcctggggtgtggccagggctggccctggtctccaacgcgaagcgcccgaagcggatggagtctccatcctcaatgtgtaagtcagcctgggccccactaaggcgggagatgacagactggcagccagggaggagggaacggagcagccccgagcctgtaatgtggtccgcgtggcagtgggtattcacagcatagagcagccgcagccccagctccttgatcagctgggcatcccgaggcgctgtttccaggactgggtcgatcagaacggcctcccgggactctctgtcacccagcaggtacgtgaaggtgcagctcacaggctcgaacatctgccgcaggaggatgggggctccagacccgccgcgctggctcagctgccgccgggcgaccctcagtacagcctccgccatcgcgcccactgcggggtcaggaatgagcggaggccccc

SEQ ID NO: 320655 - DNA, 947 bp, Homo Sapiens
tcgatgacccccttccgggttttcccggttacctttacatggttggatattgggaatcctccatgttgtcaccgggatcccgggtggtggcatcaattttaatcaccctgttatatgaactccccagaatgtcatcttttttgcttccttaaaatctgacaaggtagtaggtgaggccgaactcaggcagtgactgccacgcctggatgaaccgcagcttggcttcgaccaggggcatctgggccacgttctggtgcgcctccaggatccgggcggccagctgtttggatttgtgtttctttgcacaccgtggtgacacaaaacattctgggttcatatccatgttttcgagactggaagccacctgagatgcagagttcctgtttttcatcctcagaaatgaaaggatgttgaggacctctggctggtaggagctgtctgccatggttttgcccttcgatgccaacatgcaggcagccatccattgggcgtattgattctcatggtcacatctcaaatacatttcattcataccatcggcaacagggattagtaacttgattccaaattttcttcctgctacatttacatcgggcacaacttcgcagcctctaagatttagtttttctagtggttctccttgttcaagttccttatttttaaagtatgctatggatgtgtctttaaagataaaccaatattgtttgaaagcttttggtagtaacttcttgggcctaaataatttgagattatctgcaagtttagggatatcagtaatgtcctccaaaaggctgtccgcttttccaccttctagggttacttccaaattagaaagcgccgcttctatttcatcaacctcggactcgcctgcaaaatcctgtgtttcagcagacaacgacagtttgctaatgtggtactgtagagctgcaaagatcaacatttcttcc

SEQ ID NO: 320656 - DNA, 1160 bp, Homo Sapiens
  misc_feature (450)..(500): n is a, c, g, or t
cactcagatagttggtacctatcatatggtgatatattcatatgatggatatgatagtacagacacctactgagtgactgaaaactggaggaagttaagaaatataaagtgcttagaacacagcctggaatatagtaagtaataaatagtagcagctgctactactcttggcctcagagtctctgtggacgtacaagggagaagctggggtctttccaagaagggaaacttccagaagaagaaaataaaaattgtttccttctcttggagctcctggatgaggtggatgctggcttctgctatcagtcagatgtccagtctggctctcaccaagggcccaagggaaagcaggaggagaacaattagacaggagtatttcaccactaaaaaaggcttttattacaaaatgaattctaataaaaccaggcctggtcttcaacccctcccgcnnnnnnnnnnnnnnnnnnnnnnnnnnnnnnnnnnnnnnnnnnnnnnnnnnncctgaaagaacagagcaggctgccctcctctcatcagtctcagctgctgccctccttttataaagggctagaagagctcttccaaagccccttgagagagtccccatccttccaaccaggatccttccaaccactgctgtcacaggaccttagcaatgccgcattgcaggatccaggaggtctcggctggctctcagcagaggccatccagggtcactcagcctgagcgatggcgtaggagagcaaccacagcagcaggggacccagaatgaggacagcaagccagacagcaaagctggccaggatgagtttccgggcccgggccccccagcgcactgcctcctcggaccggcctgctttatgccgctcttccgccttgatggcaaacaccagagccatgactcccaggcaagagcagccacagataatgctagtagctgccaagcagcggaggcggagccagcagcagcggatgggggatggaggatgagcagcttccgtgttgcccaagatctccactgccttctcctcgtcctccatcacctggctataggccttgaaggactctgagtttcggctcctgcctcagctttggtttggcttgggtggtgatggagctgactcagggctccaagccaagcccaggggtggggttgagtg

SEQ ID NO: 320657 - DNA, 664 bp, Homo Sapiens
cattgtcgggctgctgctctcagcggcggggctcgccagcgcttcagtgggcggggacgcggcaggtgactccagaccaaggagggtgagctgctgtccctggaagagaacggatggagggaagcagctcctacgaagttccctctgtggctgctgctgatctggaggagggtgctggtcagactaggagcttgcctgccaccccctccaaagatgttcacaagggtgttggaggcatcatcttttcctcctcaccgattttagacttgagtgaaagtggtctgtgccgtttggaggaggtctttagaatccccagccttcaacaattgcatctgcaaaggaatgccctgtgtgtgattcctcaagatttctttcagttgcttccgaacctgacttggctggacctccggtacaatagaattaaagcgcttccttctgggattggagctcaccagcatttgaaaactttgcttttagaaagaaatcctatcaaaatgttacctgtggagctggggagcgtaaccacgctgaaagcactgaacctaagacactgccctctggaattccctcctcagctcgttgtgcagaagggattggtggctatccagcgcttcctgcggatgtgggcagtagaacactctctccccagaaatccaacttctca

SEQ ID NO: 320658 - DNA, 1550 bp, Homo Sapiens
  misc_feature (834)..(843): n is a, c, g, or t
tcgcccctcttgctttctggccgtacgttccgttctctctgttcttgcttttgttgcttctgatccgtcttcgtcgtgtctgctctgtgttagttgctgctcgtttgcgtcttgtcgttgtgctctcttcagtcatggtccgtgtagtgcgacagagagcagagacatgcgccaggaggagcgacgggggaggaccgtttttttgttttcgtcgcttcatgttgtggtcgttctcatcgacatcgtcgtgggtggtctctccctatcgttgtgtcgcttcgcgtgtgtggctcggcttgtgccgcaggtatatggtggtgtggttgggtgtcctcctgtttttactagttcccagtccggcgcggtgagacccgatccgcattcggccaggtgagggggtttaagtggctttccagtggggtctcaagccacgttgtgttcccggtgctgaaaaggaggggccttgcatgccagtgtatgcaaatgcgtgtctgtctgactgccacaggtgttcttcgaaaggccacccggtctgatggccacttgctccatggctcctttattggggagctccaacaagtgcagagaagctgcctgatgttgtgttcccttgcctgtgtcagtgttttgatgctgcctttaaaaatcgacttcatgaagtcacagattttttaacagtaaatagtttgaataccaggtgaataacctaattgctttcaaagaaatgctcatccctaggctgcttttggtgtattgttcagttggttaaaagataaaagcttacagttcctttcaaatggaaacaggatcttttcttctaaatctgaagcaccnnnnnnnnnngttattatcctaactcacaatatcattactgagcaggaacctcctgtgacaggtgactaaagagaggcaagaaaagcaaattcagaattgtagagcagctcctaagagctgaaatttggtaacagagggaaaatgaaaggtggtaagatttccattagcaaatgattaaatcttaattaaatgagtattggaaagctcctagactgcataagctattggagacacttaaaacattcatatacactggggaaaccattcactatgatatgtaacgttaagaaaaaaaatttttttgaactccatggaaaatggtgtttaaagaggggaggaggggaagttagtcattgtatccagtcccaccacaggactgagaaagcatgcacagggctcagggttttgagaaaggggacagaattggttaaaattgaaaatggaggatcatcgctaacatttagtctctgtagaattttgtttaagaatactaccaaaaaggtcatgatcatgagtgctatctcgatagaatcccatcatttaaacagagtgtaaattccttccactcaaatattcaatctatacaattggattaagtaatcagtatgaacaaagctcctagaagtctgtgtcgatctttagctctcaccatgaatgtacatggtacattgtgatggctgttactaaactaatcgtgtatttatggaactagcaaa

SEQ ID NO: 320659 - DNA, 477 bp, Homo Sapiens
cctttacatcaaatatcctcaatggaagaggggatattgcacacaaatatcatgtaagcactacatattactttcactggtaagtaattttgtacattagatatgactggataggatagaagtgatgcaggattataagacataataccatacacagctgcagactgacacaaacaccattcagaacaagagagaggagtgtgaagtgcttctcagctgggctcaagaccacttctttccagtgctggaaagaggggctgcatgcagtgtaggaaaagcgtgtctctgaactgccacagggtgttctcgaaagggcagcccggtcttgatgccacttctccatggctcctgttttggggagctccaacaagtgcagagaagctgcctattttttcccttccttttcagtttttgatgctgcctttaaaaatcaacttcatgaagtcacagattttttaacagtaaatagttttaata

SEQ ID NO: 320660 - DNA, 939 bp, Homo Sapiens
tgtttcggccccacatttttcccggacacaattcgccccgtccagggctcaggggaccaggggcttcccccaaggccccctgacgcggtcccaccctttcccatggggaatccacttgtggtgagaagggcccaccgagacttctttttgtggtaggaacttccaaggacttttgccccaggccatcgccaccagagttgcgcagtgcatccttgaattccccagcaactttgcgacagggcacgatccagttcctcagaagagacacgcacataagtgaagtcgatgaagtcacagtcaacatcctgggtgcccacggtgccaatggagtaggtgccctccttcttgtagtggaacttgcctgtgctgcggtgcagaagcaccgtgtgcagcacagccagcatggcctcctccacctgccgcccctccaccgacacctccagcacctccgagcgacagttcatcctgcacccagtaacccacaccaaggtgtggaactaggataaagacaggggatcttcaccctacccaagggccacccttgagtgtagagtttggagcacggattcctcaagctcggctcatgcccttcctcctcctcctcacgccctggtgcgacctccgcaggtacgcttcaacctccgcacggcgctgagccacaagagaccagctccacagtccacgtaaccagggaggaacggactcctcgggtgtctcgggggcggcgccccgcgcccaggctggctggactcggaagctggaggagcgcccgcgttccactgccccgggggatgcccacgccggcacaggagagggggcacacggttaaaacagctcccacctcccccaaccacagtccacgaccagcctctcagatgccaccactctcccggcaggctccagaccacctgggtcggaggctgagccgggaccggaagc

SEQ ID NO: 320661 - DNA, 622 bp, Homo Sapiens
atcgctttaattttctaaagccaaatttcccatgtaagctgcagtttctatctttagcccatcatcattttctgcccccccaaaatctgttgaaatgattcactgatgcaaaacattcacccgtaatagactgagaattgagccttaacttcagattaacttgtgagaatcaggaaaattccttcaactgcattgcatcctcttggaccagggctagaatggggatttcaggtttctatgagcctccccattacccctaaagtagaacattttttaaattgtgttgccaccacttctaaaaatttagcaatattagaataggatactagtgaagtaagaaattttgcttgttgttttgcaaaccaaatagtttcctcaaacacaaatcagtgttcccacgaacaagttccagttgagaaacactaaggttatggtgaataaaaccatagggagcttcttccccccaacccctggctattttatattaatggggagaggggatttttaaatgtcataaatttgaagagtggtgggttgcattttcttcatgggtttatgttttcgtttcattttggactcaatttcacatcaccaaattcctcatttatacttggggaaaaaa

SEQ ID NO: 320662 - DNA, 1408 bp, Homo Sapiens
ttcagattaaaatcaggtttggagttaacagaaaattgcattcctaacttaaaaacttcaacttctctagattcctttagaaaaggaataaatatagtttaaaaaaatgttgctttgggtagaagtcttgattcattgcttcattcttacagctttttctttgcttccttactataaaataatccaatgttattgtgaggacaatctctgattcagttccaatgctcttgtatctccatgagttttggcattgtttaccagcacgtcaataagctcatagtcatctttggcatataagtgtctcagtaggtaccaacgtgcagttgatgcaatagatttgggatacccaggctgatataccactctttccaaaagacgccgtgtctctcttgcccccattttgcgtttgaattgtaacaaagcttgtaaaagaacagccagtggacaaaagcaaagcttcaaggcctcagttgtagcctcttgaaccaaagatggccagtgatcattggaaatgttagccatacagacttttaatgcaagtagtgctagtctcaacagacttgagagcttcccactccaactgccccgttgggatgccaattgtagactctttctgtaacacatctctgcagctctcatcattccttgggattgatacacatgtgccagccactgccaagctggaacagaggttgagttggacatgactgttttttgtagttcttcaagtacagcatctgggagtggcttttgtgactccaggagtggtttacactgaacttgtctcaaaagtaagataacggctggctgatcagggttactttttaaattctttgtgcagagagtttcagcttcagatattcttcctgtgtctattagaccagtgacagcttgtgagagagaccacttttcaagggactggttgtaattttcaaagaatttttcgtctttaattgaagcagaaacagcagataacagtgccaagtataaatctatcctctttggctgagtgttgttcactaaggccagtttatcatcagcgtgacaggctgccattagcccagcccagatagcaggatcacctggagaaaggagagctgccttctgaatggtctttagtgcagtatttttttcatcttctgctgaactgcttcccatagccaactgatttaccgcagtgtacagtaatgccttctttccatgatttgagtccagaatatgagccacatttcttgctacaacacctccctttgcatttcgttgagcatactgtgcaacaactcgagacaacagagaccaaagagcagggtcaccagggttgctgtgaacagctttagatatttgtttttgcacagccacactgcggccttggagtgcataaatcgctgatgtaagaaggcacctctga

SEQ ID NO: 320663 - DNA, 833 bp, Homo Sapiens
  misc_feature (46)..(46): n is a, c, g, or t
  misc_feature (48)..(48): n is a, c, g, or t
  misc_feature (139)..(139): n is a, c, g, or t
aggtttaagaaaatttttccaggggccaaagggggccccaaaaaantnattattggaggcggcctgggctcccgggggattagtccccgtatgggccccggggcgcccgtcggatttggtcaggaccgttcggtttccnttacaagatagaaggtctttattcaatagcagatgagagactatgcctcagtcctctgaggggatgcatttcccccacataccattcctttcccacgtttccattctctgcaggctacagcttgatggaaaaaaggggattgttctagaggtacttatacacaacctttgagggcacagtttggaggtggagtcgcacaggacatttgtaaaagtaggacagcaaagtttcactgtagcccacgaggaagtagtacttgtgtggagacaactgcctcaggaccacggcacagatctccaactggttaccccggcgctttaaaaccagctggtcagccaggcagcctgggaaggtaccccacatgaacttgcgaaggaaaacatcctccactgttcgctctgcggcatggtcctctccatccaggttacctgtgtgcagcgacagccagcctttacggtgggcgatgtagtgcggcgcgtgtgcctcctcgtaggtcaccggcttgtcccccttgcttacgcgtactctggccgcccggttcttggcgcagaccggggaggtgtgcagggcgcgccaagcgcaaggcagctctcggctccaggacagcacccgtggccccagcaacccgctgcacacggaggccgccatcttgggccaagccctcgtgccgaattcgccacccaggcctcgctct

SEQ ID NO: 320664 - DNA, 771 bp, Homo Sapiens
ttttttcaagatagaaggtctttattcaatagcagatgagagactatgcctcagtcctctgaggggatgcatttccccccacataccattcctttcccacgtttccattctctgcaggctacagcttgatggaaaaaaggggattgttctagaggtacttatacacaacctttgagggcacagtttggaggtggagtcgcacaggacatttgtaaaagtaggacagcaaagtttcactgtagcccacgaggaagtagtacttgtgtggagacaactgcctcaggaccacggcacagatctccaactggttaccccggcgctttaaaaccagctggtcagccaggcagcctgggaaggtaccccgcatgaacttgcgaaggaaaacatcctccaccgttcgctctgcggcatggtcctctccatccaggttacctgtgtgcagcgacagccagcctttacggtgggcgatgtagtgcggcgcgtgtgcctcctcgtaggtcaccggcttgtcccccttgcttacgcgtactcgggccgcccggttcttggcgcagaccggggaggtgtgcagggcgcgccaagcgcaaggcagctctcggctccaggacagcacctgtggagggagggcgcgtgaggcggaaactagggaccccacctccgactcgcagggacctgccgagtcgccccactcacccgtggccccagcaacccgctgcacacggaggccgccatcttcctcgtgccgaattcgccacccaggcctcgcttctt

SEQ ID NO: 320665 - DNA, 1041 bp, Homo Sapiens
tcccctccccgttggaggttcggtaatcccccttcccaagccccccgtgggggagaactccaagtttttttcacaattttccaccccccttttttggccacggttttggcagctggctgtagctgcttttacctttggcagcccggggtcccctttttccaggggctttgcaagctccaggttccggcttggtccttccttccagccacctgcggggaacgccgggggtgggagttcccaccttccttcttccatccactgatgtccatgttctcccactcggggtgtcgtccgacggcagggggctgaggccacaggctctttctcctcctccacttcggacactcggcggcgaccccgtccccgcagtctggaaccaaagtccccatcctgagtctggtccccgagaggcagcaagtcatctgcccgcactactacctccttctccttcttgcggattttcttcaccctccgcttggtctttttaaaggtcaccatctcctcaggcgtgaggtattcggaggccagccggggccccactgtgctcagggactgagcctgcagccgcagcttggcccggatctcctccagctcccgctcccgcaggccatcagccgtgccgccctgctccaagcggaaggaatgtggccgctccccttcaagctcttcgtcatacttggacaggatagagcgaggtttttgctgcgccaggtcgtccacgctctcgtcctcggcatagggcaggtagtcaggcttcttcttccgcagctccacatttttctctgcccgctccttatccaccaggttcacgttcaccagcacgtcctcctcctcctgcagcacgcctttgtccttgagggtaagaatcattgtctccccttctcggaaggaatcaatggcatgctccacggtgaggccctgcaggtcccgggcactgtacaggtcctgccgcctctgcccgaactcctcctccaccagagtgctgaccgccacccagcctcgttaccttaggaccgttatatacccgcgctctttaacaag

SEQ ID NO: 320666 - DNA, 1646 bp, Homo Sapiens
  misc_feature (24)..(24): n is a, c, g, or t
  misc_feature (219)..(219): n is a, c, g, or t
ggaaagctctctagtaaccctttnggaagcgccggggtcccctttttcccgacgcgctgtttgcaagttgccaggtcccgggctgggtcctccctcccaagcaccttgcggggacccccggcgggggaagtcccaccttttctccctcatccagtgaagtcccaggttttcccactgggggtgtcgtccgacggcaggggctgaggcacaggctccttntcctcctccacttcggacactcggcggcgaccccgtccccggcagtctggaaccaaagtccccatcctgagtctggtccccgagagggcagcaagtcatcttgccggcactactacctccttcctccttcttgcggattttcttcaccctccgcttggtctttttaaaggtcaccatctcctcaggcgtgaggtattcggaggccagccggggccccactgtgctcagggactgagcctgcagccgcagcttggcccggatctcctccagctcccgctcccgcaggccatcagccgtgccgccctgctccaagcggaaggaatgtggccgctccccttcaagctcttcgtcatacttggacaggatagagcgaggtttttgctgcgccaggtcgtccacgctctcgtcctcggcatagggcaggtagtcaggcttcttcttccgcagctccacatttttctctgcccgctccttatccaccaggttcacgttcaccagcacgtcctcctcctcctgcagcacgcctttgtccttgagggtaagaatcattgtctccccttctcggaaggaatcaatggcatgctccacggtgaggccctgcaggttcccgggcactgtacaggtcctgccgcctctgcccgaactcctcctccaccagagtgctgacaccaaactcttggtccatctcctccagtaacttggccctcttctctgccaggtccttctccttctgcagctgccggctcctctcgatccaggctgcagtgtcgtccagccaggggtcatcctctcctagggtctttatcttccccagcttttggttcagcaggcgcttctccttggcagctgccagcttctcccgcagctcctctcgctgtcgcaaggccatagggttgatgacatcagctgtcacgggctcctccttggtgcccgcctccttcttgatggcattaacctccaagggtttcagccccaactttgcccggagtttgttagtctcctcgatgctgagtgaggaggcatcgcctgagctagttttggagctggcagcggcctcgtagccgtcatcgcgcttctcccgcttcacgcgccgctcggagggctctgcctggctgcgctcccgcccgtgcgtgctgctccgggcctcagcttcggccccgcgccgcccgctcccgcgctcgcccccacgttcccggctccgcttccgtcgttcgccaccgctaccgccactgccgccactccggtgcttgtgttttttgtgttcccggtgccgcggcggctgctcggtggcacccccggtgccggccgccgccgtcgtcccggccgcctccttctctccgcgatgcttcttggacgaccccatagtggcacgtccactccgagcccggctgccgccgagccctcgtgccgaattcgccacccaggcc

SEQ ID NO: 320667 - DNA, 1036 bp, Homo Sapiens
ctggggggattccccccaaggtggggcggaaaatcgggacgtggggttaaacccaggaggccccccttccggttggggatccttataccttctccccagccccggtgggggagattccagcttttttcacaattttccaccacctttttggccactgtttcgcagctgctgtagctgctgtaactgtcgcagccgggcgtcccttctccagttggttgtgcagctccagttccgcctggtcctccttccagcacctgcggggacgccggcggtggagctccaccttcctccttcatcactgatgtccatgttctccactcgggtgtcgtccgacggcaggggctgaggcacaggctccttctcctcctccacttcggacactcggcggcgaccccgtccccgcagtctggaaccaaagtccccatcctgagtctggtccccgagaggcagcaagtcatctgcccgcactactacctccttctccttcttgcggattttcttcaccctccgcttggtctttttaaaggtcaccatctcctcaggcgtgaggtattcggaggccagccggggccccactgtgctcagggactgagcctgcagccgcagcttggcccggatctcctccagctcccgctcccgcaggccatcagccgtgccgccctgctccaagcggaaggaatgtggccgctccccttcaagctcttcgtcatacttggacaggatagagcgaggtttttgctgcgccaggtcgtccacgctctcgtcctcggcatagggcaggtagtcaggcttcttcttccgcagctccacatttttctctgcccgctccttatccaccaggttcacgttcaccagcacgtcctcctcctcctgcagcacgcctttgtccttgagggtaagaatcattgtctccccttctcggaaggaatcaatggcatgctccacggtgaggccctgcaggtcccgggcactgtacaggtcctgccgcctctgcccgaactcctcctccaccagagtgctgaccgccacccaggcc

SEQ ID NO: 320668 - DNA, 878 bp, Homo Sapiens
aaaaaataaggagggagctttatttaatatgaaggttgaggcagggcgggggcgggagggcgctgtcacttggtgatggtgttcgcgttcatgctcttgccgctgccgctgagcacgatgtagggggtcttctgagccttctgcttctcctggagcagggccacggtgcccaggggcgtgtcgctggagctcatcttcttcaggagcgcctcctcgtccagcttcttcatccgccgctctgtcttcatcttgcctgagcccttgccatggaagcggtgcgacagctgccggaaagcctccttgggtgtgagtttccggcccgtctcatccacgtattcgatcttaacgtcgggtttgtagccgtccttctccttgaagtcctgtgtgaagcctcggtattcctccctccggctgtacttgtcatcgatggccatcttatcctcgatgcagtacacggctgagggcagcgacttgttgggggccttcacccgggccaccttctgcactgtggtctccagcagccctttgttctgacacaggagcagggcagctgccagccccctattcacgatcggttcctcgtccaggatggtggtggaggaagcagagaaatcctgctgctgcttctcctcgtccaggttcaccgtgctccagccgatgttctcctccccgtcagattcggagccaccgttggctgagcgctcctcatcccgttcaaagtccatgagctcctcctgctcctcgcgattgccagccagcccgtaggtggggatctcccccaaggtgcggcagaactcggacgtggcgttgaacacgatggcccccttccgctcgggatcctcatcctcactcccagccccgctggcgagactccagtt

SEQ ID NO: 320669 - DNA, 1001 bp, Homo Sapiens
gcagctcggccgtggacggccgcaccggcgctaaggtggccatcaagaagctgtatcggcccttccagtccgagctgttcgccaagcgcgcctaccgcgagctgcgcctgctcaagcacatgcgccacgagaacgtgatcgggctgctggacgtattcactcctgatgagaccctggatgacttcacggacttttacctggtgatgccgttcatgggcaccgacctgggcaagctcatgaaacatgagaagctaggcgaggaccggatccagttcctcgtgtaccagatgctgaaggggctgaggtatatccacgctgccggcatcatccacagagacctgaagcccggcaacctggctgtgaacgaagactgtgagctgaagatcctggacttcggcctggccaggcaggcagacagtgagatgactgggtacgtggtgacccggtggtaccgggctcccgaggtcatcttgaattggatgcgctacacgcagacggtggacatctggtccgtgggctgcatcatggcggagatgatcacaggcaagacgctgttcaagggcagcgaccacctggaccagcctgaaggagatcatgaaggtgacggggacgcctccggctgagtttgtgcagcggctgcagagcgatgaggccaagaactacatgaagggcctccccgaatttggagaagaaaggattttgcctctatcctgacccatgcaagccctctggctgtgaacctcctggagaagatgctggggctggacgcggaacaacgggtgacggcaggcgaagggctgggcccttccctaatttaagtccctgcccgaaaaggggagaatgagcccccgggcccgaaagaagaatgactcccctttgaccacagttgaacccacacacttgtgaatgacaagggacaacggggtttcctctcccaaggagggggctccaccctttcaaagccctccccccgacaaacttggggggccccagagtacttc

SEQ ID NO: 320670 - DNA, 501 bp, Homo Sapiens
ccttttcgcaacgggtttgccgccagaacacaggtaagtgccgtgtgtggttcccgcgggcctggcctctttacgggttatggcccttgcgtgccttgaattacttccacgcccctggctgcagtacgtgattcttgatcccgagcttcgggttggaagtgggtgggagagttcgaggccttgcgcttaaggagccccttcgcctcgtgcttgagttgaggcctggcttgggcgctggggccgccgcgtgcgaatctggtggcaccttcgcgcctgtctcgctgctttcgataagtctctagccatttaaaatttttgatgacctgctgcgacgctttttttctggcaagatagtcttgtaaatgcgggccaagatctgcacactggtatttcggtttttggggccgcgggcggcgacggggcccgtgcgtcccagcgcacatgttcggcgaggcggggcctgcgagcgcggccaccgagaatcggacgggggtagtctca

SEQ ID NO: 320671 - DNA, 1273 bp, Homo Sapiens
ggttaaacagctgttgaaaaagcaggctggtccggtcggaatcccgggatatcgtcgacccacgcgtcgctcctcatgccttgggttcaagaaattcaccaggttctcaagtagccagtaatccgagacaagcagcctatgaaatgaggatgcagaataactctagtccttcgatatctcctaatacgagtttcacatctgatggctccccgtctccattaggaggaattaagcgaaaagcagaagacagtgacagtgaacctgagccagaggataatgtcaggttatgggaagctggctggaagcagcggtactacaagaacaaatttgatgtggatgcagctgatgagaaattccgtcggaaagttgtgcagtcgtacgttgaaggactttgctgggttcttagatattattaccagggctgtgcttcctggaagtggtattatccatttcattatgcaccatttgcttcagactttgaaggcattgcagacatgccatctgattttgagaagggtacgaaaccgtttaaaccactagaacaacttatgggggtatttccagctgcaagtggtaattttctacctccatcatggcggaagctcatgagtgatcctgattctagtataattgacttctatcctgaagattttgctattgatttgaatgggaagaaatatgcatggcaaggtgttgctctcttgccattcgtggatgagcgaaggctacgagctgccctagaagaggtatacccagacctcactccagaagagaccagaagaaacagccttggaggtgatgtcttatttgtggggaaacatcacccactccatgacttcattttagagctgtaccagacaggttccacagagccagtggaggtaccccctgaactatgtcatgggattcaaggaaagttttctttggatgaagaagccattcttccagatcaaatagtatgttctcctgttcctatgttaagggatctgacacagaacactgtagtcagtattaattttaaagacccacagtttgctgaagattacatttttaaagctgtaatgcttccaggagcaagaaagccagcagcagtactgaaacctagtgactgggaaaaatccagcaatggacggcagtggaagcctcagcttggctttaaccgtgaccggaggcctgtgcacctggatcaggcagccttcaggactttgggccatgtgatgccaagaggctcaggaactggcatttacagcaatgctgcaccaccacctgtgac

SEQ ID NO: 320672 - DNA, 1416 bp, Homo Sapiens
  misc_feature (359)..(359): n is a, c, g, or t
agcgcgcacttcccgagagagggggcccccgcagcccccaaggctcttccaagggcctttcttttcaaatacccgcataccgaaggggcaatatttttatataaatcacaccccattcaaccaacaaaaccctaaactcggctaatctccaaataccggaaccccaaaatcatcagcagatcccaaattaattctcctgccaagcagaagctatccaattcgcagggattcgttagctcgctgttctgttaagaccccagaatagacctacgatcgaattcaggcggctaagattgaacagcaccctgccttgtaagtaagttcaaggcaacagctgtgaagcctcgacgacggcagangaagattccagccagtgccagaatcgactcggagggcccagcagcaccacaggagcctggctggcagacccctgaggggcctgtgagtccgcctgtctgcaggaggaagacgagaatcctgggtgcagtgccagctgctctgagggtccccctggctgtgaacagcagggttcagggtccatccgatttttttcttctgaggggacacagctgccctagcctttttgatggctgtccagtcctccagggatgtcgatctcttgaaggcatgtacacgatgtatgggccagaaaccagagggtgctttcttcctcttgctgggcggcagggagtcccaagacctggagctgcctctggcgtgcagtttgtcgtcccaccattcagagctgaggtccaggctctggcggtcctcctccagcctctggatccgctcctgcagctccccctgcagcgtgtcatagagcagcagcttctcactctccaggtgctgtttggctccctgcagctcacattcgtacttattcctgatcacatccagacagaagcccttgtagatccctgccacctgaatgcgaatcttgaggctccgctgcagccccccaaggggctccgtgtattcaggggctctctcagcccccacttcctccagccgcaaccgcagctgactcagtcgttccctgaacaacttctcctttagctccgagaactgcttctctaggtccagcatctcactgacacactcgctgcggcgtcgctcatagtcctcatcatccatctcggagctctcctcttctgactctgtctggctgccgctccgctcctcctcactctcttcctcctccccattcatctcagcagcagaatcaccctctgcttccatctcttctgtgtctttgcttggaggctggacaggcatctggactcgcggggactggagcctctggcctcacgacggagattccctgagagctgcccgtggttgccggtaccggctgctgccgccggactcccgtaggcgctgcgcggctcccttttcttcgggaggcagagcctatct

SEQ ID NO: 320673 - DNA, 793 bp, Homo Sapiens
gaaaagatagatatgattcgaaaaagactgcagaacttcagctatgaccagagggaaatgatactaaatccagagggggatgtcaactctgccaaagtctgtgcccacataacaaatattccattcagcattacaaagatggatgttcttcagttcctagaaggaatcccagtggatgaaaatgctgtacatgttcttgttgataacaatgggcaaggtctaggacaggcattggttcagtttaaaaatgaagatgatgcacgtaagtctgaacgcttacaccgtaaaaaacttaatgggagagaagcttttgttcatgtagttaccctagaagatatgagagagattgagaaaaatccccctgcccaaggaaaaaagggattaaagatgcctgtgccaggtaatcctgcagttccaggaatgcccaatgcgggactgcccggtgtgggactgcccagtgcaggacttcccggtgcaggcctgcccagcacaggactgcctggttcagcaataaccagtgcaggactgcctggtgcgggaatgcccagtgcaggaatacctagtgcaggaggtgaagagcatgccttcctgactgtaggatcaaaggaagccaataatgggcctccatttaactttcctggtaattttggtggatcaaatgcctttgggccaccaatccctcctccaggattaggaggcggggcctttggtgatgctaggcctggtatgccttcagttggaaacagtggtttgcctggtctaggactggatgttccgggttttggaggtggac

SEQ ID NO: 320674 - DNA, 910 bp, Homo Sapiens
  misc_feature (193)..(193): n is a, c, g, or t
ctagtgtggacaaggagccgacgaacttgaaacgcacttagctggggtgcatccgcggggggccccaaaaaaaattagtgcgcccttgccaaaggggcctgaaagagagttcatgtccccagacgataatagtgcagtacgagtagtatcacacgccgatctgcatgcttaagctaagaatccttctagaganagctcctccgtcactgcaaatcgatgctgctgatgaatagcgttgcagcacagtcagagatgacagcatacacagcatgattctgaaagatgacccctgacacgacaccacctctgggccatcgtgactgtctacagaacaaaatagtcacagaaagaatgctttgcctccacaattgtcgcagcaccaagatgaaggccagaggtgccgttttactcctcagatctgatgctgcaaaagtctctgcgatttcagcagcccccttgcttctctgtccctcctcagagtcctgggtgctgttcctgcaacccaccagtgatgggtgaagccaccctgactagccaggagaacctcaggggcatccccttccttaacacctgaaggaaacggctcctaacgctgtgtgatgcttcctccctgctgggctgtcaaactgcaaatctttagccttttctcccctctgaggtgagcaaaggccagcgacatcttaatgcattcaggggtgtgggcagggtcctcagagcatcttacatccaaactaagttgtaacagttggggttctgcgtcatatgccgaggcaactcacaggcctgtgggagaccctgggcgtcctcaaaggaggggtgtggtggaggaagggtcatttctgggctcagatcttcacctggttagccccaggtctaataaagatatttgaattcataggtcttatgcatt

SEQ ID NO: 320675 - DNA, 648 bp, Homo Sapiens
catgtgatgattttctctggacacatggattgctactctgagaagctgactgattgactgatgagctggaaagggctgggaaagcctgttcatctctgttctgaatctcatagagtaaacgggattcttctatagcttgcttctctctgcgctcttctggggaaaggccgaaatagttagattctcgacttgtgtgatcaaaatcctcaactctttcacgatcaggttttcttatgatctgtgaaggtgtccggctaagatttttgtgctcactggagaatttctgagactgtgacccctgaagaatgactagagaacgccatgttgtcttactcctgaaggatgctgcagtcgaggaggtagtgctgatggggcttttattggcttgcttgggattctttggccctctgtaatccacatcagaatggaaattttgtccagaagtggaaggttttttcatcttcttccctgacactgtgttccagctttctgggggaggtgccttgaggttctttgatgtgtgcttctttcccagttcttcaaccaaaactggtccattctcagaatgaattccttgaacatctgcattcaaaaattttccattgtgatccaacctaacttgacatttgtctccaacttgatattgta

SEQ ID NO: 320676 - DNA, 893 bp, Homo Sapiens
cgccccaagggttccccttgggggggtaaggctcccacccaaccggaacccccggggcgggggaacgaaagaagcccccccaggcccccatgagcccgaggggcggcccacgggcgtaaaaggcaccaaaggccgcggttcccgggaaggccgcttcaggtcttggcaggcccccgggagggttcgcggcggccccggagccccggctgggccgtgacccccaggggcctcatgagtgcggcacacacgcagcagttgagcagcaggccgcccaggatgaggaagccgccccgccagccgtagcggtcctgcagcagctgccccagcgggctcagggcacacaggaagacagggctacctgctgccgccagcccgttggccatggggcgccgcttgctgaagtagcggttcagcatgatgagcgagggctggaagttgagtgccaaacccaaccccgtgatgaccccagtggtgaggtagacctggatgatgctccggcaaaaggacgcagccaccatgcccagcgacgcaaagagaccccccacaagcatgacgggccggcagccaaagcggttcacgcacacactgcagagcggacctgtcccgtagagcatggccagcaggatggaggagatccaggctgtgtcgctgtagccgatcccaaactcctgtatgagctccttgaagaagacactgacggccttggggaaggcgtaggagaagccagtgatgacgaaacagccgaagagcacggcccagccccagccgccgtcaggggccttgacgcctgtggggccctcgtccaccacggcccctcccatggccaggagggttggttccgcctcacctgccgccgctgggccgcctcagcccgcctctcgccgcctctgccc

SEQ ID NO: 320677 - DNA, 902 bp, Homo Sapiens
gaaaagccccaggattggttaaagcagggaaaggcgggcctttggttttcggggcacggccccaggtcccttgggggtagctcccccacgaaccccgggccgggacgaagaggccccagcaccatgaccgaggcggccacggcgtaaagcacaaagccgcggtcccggaagacgctcaggtctagcaggcgccgggagggtcgcggcggccccgagcccggctgggccgtgaccaccaggggcctcatgagtgcggcacacacgcagcagttgagcagcaggccgcccaggatgaggaagccgccccgccagccgtagcggtcctgcagcagctgccccagcgggctcagggcacacaggaagacagggctacctgctgccgccagcccgttggccatggggcgccgcttgctgaagtagcggttcagcatgatgagcgagggctggaagttgagtgccaaacccaaccccgtgatgaccccagtggtgaggtagacctggatgatgctccggcaaaaggacgcagccaccatgcccagcgacgcaaagagaccccccacaagcatgacgggccggcagccaaagcggttcacgcacacactgcagagcggacctgtcccgtagagcatggccagcaggatggaggagatccaggctgtgtcgctgtagccgatcccaaactcctgtatgagctccttgaagaagacactgacggccttggggaaggcgtaggagaagccagtgatgacgaaacagccgaagagcacggcccagccccagccgccgtcaggggccttgacgcctgtggggccctcgtccaccacggcccctcccatggccaggagggttggttccgcctcacctgccgccgctgggccgcctcagcccgcctctcgccgcct

SEQ ID NO: 320678 - DNA, 915 bp, Homo Sapiens
  misc_feature (86)..(94): n is a, c, g, or t
cgattgtgggtccaaggaaagggggccctatgggtttggggaacgggtaccaggtgtcttggggggaggggtcacccctgaacccnnnnnnnnnacgaagtagcccccagctccaatgggggaaggggtccctcgggtaaaagccgcaaaacccgcgttccccggaagacggtttcaggttttagcaggccccggggagggttcgcggcgggcccccgagccccggctgggccggtgacccaccaggggccctcatgagtgcggcacacacgcagcagttgagcagcaggccgcccaggatgaggaagccgccccgccagccgtagcggtcctgcagcagctgccccagcgggctcagggcacacaggaagacagggctacctgctgccgccagcccgttggccatggggcgccgcttgctgaagtagcggttcagcatgatgagcgagggctggaagttgagtgccaaacccaacccccgtgatgaccccagtggtgaggtagacctggatgatgctccggcaaaaggacgcagccaccatgcccagcgacgcaaagagaccccccacaagcatgacgggccggcagccaaagcggttcacgcacacactgcagagcggacctgtcccgtagagcatggccagcaggatggaggagatccaggctgtgtcgctgtagccgatcccaaactcctgtatgagctccttgaagaagacactgacggccttggggaaggcgtaggagaagccagtgatgacgaaacagccgaagagcacggcccagccccagccgccgtcaggggccttgacgcctgtggggccctcgtccaccacggcccctcccatggccaggagggttggttccgcctcacctgccgccgctgggccgcctcagcccgcctctcgccgcctctgc

SEQ ID NO: 320679 - DNA, 1518 bp, Homo Sapiens
  misc_feature (243)..(269): n is a, c, g, or t
caagcgttctgttgttccaaggtccctcggtataattggtgggattcttttagagaccgaaagttctatcatcacagattggcgggttttttgcggtgcgcgttggagcccgtttttggagaatggggtgccaaattggcccacaccgtaggtgggggtgaggggggacacgcggtacatatatccgggggtgtttgccccattctccagggggccccaccaaagggcgtgggccactcggannnnnnnnnnnnnnnnnnnnnnnnnnnaaaaacggtgtccgcacttctgtgtggatggggggccagttccctgggtgggccggaattctccccttgtggccaggggtgtccccctttccctttttgcaagcgttccaagggccttcccttgttatggtcggccggggatgggggggcgttgtttggggtggaagtggacttggtactttgaagcccgcccttttaggtccaggtgggtaagtggcggtccgaatcatagggagctcaggtccccacaggtcacaaaaggcacaatgatgcggggggggccatccagctggttgaaatctgggtcgtaagaatggtccagcaggggtttgctcaggtccgggatgaagccctcgggagggtcatagccctgacagacagcgaaggcctcgatgctagagttccggctgctcctgggcttggcacacagcacgctggagaagaagacctgcagctggctgtagaggagcgtcacatcccggcctcggaatatcttggccacaaagcagccccctggcttcaggacatgtgtagcaatgttcagagcagctaggaggagctgggcctgcatatactcatcaacatcatggagaccggttacatcaggagccccgtcacacaccactaggtccgcagggcagcccttaaagtgctggatgatctccttggcagtggacagctgggtgatgtcaccctggatctgtaccacacctggtagtggagccatagcctgcaggtccacagccaccacgtggccggacccttggcccccgatcttctggctcagcacctggctccagctgcctggggctgcacacaggtcaactgcccgtgtcacgccttggaagagttggaattccttatccagttgtagcagtttgaaggcgctgcgagcacgccagccattctccttggccaggcggtagtagacatcccgcttgtcctttgacgtccgtcccatttcacacaccagttgctcaaggacctgccgacagtccactgatgccggccagtatcagtaaccagatgaatgggctaccacctacctcttagttttcggagcagggtggtccgcgagcagcctgtgcctcggcgagagcgcaaacgggcgacaagtcctagggcttcagtttgtgttcgtagtccacccgaatgcccgggggggcaagcctatgggctgtcgcagcgtggcaaactcggcatcgtggatcgcccaggttccggcgggcggggatcttgatgtgaacgt

SEQ ID NO: 320680 - DNA, 1199 bp, Homo Sapiens
tacgacgcctgcgcagtgtgaccgggatggcgcattttcttgcaccaactaatgcggtgtcgctggcggctgaggagggcggagagttctgtggtgaaatagtgggaaggattcatgtaggcatcgggaagagcctaagtccacattataaaataggaagttgatgcggggtacagttactcccggaccggcggcgtgaaagtcgtgatatcatcgttgaactattagctttgaagtttaaatccaatggagaagactcaagaaacagtccaaagaattcttctagaaccctataaatacttacttcagttaccaggtaaacaagtgagaaccaaactttcacaggcatttaatcattggctgaaagttccagaggacaagctacagattattattgaagtgacagaaatgttgcataatgccagtttactcatcgatgatattgaagacaactcaaaactccgacgtggctttccagtggcccacagcatctatggaatcccatctgtcatcaattctgccaattacgtgtatttccttggcttggagaaagtcttaacccttgatcacccagatgcagtgaagcttttttacccgccagcttttggaactccatcagggacaaggcctagatatttactggagggataattacacttgtcccactgaagaagaatataaagctatggtgctgcagaaaacaggtggactgtttggattagcagtaggtctcatgcagttgttctctgattacaaagaagatttaaaaccgctacttaatacacttgggctctttttccaaattagggatgattatgctaatctacactccaaagaatatagtgaaaaccaaagttttttgtgaagatctgacagaggggaaagttctcatttcctactattcatgctattggcaaggccctgaagacccagtgcagatatctgcgcagagacagaacatggtataagaatctggtcatatctgggagtagtctttgatcctcgaatccttaaggtgagctagcttacaatgttccgggggccactgtcgtcgtacaaattggtttgaaggaatttccctttttgccgcgagaggttttattttccacaaatcccgaaaaggggggggatcttccgggaaaaggaacacatggttttggcctccagtttatgaaatcgttgtggcaacttgcagaacg

SEQ ID NO: 320681 - DNA, 905 bp, Homo Sapiens
  misc_feature (52)..(52): n is a, c, g, or t
gttcccagttgcccctgttggggttttttagtgtaggtttctgcttcacttnccctggccgcaactttctgtgcagggaccattcctagggctcaatctgtaggaggttgctgatgtctgcaaagctggatttatagtccttgagtgctttgtgggcttgagcccgtctgtagaatgccttcacgttctttccatccagcttgagggcttctgtgcagtccttcactgcttctgtgtactgcttcaggaccaaatagcagagtgctctctgttctttgtagctgtggtttctttggatttgcttttagccatctctttgtggttctccgaaggcaaggaattccacctcttctgagctgaaacaggcaccaaggggattgagggcagcttcaggcgccactcaggcccaagcgagtccatgagagctctggtcattctgttgatgccttctacggctgacgtcacattatcatcaatctgcagcacagtcttatagtcaacataggccatagggtacttctccagagcctcataagcagatgctcgccgcagcaggggcttaatgctgaagggaaccaaggccagtgctgaagtgcaatctttgatgcagtctctgcagtttccatccttcaagtgacatgctgctcggttggagtagagaacactttcttcttctgggtctgaagaaccttgcgcctgcagcacccgcagcgcgcggccgtagagcgcggaggcctcggcgtactggccgttgcggaaactctcattgccggcggcgcggagctcctccacagagtctgggaatttgggggccatcccgtggccaggccggcgagttgggagctccttccttcctcccccgtgtggtgcggcacaccttccgggcgcaagcgccggcggcgaat

SEQ ID NO: 320682 - DNA, 1473 bp, Homo Sapiens
gactgcagccctggagaaccagctcaacaggctgctttggatcagggccttaggtttatccccctccttccaccccggcccaggagctcaggttgttcagatgaactgcagtgagttggggtctggggaagctacaagggcagcactcagtctgcagcccacttgggcaggacaaagccaaatgctttgcctgatgaaggatctgttggtgtgaatcagctagctgggctgggggaatagggacagagcttcagcttcacgcttagctctagtggggacctttctggtgcaacaaccatgtctgtgtttgactacactgagtttaatttgaacaagcaaagcctcttacagggtgggaggccatcaagggattgaggagggggcttcagagctcacttggggcatgctgggtttcaggagcgggcacagagcaggtggcccatggcttctctgggtaaggtcaggcaggggttccagttgccctgttgggtttttagtgtaggttctgcttcacttcctgccgcaacttctgtgcaggaccattcctaggctcaatctgtaggaggttgctgatgtctgcaaagctggatttatagtccttgagtgctttgtgggcttgagcccgtctgtagaatgccttcacgttctttccatccagcttgagggcttctgtgcagtccttcactgcttctgtgtactgcttcaggaccaaatagcagagtgctctgttgctgtacgtggcagattccaggttactacacaagaggctttcactgtacttctcaatagctttcttatggtttcccttctttacaagctcattgccttcttccttcagaactctggctttctccacatccccagcagaaggcactctgttctttgtagctgtggtttctttggatttgcttttagccatctctttgtggttctccgaaggcaaggaattccacctcttctgagctgaaacaggcaccaaggggattgagggcagcttcaggcgccactcaggcccaagcgagtccatgagagctctggtcattctgttgatgccttctacggctgacgtcacattatcatcaatctgcagcacagtcttatagtcaacataggccatagggtacttctccagagcctcataagcagatgctcgccgcagcaggggcttaatgctgaagggaaccaaggccagtgctgaagtgcaatctttgatgcagtctctgcagtttccatccttcaagtgacatgctgctcggttggagtagagaacactttcttcttctgggtctgaagaaccttgcgcctgcagcacccgcagcgcgcggccgtagagcgcggaggcctcggcgtactggccgttgcggaaactctcattgccggcggcgcggagctcctccacagagtctgggaatttgggggccatcccgtggccaggccggcgagttgggagctccttccttcctcccccgtccc

SEQ ID NO: 320683 - DNA, 1617 bp, Homo Sapiens
  misc_feature (59)..(59): n is a, c, g, or t
  misc_feature (637)..(748): n is a, c, g, or t
  misc_feature (923)..(983): n is a, c, g, or t
agtatcacctgcgtgcactaggcaaacaccgaggacaagtacggcgtgcgaacgcgcantgtggcgtaacaggatatggagaagggcgcataagtcacggtcgacgacagtgcgggaggagggactatgggcgggcgatagattttcgaggctccgcgcatgaggtgtgggcgtcatttcacgcgcgtgttgttgtgtgcgctagacgagccaacggctcacgcacggatgtggcgcgtgttgcgcggtcgcacgaggtttcaagtccggtgcgaggcggtgatcacgcgaagacacgcgtagcgccgaattaccgaccccagcaatgtcggtgatcaaacgaccagcgattcgcagtccccgcgtcgctataagggcgagcggggacggccagcgggcgtccgggcgtaacgcatgacaacgggcgtcggcgagcgctagtcgtgcggggggcggtgctggcgggttctgaacggaaggcggcgtcaaaaactgttgtgcagcccgctagcttctcggggacactgcgaggataggctgggcggcggcgtttgttctatctcgagtgcggccccactatgcctgccgctagtctacgtgggtcggcataacgagggcgccacaggttaggcggctnnnnnnnnnnnnnnnnnnnnnnnnnnnnnnnnnnnnnnnnnnnnnnnnnnnnnnnnnnnnnnnnnnnnnnnnnnnnnnnnnnnnnnnnnnnnnnnnnnnnnnnnnnnnnnnngagtaagcttttatctaacaaggaatcgctgcagcggtggtgttttctccgagtgatccgcatgtacggagggtgtcaaggctggtccgggggaggacggtaggggctggcagagcaaactgggcgggcgctggaggcattgttcaggtggctgctggttcgcgatagttcatannnnnnnnnnnnnnnnnnnnnnnnnnnnnnnnnnnnnnnnnnnnnnnnnnnnnnnnnnnnnttttatcctttaatctctttaattcacacatctgtcttttgtataaaaaggtgttttggtgaacccacgttgctacaccaatgacattccacagtattaacactagaatgactgaagtcacattcatgaaatatacaggaaatatcaatgggttcatgaactgattactcttctggcaagttagggttgggtctcatattatcaaactaattacgatttttaatgcctactaaaactcatacttaagtgggaagacaatctataattaaaactgtcccttgttaggtggagagcaaagacttattcacactgaatctcccatgccttgtatagcactaggcacagaatggcattcagtgttttgagaatgaatgaatggtctgcctcttgtctttgataacagtgaatatcatgctaggaaaacaggggcatgtaacttttacttatcaaactctacgagttgcactgagaatactcaatcatgagcattaatttgagaacagttaggaatgaaagtggagtctctggggcacttgcctctgttcatggcctcctgtgcaattttagccaaataacagcctttccaggcctaggtttacctatcttttaatattaccggattttacgctttaaa

SEQ ID NO: 320684 - DNA, 1269 bp, Homo Sapiens
  misc_feature (534)..(650): n is a, c, g, or t
ttatctcattccatacctagccccggtgtccttgggaaaaacgtacagttttcatcacctctccccccagaatggggcggtctttccctagcccagcatcattaaggccagctatggattcagcaacagcagcttcatttctcttcctggcttcatgtggattgtttttccagtcgatctgtgacactaattctcctctattaggagctccgtgagtcagtggcaataccgaggctgagtcatgttgggtaagcaatgatgcagtccagcaatggttcttgtgcaacattgccctgtagttttctccaatcaaaaacttctggcactgccttttctcttctaaacctggttctccaatcctgtcttccttacagtcagttcccaacatcctgaaacagctgtccaaagcaacacacagtttcaagcgtttctagaatgtgcctccatctagaatgtgcctccatcattgcccattagcaggagttcttaggtgtctgattggaaatgaccacccctgatggaagccaacaaccnnnnnnnnnnnnnnnnnnnnnnnnnnnnnnnnnnnnnnnnnnnnnnnnnnnnnnnnnnnnnnnnnnnnnnnnnnnnnnnnnnnnnnnnnnnnnnnnnnnnnnnnnnnnnnnnnnnnnttctggagttagatggatggactctctcaaggttatttttcaatctctgcacatacatacttatggaagtaagaaagaagagggagaaaaggcagatcccccataacagcggttaaacacctgaacttgctccactatgacagggtttatcatccacctctcagtcctcaagtggctggaaatatggaaattggagtccaggtagacaggtgagtgtacaacctcttaagtgtggagccctcggaattcacaacactccccaaatcgcttcctgcgcaggcgcggagtcggaagggagtcggaaagcagaccccggtgccccctaataaagcccccagccggacgctgccgctaccggggtttggcaacttccggaagacctgtggcccaaaggagaatcctgttgggggaggcgggggccggtggtcgctaaccaatccgacacccgccagcaggctgaagagaggggctttcccaaaaggaaaactttcccaaacctgggggatgggaagagaagacaaaaggagctccctttcccacttcccagccgcccgtcccagccctcggcctccgctgcgcgacccgggcggaggatcccggccgcaggccgaggcgagag

SEQ ID NO: 320685 - DNA, 1384 bp, Homo Sapiens
  misc_feature (100)..(100): n is a, c, g, or t
  misc_feature (117)..(117): n is a, c, g, or t
  misc_feature (150)..(150): n is a, c, g, or t
  misc_feature (158)..(158): n is a, c, g, or t
cccatgggggccaaaaacagaagggaaagccagaaaaccctgcccccaaaaggttcgctcaaagggctttcccttctaggcccaggacgctggtaagagnccaggcgcccgtgctcnccaggtgagtgtcggtgggaccctgcgtactgncccacgcnggcaccgaagccccttgcctgctctctgtgaagggttcagaagtatctgtggctgccaaagcctgaagagggcctcaggcctcccatttgccggtccccaaaccaagccagaaaacaagactcccttgtcagggctgggggcgctgccctgtccgcagaccacgtatgtctagaattcccgtgctgggacatggttcagacacaaggacaactgtgtcccctgccatgacggcagtgcccctggtggtggaggggctgggcacatgctctggtcacatgctctggtccccctccaggcaatggcaagagtgaccccacaggaaggaagaaccctccttggatgggagtgtggacggaagggctgttgccactactccccaggctggccggccacacggacacgtgtgggatgtgtctgggacatgccctgggaatgtgtgcaacaggcctcctggggatggtcacagctccattgtggagggggctggcactggggagagagcttctcctccaggacgccgtcgggggcgcacacccaggggtcgtgggtctcccactgccacttggccagctggtcccgaagcatctccagaagctgagcaaagtgcgggtcggtggccaggttctgggtctcgtgggggtcccggctccggtcgtagagctcccagcgcgcccggtagtagtaatgacggaggtccttgtaccagcccgtgggctgaccagctgtggtgcggttcaggaggtcctggaaggtgggtgagacgtagaagtcctggtcgatgggaaagggcatcttgaagttgaggttgtgcacgaggcggaagtgccggtgctgcacggagcgcatggggtaggacatggtgacctcgtggtggctctggctgccaaagacggtggcccagaggggctcggcctccagcgccggcaggagggaccggccagtgaggtggatggtcttcgagccaaagatggcgtagctggggtacgggatcgagaaccaatccaagatggtgggcgtgaggtcagctgtgcaatcctgagcagcttacttcacctctctgagcctcattcttttcctctaggaggctcacgtaggcctcgctgacttggccccagcgttttgggtgctccggggatgacaccagtaagggttcagcagtgcccggccagtacaggttggtcctgccgctggggaaggggatcccgttgtcggacgtgaagatcac

SEQ ID NO: 320686 - DNA, 1066 bp, Homo Sapiens
  misc_feature (61)..(61): n is a, c, g, or t
ttgcacgggccgtccggccgactcggtggatgtagatcttggggagcccggggtttttgtntgatgaccacctgtaccgtagggatgtccaggccccgggaggccacgtctgttgcgatcaggatccggtagatgctggacttgaacttggctagggcggcaaagcgttctttctgcttcatcatggagtgcagagccacggtggggaagctgaatttgcgcagcatcatgcacagaatctggcagttcttgcacgtgttggtgaagatgataatggaccagtcctcgtgctcatcctggaagcgctggatcaggtggaccaggtaggcgtccttgaccttctcaggcaccagcaggtagcgctggtccagctgctccacggtgctcaccggggcctgtgcttcccagaagaagggctggttggtggccagaccctgcagctcccggagtgtgtcggtcagcgtggcgctgaacagcagtgtctgcctgcgggccggcacagccgccaggatggcctccaggtccacggtgaagtcagtgcagccctgttccagcagccggtctgcctcatccatcaccaggaagcggatcttctttatactaaaagtgttggagctgcgcaggtgatctgccaggcgccccggcgtggcgatgaccacgtgtggtttccgagagagctccagcgcctgggccaccatgtccatgccaccgacgatgatgcagtctttcagccctagaggcttccccaggacccggaactgctctgcgatctggtaggccagctccctggtgggtgtcaggacgaggcagaagatgccatagggatcctcagacagcttctgcaagatgggaaggacaaacgctgctgtcttcccactgcctgtcttagcacagcccaagcagtctcgaccctccaggatggcggggatgcagccgagctgcacgggcgtgggctgcttcaaacccagctgccgacattgttccacgagccacgatgacagcccgagctccgcgaagcctgccatccttgtggccgcttgtaggggccccttgtaggggcccgtgt

SEQ ID NO: 320687 - DNA, 1074 bp, Homo Sapiens
  misc_feature (56)..(56): n is a, c, g, or t
ttgaggtttccgagagtttgttgatcatggcggtgtcaagccaagtcatagatggncataagtctttccgagtgcctaaggatgacgtcctgatatgtaagtgtcgggggtgggtgcacctctaatgtctccgtgtctgggttgtaggtggtgatgtccacatagactcgggctctctgaagccaggggggcagggctcccgtgagggttcgggagaacatccggaagaggggaccagtctttctttccctgccccgtgatgaaggcatcaaatacaactgacagggtctgcctcagctcccaggagatgctagtacagcgtgcatttctgcaaacagggcggatatgcactgcctgggagtggtagctggtgtggaacaagcgatctgccttcagcagcacagagaggcctgccttggaactacagggcaagagcttcttccagggggtgaggttttcggtgcagaccacctcccgcggcagcacagcatagcgcagaaagtagtggtcagtgtcattggccagacccaggggtttgaaggaggcagtgggagtgactgtgttggtggagtcgatgaagttgagagaggcgcagaagatccctgagaggacattactgagctccttccaagatttatccacatcagtgacagtgtcttggaaccagacccacagctctgcacctgatggggcctgcaggaagggtggcccccagtatcgggtcctccaaaagccttgtgtgaatgacaggtgcagctcccgtagagaatacttggagatcagctgccccagggctttgggaaagagcctgtaatgggacactccttcccgctgaagctccgaatcccagcgcgtgcggaactggaatgtggcggctacgtccccggaaggcagcggggtgatgacaagttcctcccgcaggctgtcgcgtgggggttctgcaaggcaccagccgccgggccccaggagcaacaggacgagcagagcaagcggcatagccgccgccatgcctgcggctacttccgcgtacccagcggcgctcggccccataaaagccggtatccaataagaaaa

SEQ ID NO: 320688 - DNA, 515 bp, Homo Sapiens
cagttttcatctgttttctatcttagggttttgagtaagattttctatataaaaaggttctcctgaataatgagatcagccaaccgcccatgcaactgaagacactgtcgtcattgggaaagtttcatcctattccatgtagtgcttgcaccgtaggttctttaaccagctccctcactgtggcatcaaggttgcttttggcttttggctgggatgcgtgtgctgtggtgaatatccttgccatttatgtttcctgctgtaaagccagggtagctgcatgcactggcatttgaacagggtgagacagtccacccagagctctcccaagtctctcccaaataccttagagtagggacactggtccccatttattggtgagaaaacaggctcagggtttcatgacttgttgaaagtgcagaaatggaatgctggccccctggatctgcacatctgcctcgctgctggtttgcgatcccagctctcctgttggcttcgtgcttggggtagatcttctt

SEQ ID NO: 320689 - DNA, 1033 bp, Homo Sapiens
  misc_feature (171)..(171): n is a, c, g, or t
ggtgggaaaagccactttattaaagattctctatcacagtcccccatttctggaccagtcagattggctttgggttgaagtttctgattgtctttccttccagtttctctctttgtccatggcttcctgagattcagtgtcctcgatggcatttggggaaaaggtaggtgncccttggggtcctggacccaatgcagggtgagctggcagctggcagagggccaaggagtggccagccccccagcccacaaggagtcctgacgatgacagcagagcctgcaccggctttggggcccagacgttggcttcagtgccatctccgcacatgccatgctcattccagccccaagagtaacacactccaccaattattgccaaattatgctctgagccacaagagacctcagttgctccagttaagcaatgcggagatgaaggcatgctgttcggtggtcttgaacaggggagaaatgaatcttgcttttctagtttccagccttcataagtctccaacttcctccctagctgaccatagtctgctcggccccaggtaaacatcttgccagtttctgtctgagcaaccaggtgtgtccatccactccagatggcagtgaccttttcattctggaaacaatgtgcttctattttctggggcacaggaaggaaagcagcctcattagccagttgcccatgcttgttgcttccccaaacatacacctctcctgcatctgttaatgaagctgagtggtctgagccagcaagaacacacattgctttagaattctctagacctgtcactctgcttggttcctttgctgtgaaaaacaatggaagagtctgcccagggcacaaccgtcgtccacatgatgccaaaccagtcccccactggaacacgatgccactcgctgtagcagctactgcatgcctcagtccagcagcaatacaaacaaccttctctttatggagcatatgacaacaactctcagggctgggaggcacttctaagcctcgtgccgaattcgccacccaggcc

SEQ ID NO: 320690 - DNA, 971 bp, Homo Sapiens
  misc_feature (68)..(68): n is a, c, g, or t
  misc_feature (250)..(250): n is a, c, g, or t
gtcggcccccaggttaaacattctgcccagtttccgtttggagcaaaccaggtggtgtccatccactnccaggatgggcagtgcctttttcattcttggaaacaatgtgcttctatttttctggggcacaggaaggaaaagcagcctcattaggcagttgcccatgctgtttgcttccccaaaacatacacttctcctgcatctgttaatgaagctgagtggtcttgagccagcaagaacacacatgctnttagaattctctagacctgtcactctgcttggttcctttgctgtgaaaaacaatggaagagtctgcccagggcacaaccgtcgtccacatgatgccaaaccagtcccccactggaacacgatgccactcgctgtagcagctactgcatgcctcagtccagcagcaatacaaacaaccttctctttatggagctcaatggcctggggaaccacacatcttcgaggtccatgaggaactcctaactggccaaaggagttggatccacatgatagaacttgaccattttctgtgagcataatcgtaaaatcccagccacaggccacctgttggatgggacagccaaagagggatttgcagggggtaaaatatgggatatcctctgtgtgaccaagccccagttgcccatctttgttcaggccacaaacaaagaggtctcctccatctgtgacaactgcagagtggccccctcctcctgtgatcctcctgacactcctgggtttacagaagtcattcagttgctggggcaacagcacatcttccttatggccgaggccaagttgcccatagctatttgcaccctactcctagctggttcttcctggagatgagaagtaaaatcttttaaatatgtttgtttttgaagacacctcagccgcccagcccctgaactgcccacgcgccacccaggcctcgtacctatacccctatggtatcgcgcgtt

SEQ ID NO: 320691 - DNA, 1521 bp, Homo Sapiens
  misc_feature (1033)..(1033): n is a, c, g, or t
  misc_feature (1200)..(1263): n is a, c, g, or t
gtaccggcccggaaagttagggatatcgtcgaccacgcgttccgcaaaggatagctgttctgtttaagtagggacctctcatggcctcacaggctttgacatctgagaatcaaactggagaacattccgaagccgttcttataagtgtctccatctctacctgggctgaaatggaatgtgcaaatgtagcccagcctggtccttgggtgttgccagttgattgatgactgggagccaaagtggcatctcctttgacctaaacgggcgatgatgaaataaaactcaacagcctttctctcatcttgcatgtgagatgcgaaatagagcgtgtctctctgcctctcattttaggctgaggccgtccaaagcggcatgccccatgtttccactagatggcgctgaccacttcaggcatcaaccctcatggcctctcagccttgcaaaggcagccacttaaagtcggtgtcctgtgtggggcaccaagctgagctgcagacacccagtaggcgcgaggcaaatgcgtcccattttaagatgcttgtattatatgagctctttgcttcctccctcccactaactttaaagaattgctctccatctcctttggcaaagttcctttgcccttctgtcttatttctgtggaaccctccaaggtatttccagtccatttgcatccattctggcatctttacggagagcggtctcatatgctattgttgttaacgtggactagtatttatgtgttgagaacactggctgtttgtcaggaaaagtgtgccaaaacaaagagtacggccggccctggaaatgcatcagcaaaacccatttcccccgtgcactcattctgagcttccttccttcatttctgtcattactgctgagaactggactgtgcccagctgacctttcccttccttgccctcatcttgctgccaggtctgcaggtttgccaccgtcccggccccagtctgaaacatgggattatttcagaattggaggtggcagcttcagaaaaaaatccttctcgtgtgtngactgctgagatccaggaactgggaaatcaacccccagtttgtagattgctctctttggaaattctgtggcccaacctcgtggctgttttctggaattccttctatcggggcagacagtgctgtgcctttcttgacttcaggatgttccaaggatgctgctggatcnnnnnnnnnnnnnnnnnnnnnnnnnnnnnnnnnnnnnnnnnnnnnnnnnnnnnnnnnnnnnnnncgcgtgaccgtgatttgtgcaaccctccagatctctctcggacccttcagagtggaacaagctccagtgccaaagtatttgagagtgagagagggtcagcagaaattcctctagtggggcctccagagtctatcattagacagaggaaactcaggtctaagtggagttaagtgcccacctagactcagggatggggtctgtgttctctactagccggcagcagtgtgtgtgcgccaactcgtggacaattccccagag

SEQ ID NO: 320692 - DNA, 902 bp, Homo Sapiens
  misc_feature (187)..(187): n is a, c, g, or t
tttgaagtttccaggaggggccataattcataattccatgcccgatgtcattggccattgcccttgaatcccaaccccttgggcacatgggtgcgttcacccgggatccactgaaaatttcatctgctcgggcatggctgaagtggagtcgttgggcccctcgaccaccatctttaaacttgggctntaggaagcccactcgaagcttctgggttcctttcacataggtttttccatcgtgtatgcagtgggcagctgtgaggacatgcttctctgccaccagggtgccggtgcagcccgtggataacttcactgatgttgagaaagggtagttgagcaggaagtccttcccaaaaatgctgaacctgctgtcatagccataaatctgccgcttccttcgagactttcctgaagaccctgagtctcggtgttgggccccatctccactactgctgaggatgtagatgcccacctgcgtctctgtgcggctgccattggcatagagcgtttcataagacagatattgcttggcctcttcgtaagtgggcagtggagttcccttatgacactggggtccacatgaagaagatacttctaatttggcttcggctccaaagtctggcttggctaaattgagggtagactggggcaagacgacagggaggcggtatgcaggccaagtgggtttccagggggcactgtaagggctcacttgcccaacagcacagagcagaaagaagagaaggaagaggagccctggaatccctgccatgccgagcactgttccgcgccgagcagcccgcccgggccgcggctcgctgcgccgctcagacaggtgtgggcgccgggagagagcgcgcggctcccatgcctgccccgccgcacagccgagtgcgagcaaa

SEQ ID NO: 320693 - DNA, 1852 bp, Homo Sapiens
agacagagtagtcaaattagatgctctttgcaccaagtgtcgagtgcccagttatgaccctctcaaaatggacgaggtatataaggtgatcctcccaaacttcctggccaatggtggagatgggttccagatgataaaagatgaattattaagacatgactctggtgaccaagatatcaacgtggtttctacatatatctccaaaataaaagtaatttatccagcagttgaaggtcggatcaagttttccacaggaagtcactgccatggaagcttttctttaatatttctttcactttgggcagtgatctttgttttataccaatagccaaaaattctccttgcctttaatgtgtgaaactgcattttttcaagtgagattcaaatctgccttttaggacctggctttgtgacagcaaaaaccatctttacaggctcctagaagctgaaggttagagcattataaaatgaagagacagacatgattactcagggtcagcaacctagtgagttagaaaaaaaattaacatagggccctataaggagaaagccaactatgttaagtttacgtgtccaaattttaatgaaattttactaacaattttaaaccatatttttcttcttcatatccatttctaatccatcaaacagcttatgtttacataaaattttatcattcacaaggaagttttaagcacactgtctcatttgatatccacaacttatttttggtaggaaagagagatgtttttcccacctgtcagatgaaaaaactgaagctcaaaaagggttgacttgaccatacagctaatgctgacagatccaagacctagacctaggtcttttgaactcaagtccagcattctcaactatatcaagttactgttcagaatacttaatatctcctctcttcataattatcaatagccccaagctcatggatgacaaatctctgctttatttcttgtctctattttttcactttatagctcctgttataatagcaagtttaatggtataaacacaggataccatcctctcttgcaacacccatgtgcctttgatgagtcaggtagcaagctgtagtagataatgagaaaggccagaggctgcaaaagacagtcaaaggacacgagagaaaggaaggggaagaacaggactccaggactgttttatattatagaaaagcaagagctaaagagcatttacacatgttaaacagatacttgttaagcatagtgcctgacacacggcattagctgttattttatgagattccatcagctctgcctctgtcctctttcttctaacatgaaggtatcatgagaagagaaccttctaacataagctgtaattctaaacctgcacttgtccctctccagcaagaggctagcactgaattcattctactcatactacacacccagttatggaatgtccagagttctcgaagaaaataaatgactttaggaagaggtatacattttttaagtcgctctgcctccaaatctgaacagtcactgtaaatcattcttaagcccagatatgagaacttctgctggaaagtgggaccctctgagtgggtggtcagaaaatacccatgctgatgaaatgacctatgcccaaagaacaaatacttaacgtgggagtggaaccacatgagcctgctcagctctgcataagtaattcaagaaatgggaggcttcaccttaaaaacagtgtgcaaatggcagctagaggttttgataggaagtatgtttgtttcttagtgtttacaaatattaagtactcttgatacaaaatatacttttaaacttcataacctttttataaaagttgttgcagcaaaata

SEQ ID NO: 320694 - DNA, 1873 bp, Homo Sapiens
  misc_feature (362)..(362): n is a, c, g, or t
tcacaatgtagtgtcgccaaggggccccgggccgcttacattttggttattccgtgactttccgcctggggactcccccgtctgaatcagattcccacgtaatggccccttcaggaactcccctctcgggatgtggttcaagaacccctccgggttggccgccgaggccttttttgtatttggtgaggattcccgaggcccttatgtcatgggccagaatttccttagggaaacaggttatggcccatgtttcacttaacctattggggcccgcgctgccaaaaagaagtggtttagaaaagcttcctcgagggcccgagagcggccccacaaggggattagggttttgggggttggttggntcgtaataacaagtttattctcatacaatctctagcttctcaacagtggcgcctggaaaggggaggtgaagctgcatgcgggcggctccgggtgggcggctctggcacgtggtggttaccggctctgctcgatgtatgtggagatgtcgatttcctctggaagttctgccacattaacttcaaaccggtcctggacgtcattgaggattttggcatcattctcgtcagacacaaaagtgatggctaggcctttggtgccaaagcgacccgcccgggccacccggtgcaggtaggtgtccgagtcctcaggcatgtcgtagttaaagacgatgttgactcgctcgatgtccatcccccggccaaacagattggtggccaccaggatccgccgctggaaatccttgaactgctgatagcgtgacaggcgctcctcctgggccatgccccggtggatggcgatggccgggaagttctgctccacgaggagctgggccagggccatgcagcgctgcactgacttgacgaagattatcacctggttaaactccagcacatccaagagatcaaagagcttgcggttcttctcactgtctttgagtttgacgtagtactgctgcaggccgtgcagcgtgagcttggtctcgtcgtccacaaacacctccatgggatcctgcatgaacttcctgcacacaggccggatgtccttgctcagggtggcgctgaacatcatgcactgcttctcgtgtggtgtcaggcggaagatctcctgcacatcccgccgcatgtccagctgctccagcatcttgtcacactcgtccagcacaaagtgcttcacattctttaggctgaagctcctattccgcacgagcgccaggatgcggcccggggtccccaccacgacatggggacagttcttcttcaacacttcttcatccttcttgatggagagaccaccgaagaacacagacaccttgacgctgggcatgtacttggaaaagcgctcatattccttgctgatctggaaggccagctccctcgtgtggcacatgaccaggaccgtcacctgtccgttgacaggctcaatctgctgtagggtggccagcacgaagaccgctgtcttgcccatcccggacttggcctggcacaggacgtccatgcccaggatggcctggggaatgcactcatgctggacctcagaaggatgctcaaagccacagtccacgatggcccgcaggagctccggcttcagcagaaagtcccggaagccagagctgtggatggaaacgtaggatcccttgatgtctttcttagggggagctggtgtgctctcttgaggagcctggggctcttcctcttcatcgtaatccaaaagatcgttttccacatcctgttctgccatgatgctggctccccgttcttctccgcgcgctgctaagagacacttccaacttcggttttccgccgggcgctcagacacgagttgctgcgcttcctgcctcttgcgtcgggct

SEQ ID NO: 320695 - DNA, 941 bp, Homo Sapiens
  misc_feature (145)..(145): n is a, c, g, or t
  misc_feature (158)..(159): n is a, c, g, or t
  misc_feature (161)..(161): n is a, c, g, or t
  misc_feature (285)..(285): n is a, c, g, or t
  misc_feature (295)..(295): n is a, c, g, or t
  misc_feature (312)..(312): n is a, c, g, or t
cggggggtcccccccacccaagggaccatgggggggaacagtttccttctttccaacacttttctttccatcccttttctggatgggaggagaccccacccgaaagaaacaccagacccacttaatggggaatgagggagggaancccgctcccatgnntngatacacggccccaagggccccaaccctgccaccggccccagcaccctgcgaaccaggaaggcctccaggggacccaaggcaggccctgagagccctccccggggccttccactcaaaggcagncccccaggcntgggacctgcgcaggcnccctgggagccatgcataattcatcaggcttttaaggagcaaaaaccaccgccaaacctcaaaggcagctgcccctgccaagcttggtaaatgctggctgggccagagccgaggctaacaaagctgcagaaaccaagtggcgcctggtccagtctggcccgagggactcaccttgacgctgggcatgtacttggaaaagcgctcatattccttgctgatctggaaggccagctccctcgtgtggcacatgaccaggaccgtcacctgtccgttgacaggctcaatctgctgtagggtggccagcacgaagaccgctgtcttgcccatcccggacttggcctggcacaggacgtccatgcccaggatggcctggggaatgcactcatgctggacctcagaaggatgctcaaagccacagtccacgatggcccgcaggagctccggcttcagcagaaagtcccggaagccagagctgtggatggaaacgtaggatcccttgatgtctttcttagggggagctggtgtgctctcttgaggagcctggggctcttcctcttcatcgtaatccaaaagatcgttttccacatcctgttctgccatgatgctggctccccgttcttctccgcgcg

SEQ ID NO: 320696 - DNA, 872 bp, Homo Sapiens
  misc_feature (115)..(125): n is a, c, g, or t
  misc_feature (152)..(152): n is a, c, g, or t
  misc_feature (241)..(242): n is a, c, g, or t
  misc_feature (338)..(338): n is a, c, g, or t
gggccgggggattttttctttcccctacggggaattttcggtaggagggaatccccccagtggccaaccctggggcccccgggttttggaaaggcccattccagggggggggggnnnnnnnnnnnaattttcaattgaaaccgctcccactnggacagggtcatggggaatttctttggcggtgggctgggccccagactccctgggtcactgtgtactccgggcacccgccaggcctttnntgcaccacccagctcctgccagagcacccaacgggggttgcactccagactgctgaggggggagacaggggggctgcagttcccatgggggggctncctggttaggactacagatggaactggggtagcagctgctgcagcagtaaaaaccggaatgtcctcaggcagtgaagagtctaggggagaaaaagaactgctgtcctccagggccggctccagcatgctcccccctttgaggtgtttgagggccacctcagctgccttgtgcttggctgccttcttgctggggccctgaccagtgcagctggtgtcgccaacggtgacccggaaggtgaaattaggctggtgggcttggccctcggctttgagaaggtcgtacacaggcgtcttccctattctggtcccatactcctgcagaaggctgatcggggtcttgcctgggttggcggccagcatttgctctatactaggcagcccgcagcccgtggtagtgccggagccttgctcctcttcactcattccctcctccgtccccgcgggcgccaccgtgactgcagcctccacgcgccccaatacacagccgacgagctagggccggggccaagcccggagtcgcggccggtagccccc

SEQ ID NO: 320697 - DNA, 573 bp, Homo Sapiens
  misc_feature (27)..(28): n is a, c, g, or t
  misc_feature (69)..(88): n is a, c, g, or t
cagggatccagcctctattgaggattnnatgcgacggcctcacggggctttggaggtgaaagaggcccnnnnnnnnnnnnnnnnnnnnccgacgtacacgggatggctacgggaacgcgctatgccgggaaggtggtggtcgtgaccgggggcgggcgcggcatcggagctgggatcgtgcgcgccttcgtgaacagcggggcccgagtggttatctgcgacaaggatgagtctgggggccgggccctggagcaggagctccctggggctgtctttatcctctgtgatgtgactcaggaagatgatgtgaagaccctggtttctgagaccatccgccgattttggccgcctggattgtgttgtcaacaacgctggccaccacccacccccacagaggcctgaggaaacctctgcccagggattccgccagctgctggagctgaacctactggggacgtacaccttgaccaagctcgccctcccctacctgcggaagagtcaagggaatgtcatcaacatctccagcctggtgggggcaatcggccaggcccaggcaatttcctatgtggccac

SEQ ID NO: 320698 - DNA, 1109 bp, Homo Sapiens
  misc_feature (53)..(54): n is a, c, g, or t
  misc_feature (59)..(59): n is a, c, g, or t
  misc_feature (62)..(71): n is a, c, g, or t
  misc_feature (73)..(74): n is a, c, g, or t
  misc_feature (76)..(86): n is a, c, g, or t
  misc_feature (89)..(91): n is a, c, g, or t
  misc_feature (93)..(143): n is a, c, g, or t
  misc_feature (145)..(152): n is a, c, g, or t
  misc_feature (311)..(323): n is a, c, g, or t
cacaccaattttaaattacttttttggaaagctttcccaaagagaatggtttnnaaacnttnnnnnnnnnncnnannnnnnnnnnncannntnnnnnnnnnnnnnnnnnnnnnnnnnnnnnnnnnnnnnnnnnnnnnnnnnnncnnnnnnnnttgaaattaaatacccaactttataaatacggtctgatacaaaccagaaaatgaccctttgattatgaagctacttggtgttcaggcaaaaccagaaagaatcaagaagtcaatccatccaaagccagaaggttctcacttcctactttgtgttccacnnnnnnnnnnnnncaaaggaaatgaactggcatatacgaatacaaacacgaaaacatcctgctagggaatggtaattttctgatgatatctgtgttcagaagggactgaaatttatacatttacctctttgaactcagaaagtatcagaggactgcaacataaaaccgccccatacaagagggccccggcctcgaagacaagggtcttgccccacgctcgcctccctcccagctttgccgggaacgccgtcccactcaggggttcaatgcagaaacaccctcctaagggaaaacgggacgccactccctacccaggagacgcccccacagggctggagcttctattcgaagcccatttctaaggacaccacacgcaggcctcagccaaacctaagaggcaggatgatgccctccgtcctgagagaccactgaacacggcccaggggtcttctcatcaaaattcatttttttgcctctgattttccactagtcaagtctccaaatcccagtttctccaatggttcttgtagcatcaattttctctccatcctgcattctaaatattcttttgattcctttctgcacaaagcattttcaaaattattgttatgaagacacttcatgaatttctctttaaagcttttacattcacctaagtgatccagcgggaagctgcccttgtccgggggccgcggctggaagctcttggtcccgaaattcatggcggtcgacatgttggcgactccggagtctgcgagcgccttgcgagcgtacgcagggcggccggcggagcgccccc

SEQ ID NO: 320699 - DNA, 693 bp, Homo Sapiens
  misc_feature (638)..(638): n is a, c, g, or t
  misc_feature (677)..(677): n is a, c, g, or t
cagcggagaagccctatcaatgtgatatatgtagagaaaatgttggccagtgttcccacaccaaacaacatcaaaaaatctactccagcacaaaatcccatcaatgtcatgaatgtggcagaggcttcactctgaagtcacatcttaatcaacatcagagaatccatactggtgagaaaccttttcaatgtaaagaatgtggaatgaatttcagctggagttgtagcctctttaaacacctgagaagccatgagaggacagatcccataaataccttaagtgtagaggggtctctgttgtagaatagctcttaattttagagaaaccttcctggagggaaaccatactcctataatgagcaaagtaacaacttcaagcatttttccagcgttaccatcaaactcacaaataggttgaaatcctttagttataactcagcctttaggaacaccggagaacccacaataatagaaatcttttcgtgttccccattgagaaatgctttagttagcatcttcatgcttggaaatctagacaagaagagaatccatgggatgggacatgggtcgagggaattcgggaaagcctgcagttggacatttcagttctttcactttggaaacttcaaaactggacantagggaacaggctttcatggagtttcagtaggaagttangctttattttgttagg

SEQ ID NO: 320700 - DNA, 651 bp, Homo Sapiens
caggggttggagagcagccggggcaatgtggagagacccaatctctcagcatcctgtttatgttcttcttagcatcagactcgggctttttcctgtttattacctacttcgttttcctgaaagatccatgtgccggtaccatgtgttgttcctactgtttctccaatgtctagtagatttggcacatactgatgtgcaattaatacgtgaatgaagaaccattgacagacgattagtcaaaaagctccttgcaaagccctttgaataggttatcggtggagagtagggagcacaaaacctggggtccccattctagcttgaccacttctcggctgtgcacaaactagtctagctctcctgagcctcagttacctattttgcaaattagggatgggaacatccatacctcacgaacgccaaacggctaccttgtaaagacgaaaggaggaaatgcaggaaataactccacgtaaggttaatgctccgtaaacagagctgctactgctattatatattctatacaatcctgcgcccttaacggcaggaccctttcagtgcttcagtcctgtcttctctctcctgggttgacctccacagatcctctcagaagagcgttttccaggcgtgaatctccgcagagtggagataaag

SEQ ID NO: 320701 - DNA, 386 bp, Homo Sapiens
ggtcaacacaagtttatttattctcacgtaacaatactgagtggatatttaggtcagtaaggcacagttctcctccacttaggaatctcccatcttcaggccttgctttctccagagcctggtcaccatctgcttccagttggcagaaggagtaacagcacaggggagcacctgttggaggtctgtatgggccaggcctggaaactgcacacctcttctggtcactttccgctcagcatcctgtttatgttcttcttagcatcagactcgggctttttcctgtttattacctacttcgttttcctgaaagatccatgtgccggtaccatgtgttgttcctactgtttctccaatgtctagtagatttggcacatactgatgtgcaa

SEQ ID NO: 320702 - DNA, 936 bp, Homo Sapiens
  misc_feature (517)..(517): n is a, c, g, or t
  misc_feature (619)..(715): n is a, c, g, or t
tttgaatggtcaacacaagtttatttattctcacataacaatactgagtggatatttaggtcagtaaggcacagttctcctccacttaggaatctcccatcttcaggccttgccttctccagagcctggtcaccatctgcttccagttggcagaaggagtaacagcacaggggagcacctgttggaggtctgtatgggccagggcctgggaaactgcacacctcttctggtcactttccgctggggagagcataggcacagagccacacttaaattttactttgaggaatgcagtgtaggtgtatgtccgacaaggaaaacaataattcggtagacaaataagtctccactccaatattcaattacttacttaacttatgctctggtatgtctcaaattaacctagatagaaatgaactctgaatcttccacttccatcaagtttttcactcactcaatggcatcattatccatccagttgcttaagcatacatttgaaagttatccttggtctgtntcttatccttcccttccacatctaatccttcaggaagtcctgacaatgttacctccaaaatatgtcttaaatccatcttctcagccaggcacggtggctcannnnnnnnnnnnnnnnnnnnnnnnnnnnnnnnnnnnnnnnnnnnnnnnnnnnnnnnnnnnnnnnnnnnnnnnnnnnnnnnnnnnnnnnnnnnnnnnntcacgacgccaaacggctaccttgtaaagacgaaaggaggaaatgcaggaaataactccacgtaaggttaatgctccgtaaacagagctgctactgctattatatattctatacaatcctgcgcccttaacggcaggaccctttcagtgcttcagtcctgtcttctctctcctgggttgacctccacagatcctctcagaagagcgttttccaggcgtccc

SEQ ID NO: 320703 - DNA, 430 bp, Homo Sapiens
  misc_feature (267)..(338): n is a, c, g, or t
  misc_feature (362)..(362): n is a, c, g, or t
  misc_feature (371)..(371): n is a, c, g, or t
  misc_feature (392)..(392): n is a, c, g, or t
tttaaacggtcaacacaagtttatttattctcacataacaatactgagtggatatttaggtcagtaaggcacagttctcctccacttaggaatctcccatcttcaggccttgccttctccagagcctggtcaccatctgcttccagttggcagaaggagtaacagcacaggggagcacctgttggaggtctgtatgggccaggcctggaaactgcacacctcttctggtcactttccgctccaaaatatgtcttaaatccatcttcnnnnnnnnnnnnnnnnnnnnnnnnnnnnnnnnnnnnnnnnnnnnnnnnnnnnnnnnnnnnnnnnnnnnnnnnactcaggggttgggagagcagccnggggcaatnttggaggagaccccaattctnttcagcatcctgtttttatgttcttcttaggcattcag

SEQ ID NO: 320704 - DNA, 675 bp, Homo Sapiens
tttgggttaagggtacttgattttacccatgttcccaagctccttgaacacttccataaattgcatcccaacactgtcaagttccttcccaaaatatttttgggtcatttccttcatcccatgtatttctggagaagtcctgctcgatagtatctttttacagtggctagaactccctggctcattggttgaatcagacttgtgacatttggtggcaaatacttcacaattattctgccatcatctgaactcaacatttcttcatttggacgtgctggggggaaatctaaaagaagcactgctttttctaaaagtcccttggatttcaaatgcttctgtacctgtggcacaaagtacttttcaaaccactgtctgaaaacagactgttctatccatgcacctttttgactgtaatatgtcacaggaaggtttgaaaggtcagtgcctttgaatgctcggggctttttggccttccccacaacacaaagattaagtttgtgtaaacctgtggcatttgcgcaacacataatgatgattctctctctgcttgacctacacccagaagtactttggtcagtttcaagagttaatgtccttgacggtagacatttccaaaacaatccagtttgatcagcaccataaatttgctctggttgtagattctctttttcaaca

SEQ ID NO: 320705 - DNA, 784 bp, Homo Sapiens
gcccagagacagtggactagatcctctaaactggaatggagattacccttggaaggcttaaagaaaggggatttccaacccagagtattggccactttcccagaggtgagagggaaacaaagtggcttgggcgtggccctgcggggagctccctgctgtacctgcggaaagacaggcttggtccctctactttgcccctcacacattctaccagagccccacagaccactgaaaatgggcctgggatcgtgaaagaggaacgcagctcttcaccatccaaggaccgctgcccttgttcttccgctgagggggaagcagacttgctctggggttgcgtcatcttgctggccaagtagacaaagggctccaggaggagcgccggtccgccactgacacctcccacagcttcaccttctctgacttggcccagtgctgagccacatctgggtctacacgccgctgctcctgtaagtcacacttgttgccaaggaccacgatggtgacctgctctcgcaccccccggtctgtctcaatggagcccacgtagatgtcctcctgcgtctcgatcatctccgaacccactacatggttcccatacagaagctgctccaggattgaagttttgcccacagacgcctggccacacacgaccaccttgcagctcttccccatgcttagttttcaacctcccggggcccccgcagcaccagccgggccctccgagctcgcggggaccaggggaggggcagcgccgccgcaaaggctccagtcttcctccagagtc

SEQ ID NO: 320706 - DNA, 888 bp, Homo Sapiens
ggggcctggaggagcctacaccgactctggaggaagactggagcctttgcggcggcgctgcccctcccctggtccccgcgagctcggagggcccggctggtgctgcgggggccccgggaggttgaaaactaagcatggggaagagctgcaaggtggtcgtgtgtggccaggcgtctgtgggcaaaacttcaatcctggagcagcttctgtatgggaaccatgtagtgggttcggagatgatcgagacgcaggaggacatctacgtgggctccattgagacagaccggggggtgcgagagcaggtgcgtttctatgacacccgggggctccgagatggggccgaactgccccgacactgcttctcttgcactgatggctacgtcctggtctatagcacagatagcagagagtcttttcagcgtgtggagctgctcaagaaggagattgacaaatccaaggacaagaaggaggtcaccatcgtggtccttggcaacaagtgtgacttacaggagcagcggcgtgtagacccagatgtggctcagcactgggccaagtcagagaaggtgaagctgtgggaggtgtcagtggcggaccggcgctccctcctggagccctttgtctacttggccagcaagatgacgcaaccccagagcaagtctgccttccccctcagccggaagaacaagggcagcggcttccttggatggctgaagagctgccgttcctctttcacgatcccagcccccattttcagtgtctggggcctctgggtaaatgtgttgaggggcaaaagtaaaggacaagcctggtctttccccagtcaagccagggaagctcccccgcccagggcccacgcccccagccaacttttgcttcccctcttcaccc

SEQ ID NO: 320707 - DNA, 617 bp, Homo Sapiens
  misc_feature (119)..(119): n is a, c, g, or t
tgttcaggtacagtaaggcatacagataacctgcccgtccataaagcagctcatcaggaaggtctgattcttggcagacaaccgatctctggagctgcaaaagttttgtgacacattcntgggactcacagtcacttctgagtttgtgataaatcacagctccaacagccagggggccagcatccccacagaggaaggtgaccctgcggccattcagattccgaagtgttctttttacgtaatccagggatcggagcaggtaggtttggtcacatgtgacccggtacaactgcaggtacaaaagggctatgcctgtccagccagtataagcagagcagtcatggggatcagctgtcttcagcccttcttccatttgctgcagaagatctttaattttggtctggatccgtcttatgaaattatgaatgatcttcccgtcctgatgaaaagggaggccgggctcatccgtggtcgccgggggacgaacacagcctgtctcttcggccgctccggaggcgagcagcgccccggcggcggcctcgtagtccgggaaggggttgacgaacgcccgttcctccatttctgcctcccctcccaggtggagcttcagcctcttt

SEQ ID NO: 320708 - DNA, 1714 bp, Homo Sapiens
gtgtgtccgctggtctttgctatcctttatatttttgtactactatgtgtgcgtgtagtgtaggggtttattataggtttctcttgttgcttaatgtctgattgcttgttcgcggttgtgggggagtgtctgattttaagttgaaagaggtgatttcgctgcaggaagggatggggcgtggtatttgcatgttctgttttggggtgaaggcagggccatccctgtggggagggaagttggccaagggtccgtttgaaagcggtggacacctgaggggtatttatttccaggaggagtcacattcaccaggcatggcactgcaacccagggtctccccagtggagctcttggcactcagaacaagtccgccctccaaagccggcacggcagtggcactgccctgtgaactcgttgcaggtggggcctctggcccggcttgggtggcaggcacaaggctggcaaccatggccactggtgaggttccagaagttgggggcacagcggtcacaggtagggcccttgacattgggggggcatgggcattgcccactgcttggatcaacagtgcgcactggtcaggagaatgggcactgctgcggatttgtgcccagcagtttgcatgtgcagcggtgacagctctgtcgggcagcctgcccatggaagccaggcttgcagtgggcacagtgtggaccctctgtgtggtgtaaacagcgcaggcattgccccgtgtgggggtcacaggcatcaggatccattgggtcaatgttcccactgcactcacacagttggcaccggccacctggccttgatgggtccccaaagtgcccaggggcacaagcttcacatcgcagccccgtatagcctgcccggcagtggcacacaatctgctgggaatattcatcctcggtggcaagaagtagccaagtggccgttggctcccagggccttcagtacagggacagggccggcactggcccccatatggccagccgtgggtccccgtggaaaccagcaactgcacctttcacagtgctcaccccctgtgtgatcacggcagcccaggcaagcgcctgtgtgggtgttgcactcatctgcatgcccattgcagacacatggccggcagctagggaatccccactggccacgctggcagcggtcacagcgaagcccaaaggcaccagttcgacagagacattgcccactggtcttttcacagagactgctgagtgccccctcgtggctgcactggcaggcttgacagcctgtggggccaaagccatagtagccaggggcacagaggtcacagcggcgcccaaccactccaggcttgcacaggcactgaccaccatgagggttgcactcagaactcagtgaaccttgagggttgcactgacatggcagggcaccattgtagatgagggtggacaggctgatgaggaggggtgcgcaggcctcagagggagaagtcttgctgggcaccagaccctcctcatggcattggtagcgttcaaaggtggcctggcgctccagggcagcagcatcacccccactaaacatctctagcaccaggacacggggcagcagcaccagcgagtcaatgagcaggccaggtccagagtagggagtctcaggctgggcacttccccctgtccgtaccagcttcagatgcagcttgtaggagataccaggctcaaggcagacaggattaggaaat

SEQ ID NO: 320709 - DNA, 640 bp, Homo Sapiens
  misc_feature (360)..(537): n is a, c, g, or t
  misc_feature (612)..(612): n is a, c, g, or t
aagatcctccagtgtcaagggaagccacagagtctattaaagaggcagttctgaaccaattaatttttgtccttataatttagagcattaaatagctaatatatttaatggcactaattgttgttcacggctttcatcatacttttaaacagaatccaaagtattcaaaggaaagtaagcgaagttatccaaagccaactttgtttcaggtgtgtcccctgccccaaatagattttagggcagaaatagaaaactgagtttacacagaactatttttggaaaagctgcactggagtagatggattcttcttcagcatacttttttgtttgtttgtttgagatggagtcttgctttgtcannnnnnnnnnnnnnnnnnnnnnnnnnnnnnnnnnnnnnnnnnnnnnnnnnnnnnnnnnnnnnnnnnnnnnnnnnnnnnnnnnnnnnnnnnnnnnnnnnnnnnnnnnnnnnnnnnnnnnnnnnnnnnnnnnnnnnnnnnnnnnnnnnnnnnnnnnnnnnnnnnnnnnnnnnnnnnnnnngaacttctggacctcacgtgattccacctgcctcagcctcccaaagtgcttaggattatagggcgtgaaccattncggcccggccagcatggcatttttaaat

SEQ ID NO: 320710 - DNA, 749 bp, Homo Sapiens
  misc_feature (424)..(442): n is a, c, g, or t
ccacctggaatcaattcgatccactgtgaaaggcgtgagctgaaggtccagaaaagctgtattcttagataacctcatctgtgattgctcccaggactgcagtttacttcaatttaagggggtggttttcttattagagaatgtaagtattcaatactaaatatgagactgaagccttgaagacattttatagtggtggcaggtgttatagttcaggaataggctgtttaacaagtcaaatgcatatcattccctcttaagcattaactttttcaaagcaatggaattatattttttggcttgaaatggtggtttcttctatatttgatttctcggttttcttagtagatattactgtctcctctaatatttcttcaaaactttcccctatctgggaggttttcttagaggctaccttagatgnnnnnnnnnnnnnnnnnnntttcttaagtgatagcccagtggatgagactttggaggttgtagcactgaggattctaggtgggagcaggtaacttggattgggaagtggattcagccccgaaatgcttaacccactggtgctaaaacgtgtctcctcgccttccagcagtttcctgtaagctgctatctcaatgtcaagagccattttgacattgagcaagtcctggtattcccgaaggtggcgtgccatctcactcttggtgttcctcagatcattctccagctgcccaatgctatcctggtagccagctacctcctcgtcgtcc

SEQ ID NO: 320711 - DNA, 427 bp, Homo Sapiens
  misc_feature (51)..(51): n is a, c, g, or t
  misc_feature (65)..(65): n is a, c, g, or t
  misc_feature (74)..(74): n is a, c, g, or t
  misc_feature (112)..(323): n is a, c, g, or t
ttttttggaagacaagaatcttggctctggttggccccaggctgggagtgnaagtgggcgtggancttgggctnaactggcaaagtcctggcctccccaggttccccacccnnnnnnnnnnnnnnnnnnnnnnnnnnnnnnnnnnnnnnnnnnnnnnnnnnnnnnnnnnnnnnnnnnnnnnnnnnnnnnnnnnnnnnnnnnnnnnnnnnnnnnnnnnnnnnnnnnnnnnnnnnnnnnnnnnnnnnnnnnnnnnnnnnnnnnnnnnnnnnnnnnnnnnnnnnnnnnnnnnnnnnnnnnnnnnnnnnnnnnnnnnnnnnnnnnnngactgagcaaagacagcaatggaacctctggctgcaggagatgcctgggtatgcctgatatgtaaacaaacacaagcagtcgagttcaggtcatgcatcttcaa

SEQ ID NO: 320712 - DNA, 244 bp, Homo Sapiens
aaggtaattagaacactattgtttatacaatattgaaaaaatacaattttttattgtttgaactcaaatcaccacccagcactttaagcctaccctaaatagcacctacaataaatgtcatagcacaagcaaactgcaaagtcagcaggtaagcaagttagacagtgccagcagagagaccctccctcccccaaagcaatgagaagacagcgtgctaggtaagagtgaagtacaccattacatg

SEQ ID NO: 320713 - DNA, 863 bp, Homo Sapiens
agatatcttagtgtggtagatatgtgcaggatatcaggtctgtatgatccctcttcatatctggctgcagcctagccattgtgtaggcactcttgcagtctgatggtcatagcttgttcacaatgcatcttacctctgtggggagacgtggaatcaagccagcccacaagccctgagactggataggccggagagaaagaggagtagccagagcggtcgggacaagaggacaggaatactgtgggtaaaagggacaaagaccacgcaacctgaggaaagacattgtattgaaagggtaatgactatttggctaaagggactgactcctgggttcccgaggctcaaagaccaggagacttttccactcttgcaagctgcacaagtaccatacttagtgttctgggctgagaggggagacaaaagcatcgtcaggttgccaaacaatgtcccagttgccctgggaggcacaaacctaccaaagtgccataggccaggtgcagagagaatcagaggagctgatttgcttggggtcagagcagagctgggtacttcagatgatcactttcacatactccttgttaaatgggaccaaaggggaagaagaagaaacccttaagcttttgtaatattgtcttgggtaccagataccataaaaggcagcatgagagaaacattcccttgggccagtgtcatggtggattttcttgcttgagaggcaaggatttcagctttcatttggtaccacagaatttaaaattgtaagtgcctatcccttttgactgttgatggcttctttggggttttagttaccccagttgaaagagaaatttttcatattggggttgagaagaatggaggctatt

SEQ ID NO: 320714 - DNA, 2803 bp, Homo Sapiens
  misc_feature (14)..(14): n is a, c, g, or t
  misc_feature (33)..(33): n is a, c, g, or t
  misc_feature (45)..(45): n is a, c, g, or t
  misc_feature (67)..(67): n is a, c, g, or t
aagtagaactgganttagggagggaaattaganaaatgcccttancctgatgtgaacaacccccaangaatcgggtaagtgctttaagaagacatccagaaggcctcctatagaactcaacaagagtacccatgtaaaattccatgatgtcctggatgtgtgagggatagggaggcattgctatttttgactttgatctatcctttaggcccagaaaatcttatatttgtagacagaggggatcccaggcactggagagttgttcctccatagggatgggagcctaatgttttaaaaagctaacagtgaagagtctagtggctttttataatttgtactagtcactcttcacttctggctcttcacctgctctgacatgatggaaataaaataagttagagacagctgttttattagagctggaagctcctattactccaactacaaatgtcacttaggtaagttttaaatgtattttagggaaatataagtatacttgtaacggtggttgtgataaaggaggaaagggtaagggtatccacagttggcttgaaactataatttcaatgcttataataatttttggaaggatttgaagaaataagtccattaaaggctcaagtaagatggtaacatgcagtacattcatagttgcactatttgtaatagcgccaaaatggaaagttctcaagtgcccatcaacaataggatgaacaaattgtaataagtcccacaatagaacattattctgcaatgagaatgaaaagatccacaatcagcacaatacagaggaatctcacaaatgtaaggctgagagaaagaagccaggcacaaaagaatacatactgattgattctatctacataaaagacaaaaccaggcaaagctagtgaatgatattagaagtcaggatagttgttgttctgggagtaataaagtgacaaggaggtgcttttagagcgctggtactgctctgtttcttacaggtgctggctacagggccattgttcagttaaagttaagtttattgaactgtatacttatgctttatgccatttatgtacatatgttatagtatttctgtaactttttgtttttaaaggcaaatgggcatttttcaagagacagggaactaatactcatcatttagatagaaattccctgctttcatcttttgttaggaaaaataagaattttggaagtgctcctcttttgtaaaatcttaatcaagtaatgaacgaaaatagtcaatacaacaggaaaagagaggaacagaagcctcaaaagatgaattcctatcaagcagtaaacagttcttttccagaactctttgtgacttataattctagaaggtccatcagaggcctcccatttctattcagaaatgcacttttaaagttagacagttgtcacagtcttagggagcaatgagttcacaatttcaatttattatcaaaatatttccatctgatgacaaacctgaaaagacaggagatgcagagctacataggtgcagatttgcccttttatcagagacactctcagggacagatttaattttgaaagtccaatttgaaaaccacaagtatatatatctctagacaactgtccaatggcaatttttaccctaaagtttgtgcttaaatcttttcatcaatatgatttataagtttaaatagtctcaaattttcatctgtatatcgctttatagatcttggttcacaactgtttattttaagctgaaacttcaatattcattgattacctataataatagttactcataaatgtagttaataattaaatataaaaattattatttttacatttatataaatctctgaaaaataccaagttttgagagatagagcaagaaattgcttagaaaattgcaggaagcctgaagaatctcagcatcagtcaaagcaggtacaacaaaaaacaattttagacattcattttttgctttaagagtgcttaaaataaatgatcacagaatgaataactgatgtatggcaaaaatgagtttaaaactatgtaagctccaaggccccaatgtgtataagaattctttggaaggaattttgaaggactgtaaatgttgcaaataaaagtaaaaactagtagttaggcaatgtgttttaaactatagtgtcacctactcgttcttctggtgcctaactgtattcttcaacatcttctgtttcccttttgattagaaatcctggtctacctcaaaggttttgcattgttttctagggacatcagcaaactggtagaccatatgagaaacagaaataaacagtaatattatctttagaaattaagcattatgtacacagtgagaaatgattgacttgatagaccttagacccccttcctccctccacaccctttctagaacaacctaatgttatctgtattgtgatggtgccctctctgttaatcaccctcaagtcagtacagtgacccctagggcccattttctttcgattagagaattccccatttctgtggtgttggcaagtctagccaagggctgcaatgcttcttttgaagatcaccaaacccggcacttcttttctggattcatgtatgaattcttgcggcagtgaaaggcttctgaaaactctgcagagttctgcaaagtcccaataatcctgaaattgcctggactgtgcacatctgttttaatggagttaaccgcatactctggcctataggttcccgacgcgtgggtcgacgatatcccgggaattccggaccgtacccagcttgctttttaaacaacggttatagtcta

SEQ ID NO: 320715 - DNA, 736 bp, Homo Sapiens
ggccctgaataaaggaaaattcccggtatccccaaaaaagaaattcaaaaagctttgtgaaaattccactgacactaatttagtggcggaggagggggacagagtttgttcaaactagtggaacacaagcatatatcatgtcattcttcagaaaagcaacaactggccagagttcttcacctcctatcaggagtccataaatggatgttttattgatgcgtgaacagctatcacgactctcaacgaagtctttatcatcatccaataatctaagttcaaagagcagtgctttaagaaagggaccatcttcaggaacaggcacataacttgctccattgaagactctggctcgtttttcaacagttggataccgtctggagaatctcacggtgccacaaagtggagttcccggttcgtggcttatgagccacactgcccgctgcgccatggttaagtcagtaaagcattagctcatctcataattaaggtcgccaccgaggaacagcgcagaccggctttctcagacagactcttaacagaagccctgaggctcatcctgcgccgcataccggtcgcgctcagcagagaggttagcttttttaggtgaagtcactaacgcttctgagtcgctctaggccaacacacaccacaaaaagttctaagaaccccaacctataaccttgagaaatttacctatagcctgcaactccggtattttcttcctctaaattctccc

SEQ ID NO: 320716 - DNA, 272 bp, Homo Sapiens
  misc_feature (181)..(181): n is a, c, g, or t
tcaatacttacctagaagtcagaattgcagagtcaagagaagttacacaagggtgaactagaatatcctgaagtggagatccattggtggggagactcaagctgatggtaacatttggcatgattccttccaaatcacactggagaatctcacggtgcacaaagtggagttcccggttcgnggcttatgagccacactgcccgtgcgccatggttaagtcagtaaagcattagctcatctcataattaaggtcgccaccgaggaacagcgca

SEQ ID NO: 320717 - DNA, 1769 bp, Homo Sapiens
  misc_feature (48)..(180): n is a, c, g, or t
aaatctcacaaacataatattggtgaaaagaaaccagatacgaagaannnnnnnnnnnnnnnnnnnnnnnnnnnnnnnnnnnnnnnnnnnnnnnnnnnnnnnnnnnnnnnnnnnnnnnnnnnnnnnnnnnnnnnnnnnnnnnnnnnnnnnnnnnnnnnnnnnnnnnnnnnnnnnnnnnnntgtatgcacgtgctccacttgtgaaaaatcattgatgtgtttctatagttacactttaataaaaagttaaacaaaatgatttgcctctgtctggatactcgactcaaaactgaaaaaaatgtctcctttgctctcagcctctcactttggctacactctcgtactggcattctcagctcctgccacttgcaaatggtgagggtgggaagagaatccctcttccctgccatgcaggctaaactagatttgctacaggttgggctgctaaagaaggaggtctaccaaactgaaattcaagtcttatctctgcttcctgccagtgcactcaagtgctgtcttgctctctctaaccccctctttcaacaaagccccttactcagaaataaacactcctctcagggaacatctaagtaagtatcaacgttttgaaccaaaagaatggagctctaatagttaacatctcaagctgcaggtggtggatgggtgaggagtcatctgggctgacacccgtggaggtatataacaagcacttggagggcaggcccagcttgaggagggggtgtgaaaatcctggctctcctttgggcaagtctgtatcctctatgactcagtttcctcatcattaaaatgggaataatggtgctgagatgttataacaatcaaaatgagttaccacaggtgaagaatttagcaaagtgactgacttaggtaggaggctaataaacattaagctgtcagctcagctttgtccaaggtatgttgcccccaaaaaagcacaacccaggagaagtccagggagcaggggacgtttagggcttgctcaagtctccaagccaaactggagagtacccttggatgtcctgtgcttcctcaatatcgtggtgaggtgcaggcactaaggagtggggtgactttaggcctacatgggagcagaggacaaactgagcagcacgagagggagggaagaactgacagtgccctgggatccagtcctgtatgcatctgctaaatatcattacacaagtgtagtagcctttgcactggttgccttcaaagaattaggaatgttgttctgtcagagggcggggaaatgaaaacacttgtcaagtgtgcagtgtttgatatagcagcaactagggaggttctaacatcacacacttgtacttcctatttgaccaacaggccatcaagtaccacaggcattttggtacaacttctattattagggcctggtccctggatttggcctctattttgcagaccctagagaccctctgtggtgactggcttgagataacccaaatgcacaaggcctgaggtagacaacagaaagtcagtttttcaacaaaaaacaatgtttggtagctagaatattcacactggcattttcaccctgcaggcagacctatacaagtagccaaaccttcattacaaagatacttgaagagtacttgaatacaaatcaaaatgacataatggcactaagctaaaaaacaggctgaaaaagaaattcccaaagagagttaacaaaactggatacctggccatctcatggctgagcaagctttgtcttcttttctatgatcctg

SEQ ID NO: 320718 - DNA, 774 bp, Homo Sapiens
tccagacaggtacttccaggaggccaatcccagccggtagggatccaggccccgggaggccaggcctgcttgccggagtaccgacggccaggtgaggaggcagaagctgtagccccagagccagaagacccacactagtgtcatcaccaacatacaggggggccacaggctcccagtgcccaggttaaggtgcagtcctcaccgagaaggccacatcagcttcctgtgagtgtgtcccatggatccaggggtggccagaggcccatcaccacgggtgttggcacttcctaaaaccgcacgcagcgatctccagactcgttcttggccatgagcagcagaaatgctgcagtgctgcctgccagcgtacaggctgttcaagaacccaagaggaatttctcaccaatacgtaaacatgcaccacagctagactgcggttccgtgactttgggatttcagagacaggcgaacttaagaagaaattctggggctgacaaacagcaaccaacattttgttttgcaaccaagagcatttcaaaaagcaaaaatattgccctctacttttaccttcattacataaaaggaaattttatcatccaaataaggaagaaaataacttcagaataaagaacaatcctttaagttgaacaaatgtgacttcatcaattatttaccatgctgttctcatacgcctcacctgcatagagcgctctgtccccagtgctatgctgtgggccacaaggactctggcccatcggggtccacagtccagcccgg

SEQ ID NO: 320719 - DNA, 1295 bp, Homo Sapiens
  misc_feature (284)..(285): n is a, c, g, or t
  misc_feature (287)..(291): n is a, c, g, or t
  misc_feature (295)..(298): n is a, c, g, or t
  misc_feature (300)..(304): n is a, c, g, or t
  misc_feature (306)..(309): n is a, c, g, or t
  misc_feature (311)..(314): n is a, c, g, or t
  misc_feature (316)..(319): n is a, c, g, or t
  misc_feature (321)..(326): n is a, c, g, or t
agctttgtcatcgtgatgatgacggacgtaacagcgggctatcggggccgtcggcggctggaacacaagggcgcggggaacggagacagctggccgcccgatggaccaggccaattggacgacacctgtgggggacactagcggtgtgcgatcagttgattcgctggctgggcagagcaaaaatcgagtgaggtggggtccgcgtcctcgggccgttattgggttcccggtgtcctgccttcccgtggcgcctcggacgcggcgccgccccgcgccgcccccgnncnnnnnggcnnnngnnnnngnnnngnnnnannnntnnnnnnccgcccatgccccctcactggcaggggtggctgcccgacccagaagctccaggggcaccaggaacgggttcaggggacagatcccagctgcttgccaaggcgatttcagttcgctgtgctcggccttctcggtggctgggggggtctcctctggtgccttggagccagccccatccccttctgctgcaggccccaggctccctccagcgggaatgggctggggggctgtcaggcgtaggtacgtctccgtcatatgctcaaccagggctgtgcagggcaggagtggcagctcctctggaagtgacatgagcaggtcgaggaccacagcggactcagctgctgagagctcggggctgcggccacttcgggagacagaggacaagtacttgtagatcttctcaaagtccacagcaaagtcttcttcagtggagggaccagccgacgactcagaaggtttctcaggggcagggtcaggagtcctgggtgcggagctaggtgcagcaggggcagagctaggtatttcaggggcggggtcttcctgtcctccaggggcgctcaggagcaaaggctttccacgggcctgcgtgggcttggggggcttggagtgcaggagggtgaccggttccgtggccgcgatggtgagcacctgcgagaaagccactgccacggcttcttccagtggccctgttatcttctcagccagatccgtccagacctctatgggggctgggggctgtgcctcccggcgccttggtccctgaaggccacccggatgcactttctgaatggcctcccgggctacgcggcccttgagctgctggaggaagacccggatttcaagctcgtatcctgtccaacagcatgcgttgcttttcgcccggactcggcagcatcttactcccagttcattccgcccgtttagccctcgcctcacccacgcattaccccgaggctcgccccgcctttaaa

SEQ ID NO: 320720 - DNA, 958 bp, Homo Sapiens
agggctgggtggcgaattcggcacgaggcccaggcggcgagcggccccggcgcgctatctgggcgaggtgaccggtcccgcgacctggagcgctcgcgagaagcggcagctagtgcgactcctgcaggcgcggcagggccagccggagccggacgccaccgagctggcccgggagctgcggggccggagcgaggctgagatccgggtcttcctccagcagctcaagggccgcgtagcccgggaggccattcagaaagtgcatccgggtggccttcagggaccaaggcgccgggaggcacagcccccagcccccatagaggtctggacggatctggctgagaagataacagggccactggaagaagccgtggcagtggctttctcgcaggtgctcaccatcgcggccacggaaccggtcaccctcctgcactccaagccccccaagcccacgcaggcccgtggaaagcctttgctcctgagcgcccctggaggacaggaagaccccgcccctgaaatacctagctctgcccctgctgcacctagctccgcacccaggactcctgaccctgcccctgagaaaccttctgagtcgtcggctggtccctccactgaagaagactttgctgtggactttgagaagatctacaagtacttgtcctctgtctcccgaagtgggcgcagccccgagctctcagcagctgagtccgctgtggtcctcgacctgctcatggtcacttccagaggagctggcactcctgccctgcccagccctgggttgagcatatgacggagacgtacctacgcctgacagcccccccagcgcatttcccggtgggaggggagcctgggggcctcgcttctagaaggggattggggccggcctcccccggccccctatatagcctccccccgggttctccgtgatacggcaatgaccccctcctagccccacgctccg

SEQ ID NO: 320721 - DNA, 914 bp, Homo Sapiens
tataggagagggccccccctatcacgtgtgggtctccaaggcgggggggactatagggaaagccccccggaaaaatggcttcggcccccttcggggagggaaccccgggccctggccctcccgaaaagcatttttgattggggccagccgcggggtttgccccagggggggctttcctgttttcccggggggggccgtaggccctccagccaagccccttccaaccaaaacgcccggtatctcgtccccgcaggcggctgccccgtccgtactctttgatcccgaagccccgttcttttggcaggggtctcccaggttgcccctgggcacccgtcaaagggttcgggcgggtgagtttgacgctcatggagtcgatgcagaccgttgtcttcaggggtgcatacacaagttttttgcgggagctcagagccagtcccagaaacggcagcttctcgccctcttgcttgtcatagaagttgagcaactttcgaagctcttcaatcaccttctcaatctctggcacagttcttgagcagtagatgagtttggtcacctccagcggatatgctctctggtatgccatgatcagggccaacggggatactgtcttcccggtgcctgagggcatctccaggactccatgacccttggcgtccagcgtgcgtttgagctcccgcatgtaggagaactgctcggggtagatgtagtcgtacgggaagtagaccaggagcccgtccacgttgagcctggcggcaggggctgctgggtcagttcccgtcccctcagcccctctcccgcctccacagtgcccggtcgtcgagcccagagaagggtgacgggcccggcgcccccggtaaccctcaggtcctcaggagcctcggggccccctcagtgtctcctcgctatcactgctg

SEQ ID NO: 320722 - DNA, 741 bp, Homo Sapiens
  misc_feature (50)..(185): n is a, c, g, or t
  misc_feature (201)..(201): n is a, c, g, or t
  misc_feature (204)..(204): n is a, c, g, or t
aatgtctctgtcatatcactctacacaactggaatcatgtttgtttgcannnnnnnnnnnnnnnnnnnnnnnnnnnnnnnnnnnnnnnnnnnnnnnnnnnnnnnnnnnnnnnnnnnnnnnnnnnnnnnnnnnnnnnnnnnnnnnnnnnnnnnnnnnnnnnnnnnnnnnnnnnnnnnnnnnnnnnntggcacctggggtctnatncctcccagaccctgagcaagtcagctctctaccgccatcgaggccttctgctgctgtcccccactccccagtcacttgggcccccaacccatccctggccacccactcctctcatgtccaccttggcctgtgcccccttaccttccgtgtgggagtccccctcagctgtcaccctccactgcaccagaacgcccatcaggctgagcaggggccagagtgccagcagggcccagcttcgccagcagagtgggggcacaggagcagcccggagtcgctccaccacgtagcgccccagcagtagcagctcggcgaagtagtcagcggcagtggcgatcagcgcagcaccagtcacggcggtggccagggtggtgagtgggcggggccagcgcagagtgagcagggcacagagcaggccgccccccagcaacagccccagtggaccccacacggagcctggctggtagtagggtgcggagcccagcagggcagcagctgcgagcagcaggccgagcagcagccccaccaggaagaggccca

SEQ ID NO: 320723 - DNA, 890 bp, Homo Sapiens
  misc_feature (77)..(77): n is a, c, g, or t
  misc_feature (88)..(89): n is a, c, g, or t
  misc_feature (125)..(125): n is a, c, g, or t
  misc_feature (136)..(137): n is a, c, g, or t
  misc_feature (146)..(146): n is a, c, g, or t
  misc_feature (163)..(163): n is a, c, g, or t
  misc_feature (176)..(177): n is a, c, g, or t
  misc_feature (205)..(205): n is a, c, g, or t
  misc_feature (245)..(245): n is a, c, g, or t
  misc_feature (289)..(289): n is a, c, g, or t
  misc_feature (316)..(317): n is a, c, g, or t
  misc_feature (408)..(408): n is a, c, g, or t
  misc_feature (463)..(463): n is a, c, g, or t
  misc_feature (476)..(476): n is a, c, g, or t
ggcggatgctgtggaggtacccgctcggactgcccccaaaaaatgggtcccccctctgcccctcaaatgggctcctntgaaagcgctnnccgtggtgctgccagtagggtaagggaagccagganctaaagggagnnctgataaanggaatgtaagtgtgatnacccccctcttcnntgataggggcactgctgcatcatgctanggggacacatctgcttgaaagctggatgctgcatatactnccggaccatatacagctccaactactgggcttattccaccccanttgcatatggtgtgaccatcttctatnnggtcattacacgtgctgtagcattatcaccttagagccacgttcattaaagattatttctacatctagattttgccaaactgcccaacatnctgccggaggtcagggtccggaagcggaaaggaatattagagacatgcagccgtntcggggtagattnactctctgaatttccactactttgtgtctgtgactgctggccgtctgtctgtgctccaccttctgtctgcgtaagagatccattttgtgtgctgggtgagttgctgctctgctccccgtgggcttgcgtacttccgtagagtgtcaggttatgctcaccggtctggccggcatagtcttgagtgtgtggcaccccatactctgtgggaattccattctgcggaggtggtggaaatgggatggtagtaaaaggctgaaccattgcgtcaggagttgttgtcggctcctggttaccctgctctcttatctgtctttaattaaagcataaaataccctccctcttctcttctcccaaccacccaggaacagaagagcgaactggcagcagctcaggtgaaagacttcagccttcccc

SEQ ID NO: 320724 - DNA, 796 bp, Homo Sapiens
aaagccaggaatgattaaaggaatgtaagtgttgataccccctcttcctgataggggcactgctgccatcattgcctagggacacatctgcttgaaagctggatgctgcatataactccggaccatatacagctccaactactgggcttaatttccaaccatttgcatatggtgtgaccatcttcttattggtcattacacgtgctgtagcattattcacctcgattttacggccctctaccacggtgccgtgtaatttctccctggccctgtctgcatcagcactattctcgaaagttacgaacccgaatcccttagagccacgttcattaaagattatttctacatctaggattttgccaaactgccccaaacatctgccggaggtcagggtcccggaaagcggaaaggaaatattaagagacatgcagccgtttcggggtagatttactctctgaattttcactactttgtgtctgtgaactgctggccgtctgtctgtgctccaccttctgtcgtaagagatccattttgtgtgctgggtgagttgcctgctctgctccccgtgggcttgcgtacttccgtagagtgtcaggttatgctcaccggtctggccggcatagtcttgagtgtgtggcaccccatactctgtgggaattccattctgcggaggtggtggaaatgggatggtagtaaaaggctgaaccattgcgtcaggagttgttgtcggctcctggttacccagttagaatgcctaatttttcatctccctccttcttcatgaatgcaatagtag

SEQ ID NO: 320725 - DNA, 2512 bp, Homo Sapiens
  misc_feature (33)..(33): n is a, c, g, or t
  misc_feature (519)..(652): n is a, c, g, or t
cttcttttagaaatgattggccaataaatgatncctttttttgttcgaccgctatttctcgggggggaaattttattttttgggcgaaaaggggggctttttttccgtggcgggtttgatttccaccacccccttggggtctgctcccccccggggggagtttcaccagtttcaattacaccttggaaaataggggcgggggggtggcacgattttttacgcagcggcagatctcctagtaaagttaaccaaggggcccaggcccccaccgaatatagttttataaaccccttgggtgaccggcggggatgttctttgttagggttaatgaattacaatcagtctcgggactgtttttcaggacgggaaaaaaacatagtatttcatctctgttcggtctgcccgccggtacacagcagtaatgaaatcactacttccttgtggaggatggtcagacacgatcgagttttctatggctgttttttattttcgatgtccactttcagcaggcatattcannnnnnnnnnnnnnnnnnnnnnnnnnnnnnnnnnnnnnnnnnnnnnnnnnnnnnnnnnnnnnnnnnnnnnnnnnnnnnnnnnnnnnnnnnnnnnnnnnnnnnnnnnnnnnnnnnnnnnnnnnnnnnnnnnnnnncataaatctttcttttattccaagtttcaagtatgtgtaagtgtctgtgatgacacatggtgctcagtgagcgccctgtcacccaggaccctggttatagcaccgttgaatcaaaaacccacagaattggaacaacaggaagatgagtcacttacacagtgggttggtttttccttagatttgtacttccaaagggcccagatgtccaatattaaaatgcccaataaatttgtgcttcaaaagtcctgtgaaaaatataataatagtatcttgaaaaacaaaggggtgggggttgtggagagggaagcaccaagtctgagctcaccaaatcagaaaacacgtggcaccattatctatgtgactataatagactggagggtttcattggaagagaggtctagatattcaagtttgctgaaaatgacctaagaggaggagaaatggggttcggcctgaccctctctgggggggctgatgagcccgcatttgtccacgtgtcactggagaagagcgcggctccactgtgtctgtggtgagctcggtggcttgaatgggacaagctgatgacaacctgtctgtgggcctcatcccggtcaagactggctcttggtgctgctccagcagctctgtggacaaaccccacccccccaaggccttctcaggccccaagggtcaggtagcagccccccatgaatgatgggagggtccctttcctcctgagcttagacacagctgtaggggtctggacagggtgggggccgggctgggtgagggcacgtggcattcgttcagactcagttgttggggggaagtcccatggaagatgtggtgtggcctgaagacaggagttgaccacgcaggcttctttactgcggggacagctggttgtttaagagcccgctgaagtgctcaaactttttttccgtctcttcgctgaaggaaccacctatgtggcagttgtacatccagatgcggtggccgtcatagcggctcctgcatttcatgatgttgttggagtaatcggattctgcaacctcgaagttggggttaataacaacctggaacaggtagtctccagggggcacgtcagtgatgtcaacccactggcagtcgatgtcatggcggtacatgtcccagcagcccatggtgatgccctgatcgccgaagttggcacactcgtaattcttctggatgtctccttcacattctgtgtcctccaagcagaagctggccttgtggccctctgccaccttggtgccattgaggttcagcaggtcatagtgggtgtacacctccatgctgtggtagtgcctgtgacagtcgttgccagatccacgcgtgtcggccgttcttgggccggaagtgcggactgtccattgttggtggattctgggaggagaagcgcaggagtccgtctgtgtagcccgtggtgggttcggtctgcgcgtctgaggccgagaggcagttctccttccatggcacatctgcatgcaggaacatggggccggtcctccagttaggtggtctgctgcaccatctccgcattgaggaccaggtcaggggcggtttctgagcatggcaactccggccccgtactgcactctgccctgtggggcaggccacgtcctccccgtcgtggcggcaagtgctgccagggacagctccgttctccgagcacttcacatccactcatgaccactttgcttgctgttgacatctccgtgccaataccaggtctcctggaaggcgttgctggcgaatcccaggcccagctggcggcagaccaccatggcctccacgatgccccagttttggccacacaccgacgcgtggtcgacgatatcccggacttccggacca

SEQ ID NO: 320726 - DNA, 793 bp, Homo Sapiens
  misc_feature (725)..(725): n is a, c, g, or t
  misc_feature (736)..(736): n is a, c, g, or t
  misc_feature (766)..(766): n is a, c, g, or t
taattttcttttttctcatgcacttaagactaaaacacaggtttggattaattttatttgcttcctttttccgcttttcttcccgcagagcctgatgggagaatgtccagggcagggaaaccacattttttgtaggtgataactcaatgaaaattggtgcttattttttacacttctctcttgtggctctcttgtggtgctatctgttttaaggtctccttgaaggcgcactggggtccctggccatgcctcgttctccctgctttctttatcctgttattgcctccacagtctgttgccaaggactctaagatcaatgcacgtcactttcctttccactgggcaggatagccaagcacactccctcctgcgctctcccgccccggtgcgtccactcccgagggctgttatgaggactgggttgtgcctacttgatttgaaaacacacacaagcaataaaaagcctcttcctgcattgtctgtggtgtgaccatagcagattatatttggttcctgaatgtttgtggtgctaatttctgtgtttgttccaagccattcagtcatgccatgcgctgcctcggtagatggagtaatgtacaatgaactccatgagtctctccagggctgcctgcagcacgtcttttccaagtagcctatttggattcccatctcaaatgtcctggatgcgagcgtcagtcattccagagctcggggcgggtgaggtnccctttggganacccttttcctgggccatcgaggtcggggngcttgccgtctgtgggcaggaggaccc

SEQ ID NO: 320727 - DNA, 1529 bp, Homo Sapiens
  misc_feature (1210)..(1233): n is a, c, g, or t
  misc_feature (1338)..(1379): n is a, c, g, or t
  misc_feature (1412)..(1412): n is a, c, g, or t
ggggaagaagagcgtggccggccgcggccaccgctggccccagggaaagccgagcggccaccgagccggcagagacccaccgagcggcggcggagggagcagcgccggggcgcacgagggcaccatggcccagacgcccgccttcgacaagcccaaagtagaactgcatgtccacctagacggatccatcaagcctgaaaccatcttatactatggcaggaggagagggatcgccctcccagctaacacagcagaggggctgctgaacgtcattggcatggacaagccgctcacccttccagacttcctggccaagtttgactactacatgcctgctatcgcgggctgccgggaggctatcaaaaggatcgcctatgagtttgtagagatgaaggccaaagagggcgtggtgtatgtggaggtgcggtacagtccgcacctgctggccaactccaaagtggagccaatcccctggaaccaggctgaaggggacctcccccccgacgaggtggtggccctagtgggccaggcctgcaggagggggagcgagacttcggggtcaaggcccggtccatcctgtgctgcatgcgccacagcccaactggtcccccaaggtggtggagctgtgtaagaagtaccagcagcagaccgtggtagccattgacctggctggagatgagaccatcccaggaagcagcctcttgcctggacatgtccaggcctaccaggaggctgtgaagagcggcattcaccgtactgtccacgccggggaggtgggctcggccgaagtagtaaaagaggctgtggacatactcaagacagagcggctgggacacggctaccacaccctgggaagagcaggccctttataacaggctgcgggaggaaaacatgcacttcgagatctgcccctggtccaggtacctcactggtgtctggaagccggacacggagcatgcagtcattcggctcaaaaatgaccaggctaactactcgctcaacacagatgacccgctcatcttcacgtccaccctggacactgattaccagatgaccaaacgggacatgggctttactgaagaggagcttaaaaggccgaacatcaatgcggacaaatctagtttcctcccagaagatgaacagagggagtttttcggcctgctccacctagtccatggcatgctccccctccccctccgcgggcacgcannnnnnnnnnnnnnnnnnnnnnnnttccgtcacccctcttattcgttggcctattttctcccgtacccccgctcgtgttccgcacacccgtgcccgacctatattcctcttgcgcgcgagtacggcggnnnnnnnnnnnnnnnnnnnnnnnnnnnnnnnnnnnnnnnnnngcgttaacggccgcctgcgcggcgcgccacgcngccaccgccatttcggaccacggtaggcagcccgcgcttatccaccgctctctgattcgcggtcactgcccttacccccgcccctcgcgcgcgtattgcgaagtaaattgcacactt

SEQ ID NO: 320728 - DNA, 966 bp, Homo Sapiens
  misc_feature (107)..(123): n is a, c, g, or t
gggtaccggtccggaattacgggatatcgtcgaccacgcgtccgctgtagttgttgcagagcaaatacaaatgtaataagatagctaggcctgcagaaacaaacagnnnnnnnnnnnnnnnnntgatataagagctggagtctagtatttatatgaatctgtgagagataatttttttggtctcactgcaatgaaccaaaagcggctgagtttggtttttaattgtagccatgtattgaaggcatctttttgaccaactcttgttggttctgtcttgaaccattgttaatcactgtgctgtaattagtatagctaaatcttttccttccttgctcctcccccagcccaccccgtcttcccttaacattttttcagggggggttgggagtggtttcattttagtgtgagtggatgttttgatagttgtaaggaaaaaatgcatttcagacacatttcacacatgagctattttcttacacagtatgtcttattgttaataagaatgtaatttcatgatacaagtatttaataccttttttaagtcagtaaatattctagccatcaataaattgcagtagagtattaagaggggacaggatgagtttactcttaaaattaatcagtatcaaactaagtctactgtgtgtgtattggtgggcgggtgtactattttagaagttagtctttttaacttggcttcggattcccagttttattacaaaaatagatgaatccaggtggtggaatgctggcggtgccccggtttgccacatgggcgaaaagtcgccagtgtgctacagtggaagggggtgacgtgtggttcaccaaaaccaatttagtaggctacctgtctgacggtgggcctcaagaatcgtagacaagtcgtacgacgatcgcgataggtacaacatcatgtgcaacacacatgtcatagcgccatcttgtcatcttcaaacctattgtcca

SEQ ID NO: 320729 - DNA, 556 bp, Homo Sapiens
tcgatcatgcggaagttgttgacaggcttgtctcccactgtgaactccaccgtggctcccacctgcctcaggcggaggaaggcaggcgtgaactggtagcggacaaagcgcccagcattggggtccaggtcccgccggttgatgggcaaccgttctgagactgggggcttcttgatttcaaagaggacagtgcctgagtccatgtcccgaatcttaaacctgacaaagtcgatcttgtagatattctcctcaggggagcagaggtagtcaccggtgatccgctgcagccccagcacgtcctccggcccgatcggctgcttcctctgcagcggccccggcctgggccctgggcctgcgtccggctccgactcggacccagattcggattccgcaggcggctgtggtatgggggccacgctctggcccgagggccccggagcggactccgtcgccgtcccggccccaccgccgcccttcttcaccttcatggccttgcggggccgaggctcgcctgctgctgccgccgctgcctgcgccggctggagccgggggaagt

SEQ ID NO: 320730 - DNA, 1327 bp, Homo Sapiens
ttttaaggccccgggaatggggaggatgaattttggaggtttctggggggaggaaggttttcaacccgggtttttccccaggggaatgggcccccaggtccaggttggggggggaaatgttattgagttcaaaagcttaaggtcctggcttcccgcctcctttgggggattttggccctgaaattttatcttgtaaactccttattgtgttaaggtaaggggaggcaacttttgcttgcaatagagagagaagattttgttggtcagcttcagaacttatatccaataagctatcagcacctgtagtactgtcacttagtctgtctttgttttctcgtatagaactgatctcagccttgaagggtggttcagcaaaaaataccgattcctttcccgatagtggagtcgaagttattgatcttggggaagagacatcactcaactgctttggttttgttggggtctttaaatcagcatcctgagagatttttgataatagaaggctttgaattcctgcattttctgagagtttggaataatgtaaggcattgtatccaagagaatctacaaggtttaggtctgcaccctttttaattaaggcttccacagcgttagagctgccaatctcacaggccagcatgagagcagttcttccacttttgttcctggaattgacatctgctccatgatccaggagaaagtgacagatctcactgtgaccattttgtacagcaagaagcagtggtatattcccatccaaatctttgaggtttatggggctcttgtgttcgcagagaatctgcacagcttgaaggcagccctgagccgctgcataatgtaaagctgttttcccagagctgtcgacactttcggctgggcatttagactgaagcagcttcctgatgcattcatggtggctgttcttggctgcgagatgtaaggcgctgtgtccggtagtatcttgggctgtcacatccacaccatgtgtaatcatgaccctgaggcattccacgtgtccttttgcagcagcaagatggaaagcggtcttgccctcactgtcgtgtttggtggcactggcccccttcttgccgagcagtgaggccaccttctccgcatctccattctccacggcctgcagtagccggtcatcattcttgttccactcattggtgtcactcttcctgaacttcgctttcaagctcttcatgtttagtgcattcagccttccaaagctctagaggagacttttcaacaccccatcgaggcggcggcggcgctccccggacccagctggctgctccaccccgcccgccgcttccccaggaaa

SEQ ID NO: 320731 - DNA, 993 bp, Homo Sapiens
ggtaccggtccggaatccccgggatatcgtcgacccacgcgtccgacctcccttctcttctgaattctccattctgggctcttgcctgtgaaatctttctttgctttccccatcttttcctcgcattttttcaccatctttccctcaatctccaggagccaatgcgagactttggctccgattaagcgacggcccgagactcggggtgcgcgaggaggatcgacagagtggtgatggagagcaccccttcaaggggactgaaccgagtacacctacaatgcaggaatctgcaggaattcttagggggcctgagccctggggtattggaccgattgtatgggcaccctgccacatgtctggctgtcttcagggagctcccatccttggctaagaactgggtgatgcggatgctctttctggagcagcctttgccacaggctgctgtagctctgtgggtaaagaaggaattcagcaaggctcaggaggaaagtacagggctgctgagcggcctccggatctggcacacacagctgctcccaggcgggctccagggcctcatcctcaaccccattttccgccagaacctccgcattgcccttctgggtggggggaaggcctggtctgatgacacaagtcagcttgggaccagacaagcatgcccgggacgttccctcccttgacaagtacgccgaggagcgatgggaggtggtcttgcacttcatggtgggctcccccagtgcagctgtcagccaggacttggtcagctcctcagccaggctgggctcatgaagagtactgaacctggagaggcgccctgcatttacttcccgctggcttccagtttctgttgctggacaccccggctcagctctggtactttatgttgcagtatttgcagacaggcccagagccggggcatggacctgggtaaagattctctccttcctccttccaggtcacttctctattctggggaaggattaattcgggggg

SEQ ID NO: 320732 - DNA, 758 bp, Homo Sapiens
  misc_feature (111)..(134): n is a, c, g, or t
  misc_feature (338)..(338): n is a, c, g, or t
  misc_feature (344)..(344): n is a, c, g, or t
ttttcaaagtttaaaagccaatcttagcatgtataatccttatgggattcttaagttttatcctatcttgtttttgctcaagaacgctttatcagtgacgtttgttagaannnnnnnnnnnnnnnnnnnnnnnnaaattgtttttgggctagaaatgagtttctctagttttatttgttctccctgagttggagttatgcaatgaatggcatttttgtggtaaaatactaatcctaaaatctgttaactcactgttcatttaagtagggaatatctgtatacattaatgactaggtaaaacaggaaatacattttgaatatacagcctaaaggcaggncagttnacagggtttttgatttctccgattttatagggtgcaagttcccagtggcaggatgccctgctgtgtgactgactacactgtgtcctgagcagtggtaatttcaatcacctctcatcagtttggccagccctacaaccaccattcctagccctgtgttgcttgacaggatacctgtgcttgaatggacataaggaaaagtccttactttctccccaatttacctctcaatcttagttcttccagaacacacttccctttcacaatgcaaataaactgaaagtgagatttgatacatggaattttgagaccaaccaactaaccttacacataatttgagggattcctggattcttctagtgatactgaaaagcacacttgactaaagcatagtgttttttgtttgttatggaaata

SEQ ID NO: 320733 - DNA, 1705 bp, Homo Sapiens
  misc_feature (158)..(170): n is a, c, g, or t
  misc_feature (186)..(186): n is a, c, g, or t
  misc_feature (418)..(438): n is a, c, g, or t
cccctttgatttgtccaaaggggtgttttccatatgggaaaaaaaacaggggcccccccgttaaggaaaacccgcaggaggcctctcttctagaaaggtttccccccctggggaggaaagaatgcccaccccttccccatggggggaggccagggagnnnnnnnnnnnnnacaatacctttggcgnccggggcccctgccccaagaggctcattttttccaagggcagcccccgggctttttccaggggttctttgtggggccctgggggtccaggttgtcttgcttccacgccttatggggcgggggggcttcttcgttttgggaggggccccgctttcaggggtgggccctggcaattttccttcccacccaagggcttgggtggccccagggagttgtttgtgaaaacaggccgnnnnnnnnnnnnnnnnnnnnnaggagggccagaaaagcggcccagttatgtcaaaggacaagttgggggatccactcgccatggacccgctcaaagcactcctccttcttgccccgccggggtattgtagagatgaatattactgccactggccaaggccaagacctgggcgttgggggagagggccaggcggcacggcgcggcacccgccgcctcttcaaagcggcctgtcttcagcaagtaggggtcctgcttcttcttgtattgcacatctgtgtcccacagtttccatgtaccatccttggagacagaagccatcctccgtgagtcgttggagaaagcaaacgagtgcccagccgcggagtggccctttagttcgaaggctcgcaccacctcctggaactccccctttttccaaagcagacttccccaaccttcacatctggggtgaagccacacgaggctacaaatctgccacagggagatacagcagcgtgtgtgttgttcatctggttggtgttgatggtagacagcacttgacccttcaggctccagatgaggacagtggtgtcactggaggcagtcatgataaacttccctgtgttagcaatgccaatgtcgatgacaggcgccttgtgctttttagggaagtcctctggggtggctgtgaaggtgtagcccccatcctcccgcttggtcatcttgaagacacggagggtgtccccgttggccagccagacgatgaaggctctgcagtcagggctgaagcgcaccagggtggcgtggtccagctccacgttggctctcatgctgcggtgctctcgctgcaggaagtccttggtgctccagatgcggatggtgcgatcatctgcacaggtagccaggtatttgccattgctgctaaagtccatgcaagatatgttcccgctgtggctcttcagagctgcagccaggaggcggtgggtgaagttgtgttgttgaggcttctccttccgaatccgctgatattgtttctgcttcttggatcccgaagatttgtcaggtggaaatccatttgctttttggcaggcgggccggccgctcctctcctcccccgcgcgcagccacccccgcgctaccgccgccgtcgccatcagggccagcagcccaagcaacaccgacagccccatgagctccgacatctgcgagagctccatgttggtggaaccaccctcgtgccgaattcgccacccgggcggcgggcgggggtgggtggcggtgtcggcgtcgtagaggatgggcacgttcg

SEQ ID NO: 320734 - DNA, 1669 bp, Homo Sapiens
  misc_feature (27)..(27): n is a, c, g, or t
  misc_feature (53)..(62): n is a, c, g, or t
cccgggaacccatcccaaaagccgccntccccagctccagggaacaggaacgnnnnnnnnnnaggccatgggccgccgccaagggtctgggtaaaacacgtgggatgataggaaggctgaagagggcctaggggtgcgggcggggtaaaggtgaaggggcaaaggattcgtcagaaaacgtgattttaaaacgagccagattcatccatttccctccttacagtagtagcagctcgcaggtcacaggttctgacagaagaacctgggtgctggggctacgcacaccctgctctggccgtgcactccacagcctcgcacaggtacctaaggggggtttttcctcaggctccccccgagcgcccaccgtgaaagacagaagcgtgcggagttactccagcgtgggggcaacgctgcccactcacaacacatctgttgcatggcaggggagcgggaagagaagacttatagggcagccctccagccaggcttccacctcggggccgctgtcctacagtgcacacacgtggggctcccgccggggaggaagacacacagtggcccctttcatacaagacacagggaggagcatggcaccggcacaacctcccagggtggctcctaactccaaggccgccgctgtcccaccgaggggcctgcaggtgtgcctaactgacgcttttctcagactgccaggccgtgccagcctctctgagaccgagcatctgtgtgtgcggcgctggagaaggcggccaggagtggaggaggaagcagggcaccgaccacagagtggcaggggtgacgaggaacattcctgagcacccaggtagaagccaggcacctctccccgttatgactttcagttcataactgtctgtggtttaacaggaccccaaggctcctgtctcccgccctgaatcctcagtgtaaatgagcaggtattgtttggttctgacccttcctaattctttccccaaagccccctgaagcagtcatcttggccaggcggggtgtgggagggagctgcgggcggggcaggactcgctgcctggctggagctccccaggccagcaggtgtgcaggactgtgagccaggcctgtgccctggctgacgggctcatccctgacactgctggccattaattctgaaggcccagcgtgcagggctcagatcacaatgaagccaatactagcgtgtgacagctgcctggcatcattggtctgccctgtcgccagggggcagcggtattgctggctcacacagagctatggggtatgtcttatattccttagagaaaagaaatttaatgtaaaaagacccaaagtgatatctgtcaaaataagtaaccgctccaggttcacagatacgcacagcacgcaaggtggattctgacgcacagtagggactctcaggctgacgcccaacagggatgccggggccgaggccggtggtctggaggaagccccccagctggccacagcagtagcaccaactggctgatcgggctccaggggacaaaggccacctcctccctctgtgagaaactggccccaccgggctctggccccttctccggaagctgcgaacggctttgtggggaatatacaagatgacgatgatctacagaaaccatagggaactgaccgtacattctttctctatatagcttta

SEQ ID NO: 320735 - DNA, 403 bp, Homo Sapiens
  misc_feature (12)..(12): n is a, c, g, or t
  misc_feature (77)..(77): n is a, c, g, or t
aacatggcaacnggcaaaaaccttcccagggtggctcccctaaattccaaagccggccgctgtccccaccgaagggncctgcaagttgtgccctaaactgaacgcttttcctcaaaagtgcccaggccgtgccaagcctctctgagactgagcatctgtgtgtgcggcgctggaagaaggcggcccaggagtggaggaggaagcagggcaccgaaccacagagtggcaggggtgacgaggaacattcctgagcacccaggtagaagccaggcacctctccccgttatgactttcagttcataactgtctgtggtttaacaggaccccaaggctcctgtctcccgccctgaatcctcagtgtaaatgagcaggtattgtttggttctgacccttcctaattctt

SEQ ID NO: 320736 - DNA, 1137 bp, Homo Sapiens
tttttttaaaatccccttggggggcccccggagattttaagaaaaaaatacctttccgggcccccttttccccccttccaatggatttgaacccagggaagggggagttccagatttctaggttttttcttgaaggaatccaaggttccagaattagtacctttaaagggcatccaaaattccatatgctcaaaagttaaattttatttaccctgttcactggcccaaacttaaaatccttatatcacataaagatttcatggaccgttccctctccctgccaaaaatacgtattaggaacaaattaagagtaagagttgggttttaaactgcactttatttgttactgtaacattcttttttaactgatcaaccataagcatgcaaaaagttctctgaaactgcttccactgcctgttgtatagaaatgggtaaattataaaggtgattcaatttggagctctttccttttttatagcacttctaagctgtgtgcgcgacacacaccacagaggtaggaaggaccacctttaataaattatcttcttaatcgcagagaatttctgaagataaaactgacaaaatgctaaaccaaggctttgatgagtcccaaaggaccacagatccatcggctcctatttgaagaattcatcccctgtagtgttctagcctttgtagggcactggattacaagatccaccagggctctgaacaactgcgctaagaagccttctaaccactctcatttgccgattctttggaccacccagtcctgctggcagagagggcagcgattgttctgtttcacccacagggacatgcagcagttgtggaaggaatgattacattctccccagaccacaacacagtcctcttgtttgttttcagcttgacatctaagacaggcatccatcacctggaccctgcagatggcgcacgtatcgcactccacgtcccagctccacatggccaccgcgttccacttcttgagggagaacatcttgtcgcctcccgacttggagcctgagctcccggagtgagaggccagggcgcaggtttcctctccgtcttccacgtcggccatggcggcgccgcggagccctcgtgccgaattcgccacccaggcctcgctacctt

SEQ ID NO: 320737 - DNA, 802 bp, Homo Sapiens
tccaggcgggcgatcagctctctctgctcagtggctgtggccacagcctcagtgatacggacttgcagctccgcacagcgtccgctcaggtcgctgttggagatgcgcagcgcggcgttctcggactgcagcgagcggttcttctccagcaacagcacctccaggggcttggccgcatcctgtgtcccagcgccctcggatggtgcaaactccatggacttcagaatgttcagctctttcttcacctcttcatagtcagcctggcctttgagtttttcttccagttgtttgagtgtgctgtttttggcgctcagctgctgctcaagctgtgagatctggctggccgaattctcccgcagcttggtgaggctggcctggagtctctgcacgtcctccaccagctgtgcgatctcccgctccttggcggccaactcaacttctaggctggagcgggtcagcacctctatggcctgctccacgtctggtgccttctggatctgtgaggccagctggagggagtgattggccgatgagagctgttcccttaaggtctccgcctctctctgagccacctctgccctctggtttgccctttcaaggtccgtcatgatcatttcaatctcgtcggcctttgcagtagtttcttcatcgtatttggttttcaggtcaaataattctgttcgagttttttccagggctgtttgtaggctctgaaccttatgctcagcttcctccagctttgaggtggtggacatctgtgtctcctgcagctttctctccttttctgcaaagtcattctgta

SEQ ID NO: 320738 - DNA, 1172 bp, Homo Sapiens
aaacctttacgtagcggacggatgcttaattccgacagtatggtgctgctgcacgtttcgaggatgtgggcacaccggttccttgcccccgtgttgatctcgtcgccctagcgtgtcccatttcccggatcaagtgttcgctcacccctgtgattctttgaaggttcctagtattatggccgccaagtggtccaccagccgaccggcagtaaaagtttacacagtttctttagttccacttgttttccttgcccagttaaaagtgaaccagtgagaattaaatacgttatcgtttacatatacacaaggtatgctatgaaaagcatatctgcttacaaacatataaaaatacttgttaactagtttgataagaaaaataatgtataaaaagtatatagcaaaaacattaatcatctctgaccctggaaagatcaattccatattttatattacaaacaaaaacagttttagttttttgaatccctttacccagaaatacttgaaaaggaagacagaaggaaattattcctttttacccttagcgtggctgtgaaaaagagttaaattaaaaaatcaagtacactgaaatatctaagtcctaaatgagtccaaatatttgaccacatagaatattatcatctccaagagtaggagtagtaacacagggttttataagcagtttttaatccataaatacaacaggcatttggtattttggccatcagaaaacaaaagttgtagtatcagtaaaggtctgagatggttcacttttgtagattcaattcagtgtatttaaggttaacaaaggctgacattgaaatgtttaaagataggcaaaaattcacattaaaaaaaaccctatatttctatttagagtaacagtaggcagtatgattccaaaagttaaaaattatttcacaacctgtagcttcagcttggcaaacagcttagattccaaactgattcatctctattaaaatgtaagcacttaaaaaaagagcatgtctgtgtatatagacatatattttaaaggaatcagataatctttgaagcagccttagtgtttcctttatatttgtctggaaatgaccattgtattagcttcacagaaaggactagccagcttcttcgacgcgtgggtcgacgatatcccggaattccggaccgtacca

SEQ ID NO: 320739 - DNA, 785 bp, Homo Sapiens
gaagtagggctgagaatggtcagttctggtctacttggtttaggctttggagactcacaagaattaatgaaattcatgataaaaggttccaaatgctgacctttctctttcattagttttccaggaacagattttataattttcccaagatttacatctggtagtatcttatcaagaaattgtgtttccccaccattaggggaaagaaagtctgccagaagttgactattactcagttctggatgctgcagaagtttctgtagatattcttggaactcttccctctttgactttaagaattcataatttttggggccaatgatcctcttagaaggaagctgggcatcaggaaatgcaccatgaaattctgttagttttgattcaagtacatagaattcaagatatcttctatagacagaccaatgttcaggctcgtgtccaactgctcttctatcatttctttcaacatcaatacaaaacacaggaattctttcttttttctccttcctttcagaggagggatcctcaaaaaagtctacatatggaatgctaattttccatgcagcaaggtttcggggagtattaggtgtgctcacagcctccactggagaatcatcttccattacaacaataccttcttcaataaaatcatcttcaccttcagctacaccataattaggcaacatagctccctccattgtggtacttttgaatactcctttaattttgctacctattctgctgattccaaatgattctccccttttctgtgtgttcctgttcat

SEQ ID NO: 320740 - DNA, 557 bp, Homo Sapiens
attcggcagagggcgcttcgacgggctgggctgtgcgcctgcgcagtgtgggtcgctcccgattccctgccccggccggccccgcctcggctccgcaccctcgccccgctctcagccgccgctctgccccgcagcagccagccccgtgtccggcagtatgttcagctgggtcagcaaggatgcccgccgcaagaaggagccggagctcttccagacggtggccgaggggctgcggcagctgtacgcgcagaagctgctacccctggaggagcactaccgcttccacgagttccactcgcccgcgctggaggacgctgacttcgacaacaagcctatggtgctcctcgtggggcagtacagcacgggcaagaccaccttcatccgacacctgatcgagcaggacttcccggggatgcgcatcgggcccgagcccaccaccgactccttcatcgccgtcatgcacggccccactgagggcgtggtgccgggcaacgcgctcgtggtggacccgcggcgccccttccgcaagctcaacgcgtttggcaacgctttcctca

SEQ ID NO: 320741 - DNA, 1067 bp, Homo Sapiens
tgaagtaaatcaagaggtctcgttcttgatcttgtttcgtctctgcttcttttctgctctttgttttcatgtgttcggctgtcgtcctccgctgttgatagttctaggccatcggtagagaatccgtagctctgcggtcgtaagtcgtgtcggatatggcctggtgacagtatgcatttatgcttgacctctcggggtcttaggttctctcaggaccaacataggcccggtacacccgatcactgctggctctcgaacttggttcctttggttcagcataacgcggatgtggtcctcatggttgctcaagacccgtgatcacttccgagtactctatcgtatgatgtccagccttgtgggctggaagaatcagaattatgcggtccacacgctccgccgaaccacttccaggacggctgcaaagtcaatagcctctgcgtgatccgctggcttctctccagacaggatcccgggggctgtcgatgatgctgatgcgtgtccaggacggggttgggcagctgggcacaacattgaacctgttgagggaaagcgttgccaaacgcgttgagcttgcggaaggggcgccgcgggtccaccacgagccgcgtttgcccggcaccacgccctcagtggggccgtggcatgacggcgatgaaggagtcggtggtgggctcgggcccgatgcgcatccccgggaagtcctgctcgatcaggtgtcggatgaaggtgttcttgcccgtgctgtactgccccacgaggagcaccataggcttgttgtcgaagtcagcgtcctccagcgcgggcgagtggaactcgtggaagcggtagtgctcctccaggggtagcagcttctgcgcgtacagctgccgcagcccctcggccaccgtctggaagagctccggctccttcttgcggcgggcatccttgctgacccagctgaacatactgccggacacggggctggctgtctgcggggccgagcggcggctgagagcggggcgagggtgcggagcccgaggcgacgcgtgggtcgacgatatccctaggattggggaccgtaccatgcc

SEQ ID NO: 320742 - DNA, 1490 bp, Homo Sapiens
  misc_feature (817)..(817): n is a, c, g, or t
cctgccgcatgagattattttattaaaaaactcaaaggaagcagagtgtggagcggtatctgtcctgcgtgacgtctcacatcggagttggctcagaccctggctgtgcatccatcagaaagtgcaaggcccaggccatgagctggggaggaagcctggacagcttggacccgagcacagagggacgtgcagggtggctcatactcatactggaaggcagaaccatcacgatgcctctttgggggttcccagacagagcagggctcctgggctcccctggtagctccggtcctgggaaaaggcggccgattcttgcagggcaaccctacaaactccttgaactccaggctaggtttctggggcctggtcacaagagcctggtgtggactggggacatggctacggggtgagagactgggagtgcagctctggagtggggagctgggggtacggctggcgtgtggggacctgggggtcagggtggcaggggctgagcagatggctggtgagggctgggagctgcttctctgccctgggtctggagcagccaaggacagggcaggcagaaggctgatgctggtaccactttcctcggatgacatgtggccgggtaaaggccgggggttcctgaggaaactgggtgaggaaggaggagagggctatgagggtcagagataggtcctgcagagccggggtctggtgggggcagctcagggccctgtgtcctctgacaggggcctagagagctcagaattagctggtcattctcagagatgcacagcattgagctggggacagtgtacacagcttctcccgntggccttgcatcgtgaggcagcccagtgggtgacagggggtgctgtgcaagggccctccagtgtcaggcagctttcagccaggcacacgagtgccccctgatgctcctggtcctcccgcatttcatccagaagctgggacagtgataggcctgcattggacgaggtggactctgaaaggtgctcctcaaggcagtcatagagctttttctgaacatctaagtcttggttgcaaccaggcacccgtagccggggctgctccgtgggcagcaggctgaagcggtccacctggagatagaactctgcgggcgcgccgccctcagcgacctggacatgaaccccgcagtcctgcagcagcagcagccggccctctgtcccgcggaagccgaactccttctcctcccagtccgaggtgtccagggcctcccgcgtcaccaggcatcggacactgtgggtcccgtcagacacaagcagcgtggccccgacgtcggacgtatcaggggcgtgggatgggcccgcgaccgcggcctcggcgtcctgtagtacctcaagcagctgcccggctcgtggactggagggtgtctctgaccccagaatcagctcccgaatccagggccgtaggaccagcctccccgaacctgccatccccacggctacacccagcggatgcaacgg

SEQ ID NO: 320743 - DNA, 471 bp, Homo Sapiens
tggttgcaaccaggcacccgtagccggggctgctccgtgggcagcaggctgaagcggtccacctggagatagaactctgcgggctggacatgaaccccgcagtcctgcagcagcagcagccggccctctgtcccgcggaagccgaactccttctcctcccagtccgaggtgtccagggcctcccgcgtcaccaggcatcggacactgtgggtcccgtcagacacaagcagcgtggccccgacgtcggacgtatcaggggcgtgggatgggcccgcgaccgcggcctcggcgtcctgtagtacctcaagcagctgcccggctcgtggaatggagggtgtctctgaccccagaatcagctcccgaatccagggccgtaggaccagcctccccgaacctgccatccccacggctacacccagcggatgcaacgggcccgggtttcccgcgggcgcccaggccccgccttataat

SEQ ID NO: 320744 - DNA, 800 bp, Homo Sapiens
  misc_feature (444)..(471): n is a, c, g, or t
ctttcccgccccgcttttgttttccggggggggaagaaaatttattttgacaagggcggggcaaagggaggttgattcccgcctggtggattatagggtgcttccatgcccggtccgtggatgggcgttccacctcggcggggaaagatttatggaattacctacacctcttcctaaaatgagcaagcacggcggggtaatttattaatagagatcgccgggacgccctcttgataaatccagcaatgacctccgaactccatcttgaggagttcatcacaacgggctgccgccggggggtttttattggtggggatacaaccagcagtcatgaccaggatgttctaggaagcaactatgaccatgatcttctccttcctggggccgccgcccaacagaatggtgttgaaagattcttgaggagggaggcggcggacaacatgnnnnnnnnnnnnnnnnnnnnnnnnnnnnagccacatgaattaagcattttatttaattatcacggaccaccttaaatattactttacaaaattcaggcctatatttaaaataggtgtcctgataacttccaggatattattcggaacacccgtttccccaactacgataagtccattgccggatgctgaataaacttcgcccattaccacttggatttcttgatagtcttatgtttccatcatccatcgtaatgtgttcagctcagcttctttcacctaatcccgacgcttcccgaatgtgaaaggccgaggccttcggcacacgctctcttatagaactgatgacgctattccccc

SEQ ID NO: 320745 - DNA, 628 bp, Homo Sapiens
agagccacatgaattaagcattttatttaattatcacggaccaccttaaatattactttacaaaattcaggcctatatttaaaataggtgtcctgataacttccaggatattattcggaacacccgtttccccaactacgataagtccattgccggatgctgaataaacttcgcccattaccacttggatttcttgatagtcttatgtttccatcatccatcgtaatgtgttcagctcagcttccatctggctcaaactgacggttctcggggtgctagggcacaagagcgacagagtagactcaagatggccacatgacacagacggctgaacaggcttcaccggagtccccgagtgcacggaacctttccccgagggcccacggcccacgcacgccggggttcagggtccagggctgcacgtggacgcccggcgacctaatgagcactcaagtgccgcgcatgcttgtaaacttaagggtttccaaagccgcccccgacctaccaatatcctgactgcgctgccttttaggtaaggcagtaagtttcggcccaattatcattttaacttacgaaagacaactacgtactttcacctaatcccgacgcttcccgaatgtgaaagccc

SEQ ID NO: 320746 - DNA, 379 bp, Homo Sapiens
  misc_feature (98)..(98): n is a, c, g, or t
  misc_feature (300)..(300): n is a, c, g, or t
  misc_feature (352)..(352): n is a, c, g, or t
  misc_feature (361)..(361): n is a, c, g, or t
taattaagcattttatttaattatcacggaccaccttaaatattactttacaaaattcaggcctatatttaaaataggtgtcctgataacttccaggntattattcggaacacccgtttccccaactacgataagtccattgccggatgctgaataaacttcgcccattaccacttgggatttcttgatagtctgcaagaggaaaaaaagcattataaaactccgagctgtgtacttacctcactgtttttgagatcttatcaggctaattcagttgggttgttacctcaaactacaaanggccaggcaaaacggggccaacttttaggctttccaacgtcctggcccgctnagggttttncagatttaacctccggaa

SEQ ID NO: 320747 - DNA, 513 bp, Homo Sapiens
  misc_feature (22)..(22): n is a, c, g, or t
  misc_feature (44)..(44): n is a, c, g, or t
  misc_feature (53)..(53): n is a, c, g, or t
  misc_feature (71)..(71): n is a, c, g, or t
  misc_feature (106)..(106): n is a, c, g, or t
  misc_feature (282)..(282): n is a, c, g, or t
  misc_feature (363)..(363): n is a, c, g, or t
aataatgggaaaaacccgtttnccccaaactaggataaatccantgccgggangcctgaaataaaactcgncccattacccacttggaatttcttgaataatcttnatgtttcccatcaatcccatcgttaatgtgtttcagctcagcttcccatctggctcaaaactgacggttctcggggtgctagggcacaagagcgacagagtagactcaagatggccacatgacacagacggctgaacaggcttcaccggagtccccgagtgcacggaacctttccnccgagccacggcccacgcacgccggggttcagggtccagggctgcacgtggaagcccggcgacctaatgagcactcaagtnccgcgcatgcttgtaaacttaagggtttccaaagccgcccccgacctaccaatatcctgactcgctgccttttaggtaaggcagtaagtttcggcccaattatcattttaacttacgaaagacaactacgtactttcacctaatcccgac

SEQ ID NO: 320748 - DNA, 1270 bp, Homo Sapiens
tgggagatgaggccgcgaggtctcccgccgctcctggtggtgctcctgggctgctgggcctccgtgagcgcccagaccgatgccaccccggcggtgacgacagagggcctcaactccaccgaggcagccctggccaccttcggaactttcccgtcgaccaggccccccgggactcccagggctccagggccctcctccggccccaggcctaccccagtcacggacgttgctgttctctgtgtctgtgacttatccccagcacagtgtgacatcaactgctgctgtgatcccgactgcagctccgtggatttcagtgtcttttctgcctgctcagttccagttgtcacgggcgacagccagttttgtagtcaaaaagcagtcatctattcattgaattttacagcaaacccacctcaaagagtatttgaacttgttgaccagattaatccatctattttctgcattcatattacaaactataaacctgcattatcctttattaatccagaagtacctgatgaaaacaattttgatacattgatgaaaacatctgatggttttacattgaatgctgaatcatatgtttccttcacaaccaaactggatattcctactgctgctaaatatgagtatggggttcctctgcagacttcagattcgtttctgagatttccttcgtccctgacatcatctctgtgcactgataataaccctgcagcgtttctggtgaaccaggctgttaagtgcaccagaaaaataaatttagaacagtgtgaagaaattgaagccctcagcatggctttttacagcagcccggaaattctgagggtacctgattcaagaaaaaaggtccctatcactgttcagtccatcgtcattcagtctctaaataaaacgctcacccgacgggaggacactgatgtgctgcagccgactctcgtcaacgctggacactttagcctttgcgtgaatgttgttcttgaggtaaagtacagcctcacatacacagatgcaggtgaagtcaccaaagctgatctctcattcggttctggggacagttagcagcgtagtggtcccactgcagcaaaagtttgaaattcatttttcttcaggaaaatacccagccagtccctctcagtggaaaccctggttaatgtcgtggggctcccattagctgctggattcagcctcaataggggtctggggattattccgaccacaaatagatatggacagcttactatttctcatagcacaactgagcaagacg

SEQ ID NO: 320749 - DNA, 966 bp, Homo Sapiens
  misc_feature (282)..(341): n is a, c, g, or t
catagagcttgcttactaccactggttcttcctcttgggctttcagcccagactccaagcagctgctatcaaccctctctcccttcatctcttagccttgcttatttttattttgggaccgagctgcccactagatgactctgcttttccctgcatttggggctaaggtgccaggtacttatttgcacagggagcaggagcagcaaaaaatctctggttctccagagcactcgtcctctctttggaggggttattaggtagggagaaatgtagatactttgnnnnnnnnnnnnnnnnnnnnnnnnnnnnnnnnnnnnnnnnnnnnnnnnnnnnnnnnnnnngattaactagtcgttgatgaagccgaggggctgattatgctgccgtgctaagatgcggccaactccgtgcgtgatcgagacgcgtcacccctcgtctccataacgacgagggtagagaaaagtcgtaagtagtatgctttcttccaacaacgaccagtcttccgctggtgccctatgcagctgctgcggcgacgccctgaggagagtactaaggcgtgggcgcatcccgcgtgggcaccagaggcactcgccggtgggggagcagcagattctaatggtggacctcaggggctgctcgtaggggctggcagctggagccggggacagcatctacctctatgaagaaacgctcagcgcggagcgaagaagacaggtagctgcgatctaaagaagcggcagaacagagggggggcagtcggtggtcccccccaaggcagcaaatataccgcgaggccaaggcagaggaccaaaatcgctgagggaagaaggggcaggtggggctagatttactgcttgccccccgaggggcaggtccgaatggaacaataacatccattataattacccccaaaacactacaggaacttaagggaaaacgaagtggtggtctcaactatgggtcgcc

SEQ ID NO: 320750 - DNA, 179 bp, Homo Sapiens
gattgagctccctcttgcaatgtttctcaaattcatcacgattggaacataccgacggaattcattttctgtctgaagcaatgagtgctatacatgaaagttttcctcacatataatattcatcaagtttatttacagtataagctttccgatgctaagggctgagatgtgattaaagg

SEQ ID NO: 320751 - DNA, 757 bp, Homo Sapiens
  misc_feature (17)..(17): n is a, c, g, or t
  misc_feature (344)..(393): n is a, c, g, or t
  misc_feature (596)..(622): n is a, c, g, or t
  misc_feature (695)..(695): n is a, c, g, or t
cccctaaaaataagggnctcctttcctaaacatttatttggagtccttttatccaagttccttcctaatgaattttaggattattttggccttatttcatcaaggaagtttggtgtaagaacttgttacctaatgagtgcccctccttgtaagttcatatttcaagttacatggttcatgccataaataaaccacacttgctttaacatcgttcagaatggtacatttaacaattggacatacagcactgtaaacaattcaaagtccattgagcttaccatgaaagaactgaaacgtatgtaggaactgtgtcctgctgcagacaagcagctgctctggctttnnnnnnnnnnnnnnnnnnnnnnnnnnnnnnnnnnnnnnnnnnnnnnnnnnaagggagaattcctgaggccagtcacaattattgaagctaaattaatttcttcctgacactttagcattaattctaagtagttctaagttctaaaccattaactgtatagttaatttttttaaatcaaagaagaaaaaggctttcacacagatgaatgtataggaaaacacaagtaatgacaattttcaagagccttattgtnnnnnnnnnnnnnnnnnnnnnnnnnnngacaattatttttggagttactgtctctaattcttaaaaagtaagtacagtgtctgtatctctaagttttagnctatacagcactaaatgtactttatgaatttggggtaggtaaagtttgtattttctcgtgcc

SEQ ID NO: 320752 - DNA, 1104 bp, Homo Sapiens
  misc_feature (162)..(162): n is a, c, g, or t
  misc_feature (174)..(174): n is a, c, g, or t
  misc_feature (514)..(514): n is a, c, g, or t
aaaaattatacagttaatggtttagaacttagaactacttagaattaatgctaaagtgtcaggaagaaattaatttagcttcaataattgtgactggcctcaggaattctcccttccacacctgcccacctcacctcacctcacctcaccgcaccgcaccgngaacggaacggnaccggcaccagagccagagcagctgcttgtctgcagcaggacacagttcctacatacgtttcagttctttcatggtaagctcaatggactttgaattgtttacagtgctgtatgtccaattgttaaatgtaccattctgaacgatgttaaagcaagtgtggtttatttatgggcatgaaccatgtaacttgaaatatgaacttacaaggaggggcactcattaggtaacaagttcttacaccaaacttccttgatgaaataagccaaaataatcctaaaattcattagaagaacttgataaacgactcaaataaatgttagaaagagcccataattttanggactcctataaaattcttccttgtttgttaatgctattaaaactcagattcaagggaaataccagcttccacttgagtcactttgaaatagttaattcaacagcaccatgttagaaatatattggcagccaagactctgaactctgcagaaacatttgtttcacccagacttcaaactctagccctgactatgatgcccctgtgtgcatttacaataaagactccaacggagggagcctgttggtgttaaattgtttacatttctttatacaaataatgtgctttcagtgccttagttacagctccctttctgtttcttgttccaaggattctgtagtatgtagtgtgtttcttaggtaaagtctctttttgctactgaaagggaaatggtctctaaacactggtcactgtagcaggtaaacactactctaacgtggagaaatgagcttcatgctgaggtagtggttgccttagagctgttatttatgctgtagaaaacgaaaatggttttgctacctgataagcttcagattagatatagccctaaagttatcctgtacctgcattaaattttcattttagaagagaa

SEQ ID NO: 320753 - DNA, 2639 bp, Homo Sapiens
ttttagagttgtaggcaaatgtttaattctgctcatatgcacatctgaaagcatgagacacactccacagacagcacgcactggagctggtggggcagatgggcactcgccgattaggtattaatgtcaataatacgtgcataaagtgctgataaaataacttaagtgttacaaaaactgacagtccacggtggctgcaggcacatgcaggcgggactgggtcagacactccagggctgcacatgttccagctggcctgagtccgacacgtcatagctggccttgtacttggccaggattttcatgaggggccgtagcttgagccaccactgttctttgggaatcctgtgctcaaaatccgtttgcttcttcagctctgccacaggttgaaaaataacgtttcttttgcttattcccagcacacaaatggaatcatcggtggtaaatttttttcctctgccccgggcctccttgagttttgcagtgatccactccatagctctggcagagattttggttccaaagtttctatcaaatggagagggtgccccaccctgctgcatgtgacccagcacgttcttcctgcagtcaaacacgcctttgccctcttctgaatacagctggtaaatgaagtcggtggtgtagttttcactgcagctctcatttctgagcacaaggcctctctggatggtggtcttcattttctccgtcaggtgctccacgttggactgcagatccctgatgtcgaagggctcttcgaaaatgtatgcggcatcagctccggccgcgagcccccccatgttggccaggtagccacagtagccgcccatggtctcgatgatgaacacgcgccgcttggttccgctggcggactgcttgatgcggtcgcaggtgtcggtgatagtgttcagggcggtgtctgccccgatgctgaaatcggaacccggcacattgttggacacagtagcgggaaccatgaccatggggacacagaactcctcgtgcttctcccgggcggctgacagctccaggagtcccaggtaggcctcgaatccaccgatgatcagcagcgcgttgatgctgtgcgtgcgcatctgtgtggcgatctcttccaagtacttccccgggagaacgcgttttgtcccaagaatggagcctccttggccggtccagcccccgacatctgtccagccgatttctttgatctggcccttggcaaagccgtcaaagccatcatagatggcgagcatcctgtggccgtcggcaatgcccacgcgcacagctgagcgtacggctgcgttcatcccagccgcgggtgcccccacgttgatgacagctacgttgcaattggtctttgggatctgatcatccggcagcttgatggcaagtcgcttgtaggtgttcaggttgcccgcaaagctcctccctcggagtcgaaccgcatcttgaaatctcctctcgtccatcgccttctgcacatcctgagtcatctgcacgcactccatcagcggcaggcgcacggcgtggttcccgttcagtgacacgacgcaagctggggtgtccggggtggcctctagcaaggcgatgactgcctccactcccatgcggctggccaagatcctgtcgaatgccgaaggggtccctcctctctgcacgtgcccgaggatggtcacacgtgtgtcatagcccagctgcgtgacgacaagctctttgattttctcagaggtgatgggtttattttgggtatcaattgctccttcagccacaataataatattcagcctttttttccggggcacggttctccgagagtttgacacacatctgctcctcccagccttcctctggtggagattctggaaggaacacccagtccgcaccgcaggccaaggcactcaccagggccaggtacccacagtgtcgtcccatcacctccagaacgaaggtcctctggtggctctgggccgtggtcatgatggcgtcgacgacctcgatgatcctgtgcagggcggagtccgtgccgatggtcatgtcggtgccgcagaaatcattgtcgatggagcccaccatgcccaccacgttgaggtaggcgtacttctgcacggcctccttatcgatctggccgttcctggccagctcctccagcagcccactccactccttccggaagaggttggccccggtgaggctcccgtccccgccgatcacacacaggttggtgatgccgcgctgcagcaggttgcaagcagccttcaggcggccttcccgcgtgcggaaggcctggcaccgcgcactgccaatgatcgtcccgcccacttgcaggatgctggagacactctcccagtcggcctctgcgatgtttgagcctccgtccaccatgccctggtagccctcgtagatgaagtacaccttggcccccacgtagatacccatgcgcaccacggcacggacggcagcgttcataccttgagcatccccgccgctggtcagcacgccgatggccttgccggccccggagaggtgctccaggaacttccgcaaggagcccttgggggcccgggagtcgtccgcgtccatggcgaggaggccgaggggagccgcacgtccgggatccggagaattccggaccggtccagccg

SEQ ID NO: 320754 - DNA, 995 bp, Homo Sapiens
  misc_feature (154)..(154): n is a, c, g, or t
  misc_feature (178)..(178): n is a, c, g, or t
aggtatggaagtaaagggggggcctccccttattggtaaagctcttggggaagggctgctttcaccttggggatcccagctttgaaaaagggactaggtttgccacccccagctgctgatttccatgatattctcaaaagtctcttttcatcanataaatatgtgtccataagtgcancaccatcctgtactcggtctactccttgtgaggtcaagggctgtacaagtgcatcctttagaagcgacagataatccatgtttacagtccttttgctggagtaagttctgagactcatatgcaaggccaggtcctgaacaatacgatcatgtttgcctgtagacgagtgcttccccagccagcttgggaaggtgggaaactgggtcatgtaccccctcatcaactctccaggaagaacactggcataaatggcctgcgcaggcagaagactccagttttgcttactccggatctggctgtccactaggtcaccatcgcatatgctgtctgctgctctgcttaaaagcatcaggtgctttttcatgtcaccccctgctgctacaggcttcacgtgtatgtaattttcctggacgaagaggggtgctattgaataatcatgaaaaaagagatctgacttgtccacaagtgacatgtgagcagtctcctctccagctgcaaacactttccgggcaacatcaaatgggcccattttgatatcctttttggctctgtgagaatcagctttggcctggtcataggttaatgctttacttcgtgcacaccacatactcagattatgtaaaacctgtctgatatcttgattggctcccaaaattatttcattcatagctggagggggaatctttaaaccttctttaaatgcaatagacatcatagcacccttaatctgttcaacccgaggtctttgaaaacgaagatcaaaacaataatgaaccagagagcgaatcttgggatgatttctatcattgcacataca

SEQ ID NO: 320755 - DNA, 511 bp, Homo Sapiens
attttcctgggaggggagagggtgcgaccaagccctggctccagctctagcgggtatctgcccaccatggccctggtgctgatcctccagctgctgaccctctggcctctgtgtcacacagacatcactccgtctgtccccccagcttcataccaccctaagccatggctgggagctcagccggctacagttgtgacccctggggtcaacgtgaccttgagatgccgggcaccccaacccgcttggagatttggacttttcaagcctggagagatcgctccccttctcttccgggatgtgtcctccgagctggcagaattctttctggaggaggtgactccagcccaagggggaagttaccgctgctgctaccgaaggccagactgggggccgggtgtctggtcccagcccagcgatgtcctggagctgctggttacagaggagctgccgcggccgtcgctggtggcgctgcccgggccggtggtgggtcctggcgccaacgtgagcctgc

SEQ ID NO: 320756 - DNA, 481 bp, Homo Sapiens
caaatcatgattttgatatcattattctaaggagttatctcaaaggcacaaaatatgaattctgcaagaaggctattttttattgtagtttgaatgggttaggaaaagcctcaatttttcactcttaagtccttcagtacatttttctttcatcttattacttatgcaagttaaggttctttggtaacagaattcttgcaactgtaaaataaaactacatagatgtaagaagtcatgtaaacggttaacaagcttaccaaggttagcaaaactttcattgtaaatcagtctgtactgagcaaataaaaatcattattagttgtataaacacaaattccattttgactttcaggatgtcatactacttctgtacctagcattttcagtccttatatttgcaatgttacacaaactgtactattttcttttatgtgcagtttgcatgagtaaaccatcagagaataaattctatctttaaatt

SEQ ID NO: 320757 - DNA, 897 bp, Homo Sapiens
  misc_feature (13)..(13): n is a, c, g, or t
  misc_feature (26)..(26): n is a, c, g, or t
  misc_feature (53)..(53): n is a, c, g, or t
  misc_feature (70)..(70): n is a, c, g, or t
  misc_feature (80)..(80): n is a, c, g, or t
  misc_feature (94)..(94): n is a, c, g, or t
  misc_feature (165)..(165): n is a, c, g, or t
  misc_feature (273)..(273): n is a, c, g, or t
  misc_feature (861)..(861): n is a, c, g, or t
ctacaacacaaanccccatccatttnatccaaggatacatcttaatgagaatnaaaagcttctgtatgcncatactgccnaatacatttaaaanaggcctaaattttaacaagtaggatcagacaaaattcatcagacaaaagatcataaattactttggccganaaaaatctttaaaaaaaatctggctcaacattctgcttgcaggtttctatatatacgtgtatatgtggtgagtgtgtatgtgtgcgtgtatatagagagagctttctnttgtttaaagggaatggagaacggtctagcccactttcccacagtcatgtaggaactacgatgttttttgcgagcaaaacaagaagtgcaaggtctgcattcccaccaactcgatgcaaagctccaagagcttcctgcaaagtaaagccagcacggagaatgcggtcaatatctgtggcaggaaaaatcaatggtggaagaatggcaggacttgatgatggatggctggtaggtggttcatattcaagtaatggcctcgaagcatcaggacagacattttctctggtttcaggcctgtctgttactgaaattctgtatgccctgacctaagtctttaaccaatatgaaattggatgacaaagacttagtttgctcagaagtctgattgagtgcatcctcctcacctgctaaaagtttgggtgaaatttctacacctaaggtgcagtgtaactgattggatgttttagctgaggttacagtgacagaacggttcttatttatggattccctagatttggggacaccttccttatcggttgacaggccatcacctagactcctgaagtttacattttctacagcttctcntccagtgtcagatgaagtacctgttaatttttctgt

SEQ ID NO: 320758 - DNA, 648 bp, Homo Sapiens
cctatgaagccaggaaaagctttctaacaaagtatttcaacaaacagccctatcccaccaggagagaaattgagaagctagcagccagtttatggttatggaagagtgacatcgcttcccattttagtaacaaaaggaagaagtgtgtccgtgattgtgaaaagtacaagcctggcgtgttgctggggtttaacatgaaagaattaaataaagtcaagcatgagatggattttgatgctgagtggctatttgaaaatcatgatgagaaggattccagagtcaatgctagtaagactgctgacaaaaagctcaaccttgggaaggaagatgacagttcctcagacagttttgaaaatttggaagaagaatccaatgaaagtggtagcccttttgaccctgtttttgaagttgaacctaaaatctctaacgataacccagaggaacatgtactgaaggtaattcctgaggatgcttcagaatctgaggagaagctagaccaaaaagaggatggttcaaaatacgaaactattcatttgactgaggaaccaaccaaactaatgcacaatgcctctgatagtgaggttgaccaagacgatgttgttgagtggaaagacggtgcttctccatctgagagtgggcctggatccc

SEQ ID NO: 320759 - DNA, 564 bp, Homo Sapiens
  misc_feature (13)..(13): n is a, c, g, or t
  misc_feature (471)..(479): n is a, c, g, or t
ggcacgagcctanctatattgtgggtagagtaacttctcagaaaaaaaggaaatgtctgtattggttggatgaaactccaccagagcacagcttagctggggcgagatgcatgtgaaggcaggcagtgcaagattccgcttcctttgtttgccaaatactagaaacacaaggaaatgcaagttacgctaaatggcagtaatactacccaactgcctttctgttcattttgtttgaaggaaattgttttgaccaaacagaaaattacttggaatggtgtgttttacagtctacctagaaaatagatggacaatatttttcaactgtatgagcacgtagataaccgagagaatgtgggccacctgtgtttcaagaagccactgatactggtttttgttaaacattggaagttcaggcaatggaataaatgtaggaacatacagaatgttgcactaatttggtagcctgggaannnnnnnnnattgtgcagtatgtatttaaattttgtctatgttaattaccagcatttacctttatttaaatgatggtaaggtggaatattgaat

SEQ ID NO: 320760 - DNA, 792 bp, Homo Sapiens
  misc_feature (695)..(695): n is a, c, g, or t
gggacttccgggggagcggcgcggcggcgcgggagttggttctaaagagtggtgagtcagaagagacgtcaggcagcaagcgacttgggccatggcctctgacctagacttctcacctccggaggtgcccgagcccactttcctggagaacctgctacggtacggactcttcctgggagccatcttccagctcatctgtgtgctggccatcatcgtacccattcccaagtcccacgaggcggaggctgaaccgtctgagcccagaagtgctgaggtgacgaggaagcccaaggctgctgttccttctgtgaacaagaggcccaagaaagagactaagaagaagcggtagaagaggaggcctgaggagctgggcgggcagggagagggtcttggggacagccctcctgggaatctacattgtgttcccccgcattccaggctcagggtctgaggaggctgtgacgccctatgaccgcagagatctagacagtcgtaacagtccccaggctccagctgggcaatccaccacttcctcttccttctgcttctgtgacggtttagagtcaagggggctgaagcacactgtgagcatagactgtattaggtttgttcagaagccgggtcagctcacagagtcacattttcttgcttagtcatgtgtcccctccttgagttgcccccctcccttgtgggtntgacagtacaattttgggagtccattgtcctaatggctgacaaggaacccccctctccccatttatttggtgcaccttccaagatcctcctggctga

SEQ ID NO: 320761 - DNA, 858 bp, Homo Sapiens
  misc_feature (843)..(843): n is a, c, g, or t
ccagatcaactttaatagtttgtacacagctctttgtgaacagcagacatctgatcaagcaactctcctcttgtataccttgctccatcaaaatagtaatattagaacatacatgttggctcgcacagatatggaaaatcttgttttaccaattcttgagattctgtatcatgttgaagaaaggaattcacaccatgtgtatatggcccttataatattgttgatccttacggaagatgatggcttcaacagatccattcatgaagtgatactaaaaaatattacttggtattcagaacgagttttaactgaaatctccttggggagtctcctgatcctggtggtaataagaaccattcaatacaacatgactaggacacgagacaagtaccttcacacaaattgtttggcagctttagaaaatatgtcggcacagtttcgttctctccatcagtatgctgcccagaggatcatcagtttattttctttgctgtctaaaaaacacaacaaagttctggaacaagccacacagtccttgagaggttcgctgagttctaatgatgttcctctaccagattatgcacaagacctaaatgtcattgaagaagtgattcgaatgatgttagagatcatcaactcctgcctgacaaattcccttcaccacaacccaaacttgggtatacgccctgctttacaaacgcgatctctttgaacaatttcggaactcatccttcatttcagggtataatggcaaaatattgatctgggtgatctccttctttaggcttcaaggttgctgcaagctgggagctgagctgttcagtgggacggggtcctgggatntcatttaagcaaggc

SEQ ID NO: 320762 - DNA, 1181 bp, Homo Sapiens
cctttcccctttccccccctttccccagccctatggggatttaaaggggctgagaagccaagaggcagcgggcccatggaaagcaggaagacctgggggtggcaggtggccactaacagcccagcagctccaggcgcagggcgatgcggttgtgccaggctacaggcaggatgcgcacatagcgagccaggatgggcgtctcaaacaagttcttcttgtgggagtggttgtcccagttgccagggaagatctgcagccactgatcgttaccgtagctccccgcaaccccaggcgttgaagttgccctgcttgtccagccgtgcataggaggggttccagctgaagagatgcaagccccaggtcttgtagctgctggaggccgtgatctgcttgtcagggatgctgttattcttcaggcccaggggattggcgcatccgttcagctcacagcccagtagctcaaagcgcagagtgcaggccgtgtggcagctcgtggggtacaatctcacgtactgagcctccacaggggtctcaaacaggttgacatgcaccgcgtttttgttccagttacccacaaactccttgtgttttttattaacatcatggatgaaatcgaattcgtgtccattaaggctgtaggccaccttgaaggccttcaggtactcatgactggccaagcggctggcaccctgcgtcaccacacctgttacccacatcctccgcagcaagttcacctggatccaggggttatcgtcattgctgctgggtgtccaggcattgaccatgcctgcgcggttcaggcgggccagctccgggacccaatgctgcaaacccaagaaggtcacacgcacagatgaggcggcgatctgtgagttggcaatgttcccattctccatgcccagtggctcgacacatttcgtctcacagtggttgcccgcgtagcccttaaggcacgtgcaggtgtacgaggggaagacatctcctcgcacttcttgggaaatctcctcgcataaaccaccgttgtggcaggggtttttggaacagatatccagggcgacgaggaggctgggggcgcagagcagcgcgccgcacagcgcggccagcaggcgggggctcggcatgctgcggggacgcgggcgctggaatgggcacgctgggctggtcagaccccgcggggttct

SEQ ID NO: 320763 - DNA, 1266 bp, Homo Sapiens
  misc_feature (738)..(738): n is a, c, g, or t
  misc_feature (746)..(746): n is a, c, g, or t
tttgaatagcaggtttttacatttattattgttgtgtatttcctcccctttttgcaatactatctacgctgagttatctattgccaactagcaccaattctccaaatcaaagtgtgtgaggaaaacacactcgtgcaatcctctttaacagaagatacaccaagtaacctgtctgtctacttctgttacccagaaataaaagaacttgaagggctgcttggctggaggggtccgggtgggagagcatcctgccctcagtcggaatccatggtgaacagctggatgtcctgtggattccagtacaggccgactgctgagttgtagacaagagaccagacatagggggataaaaaactcctcggggctgctcctcttccacatatttgaatttcaattctgggaaatttcttcagtctgtctttgggcagcgcaacgacgccttgcttaatgatttccaggacccgttccactgacagctcagctccagcttgcagcaaccttgagctaaagaaggagatcaccagatcaatattttgcattatatcctgaaatgaaggatgagttcgaaattgttcaaagagatcgcgtttgtaaagcagggcgtataccaagtttgggttgtggtgaagggaatttgtcaggcaggagttgatgatctctaacatcattcgaatcacttcttcaatgacatttaggtcttgtgcataatctggtagaggaacatcattagaactcagncgaacctntccacttcccccagagttcccagccctatggtgatttaaaggggctgagaagccaagaggcagcgggcccatggaaaagcaggaaagacttgggggtgggcaggtggccactaacagccccagcagttccagggcgcagggcgatgccggttgtgccaggctacaggcagggatgcgcacatagcgagccaggatgggcgtctcaaacaagttcttcttgtgggagtggttgtcccagttgccagggaagatcttactgctgccagtcctggggtcctggtactcagtccagttcgcactgtcattactgtaggcaaccttgtaggatgccacaaactggacagagccaaagttacgggccccctgggtgatgatgcctgtcacctccttcgaggagcccaggtccacctgcagccactgatcgttaccgtagctccccgcaacccaggcgttgaagttgccctgcttgtccagccgtgcataggaggggttccagctgaagagatgcaagccccaggtc

SEQ ID NO: 320764 - DNA, 534 bp, Homo Sapiens
  misc_feature (488)..(488): n is a, c, g, or t
  misc_feature (499)..(499): n is a, c, g, or t
ttttttagcaggtttttacatttattattgttgtgtatttcctcccctttttgcaatactatctacgctgagttatctattgccaactagcaccaattctccaaatcaaagtgtgtgaggaaaacacactcgtgcaatcctctttaacagaagatacaccaagtaacctgtctgtctacttctgttacccagaaataaaagaacttgaagggctgcttggctggaggggtccgggtgggagagcatcctgccctcagtcggaatccatggtgaacagctggatgtcctgtggattccagtacaggccgactgctgagttgtagacaagagaccagacataggggataaaaaactcctcgggctgctcctcttccacatatttgaatttcaattctggaaatttctgacagacaagccatgaaactgtgagaacccagaagctgcatacacaaaggcctggcattgcaaggactctgtccacctgacgntcggccagcgntttcagtctgtctttgggcagcgaaacgacgcctt

SEQ ID NO: 320765 - DNA, 260 bp, Homo Sapiens
  misc_feature (108)..(108): n is a, c, g, or t
aaagaagcagacctacatcgtttgcagacgagctggctacccgcatcaagggggatgccgtgggtcgagtggtcgaggatccgacaaccttaccctcaggagaagcanaaacttcgggaagacactcaaagagaagaaggaaaggagaactccttcggacgatgaagaggataacttattcgcaccccccaagctgaccgacgaggacttctcgccatatcggctccggaggtggcctgttcagtgggggcaaggggctc

SEQ ID NO: 320766 - DNA, 599 bp, Homo Sapiens
atccttatgtgaggaccacttgatccttatcactgcttttggcacactcctcatccaagagttgatcgcagaggcagagttccttgccaccagtccagtggaagtacaagccaactttgctctccaaatggcagcagtagctgagcaggccgccctgcattctctcctcataaacatgctgttctcaagtttgtcagaatccagagctctctactcattacccccttttccaaacaagcaagcaaagcatgctcttcctttgtttcccttaattgcctaaaacatctccatgctcatagctgttgactctctttgcctcctagttcctgttcctctggtgtaggatttctcagccctagcactgtaaacatgttgggctggataatcatctcttgtatgggctgtttgtgcattgtaggatgttgagcagcatccctggcttctacacactaagtgccagtgacactcttctcccctccccagctgtaaaacccaaatgtctgcggacattgccaaatgtctcctagggggcaaaatcacccctggttgagagtcactgctctatcatttattcactaaatactgctggtcagctgggt

SEQ ID NO: 320767 - DNA, 1218 bp, Homo Sapiens
  misc_feature (941)..(941): n is a, c, g, or t
  misc_feature (1157)..(1157): n is a, c, g, or t
gcttctcgccgccaaacacgttcagtccaaggccatcgaggcccggcacgcctccctcatgaagaggtggagccagcttctggccaactcagccgcccgcaagaagaagcttctggaggctcagagtcacttccgcaaggtggaggacctcttcctgaccttcgccaaaaaggcttctgccttcaacagctggtttgaaaatgcagaggaggacttaacagaccccgtgcgctgcaactccttggaagaaatcaaagctttgcgcgaggcccacgacgccttccgctcctccctcagctctgcccaggctgacttcaaccagctggccgagctggaccgccagatcaagagcttccgcgtagcctccaacccctacacctggtttaccatggaggccctggaggagacctggaggaacctacagaaaatcatcaaggagagggagctggagctgcagaaggaacagcggcggcaggaggagaacgacaagctgcgccaggagtttgcccagcacgccaacgccttccaccagtggatccaagagaccaggacatacctcctcgatgggtcctgtatggtggaagagtcggggaccctcgaatcccagcttgaagctaccaaacgcaagcaccaggaaatccgagccatgagaagtcagctcaaaaagatcgaggacctgggggccgccatggaggaggccctcatcctggacaacaagtacacggagcacagcaccgtgggcctcgcccagcagtgggaccagctggaccagctgggcatgcgcatgcagcacaacctggagcagcagatccaggccaggaacacaacaggtgtgactgaggaggccctcaaagaattcagcatgatgtttaaacactttgacaaggacaagtctggcaggctgaaccatcaggagttcaaatcttgcctgcgctccctgngctatgacctgcccatgggtggaggaaaggggaacctgaccctgagttcgaggcaatcctggacacggtggatccgaacagagatggccatgtctccttgccagaatacatggcctttcatgatcagccgcgaaactgagaacgtccagtccagccgaggaaattgagagcgcccttccgggcccctcagcctcagaggggaaagcctttacgttnaccccagggagggagcttcttaccagaaacctgtaccccggggaaccaagcccgaactaaa

SEQ ID NO: 320768 - DNA, 848 bp, Homo Sapiens
ccattacaaaacccatctctctttggatgaaatggtcggacatgccaacttggggatctgagtttgtgcttcagagcccgggctctggaaaacccagcaagagataaagggctaatacaagaatctgtacctccagccaccatcacatcagcatcaccatgggctataaatctaaatgagtctcccacagcatgagctcctgtggtacaggctgtggatactgcatgatttgggcccttgagtttatatcgaatgctgacctgcctgctgccatattgaccagaatcttagggacaaaaaatgggctaactttattgtaaccttttgtctgaaaattcaaagcagtttcagaaacaacttcaagaggaatcattcccatgccaattgcaacaccagtagccacttgatcagcttctgactgaggatgccagccagaatccttcatggctaattctgcagccccaatggccatgatggtgggagaagacatggacttgatatctgatttggacacaaagttttgttcattgaactgaccttcatcactacctcttggcacataagcagcaacactgcaagggatactcttatactcttcaccaaccagtgaaacaattccactctctcctccgataagacgatcccaaaccaggtgagttccaacaccaagaggagtcactaagccaatgcctgtaatgacaactcgcctatgcaatctggatattggcacagttccgaaaaacttccttttacttcttaactgttggcataatcttgaacatagaagacgagtgcttgtaattttcaggaaattttgcaggcagttggacatgattaagattcagatg

SEQ ID NO: 320769 - DNA, 1714 bp, Homo Sapiens
taatcaaaataacctatgaagatttatagaaaacacaccaggtaaggaagggttctttcaaagcaaccacaggaacagttacgataacttaaaaagaaatgctttccacactgaactgacagcgctgcagaccacgcctgagtggggacggcagccccaagcccaggggcaagcgcccacaggctggacccaggccaggcacacctggggagtctcttactgctgaaaacctcagccatctcacttcatgtacttatcctgctggtcagccaggattttggcggaggacttggcatcatagaaaagttcactgatctcttcgacatgctctttctcaatgctgtccttcccgttgattttagcaagcaagttggccggggtcagcagctgcactgagtacctcagtgtggtcttggtgccaatctcccccaggtggttcagtgcctcctcactgatgttgattccttccgtctgggcacggattttaatgatctgtttcatttcctgtggagtatacagcatggtccggattatcatcactcggtccagaaggtcaagagggatgccgtgaggggatgtgatgtcctcagtgcctctgatgacacagttgcctcggttggatgcaaagatgacgatgggagcgatagaagactccagggcgcggtgcaggtaggtgaagcactcaatgtccagcatgtggacctcatcaacaaacagcacacccgggaccagctcagcaatgccctggtcgatgtacttgttcaccaccttattaatctcccctcgaagtttgtctgtgatttctgtcttctttggcttcattagctggcccatcatggacaggatatcttgtccccctggggccgcgcattagccacatccaagtcatgcaaggtcacatcttggatgatttctttctttttgtgcacatccccttttggcaaggggacatactcttcagcttcaaggtcgaattctgtggcataggtatcacacctgccctgcctcttcacggccccactgttggcttcaaatgtaaatccacatctccaagcttttactcgcttctttttgcaacctttcaaaaatgctggggtcccagtttcaactgtttggttcctttggctgttttgagtcctatgatcacatggctaatggttttgccatatcctcccatgggattctctgtctcacacggagttagctctgtgacttcaccttcataaacttccttggtctcctttattcgcagcccaatggccctgcggaagttctccatcagcacctctgtcttcttgatctcagttgagtaaacttcactccccaccattgggcagaaggggaccttactacccagctcctgagcaatagccagagccagagctgtcttgccagttccaggaggtcctgccaacaagacagctcttccagccattttcttgcttttgattaattctactatgacgccacatgcctctcgcgcgttctcctggcccacaagccctgaggccgcctgcttggccaagccgctctcgtccagccccagccctttcacgtggctgtgggaggcgatgcgctgcgtcttcgtagtgctcttcacctcctcaatcttcattttgcagacgccgggagctaaaaccagcgtggaaaaccagcagctaggacagtgcgcccggcgcctgagttaccatgcggccgttactagggcaatttt

SEQ ID NO: 320770 - DNA, 996 bp, Homo Sapiens
gggggggcctgcttcaacaaaccagccccccgggggccagttcagcaatggccctggtggatgtacttgtcccccccctttattaatctccccctcgaagtttgtctgggatttcggtcttcttgggcttcattagctggcccatcatggccaggatatcttgtcccccccgggggccgcgcattagccacatccaagtcatgcaaggtcacatcttggatgatttctttctttttgtgcacatccccttttggcaaggggacatactcttcagcttcaaggtcgaattctgtggcataggtatcacacctgccctgcctcttcacggccccactgttggcttcaatgtaaatcacatctccagcttctactcgctctttctgcaaactttcaaaaatgctggggtccagtttcaactgtttggttcctttggctgttttgagtcctatgatcacatggctaatggttttgccatatcctcccatgggattctctgtctcacacggagttagctctgtgacttcaccttcataaacttccttggtctcctttattcgcagcccaatggccctgcggaagttctccatcagcacctctgtcttcttgatctcagttgagtaaacttcactccccaccattgggcagaaggggaccttactacccagctcctgagcaatagccagagccagagctgtcttgccagttccaggaggtcctgccaacaagacagctcttccagccattttcttgcttttgattaattctactatgacgccacatgcctctcgcgcgttctcctggcccacaagccctgaggccgcctgcttggccaagccgctctcgtccagccccagccctttcacgtggctgtgggaggcgatgcgctgcgtcttcgtagtgctcttcacctcctcaatcttcattttgcagacgccgggagctaaaaccagcgtggaaaaccagccctcgtccgaattgccacccaggcctcgctac

SEQ ID NO: 320771 - DNA, 408 bp, Homo Sapiens
  misc_feature (345)..(345): n is a, c, g, or t
  misc_feature (385)..(385): n is a, c, g, or t
atcaaaataacctatgaagatttatagaaaacacaccaggtaaggaagggttctttcaaagcaaccacaggaacagttacgataacttaaaaagaaatgctttccacactgaactgacagcgctgcagaccacgcctgagtggggacggcagccccaagcccaggggcaagcgccacaggctggacccaggccagggcacacctgggggagtctcttactgctgaaaacctcagccatctcacttcatgtacttatcctgctgggtcagccggggtttttgccggaggacttgggcatcataggaaaagtttcactgattctttttcgacatgctcttttctcantgctgtcctttcccctttgatttttaggcaaggcaagttnggcccggggttcagcagtttgca

SEQ ID NO: 320772 - DNA, 319 bp, Homo Sapiens
  misc_feature (161)..(161): n is a, c, g, or t
gaggagggggctggggcccggggccgcgtggcgcgtttccgctacttcgaggatatttatggctactcaggggtcttcatctgcggcccctcccctcactggctcttggtgaccggccgaggggctctgcggctacactttctggttatcgacggcccggncgactctttcgctccattccacaatgtcaactgtccccgcggcttcctgtacttcaacagacagggcgagctgaggatcagtgtcctgcctgcctacctgtcctatgatgccccatggcctgtcacgaagatcccgctgcgctgcacggcccactatg

SEQ ID NO: 320773 - DNA, 646 bp, Homo Sapiens
  misc_feature (88)..(382): n is a, c, g, or t
gagctgtaccattgtagacacactttagcttcaggcaaacaaatttctggtgtacccagaaccattttcttaaaccatttccatgggnnnnnnnnnnnnnnnnnnnnnnnnnnnnnnnnnnnnnnnnnnnnnnnnnnnnnnnnnnnnnnnnnnnnnnnnnnnnnnnnnnnnnnnnnnnnnnnnnnnnnnnnnnnnnnnnnnnnnnnnnnnnnnnnnnnnnnnnnnnnnnnnnnnnnnnnnnnnnnnnnnnnnnnnnnnnnnnnnnnnnnnnnnnnnnnnnnnnnnnnnnnnnnnnnnnnnnnnnnnnnnnnnnnnnnnnnnnnnnnnnnnnnnnnnnnnnnnnnnnnnnnnnnnnnnnnnnnnnnnnnnnnnnnnnnnnnnnccatgggtttttaaatacagctgtcaactctccttttcttcaagtatgaagtcacatgttaaaagaggctgtccttggctgtgtttgataaagggagttaggcacttgtttcatctgattattcctccaggaaataaggttaacaacacaggtggtgaaagcccagcaacctccgattgcacaaggatactgatgccatggctttgcttttcagccacaactgggaataaaactgggagctctgctgaggcaattttgctgcta

SEQ ID NO: 320774 - DNA, 550 bp, Homo Sapiens
  misc_feature (101)..(121): n is a, c, g, or t
atgggcatgtccgcttcgaccttcccccacaaggctctgtgctggcccggaacgtgtccacccggtcatgcccgccgcgcaccagccccgcagtggacttnnnnnnnnnnnnnnnnnnnnnctctgtggatggcaaaggggaccggtattatcacaggcctgaaactctccaagaagaaagcaaggaggagacacacggatgacccaagcaaggaatgcttcactctgaaatttgacctgaatgtggacattgagacagagatcgtcccagccatgaagaagaagtcactgggggaggtgctgctgcctgtatttgaaaggaagggcattgcgctgggcaaagtggacatctacctggaccagtccaacacacccctgtccctcaccttcgaggcctacaggttcgggggacactaccttcgtgtcaaagccccagccaagcctggagatgagggcaaggtggagcatggcatgaaggactccaagtccctgagtttgccgattctgcggccagctgggaccgggccccccgccctggagcgtgtggacg

SEQ ID NO: 320775 - DNA, 1543 bp, Homo Sapiens
  misc_feature (56)..(65): n is a, c, g, or t
  misc_feature (1040)..(1040): n is a, c, g, or t
  misc_feature (1044)..(1044): n is a, c, g, or t
tactgctcatggatgtgtattttaataaaaataattctgtcaaaatacaacagagnnnnnnnnnngtctctcaagtacaattttaataagatgttttgtgttagagttctctctccatcctcccacacccacaagtttcatgctaatgccaagtatcaactcttgaggacaaaggcaaaaccagtgtgcacaatgtggaggatgtctgttgcagctgtagttactaatgcaggaaaacccaatgcaaagaggaaaatgcctgaggagccagaggcacaatctggccacaggtctgggtgcatgagactggcagtctagtagggctccgctgcctggctgccacatgggtgcataccctgagttgtgagcaacccaaaggaactttcagctctgacaattctctgcctcatcttctttgtgcttgcttaaggagtgagaaggcgctaggtggcccaggcagtccccacttctgtctcgtggtgtccattttgatggcctgcacccagccacagacccatgaggatggggatgggggttctggcttgctatgagtgccagtttttgctctggaaggaggtgaccatttggtgccgcaaggggaaagtgagtagggaaggctgctccccagggccggacaaaccaagaaagccaggtcttcctcctgcctccatgggtcaggtccagcccttcaccagggctcccccaggtgcctttcccactctaggctcctggaagcaggctggtaggactggatgtgcataaggggcacctctggctggcaggcaggcaggcctggactctcagcaagagagtgggctcaagcagcttggttttggccctctccacagcttgtggggcaaaggcttatgtcccaaaggtgagctgcccaactgggacagagagcccctctggagaggaacagagtaaacaacttggactcagctgaaacagtgagataaggcacagaaaatggggaggtggccatgggtaccaagtgcgagccaggcagacacccaaccccatgcagcacacagctgtcnccgnagcctcctgggccctctcagccactccacaacctaagctcaggcacccgtcctcatccctgacacacccctgaaggtagcagcttctcagatactgctggagggcacatcagcctgacccctcatggggtttatctgccattcggtttcaggactaaatagtgttgcccaacccacagggataagggatagtcccggctctgctactaatttgctatgtgactttagccaagtcacttaatctcctgggcctgtttccttatttgtagcaagagaggaatgggggagatgttcactgaaccccattccagctgcaaaagcctgtggttttaatccaatcccgctaggctatgatcgtttaaacagcctgatgtctccaacttctgggtttgggagctaggtagccccaggctgtcacaagagatgaatttcctttacagacaggacgcctcctaacaggccatggtctatgggtctgccagcctttaggaccaagaaaa

SEQ ID NO: 320776 - DNA, 557 bp, Homo Sapiens
ctttttcccggaggctggcagatgcgcgtggtgcggctgctgcggctccgggcggctctgacgctgctcggggaggtcccccgccgcccggcctcccggggtgtcccgggctcgcgcaggacgcagaagggcagtggagccaggtgggagaaggagaagcacgaagacggggtgaagtggagacagctggagcacaagggcccgtacttcgcacccccatacgagccccttcccgacggagtgcgtttcttctatgaaggaaggcctgtgagattgagcgtggcagcggaggaggtcgccactttttatgggaggatgttagatcatgaatacacaacaaaggaggttttccggaagaacttcttcaatgactggcgaaaggaaatggcggtggaagagagggaagtcatcaagagcctggacaagtgtgacttcacggagatccacagatactttgtggacaaggccgcagcccggaaagtcctgagcagggaggagaagcagaagctaaaagaagaggcagaaaaacttcagcaagagttcggctactgtatttt

SEQ ID NO: 320777 - DNA, 1390 bp, Homo Sapiens
ttccctgttttagtaatggtgtctttttattgataacttcccaacagcatctgtaaacatcgggtacaacaatattccattaaactctttcccgaggtggctccgtttgctccatggaggccttcacgagaggcctgctggcccctcaggttccacacctctattcagagaaacacagaactcagcacgctcagggctgaatggatggccagcctccgtctcaagacttctacctatctcagaaacctccttgagataccaaggagaaagtatttgatacttttacggagcaaggggcaggaaaagcagaattagtgggtgcgggggtggcgttggggtgaactcagaggagaccgtgcttgtgcacctcaaggaggtcgtgaccggtggtgggggacatctggctctggtgtctgggaaccttctaagcattcttcagagcagacgtcaggctcagctctggaaaaattcccctgtgcccagccccacgactccagctggaatgggcgtgccctggcatggcagaggggtcttgcagaatagagatgttctgaggaaggaaggagccagaattaaagaccccccccaggaattccacacccctcgggagagagccttgtccccctaggagccctgggtgacagaacggggcagcaaaggagccctggatgacagaacaaggcagggttacccgctgccaccttgtatgctgctgccctgagaccccctcaaggcaccgggcagcagggctattcgcccgtcatctcctcgtcatctgtctggctgcggccgttgatggctggggagccaggctgggcatgggacaggtcctggaatccggggctcagggagggcgagacggtgtcggggctgggtgtcacatgagccccgtgctctgttctgaggtggcaatggtggtcgtggtgctgggtgggatggggtcttcatcctcttcctccaggaaggatgcctctgggatatggctgaaggcctctgggtgctgcctggccagtttccctttcagcgtcctgatacggcggaagatgctgtccaggtcccgtttcatctctactagggtcctcgtgtggtgcaggaagcgttcgctcatctgctgcaggcgggcactggacaggttgttgaagttgagcagcatctcattggtcttctcaaagcggtccagcatgttcttctgggccaggatgatggcgttgacatcatctgtgttcaccatgctcaggatgcggccgcagaagaccctcgaggccgagtccgggaggtccatctctttctcctcctccgctgcctgcacatctggcggccttgctcgcgcttccgggatggcgcccgcgccggcgaaacgtcaccacgcaccgatcctgcgagcgcgcgt

SEQ ID NO: 320778 - DNA, 541 bp, Homo Sapiens
  misc_feature (426)..(426): n is a, c, g, or t
aacctgtgtggaccactcactgcttacagacacacgggcctggagccttgcgttctggagacagtggccggcagcttggttttgaaggccgtgtgcgtgcagggaggaaggcatggacaaaacaaacgccctgtctggaacaggccgtcgaggacagtcaagtggctggaacgatggccttggctccaaagctggaggggctggggcaggtgcatgggctgggctgtgcattcaggtgacattccctagtgactcaggtcactaaacccactccacaggtggggaagctgagatcagaggtgaaatgcttctgtccaaactccaagcaagccggtagagaaatggggattcactccagagtcccggccccaagcctgagatcctaccaacttcccgagcttgctctgcgtactgtgcccatcacancctgcgctgcctgagctgttcgcctcttcctgaccccctcctagaggccactgttgcctggcttcccccaaaaggagtggggtggagcacatgcgtctcacacacgacccagtct

SEQ ID NO: 320779 - DNA, 815 bp, Homo Sapiens
cggaacaggatgtagtctgccaggagcagggcgccccgccacacctgcttgccaacatcctccaggggcgtggccatggtgtgctctattctgatgatatcgtgcgggctgccttgtgcttcctctcccaggacgtcgtcttcttcctgtgctagaatcatgggatgtaccttgtctctcagaggccctgctgggttggaatcagaggcggctcgtggtcttctcaccacgtccaaatccccatcctcatccagctgagcttcagccacttcctggccagtggtgtcagtcccggcctggagggagaaaccctcattaccatggccacttcctggaggggaccctgtgctgcctgtctcagcagaaggaggctcctttgtgtgaacatctctgtgactgccacccttggctcctgaatctgtccaagagtcttggctccatagaagcttgaattgggacaggaaaactggctgccccacgctgttcagccgtaccatgagatgtctatggttcggggtatagaggtggacatctgacagcacagtgtcgctcctaaaggtgacctcgtccatggctgccgcaggagccagctgtaccatggcccaggctccaccttagtcctaggacaggagtccctcagaggtgagaatgggtcctcagcatggcaggtcccagaggagatactgcagacaggtccaagctggtagcgagtagctttgcatcgccctgggagaagatctcagagacttggccagggaagagaatccagccgccgcggggcccagcctgggatcccacccgactcccgtctctgt

SEQ ID NO: 320780 - DNA, 544 bp, Homo Sapiens
ttatccctcataccccactctgggagcacaggaggaacccaagtctgttagatcagtaaactgaaggagcctgctgagctcgtggggctccacgccttgactttgcagccgcagatggagtgtggtacagaaagatcaggggccctggaagccaccagaagcttggactaggaagggagagctgagcctccagggccgtggcatctgttggccatgtgctgggacgggagggagcactggtggccatgccacagtgacaaggtgaaggccctggatggtccacaagacacagcctgggtttctctccagatcgcaggcccagccagcaggcatggggcccccagcctcagtactgatgctttatactttgtgtagttttaagaagaattgtgtctttcaagggagtaagagaaggatgtttctgtggttagggcagtacatgtctgtgagctacatgcaaagggtcctgctgctgctgtgcccagggtagacccctcctttccacagggatgcttctgtttgcggggacggtcggtgcagctgc

SEQ ID NO: 320781 - DNA, 1249 bp, Homo Sapiens
ctggctcccttccctctgcggtcccagccctctgggaatgggcctctaacagccgtgcctgttagtgacacaactttgggtctgggtccctccccaaggggcccctttcggccctcactcgctttgccagagcccagtgaatgttggccgtcacctttggacccgtgggccccttttccttcattcaggactctagcctggctccctctttcaaccttgttaaaagagctctgggggtttccccagaggagcctggtcccttctgccccgaatcctatcatgctcccttatgaccttcgttccagacccctgagtgcggatcccacctgtgaaaggggaggacagatctggggaagggatatgcccagaggaaatcaacaagaccaagagacgtcagagtcctgatggccaaatcagacaccagctttcctgagaaggcagaagagagagcccccatagaagcagtgggggctcagaaggttcagtgggttcacaggggagcagaggctcctgagggcttactcagacaggaagcagccccccaaaacatacttccccttctcctcccacagaaacagaacagataaagttcagaattctaggcccaaaagggtgcaacacccttcaaccagtttcagtgaagagcttgctggcctgggaagtaaagaaggggtttccaaatacagcagtttataaaacagtcctggtgagctatgaagtgaaagagggggagtcacagagctgctcccagttcacctgcttgtgctaagaaacaataaaatacaaattgcttccccaccccaaccctcagtacaaagcaaacttcacaccagagccaccatcagtgacaggcccagtggcggtggatgaggaagagaatacaaaagggaacgtctttaaaatctcttcaaaatcattttgtatagagaagtaaaagcaactcaggcgatatgaattcaaacctcagtgtagaaatctatcaaagtcggtacagtgtccaggcacggcgtcccggagacggaggaagtgactagaaaacattattgctggagaggcttttctcagtagaacaagagcaggtataaaaggggagggcgggtctaaaaggcagggcagtcgccaggcctagggcactggaagggtaggaggagcacagagaaccttccatggcccctttggttctctgcctttggatggatggatttatgctggcattgtctggagggagccgggtgtcccccaataatca

SEQ ID NO: 320782 - DNA, 886 bp, Homo Sapiens
  misc_feature (378)..(379): n is a, c, g, or t
  misc_feature (388)..(389): n is a, c, g, or t
  misc_feature (393)..(393): n is a, c, g, or t
  misc_feature (405)..(406): n is a, c, g, or t
  misc_feature (426)..(427): n is a, c, g, or t
aaaaggagcccctttggattcccccggggggggttaaacccttgccattttccccaattttttggagcccccggattggaagttcttttttaaatccccggtagaaatttttccaccatatttcagaacgttccttaaaaagtttccacaaaattctttcatcatgaggggattcccagaagcctggaagttccgctgctgtgagcgactttttattatctcaaccagagcatgtgcaagagattccatgttttctcggtcaagatttgttgttggctcatccaaggcaatgatgccacagttgaggcagaacgtttcaggcagggccaggcgaatgatgagtgaggctaaataccccttttgttcccaagcactgcnnatcgtcctnncgcnatatccaaggcnntgtgtctcccttcagcatcnnaccactcggtagttataattccgccttttatcagaagctgatacattttcatcggcatcagaccgtatttctatgtattcaatatcttgtccacgataggtacttcgccacaggtcacgtataattttattgatttcttccattttcatactgtgaaatttcattattgcttggtcaagagtcttataataaatatccagatccttgttcacaagttctgttgtcctcataacaatcatcatttctctatacttttcctcagcatcccgaaattgtggttctcgaagttctttcttaaaatgaataatttcttcttcataacctttctgtcgccctaatgccaaattatgatttctttttatattgtctatgttctcttccaacttctgatgttcacttttcatttgcaaaacctgcatttgacccatttccttcaaatgttgttttctttcttcttca

SEQ ID NO: 320783 - DNA, 483 bp, Homo Sapiens
caggtggcagatctcaacaaacaggccacgacttatggcatggccgacggtgacttcgtcaggatgctccggaaagacaaggaggaggcagaggccatcaagcatgccaaggctcttgaggaggagaaggccatgtactcgggactccgctctcgacgccagcggagagagtttcgggagaagcggctgaggggtcgcaagatcagcccacccagctatgcccgccgagacagccccacctatgacccctataagcggtcaccctcggagtccagctcagagtcccgctcccgctcccgctccccagtccccgggccgcgaggagaagatcacgttcatcaccagttttgggggcagcgatgaggaggcagccgcagccgctgctgccgcagcagcatcaggagtcaccacagggaagccccccgcacctccccagcctggcggccccgccccgggacgtaatgccagcgcccgccgccgctc

SEQ ID NO: 320784 - DNA, 2046 bp, Homo Sapiens
  misc_feature (203)..(213): n is a, c, g, or t
tgattaaacaaagaactctggtttttaatagttttgatcattaaaaaagtttaaacctgcatagcaatcatttcaaaaataattatttaatgttccataattaaactgtacacaacctagtcttgggacacagaagccagtgaggtgagtttggagcagtctggtgcagtcccaggagccaggagttgagttctcattggccnnnnnnnnnnngtcattctgctcatctaagtttttggatagttggcacaatctggctctgctgatgagtggatctgcactgggaagagagagcagcttgacccccatcccttcttgcttcccctcccccactcagccggattcctcaaagtcgctcaatgtctcggtatttcttcctcaaaatagagacctggtctttaaagaggacggggtcgagcctcatctgagagtggatcagcggcatgtagccaaaccagctggcaaacgtattcatgcagctctgtcgctgggcaaagtggtcagggtcagcccaacgggaagcccgagaagtctgtcccatcattgtctccttatactgcttcttctgggtcactttgattggaggcaattttgtcacagcagacaccaggaagttcatgagaatgtcctcacaattggccaattggtccaccatgttcttcaggctggctggcaggtaatgggagtataggtagtgataatatttgtggtaaatagcagctcctgtcaacaccatggagtagtcgttcgtccactttgatgtgtatccccaccgctccttagagttatcccagaagtggctgcgcgcggggtaccccacaatcctctcagggaagctctgccacactgtgaaggcgaaatccacctctgttgttgaaagcaccgtgtcctcgtcaaggctgagcacggcgtctgtgatgatgttgtcgtagggcagaaaacggctgctcataaccttgctctctccttcaatgacgacgacaggcacagcagtggcaggccagcggtgtttggctggtaggggcttgtcacaattccatagaactatgatctgggcacagtactgggacttggctgcagccacgagaagcttcaacactggctgggactgagagaccaggggggtcaccgcatggatgactgcagtgaatttggaggggggctttaaacctaaattagcatagtagtaaggaaaatctcccagataagatgaatactgtggtagtacgaacaatcctccaggatgtttgttccatattaaactgttacgtgatatgtgcttgaatattctgtcctgaataatctctagtgtagttaatacaatcttctcaactgaagaaaaataagcctcccacaagaattgtgtctgctgtctaagtgctaggattttatcctgatgaatagacctgattgtagaaggaatctgtaataacaatctctcatcgcctatgacggcagcttggttccaattaatcacttcagagaatggcaactcccatccattgctgagcatcacagggacgcaggcagcctgcaaagcctccaggaatctgaaggacccaagcctgcgaccacgaggaaccagacagaaagtggcattgtgcagcatttcccgataatcatacttctcatactcggtgttgtctctgtcacagcgagaatccttgtgcttttgccagtctttgccatgcttgcaggtggtgaggagcacaacgtcctccccgttatggacgtgatataaggcattcctggtgtctgatcctatccctgtcaggtacctcttccccttgaataccagcatgtacttcctgagaggagggatggtgttgaacttcaaaaaccccctctcccctcctgtcctgggatgatccttagaaaagaggggaatagaaacatcaaagttgggtcggaagttttcagtactgatgctggctttggccagcatcgcctggccgatgtcaaaccccacgtcctcggtgtagtcaggcccggacgcgtgggtcgacgatatcccaagggattggcggaccggtaccagcctgcttg

SEQ ID NO: 320785 - DNA, 1018 bp, Homo Sapiens
  misc_feature (117)..(117): n is a, c, g, or t
  misc_feature (250)..(288): n is a, c, g, or t
tttcaaaccataattcaaataaggcaaaacggtgaaccgttaattaatccgggctgttgccgtatctcacttccattttcccatacatcactttctttttgtcccataatcttcaanctatgcagctgggctgaagcctctgagcctattatgtttcaggggctacctgatttgtgaattgtcctttgctcaattaaactctgccaaatttaatttgtctaaggcttttattttaaccttattcatcatnnnnnnnnnnnnnnnnnnnnnnnnnnnnnnnnnnnnnnnctgatcaactaaaaatgaaactgcccagtagaaatgcttagctctcactgtggtaatttcgtgaatgtggaggaaactactaaaactttgatatactaaatagacagctctgtcccacatttatgtttattaaaaactgacataaacaaacacaacctgtacaaaaaatatcccaaatctcatatgactttgaaatcttgagagacattatcgcctaggaccccctcttcctctgccacggccacgtcctcttcctcttcctcttcctctgcctcttcctgcaacagcttcccttttcttagatttcaccttaggttcaacatccacaagtagtgtatccagaggtaaactgtctggtagaataaaataccgaatgttatttcctcgaatactcagcgtttccagctgtacaggttctctgttcttcagggtcattttcacagctttaagatgtgtattcatgctgacatccacacctgtgattgttccatggacctgtgttccgttcttcaattcaatggttacagtttcatgactcaatttcatcaaaaatctcacgagcttcatcctagcggcgccgtcaccctctgggtccgacagcacacagaatccttcaaccgaacactgaccgactgcagtatgaatggccggaagcgcctactccaggggctccggacgtcaagagcgcgcggagcactgcagacgcatggcggaaacgccgaggctgccc

SEQ ID NO: 320786 - DNA, 891 bp, Homo Sapiens; identical to SEQ ID NO: 149230
  misc_feature (186)..(251): n is a, c, g, or t

SEQ ID NO: 320787 - DNA, 475 bp, Homo Sapiens
  misc_feature (421)..(421): n is a, c, g, or t
  misc_feature (442)..(442): n is a, c, g, or t
  misc_feature (454)..(454): n is a, c, g, or t
ggcgctaggatgaagctcgtgagatttttgatgaaattgagtcatgaaactgtaaccattgaattgaagaacggaacacaggtccatggaacaatcacaggtgtggatgtcagcatgaatacacatcttaaagctgtgaaaatgaccctgaagaacagagaacctgtacagctggaaacgctgagtattcgaggaaataacattcggtattttattctaccagacagtttacctctggatacactacttgtggatgttgaacctaaggtgaaatctaagaaaagggaagctgttgcaggaagaggcagaggaagagaaactgaggaaggaagaacaagaacaaaaagccaaaaagaaacaagaagctgaagaaaatgaaattacagagaagcaacaacaaagcaaaagaagaaatggagangaaagagagtgaacaggccangaaagaagatanagagacctcaggcaaagaggg

SEQ ID NO: 320788 - DNA, 588 bp, Homo Sapiens
tttgggaggctctcagcttttccccataaagcgaatggactgctataatgtagtgaaggatagctggtattcgaaactgggtcctccgacacctcgagacagccttgctgcatgtgctgcagaaggcaaaatttatacatctggaggttcataagtaggaaactcagctctgtatttatttgagtgctatgatacgagaactgaaagctggcacacaaagcccagcatgctgacccagcgctgcagccatgggatggtggaagccaatggcctaatctatgtttgtggtggaagtttaggaaacaatgtttctgggagagtgcttaattcctgtgaagtttatgatcctgccacagaaacatggactgagctgtgtccaatgattgaagccaggaagaatcatgggctggtatttgtaaaagacaagatatttgctgtgggtggtcagaatggtttaggtggtctggacaatgtggaatattacgatattaagttgaacgaatggaagatggtctcaccaatgccatggaagggtgtaacagtgaaatgtgcagcagttggctctatagtttatgtcttggctggttt

SEQ ID NO: 320789 - DNA, 840 bp, Homo Sapiens
agaataaatccccggtaccccagtagcctttaaatgttgagaagtaatgagaataaggtgcccaagctggaaatgatctctatctttaaaaggagactcaagcagtggtgcaggcttttgtgcctaggaatatttttttggcatatttacttaaagctccactcttttcattcggaacaataagctgcctaataaatcttgtacggtctctgatgtcgtagttttgatcatacttgccgagatttaatatgtactgggtaagcaattttgtctgtttggagttggttaaatacaattttgctcccagatttaatatctgcagttttaccagatcatcttcactagtgaagcttttagccatcttcctcaaaacatcaggggcaattttaggaactcgttcacagttttctccaattagccaaagaatacttgctctagcaacaggaacagtgatactgtccaggagtttggccatatgtttaataatttcaccatgttgtgcaggttgcatttgcagtaatttctttataacaaccacactttcagcaacaactatttcatccctgttggacagcagacagaccaagccattgaggcacgtgtcagtgacttccaagatgttggttgcacatctgcctatagtctgaatagtggctgctgcaaattgtttatcctggcttttcacataggtctgaaattctcgaagaagagttgatatgttggcttcatttgccaagtttgtcaaaatttcaagcttcagtgtcttgatcatagttggatcagttgacctaacatagaaactcttcagataaggttcaaacatcccctttctttgaattg

SEQ ID NO: 320790 - DNA, 862 bp, Homo Sapiens
gcccggccaggacccccaggtttattggggactccccgcccagacgcttatggcatcacccgccaaacggcacggttacttcgggacacacacggtggcctctgcccccagccagggccccagaggcagtggggtgcagtctcctcccttgtggcccagacccagctgggtcccttcctcctaggcagctgagggaaggactgctgggttgtccacgggcctgggaaggggaagcgagcaggcgagtccaggaggggccggggccggggtgggggctcgcctgccctcactccagggactgtagcatcagcagctgtttcagcaccttcgtctggctggtctctcggatttcgcccagccaggaacatcctcgtccacgaccgtgtaaaccttgtagaagttgaacaccaggtccagttcacagacattgtggaaatattcgtttaagacctccacgaagttgtgaatggcctccaggtaagccaggttgttgtcattgacatccacacagatgcagaagtagaggccagcatagcggcggtaaatgatcttaaagttccggaactccacaaagttggtgtgtttggcgtctcggacggtgaccacggcatgcacctcctcgatcagcttctgtttctcatcatcatcaaactgcatgtaccacttggccaggcgcgtcttgcctgcccggttctggatgaggataaagcggatctccaggtcctctctccttttacagcgctttcccagacccttaagtttcattccctacagttgcctccttttggtttcctgtgccaggtctcttcttgagatcatccctctctcacaggcagtctcctgcccactgtctcaacatccc

SEQ ID NO: 320791 - DNA, 672 bp, Homo Sapiens
ttgccaggcaggaccacaggtttattggggactccacgcacagacgcttatggcatcacacgacaacggcacggttactcgggacacacacggtggcctctgcccacagccagggcccagaggcagtggggtgcagtctcctcccttgtggcccagacccagctgggtcccttcctcctaggcagctgagggaaggactgctgggttggccacgggcctgggaaggggaagcgagcaggcgagtccaggaggggccggggccggggtggggctcgcctgccctcactccagggactgtagcatcagcagctgtttcagcaccttcgtctggctggtctctcggatttcgccagccaggaacatctcgtccacgaccgtgtaaaccttgtagaagttgaacaccaggtccagttcacagacattgtggaaatattcgtttaagacctccacgaagttgtgaatggcctccaggtaagccaggttgttgtcattgacatccacacagatgcagaagtagaggccagcatagcggcggtaaatgattttaaagttccggaacatggcgacccccgtccagaccccagcggccccggtcccgcggcgactgggcagctccggctcagggtgcagttgtagggcccagagccctcgtgccgaattcgccacccaggc

SEQ ID NO: 320792 - DNA, 892 bp, Homo Sapiens
  misc_feature (82)..(86): n is a, c, g, or t
  misc_feature (88)..(107): n is a, c, g, or t
tggttcattccccaatggggcccgcgggcaaaacgaaaggtcttggaaagcttttcaagggccgaggcggccgaccaaggannnnntnnnnnnnnnnnnnnnnnnnnccaggaccacagggttatttgggactccacgcacaaggcgcttatggcatcacacgacaagggcacggttactcgggacacacacggtggcctctgcccacagccagggcccagaggcagtggggtgcagtctcctcccttgtggcccagacccagctgggtcccttcctcctaggcagctgagggaaggactgctgggtggcccacgggcctggaaggggaagcgagcaggcgagtccaggaggggccggggccggggtggggctcgcctgccctcactccagggactgtagcatcagcagctgtttcagcaccttcgtctggctggtctctcggatttcgccagccaggaacatctcgtccacgaccgtgtaaaccttgtagaagttgaacaccaggtccagttcacagacattgtggaaatattcgtttaagacctccacgaagttgtgaatggcctccaggtaagccaggttgttgtcattgacatccacacagatgcagaagtagaggccagcatagcggcggtaaatgatcttaaagttccggaactccacaaagttggtgtgtttggcgtctcggacggtgaccacggcatgcacctcctcgatcagcttctgtttctcatcatcatcaaactgcatgtaccacttggccaggcgcgtcttgcctgcccggttctggatgaggataaagcggatcatggcgacccccgtccagaccccagcggccccggtcccgcggcgactgggcagctccggctcagggtgcagttgtagggcccc

SEQ ID NO: 320793 - DNA, 477 bp, Homo Sapiens
  misc_feature (23)..(23): n is a, c, g, or t
  misc_feature (33)..(33): n is a, c, g, or t
  misc_feature (46)..(46): n is a, c, g, or t
  misc_feature (132)..(132): n is a, c, g, or t
gtaccctcggaaatttggccaancccgggaaanaatctcgttccangaaccttgtaaaaaccttgtaagaagttgaaacaccaggtcccagttcacaaaacattgtggaaaatattcgtttaaagacctccncacgaaagttgtgaaatggccctcccaggtaaagcccaggttgttgtcattgaacatcccacacagatgccagaagtagaggccagcatagcggcggtaaatgatcttaaagttccggaactcccacaaagttggtgtgtttggcgtctcggacggtgaccacggcatgcacctcctcgatcagcttctgtttctcatcatcatcaaactgcatgtaccacttggccaggcgcgtcttgcctgcccggttctggatgaggataaagcggatcatggcgacccccgtccagaccccagcggccccggtcccgcggcgactgggcagctccggctcagggtgcagtt

SEQ ID NO: 320794 - DNA, 1187 bp, Homo Sapiens
  misc_feature (46)..(60): n is a, c, g, or t
  misc_feature (68)..(211): n is a, c, g, or t
tcctttgggggcccgggcccaaaaaaaagtttttaaaaattttttnnnnnnnnnnnnnnncgcaaaannnnnnnnnnnnnnnnnnnnnnnnnnnnnnnnnnnnnnnnnnnnnnnnnnnnnnnnnnnnnnnnnnnnnnnnnnnnnnnnnnnnnnnnnnnnnnnnnnnnnnnnnnnnnnnnnnnnnnnnnnnnnnnnnnnnnnnnnnnnnnnngagtaaagagaatgtttatgaagtggctcctacataatgtcccagccctgggagtcacgaacagactccatggttttcattggcccctcttcttcggtatcagaatccctggtttaaggcaaggatgagagaagaacacgaggacgcaatgaaccagattcaagctgaggctgtgtggcatggcagaaggctgaactattcttgtgtagccctagggatagtccaagagccctctagtcttctctgaggcaatgagattcaagggcagctgtgatccttgcccttgaacggaaaccagccgtggccaaatctgtcctcacagatccatgtctccctggggcagtggcagagcagaggatagttccttattactctttgctcaaagggagatgtctcctgtccttgcctgcatttcgtcgcctctttcgactcaagaagttctccaatttcttgctgcgtttcagctccttgaacttctcagctagtgccaactggcgctgctcagattttttcaggaagtatggccgatggccctgctgggcctgagcccgacgttcttgcttcagggccaggtgcagctcctgctgttgctttcgttcctgctgtgccatttcttgctgctccattcgctgaagcagttgctgcagtttctcatgctcctctcctgaaaggtgcttcttcaactgttttttcacaagctctttctctttcgctcggatgtcattcaagaattggtatgttttgtcaaacacctcaggattatattcccctgacagatcatcaaagcgagggtcccgggctacctttttactaatgggaacaacctgacgtaaaaatggtactcggatcttggctgacatttccagaggcctgtgcttatctgcaacacatgcattttggataggtggtctagaagcttgtttcttaggactatttccagctaccaattgtttgtacgtcttagtccccacttggc

SEQ ID NO: 320795 - DNA, 578 bp, Homo Sapiens
cataagcaattccaataagaactgttacattgtcaagaagaccttcggtatattccttggttccatccagaggatcaacccagaccacgagatcttcttctttaatagcactgtactgcgatgggcatggttgcttcagtatttcttcccactgactgtcttcaatcagctcttgatccacttcctcagaaggcagatcctcttcccctataattgtgagtttggggaatttccgggccaatgaagaacatatgctcatctgtgccaatcggtcagctttggtctgcaggtctgttgcacaggtcttctccacaatacccaggtctccttcagcaataacacgtctgactatcattcctgccttttgagcaatagaatatgcggaggctaccaaccgcatcaacacagtgttactggaagccatggtacactctggctcttgccctgaccggccggagagaaacggtgacaaacctggaacaacgttggaccaaagacacttcaggaggagcaaaagcgcgttatcgtagacccaggtccctcgttgtgtccagtaccgagctttggcactgtcaata

SEQ ID NO: 320796 - DNA, 916 bp, Homo Sapiens
acaaaccccggggacttgcaaaaatacattaaggcagaaggcttttcccttcaaatcaagctgaaaaattcttattttccggctcctcttaactcgcagcacagcatcggggttcaatagcagccaacacagtccagtaacccaacttgttgctatgggatcgagtagttgtgataatgtgtttcccagcagggacttctttcagctgaaacccaaaggcgcctaaacctaaaactccccagattgtcctccccaacacagcatctggtcctgcctcatagttgtaatatggctggttaataactcctgctatggcttttccttcataagcaattccaataagaactgttacattgtcaagaagaccttcggtatattccttggttccatccagaggatcaacccagaccacgagatcttcttctttaatagcactgtactgcgatgggcatggttgcttcagtatttcttcccactgactgtcttcaatcagctcttgatccacttcctcagaaggcagatcctcttcccctataattgtgagtttggggaatttccgggccaatgaagaacatatgctcatctgtgccaatcggtcagctttggtctgcaggtctgttgcacaggtcttctccacaatacccaggtctccttcagcaataacacgtctgactatcattcctgccttttgagcaatagaatatgcggaggctaccaaccgcatcaacacagtgttactggaagccatggtacactctggaacaacgttggaccaaagacacttcaggaggagcaaaagcgcgttatcgtagacccaggtccctcgttgtgtccagtaccgagctttggcactgtcaataagtcttttgagaaggatggcatccctacctcagctactgagcatgcgggaaacccc

SEQ ID NO: 320797 - DNA, 630 bp, Homo Sapiens
acaaaagattaataaaaacaatgtctacacagttcgtggcagggcgtaaaaaggtaataaattttcaaccgtgagaggggttccccatcacctagggattgggctgccttcctggagtgggggctgacatggaaatccaattctactgagggtctatgcatggtaattggcagaaaacatgatagaactaaacacttcaattcttctcgtttgaggaaaacagctccttagagagagcttgaggttcaagtccttttcccattgtcatctattcagccatccacagcttgaaggtcctgtcatatgagcaagtggctatgagctgcccatcggaagaaatatctaggcccatcactttgccttcgtggccagccagagtcttcagcggggaccagcctgggtgcgtccagatcttggctgtgttatcataggcaccagtaagcaagaagttcccatggataggctcaaacttgacaccagtcactaagttctgatgagcagggatggtgtagacgcaacgccgctgtcggaggtcccacactttgcaggtgttgtcaccactgccggttgcaatgtgatagccattgggggagaaatttattccatagatttctttcaggtggccttcta

SEQ ID NO: 320798 - DNA, 1117 bp, Homo Sapiens
tccgggccaaccagatggcagagatgggagggaaagatgtcgtttgatgcctggtgccctctgttctgtggggtttgttcagcaggtgcccccactacgccagccctctggcagtagctcccaggctgagggtgctagcagacccggaagtaaacttgttattaaaccatctcttttctgtttattttcaagtgcatgtattgcagaaggacaaaagcctaaatttgctttatgttcctcagcttttgaaaaataactcggtgacccacctgcggtgtatgtgacagagattggcttctatgcacatctggtcttctctttccctctctatggggacctgagaatcctgccctccactaactactcccaaggaccctccagggccctcatccattcctcaatttataaacaggtcccgaggggaagatgggaacaggcagagtggggacagcctgtgagcattggacgctgctgtgtctcaccaaggcctggaacgttctgagccatttctatatgctgggccgcagaactcatcaacaagaaagaacatgagtaaacactcattgctgaatggtccccttgtgctagggaggctggcggccagtggagagaggcctcagctgctccctctgtctccgggcaggtgggcaccttgcaggggaaggcttctggcagacaagctggaacagaggagaagccagggctggcctcgctggaaaaagaggcccggccaccagtgcttccatcttctccatcccagctccaagctgaaaatcatatccacatgggtgactccaaccatatccataacgtttcaagccaatagtcacaccacactgtccttccccaaaccccaagggttcccagagcatcgctgagccccaggggaatacacttccaggaaacatccacgcgcttgtgacctgtctcaaacacccgggcagaggtaatacagcagcaagggccctgatgtagcatctcagatcaacaagagagaaaccaagggatctcagatcttaaacaacgtcctggggccatcgtggtgctggcgctccagctcattctcctcttgtgttctgaatcctcgtgccgaattcgccacccaggcctcgtacct

SEQ ID NO: 320799 - DNA, 1046 bp, Homo Sapiens
  misc_feature (990)..(990): n is a, c, g, or t
cggccgggccggaaaattgacgttgctattaacgccccccatttcgggtgatgtttccaaggccattcttgcccgaagggccaaaagcctaaaatttgccttaatgtccctcaagtttgggaaaataaactcggggccccccttccggtgtaggtgacagggattggcttctatgcacatctggtcttttctttccctctctatgggggcctgagaaatcctgccctccccgtaattactcccaagggcccctccaggggccctcatccattcctcaatttataaacaggtcccgaggggaagatgggaacaggcagagtggggacagcctgtgagcattggacgctgctgtgtctcaccaaggcctggaacgttctgagccatttctatatgctgggccgcagaactcatcaacaagaaagaacatgagtaaacactcattgctgaatggtccccttgtgctagggaggctggcggccagtggagagaggcctcagctgctccctctgtctccgggcaggtgggcaccttgcaggggaaggcttctggcagacaagctggaacagaggagaagccagggctggcctcgctggaaaaagaggcccggccaccagtgcttccatcttctccatcccagctccaagctgaaaatcatatccacatgggtgactccaaccatatccataacgtttcaagccaatagtcacaccacactgtccttccccaaaccccaagggttcccagagcatcgctgagccccaggggaatacacttccaggaaacatccacgcgcttgtgacctgtctcaaacacccgggcagaggtaatacagcagcaagggccctgatgtagcatctcagatcaacaagagagaaaccaagggatctcagatcttaaacaacgtcctggggccatcgtggtgctggcgctccagctcattctcctcttgtgttctgaatcctcgtgccgaattcgccacgcaggccaggnggcagtgttaagaccgggacggaagacggtataggggagggggtaagaaggaaggg

SEQ ID NO: 320800 - DNA, 1078 bp, Homo Sapiens
gtcccccacagggcctgagaagggggtggttataaaccaaggaccccgggaaaactaaaaacctgtggtttatttaaaagccatcgtcctttttgcggggttaattttccaaaggggcaaggttattgcgggaaagggccaaaagcccctaaaatttgccttaaggttccctcacgcttttggaaaaataattcgggggaccacccgcggggtatgtgaccagagattggctttttatgcacctccggtcttttctttccctctctatggggaccctgagaatcctgccctcccactaattactcccaaaggaccctccagggccctcatccattcctcaatttataaacaggtcccgaggggaagatgggaacaggcagagtggggacagcctgtgagcattggacgctgctgtgtctcaccaaggcctggaacgttctgagccatttctatatgctgggccgcagaactcatcaacaagaaagaacatgagtaaacactcattgctgaatggtccccttgtgctagggaggctggcggccagtggagagaggcctcagctgctccctctgtctccgggcaggtgggcaccttgcaggggaaggcttctggcagacaagctggaacagaggagaagccagggctggcctcgctggaaaaagaggcccggccaccagtgcttccatcttctccatcccagctccaagctgaaaatcatatccacatgggtgactccaaccatatccataacgtttcaagccaatagtcacaccacactgtccttccccaaaccccaagggttcccagagcatcgctgagccccaggggaatacacttccaggaaacatccacgcgcttgtgacctgtctcaaacacccgggcagaggtaatacagcagcaagggccctgatgtagcatctcagatcaacaagagagaaaccaagggatctcagatcttaaacaacgtcctggggccatcgtggtgctggcgctccagctcattctcctcttgtgttctgaatcctcgtgccgaattcgccacccagccttggtacatagggcggaggcccggcccgga

SEQ ID NO: 320801 - DNA, 912 bp, Homo Sapiens
gaaaagccctaaaatttttgcttttaaggttccctcagcttttgggaaaaataacttcgggggacccccctgcgggtgtatgtgacagagattgggcttctatgcacatctggtcttctctttcccctctctatggggacctgagaatcctgccctccactaactactcccaaggaccctccagggccctcatccattcctcaatttataaacaggtcccgaggggaagatgggaacaggcagagtggggacagcctgtgagcattggacgctgctgtgtctcaccaaggcctggaacgttctgagccatttctatatgctgggccgcagaactcatcaacaagaaagaacatgagtaaacactcattgctgaatggtccccttgtgctagggaggctggcggccagtggagagaggcctcagctgctccctctgtctccgggcaggtgggcaccttgcaggggaaggcttctggcagacaagctggaacagaggagaagccagggctggcctcgctggaaaaagaggcccggccaccagtgcttccatcttctccatcccagctccaagctgaaaatcatatccacatgggtgactccaaccatatccataacgtttcaagccaatagtcacaccacactgtccttccccaaaccccaagggttcccagagcatcgctgagccccaggggaatacacttccaggaaacatccacgcgcttgtgacctgtctcaaacacccgggcagaggtaatacagcagcaagggccctgatgtagcatctcagatcaacaagagagaaaccaagggatctcagatcttaaacaacgtcctggggccatcgtggtgctggcgctccagctcattctcctcttgtgttctgaatcctcgtgccgaattcgccacccaggcc

SEQ ID NO: 320802 - DNA, 1276 bp, Homo Sapiens
  misc_feature (23)..(23): n is a, c, g, or t
  misc_feature (44)..(44): n is a, c, g, or t
  misc_feature (57)..(57): n is a, c, g, or t
  misc_feature (91)..(91): n is a, c, g, or t
  misc_feature (101)..(101): n is a, c, g, or t
  misc_feature (151)..(151): n is a, c, g, or t
ccagctgaattccccagcactgnccagactgattagtccgtaantctgatggcaatnacgacctagaatttctgaggaaaggaggtggaanctcagagttncctgtgctggaactgagaaactgaatactgaggttggcgagtctgagggntccctgcagggtagggctagcagcactagaagggcagctcctccttggaagattgctgccagtgctgtttccagaatgtggctggctgctaaaataccctggtgtccccgtaaatggggccaacgagtctgtggacacagggtgggcggggctggaataggacgtggaagagagggatgattctgaagaaccgtgagagggggggtttccaggtctcagtgcagtagttcgataactgttatcctggagactgtgtaggatgtcctctgaagggggaggaactctgctgaaggaggctttgtgattctgtccgaggactatcacactgcaggagctggtagctgtatctggaagggctgtaaactgttgctcctttagagagtgctgagcttaatgtctctgggccttctccatctgcagggtctgagtctttctctgtgatgttactctcccatgtgggagagggctctcccttttgggccaccctcacgctgcttcggaggaccttggggatgctccctccttctcggagtcgttctactgatgtgggaaccatccacctactgctgatattctcttgaggtctgcagtgagatgaagaagtgcctctggaatctgatgggcttaccgcctccaaatgggacatagaggaatgagatggggagaattttttgtgaggggaagatggagttcgggctgaggatccctgcacaccatgggcaccagtgtcggaaacggagttactgctgccttgcccagctcctgcagacttgcttttgctctgtgcagagtcacctccccccaccagcagaattttccttagcttcttgtttccgttttcggtactccagcagggatacttttttcctctgtggtgggttctggggggcagatgggactccttcacaggccctttcaccaccaggtgacaaggatccacgagagaggtctttcattaagccatgttcatatctgctggaaaatccttctgcaggggaacaatatcccccatccaaatgtaaaggcttcctatcccccactagaggagatcctcgatacagtccatctgctcgaggcatagcattcaaaggggagtaggcatacatcaagttgaactctgtccga

SEQ ID NO: 320803 - DNA, 1095 bp, Homo Sapiens
  misc_feature (53)..(63): n is a, c, g, or t
aaactgtcagtgtttcaagctattctgcttgaattttgaagacacctggatcnnnnnnnnnnnaacatttcaaaataagcatggcaggcttctattgaggtttggacttctctcatttctaaagaattagagttgtaacttcatattagttgtaagtttggggtttggtcctcacccaagttggaaagctgtttgcttaagacatagatgtattataataatagaagggagggagtagaaagctgatgaacccttgttacttatagcaaacttcctgctgttttaaatgcacagagattattttatcaactgtggttagcacgcaattggtatttttatcgttctgccattttattgaggctatcaagtgggacttcagacctggctctgagcaggaccacacgtgtgtatttatattgagtgccctcactcatgataaggtgacttcatggagacccagaaactcaccctcagggggtgttcacctttgaggtgggcatccagatgctgaggggaaagtggggtccatcctctgaggtccaggggcctactttgtgagctcagttgtgttcacctgtggttcagtgtacctcggcccctaagccaagtgatcgttcagtgacttgcagcaatgtgggaagtgaggggacccctgccacaccccccaccaacccctgtagagtcactgaccttcatccttcaccctggtcctccatggtgcagcagcatctcatgggccttgtggctgtcagagcccgtggttggaaccccgtccactggtcccaaacctggaggggcagctgcagatgaggtttagacctcctggtgtctccgtggattctgagtgcccaggaggggaggggagggggtggcatcctggcctctaggataaatgcctggagtatagggcagcgccacgggacacttggagaccctgtactgcgcatctgccaagcctggcagtttatagcagtttcttgaaatgtattgatactttgtggatacaaatttgctaataactgtgttgtagcaatgcttgccggggtataccaccttgatccctatcctccggacccttgatttgtgcctgaacaa

SEQ ID NO: 320804 - DNA, 1090 bp, Homo Sapiens
caggagccaactgaccccggaaatcagctcccacccggctgaaggacagcccaaagtacatgcactggcccagcagagagtccaggtggccgcctatgccccggtaaaggtcggtctccagcacctgcaggaattgtgagaccttctgtagcacccagccatggaagatggcactctcattcacagtgtgctcacccatggcagggggcagcagtgggtcctcgtctgagaagatggcacggtactgggtgatgatatcaaagagatggacacgggaggcctcgatggtttttgtaatatggaaatagggatcatcattaggaatggcagtcaggatggaccggagccaagcatctcgggcctgaagaaacttcaccctcaactcagcctcagtgaagacgtccatgcgccgcaggtagccaatgacacggaggcaggcaggaagctggatgttggtcctcagttgctggatcagctggctcagcatcagctgcatggactggcgcacttcgttcacgatgccctggatgacagggatggaagagtatttcctctccagtcggcgtacgtaggctgcaagctccagggcctcttcataataactgttccggacacaggtgtccatgagctgaggaatctccagtatttccaaaatttctgtgtgccggtttagggtcaggctattcatccggcggttggagctgatctcctcggcttccttcacaaagttcctgcagctctgctggaagctgggcaaacggtcgagcaggcggccgagcgacgcctccacgtcgccaaacaggcggtggatgcgctcggtgcactcggcgccgcggatgaaggtcttgtagttagcgaaggccaagtcgcgcgtctgctgcagcagctgcgcccgctcctccgccaggcgctcgggctcgcgccgcagccgctccagccccgagccgctcaactcccggaggtagcggcccacatcgggccgctcgcgccactgggcctcggggaagcggtcccggaacagcgacgccaggagcccttcatcctccacctcgccgagagccgctgccgtggccgtggctaccgatgggat

SEQ ID NO: 320805 - DNA, 559 bp, Homo Sapiens
gacgttgttgctgggaagatggcgaccgcggcgactatcccatcggtagccacggccacagcagcggctctcggcgaggtggaggatgaagggctcctggcgtcgctgttccgggaccgcttccccgaggcccagtggcgcgagcggcccgatgtgggccgctacctccgggagttgagcggctcggggctggagcggctgcggcgcgagcccgagcgcctggcggaggagcgggcgcagctgctgcagcagacgcgccgagtgcaccgagcgcatccaccgcctgtttggcgacgtggaggcgtcgctcggccgcctgctcgaccgtttgcccagcttccagcagagctgcaggaactttgtgaaggaagccgaggagatccagctccaaccgccggatgaatagcctgaccctaaaccggcacacagaaattttggaaatactggagattcctcagctcatggacacctgtgtccggaacagttattatgaagaggccctggagcttgcagcctacgtacgccgactggagaggaaatactcttccatccctgtcat

SEQ ID NO: 320806 - DNA, 925 bp, Homo Sapiens; identical to SEQ ID NO: 123356

SEQ ID NO: 320807 - DNA, 1560 bp, Homo Sapiens
  misc_feature (552)..(552): n is a, c, g, or t
  misc_feature (1244)..(1244): n is a, c, g, or t
  misc_feature (1279)..(1279): n is a, c, g, or t
ggcgggtgggtcaaggtaactctgggctacagagtccttggctgggggttcggggagcgcttggaccccggcttctgggacgcgtcaggagaagggagcactggctttgctttcatcaggccaaagatgcctttctttgggaatacgttcagtccgaagaagacacctcctcggaagtcggcatctctctccaacctgcattctttggatcgatcaacccgggaggtggagctgggcttggaatacggatccccgactatgaacctggcagggcaaagcctgaagtttgaaaatggccagtggatagcagagacaggggttagtggcggtgtggaccggagggaggttcagcgccttcgcaggcggaaccagcagttggaggaagagaacaatctcttgcggctgaaagtggacatcttattagacatgctttcagagtccactgccgaatcccacttaatggagaaggaactggatgaactgaggatcagccggaagagaaaatgaagaccccagagacatttattggggagtaggatgtggctgagtgcnttttttttggccagactagcggattcagtcctggaagagagtatcatataatgagacccacaggcactggcacccttgggttggcaatagaaggtgacatggaatggagaaaaccaagattccagatggggatagtaactagaaggtgcttcagatgcactgcctgcgggtgccagtctgaaaaccagaccgcacagaggcctggggctgctgatgagctttttggtgctctccacacacaagctcgcaaacacacatgtcccagaatagctctgttgggttgtgttgggagaaacggctggagttcattctcctcccccccttaatgttggtgtttggcgtgtgacagcagttctacagagctctgggttggggtcatgaatgagcggctctcttggctccttaagggaggcctcctctcttcttgggctttaaaaaaaacttcctttccctgaagacctgggacctgcccctggccttcaagctttctcaaggagccaggggcaccagccctttccccccaaacaacgagttatgagtgtttgtattggcgaagctttgtccctggggtttgtgcccccgaacctaacactttttttgtcaatctcagaaagcgggagcgggcgtgacaaataaattcggcgggggtgacatgggtgaggtacgcagcaccagaaaggagagagcaggangggtctcgtggggttgggtcggcgcctctttgcgncaccacgtcagggggagactgttattgtttgaacaccctcttccccttttaggggaaaaccggggggcgcctaggcggaggggtaaagtagggcgggcgctggggtgagacttcgctggcgggccgccgcggtaaggagagagtttgtcgccccccgtacccgaaagcaggcctttgtgaattttctccccgccggtaatggagagaccccgcgtcaggcgcgccagccacgccaaagtaggttctttaccgacctagaggcctggaggtgggaggtgtgt

SEQ ID NO: 320808 - DNA, 883 bp, Homo Sapiens
  misc_feature (81)..(81): n is a, c, g, or t
  misc_feature (204)..(204): n is a, c, g, or t
  misc_feature (297)..(307): n is a, c, g, or t
gctccaaatagggggtacgttgatgcaagctctcaaggagcttaatggtgcgggtcgggtttttccagaaagtgagaccanccgccaaggtcatgggccattgcaaaagcccacccgtttttagttaagtgatgcgcccctctctggaaatccaagggttttctatcactttccacgggtccaccgtttgtatgtggccatacncccaaggcgtttcccagtcgccctgtgggttctgccaactaaagagaagactcttgtttgcagggacgtgaattccggttagatctgggcccnnnnnnnnnnngcaagtccagcccacatcctacttcgcccaataaatgtctcggggttcttcattttctcttcccggctgatccctcaatttcatccagttcgttctcccattaaagggggattcaagccatggcttctgaaaggcatgtctaataagatgtccactttcagccgcaagagattgttctcttcctccaactgctggttccgcctgcgaaggcgctgatcctccctccggtccacaccgccactaacccctgtctctgctatccactggccattttcaaacttcaggctttgccctgccaggttcatagtcggggatccgtattccaagcccagctccacctcccgggttgatcgatccaaagaatgcaggttggagagagatgccgacttccgaggaggtgtcttcttcggactgaacgtattcccaaagaaaggcatctttggcctgatgaaagcaaagccagtgctcccttctcctgacgcgtcccagaagccggggtccaagcgctccccgaacccccagcaaggactctgtagcccagagttaccttgacccacccgcctcctgccgcctccc

SEQ ID NO: 320809 - DNA, 707 bp, Homo Sapiens
cacactgccgacagagccatttttcatctgaatcaatcacactggaatcaatatgaggtgtgtgacacaactgatgatatccttggccacacttgtcacatataaccatttcattgggagcttctgaatactcttcttgacatattgtacagaccatttccccacttccagtggctcctgtttgaatgtccttccagagaacccaggatttagaactgtcttcaaatatgatgaagcagctctgtttcaatatgtttatctttttgatagtgccaagataaaacaagccatctgaccatctagctaggacatcctgaccctcttcaaatttacatgctggctttttggctttatgtccaccctgtaaagacagcttggtcaagggtgttggggtcttttggtttcgacgtaaaggagaccgcttgtggaccagtgaattacctgcccctgtagagtctctcattcggtcacttcagtggtgccaaccgcttcatacaggaaaaaacaaccaatccgtccccgtgggcgcttcccctgcgagtccgagcacttactgggcacccgccccaccgggtacccggcacatatgcacgcacaaaccgaggtccttggagacaagggttgggggtagaatgagcgttcttacaccggcctcaaacacagcccacttcaatacagcccctcgccattttggtttcccgcggacc

SEQ ID NO: 320810 - DNA, 1604 bp, Homo Sapiens
tttttcaagtatatttactctttattgcattccttcatttgcattaaacaatattttttcaatacagttttggacaaaacacaaagacattaagctcatttaacaagagacataagttaacacaatgtgtgctgctttcatgaggaggaaagaggcaagatcttagaggaatccaggatactggccaccaggaatcacaggatctcacaatacaatccacttctttaaaagccacaaaataagctagggaagaaaacccaaaacaaagaagatatgacatccaagtctccaccaaaagtatacaaatggcaagatttggagatgatctgctttctcacatgaggacaaataacagaggagccacacccaagtgccactgtggccacaagcctcatgggtggcgtgtgaggtaagcactttaggatggcttctaattgcttgtccttgcattttaagcagcagttgggagagagaggcacactccataagtctcatcaccaaatatgacctaattaaattcctgctaagtcagtcagttgtaagacaaatcaccctcaaaaggactcaacgggtgcttccttttggaagaagtgtgtggagggtaaaggaaatgtgttcaatgtattggaatggacaataaaggactgagggagagggctagaaaatgattgatttttctggagaatagtgttttagacactagatagtacagatcatttaaaataaaggataaattctaagtaagtcattaagctaaggaaaaagcagtgatactagtaagccttaatattatactaaggaattgacccacttggagttggacactaattagtgctgagaggtttgtaaattactttaataactcctttctgtttgggggtgtatgctttttccatacctatctttcacatgtttttaacaacatcttctaagtggtaataatgagcatatctcttaccacagagcaaattagttatacttaaggggaagtcacaaccaacacggtagtcatctgactttctattaagaaagatcttctgactgcaacttgaaaacatctctgacaatgattgagaacagcattttagagattcaatgccttgtttcttcaggcaaagagaataccagtcttgtgggagacctttaaccaaatacccagtgacttttagtgttagctcaggacagctgtcagaggatctctggcccacacctcgatttactaagccagatttgcatgtagaaagtctgccttctaatcggccaactgttgtcatgcaacattcatgacactgactgagagttttcaagggtgatggtgctagtagagaggttgaaacgtgtagtgtccacaagtactggatggttcccacccagagggactgagcaagaaggaatcactttagcctgcatgggaaggtaagcgcagcattctaaaccaaattgacaccttccacgagacactaagctatctcagtatgcataaggaagggagttttattgcactaatcatgcagagcgagcacatgttgaaggtagagaacgttccacttagtccagtatcttgagtaagacagtgaagatcctaggccatcttcaccttggtc

SEQ ID NO: 320811 - DNA, 865 bp, Homo Sapiens
  misc_feature (69)..(97): n is a, c, g, or t
gtactttcagaaagtctgacactttcattgttgtgccaggctggttgaaattaaaactctgatattacnnnnnnnnnnnnnnnnnnnnnnnnnnnnngcttaaacatatagtttgtctagaagtttaaaaagctaaaagttaaaaatggtgtaattatgaaaatctaacactcaagatagtttctaaaaggaaatcagtagttaaggatacctgatttcaaaatatttaaagcataacctaactgatggtaggatgattgtatcttgaatatgtggtagggccacatctattgtaggaaaaccttgcttttatcatctgtgtgtaaagggcttaataaggagaagaggccttttgactgatttgtgagtataaatgcatttgctgtttcatttcaaaaatgttgtggaggaaaagagtacatttaacttgtataagagaatatttgtactcctgtccaggctgcaggacctttcttcgagagctttgcacacttgacttgaaccacattttctgatccctttactttgttttagaagcacactgaaaaatctcgttgtttaaagtacaatttgtaaatatttcaaaggtctaggagtcataacttttgttttcatactgaaaatgatgttgatcagagaaaccaactgttttgcttttcattgctctgtgagaaatttgaggattctgttttgctgttaggtaagctaaactcagaaattgaaaaggaaaagactggataaacacaggattttcagtaagaaaacaaccccagtcttgtcttagaagccacttgttgaggagtctgttgggggaaaaaagaggatatgcttttaaaggtagaacaaaccttcttctgtgttaaat

SEQ ID NO: 320812 - DNA, 1566 bp, Homo Sapiens
  misc_feature (21)..(21): n is a, c, g, or t
  misc_feature (50)..(50): n is a, c, g, or t
  misc_feature (78)..(78): n is a, c, g, or t
  misc_feature (150)..(150): n is a, c, g, or t
  misc_feature (334)..(334): n is a, c, g, or t
gctgtcctccaactaaaaaanacaaaaattacccgggcatggtggtgcangccctgtaaatcgggaggctgaaaattncaggtgtgaagcccacccatccccggaccttttcttttcaaaaacatacataaaaatggaaatgaaataggnaccaccagtggctgtgatgcagccaaaacgccctgtctggaaagcatgcgtcctaggtaattttcctccgctttgcccaggcggtctgaggtctgggctggaggcagcgggagggacagggtgcccagtttgtgatctttttcaactgccggcggccacagacaccctttcttttggagatctntcagcctcatggctttggctatctccatcatccttttctcactgagcttcaagtccctctgtaacactgtcaggtcaatttggaagtcatgtatgtgcaaggcaagtatgatcacatatgcagtaatcttcgccttcatagaatccgaaattaagttccgtaatctgccattgttgtaggtcaagcaagtaaagtgcttcagcagtttggtgttgatgatgtggggaactccaggtcccagagcacttttccgcttaactaccctatgagctcgaaatttgatgagggtatccagaaaccatatgcatcgggcctggcggtctcggctctccacatctgatggcaaagacttcaacgcttctatgacaaaggtgcaatggctgttctcctcaatcatcttcagtatttcttctgacgtgacgttcctgaaagcttcagatgggctctgaagagcttcatactccgcaggggaaagaagatcttcaaatttatacacgtcttcaggcttggctgcatcatcatagcagggaggaaggtagagggagtcatcttgcaagtcattgtggatagcatcgctgaccagagcagtcacacccttcgtatcaatgatagtctctgcagctttagccactgcacgattcaaagattcattgccaactctgttcattctcctggtgttcagagctcgcttctgtttggtggtaccaaaggcttcaatacaagaatccatcttttctctgtaagttttggtctgactctctagcgccagttcactctcaactgatacatctgaaaatagtggctgcatattgaacaattcagcatcatatacttccatttggccagaggtcttgttcaaaattcccacaaagtgcctgcacaaagtgttgcatttgagggctccagtcccaaaattgtttcccacataggagagcctatctgtttcagctgccaggatccgttgattcctcttcctggggttggtggaatctttgttctcatacaaggtaaagcgcatgttgcctggactctgtagcttcccgttggagaactggaccagtacagctctctggctcccgtcgggcgccccacaatactgccacctcgcactcggcaacacctccgccgccatctcgcctgtctgtccgccaagcacaggagttaagacagcagcagccacaagcgcacttttaaacacgcgggagcccaggccgcgctgcgggccggaaaaa

SEQ ID NO: 320813 - DNA, 839 bp, Homo Sapiens
  misc_feature (22)..(22): n is a, c, g, or t
  misc_feature (59)..(59): n is a, c, g, or t
  misc_feature (466)..(466): n is a, c, g, or t
aaagaaacaagtgtgaaagcanaacctgcctaaagcaaaagcccaagtagtgaacactncacttcccaaaacataccccagcagaagcctccctgccaagtacccaacagtgaacaggtgcttgtagcacagaaaactcaccccttcttcaacagttgatttgatttgcccacacatcactaatgaacagctcggtggcattttgactgtttatcttatagggcaagataccctgattctgaactcacttaggatgggttggcatgagctgtatcctagtgaaaaaaaatatcccacctacctcctaggtccactcaagacttctgcacgtggagtaaatcaagccataatggagcccctgagaatccccaggaggcgagcagtctggatggtaatggaggaaagggccaggcaggcaggtggaacagaatctcaactggccaagacctggcaagattagatatcncaggggttgagtaaaaggagcacagggaaatatttattttcaccttctgaagacactgtgtgcatgtagctctgacttcccacttcagggaaacttctgtgccgcccagttttatctgggcaagtgatatattctcgtgggaacaagtggtgcgaagcctctttctacacatttcccctccttcctccagtcatctgtggggctggcgggtgggacacactagtgaataagcattgtgtgccacaagtttttatgcagagaagatggaaggaagtttcctcccacaggccccaagataaatataattttaaagcaattaaagcctgcttcagtgggagagtttccgtacaacatgctggtgatattccttcaa

SEQ ID NO: 320814 - DNA, 1113 bp, Homo Sapiens
gtggggcgaacaaaacactgtgggactgacaacatagcagtaatagataggacctcattagaacagttgtagtcacaacttgcaataaccatttttgcgagctgtggatctagaggaaactctgccatcatggatcccaattcagtcagatctccatcatcatttaaagcagccaggtaattcaaaagttccagggctctcatcagagtttcaggagctggtggatccataaaatcaaaatgtaccaagtcatcaataccaagtttcttcaattgtaacacaactgatcctaaattagaacgcaaaatctcaggataggtgttatcctgcatttctgttttataagctttctctgtgtaaagtctgaagcattttccaggtctggtacgtccagctcgaccagccctttgctgagctgaagctttactaatagctgtcaccaaaagggactcaactctgattcgaggattgtagaccttctgtttcgcaaatccaggatcaatcacaaacaccacaccatctattgtcaaagacgtgtctgctatgttatttgacacaactacctttcttccaattgctccattctgttttttgggaggtggaggctcaaaaatgcgttgctgctgctgaggtggaagtgtagaatacaatggaatgattttaatgtcaccaacttcagggcccaaatcatcaacttcacgctttattctcttacaggcttcatcaatttcctcttgaccagttaagaaaagaagaagatctccctcttcctcttcacacatatgaatctggataactgttcgaattgctgcttcaagataatctctctctggttctggagtatagaagatctcaacaggatgtgtacgcccaggaatagttaggagaggacagttatcaaagtaaatctggaattttcctgcatctagagtagcgctcataactataacctttaaatctgatctctgtcttacaacttccttcagaacacccattagaatatctgtagccagtgtcctctcatgagcctcatcaagaattattacaccataacgctccaggaggggatcattcatagcttcacgaagtaacatcccatcagtcatatactta

SEQ ID NO: 320815 - DNA, 942 bp, Homo Sapiens
  misc_feature (52)..(60): n is a, c, g, or t
tccgaaagattaagggttccttgccggggcctttgggttgaggggcctgttnnnnnnnnnttcatgggggccgtgggggcccattctccttttggacgcaggggaaagcttccggccttgagctttttttcctgcttttgccgtcctttctcctgtttctctcgctccttttcctggttctctcgctctttttcctgcttctgccgctctttctcccgctccttctcctgtttctgccgctccttctcctgtttctgccgctccttctcctgcttccgggtctccttgctggaacccaagggggtgctattgccagtgggtgagggaagggatggatgcagtccctcagcagtgaccacaggccctggggcaggcccagcactggctctgcggacggggggcggcggggacggggcccctccagctgcccgggagcctcggctcttgaggccagggaggctgaggaggctggaggaggggcccaggggtggctgttgccgccggcgctcctcgtggatggcccgggacccatgcagtcgccgtgagggccgatactgcagctccccccgcgtttcccgccacttcttgagctgggctgcattctcccgctcaatcagtgcttctgtcaccggcagattggtcacctcatgcaccaggaagtcttcctgcatgcactgctggggcaggttacgcagctgctccatggtctcatacatgccttggcaggagcgcagcttctccactgagcccagcgtgtggcgcagcaggaccagggccacccggaagatgatcttaacgccttcacagaaaaacatgtcccagacacgcagcaccgacgcccagggcagggtgcgggcgaagatgcacatgaaccactccgtcatgtagagcacagggtcaatgcgccctcgtgccgaattcgccacccaggcctcgctcctt

SEQ ID NO: 320816 - DNA, 625 bp, Homo Sapiens
caagctttcatctcatattatttaatcgcgttttaaacttccaagaatctttattgaacttgctcagcatcaagcacgtgtctgaaggagccagggtggaaaaaaaagagtgcccactggcgacagggagggccccagctggcagaccccccaaccacatcagaggagttttcatttcttcctgggctgcttatctgggaagccttcaaagaattcgttacacatcatggcgatgcaggacaggaagacacagtactcttggaagtccacctcgttgtccctgttgctgtccaagttgctcatcagcttctggaaagcagcttcatctgtccttttccccaagaagctgggcagctcccgggtcagcagctcctttagttctgacttgttgagcttgaacttgtcaccctctttgcccgagtacttgtggaaggtggacaccatcacatccagggccttctccagagggcacgccatgacagcagtcaggatcaaaccaagaaagaagaagcgctgaggagagagggttgtagagaggggaagaatggggacggcccagaggtctgacctatttataccccagccaggccctgcccatagcaggggacaggggagagcgaatact

SEQ ID NO: 320817 - DNA, 487 bp, Homo Sapiens
gtgcccactggcgacagggagggccccagctggcaagaccccccaactacatcagaggagttttcatttcttcctgggctgcttatctgggaagccttcaaagaattcgttacacatcatggcgatgcaggacaggaagacacagtactcttggaagtccacctcgttgtccctgttgctgtccaagttgctcatcagcttctggaaagcagcttcatctgtccttttccccaagaagctgggcagctcccgggtcagcagctcctttagttctgacttgttgagcttgaacttgtcaccctctttgcccgagtacttgtggaaggtggacaccatcacatccagggccttctccagagggcacgccatgacagcagtcaggatcaacacgtactatagcaacagcgtgtgcaagcccacatctcagaagcaccaaaccaagaaagaagaagcgctgaggagagagggttgtagagaggggaagaat

SEQ ID NO: 320818 - DNA, 816 bp, Homo Sapiens
gggattcttcccctctctacaaccctctctcctcagcgcttcttctttcttggtttgatcctgactgctgtcatggcgtgcctctggagaaggccctggatgtgatggtgtccaccttccacaagtactcgggcaaagagggtgacaagttcaagctcaacaagtcagagctaaaggagctgctgacccgggagctgcccagcttcttggggaaaaggacagatgaagctgctttccagaagctgatgagcaacttggacagcaacagggacaacgaggtggacttccaagagtactgtgtcttcctgtcctgcatcgccatgatgtgtaacgaattctttgaaggcttcccagataagcagcccagggaagaaatgaaaactccttttgatgtggttggggggtctgccagctgggggccctccctgtctccagggggcactattttctttccaccctggctccttcagacgcgtgcttgatgctgagcaagtccactagacattcgtgtaagtttaacacgcagtcgagcgccactcaatgaaaaagcaggccgggccgctcgcccctccaaaacctttccacaccacttcgttgccggctgggcccatgaggtaggcccacatggtccatagccgatccgtgaagacccggatcgcggtgtggctgactcgccacaagacaaccgcccgtgggacggaggagtggatgatgcaagagaggtcccggactaccaaagtccgcgcgcaacgcacgcgcgctgatcggccctcgcctaactgccacccccggcctcgagcccctagatgccattag

SEQ ID NO: 320819 - DNA, 1415 bp, Homo Sapiens
  misc_feature (1399)..(1399): n is a, c, g, or t
gggaaagtggtctggaagacagggccttcaggtgggccttgttccccactgaagagtccccccgggaaagtgccttgacatgggttgggccactggggctcccagttggaaagaacttgatgtcacttccacttgggccccattcatgggccctctcagcatagtctgctgctgctgggctgagcagaagagcgggctgatgctttcaatgacctggctcttagaatccaacctccttttcctcggggtttcttgctcaggaagatggtgggaactttctgttcttttctttggtgaccacagtcatggccatggtgccagaaagctgggcctccccactatggggcaggcgggacacctgcactgagcggaagacactcttgagggtgttcttcgaagctggcgtccctcttgtcgcctttccctcctccgctccccggggtggcccagccagtagtccacctggaggccaatcacgtccccatatgggctattagggctccccacgatggccagggcgctgctcatagatggggaggagggaggggtggccgtggcgtctcggctcaggcccgagctggagggtggtgatgtggagggcacagtaaggctgaccacaggagaatcgtccccatcgcctgctgtggagggagagtcttcaaccagacccaccttcaccacgccaatgaagggaataaacttctgataggagtcttcatcagggaacttatgccggcaagtcagcatggcttcggccacgggaagctggtgtgtcgtggctgccccgttgacgtactgcatcacccgccctgccacgtccagttgctctgacactggtggctccgagcgactgaacagatctctccaaccagaatccaggaaggaactactgtatttactgtcgactgaccccaagtatttggccacagggtgagaaccgagggggatgatgaggaagcgcatgtagccaagccagtcggaggtcttgttggccagggacttgacaaagaacctgaggatggagctcaggtagctctggcctcccacagcagccaccttcactggcctcggcatggaagagttgcagttgcagtagcgctggatccgggtgagcagggcggacagcacggcctggacctccacggtggagcaggtgcacaccacaggcttccgctggtcctggagcagctcagccacatactggccctgccagtcagtggtgttcaccagaatgacattttctgggagggctgcatctgacaccaggatctgattgagctggtcatacaccacctttcttggaatcagagtgtctgtttcagtcaagctgtccggacgcgtggtcgacgatatcaccgggattccggaccgtaccagcctgctatacgccggacttctntgtcactctcatagcc

SEQ ID NO: 320820 - DNA, 878 bp, Homo Sapiens
ggattgtttaaagaaggcccccaaggattaaaagggccatgggaaggcggtttacgggttgctgcttccagaggggggcaaagccggtctgaccttggcctaatacaggggttccaaggggaacggggtgcggaagcctagggtttacgggacgcctccccccagggtccagggggttggttcctgcgctggcccggtgatgaggtccttcgggaaagggttcaagcccgtccgccaccagggcgtggagggccgggcagagggtggtcagcaaccaggtgccccacatccgggctcagccggctatcacccaacggggcctggaggtggcgcgatgccgatggctccagagatccctccagacacctcccagccacctcccgccaaccattcccgcaccccccggggagctccattactctcctcatcccaacagcctccccccagccaccttcaccttctgcaccaagttccgggcggccccgaaatgcgagatgattttatcaacggagacgctgacggctatcagaagaccaagtgttattccgaggactccgggctcccgcacaagttgtctccggcgggtctgcagtgctgtgtccccgaagggtcttggggagaggaggcgcaggaccgcctgaagcacggggtagctcgacccgagccccggagtgaaatctcgcacacttcccagcactcgctgtcccccagccccatcccggttccctgtgccctccctcagggcacagcccccacctccaggatcccggaactccgggagcgggatggccgcgctcacctcccgcctgccctgctagggcctgtagggcgggagaggacggggcgcggggagggaggtgcagcccagcgcaccgccc

SEQ ID NO: 320821 - DNA, 1293 bp, Homo Sapiens
atatatttggaagaagagcagatttcaccttacaggtgggtataggagggaagaaggaaagtttattttaaatattagcagaaacagacgtgggaagaaacgtcattttgcagagggaaaatgcttctgggatggtgttcactggccattccattcccaggtgacaggaaggagacacatacgcaggaaagggtcccagggctacagaacaagggaggtataccccacaggcaccagaccctccatgccatcccgcccacagcggagccaggtcctcatccactgtggtgatgacacgcagcacttccccacgccggaagctcaactggtcaggtctttgcagcagtgtgatcacagagagcccgcactgccctatgggtttgcaccatcctgggtgctgaggcctcaagctcctgaggagaaggcatctcgggaggtgccccccgcttcacaagagccaacacactcactgtcgggggcagccagctagatggtctcctggactttagggctccattctcattttcttgcgggggccccccaggcactcccaaatagtcttccccaaccagaggccccctgcctggtgccatctcatctgtgggcaggggtctctcctgtgcaccttcttcagctgcagtcccatgacgcccccggtgcccatcgggaaagaggaaagccctcagtgcccccagaggcatagacccgggaggcctgggtcaactgctcccaccagctccctgcatcttcctggagactggaaaaccacagctccaactgcttggtgttgaggaggcccaggataaaggcatggaagcggctacggctgctgctcagcggggctagacggctgacctggctatacagggttccaagggagcgggtgctggagcctggcttcaccgacgcctccaccacgctccaggggctgctcctgcgctgcccggtgatgaggtccttccggaaaggcttcagcccgtccgccaccagggcgtggagggccgggcagagggtggtcagcaccaggtgccccacatccgggctcagccggctatcacccaactgggccttctgcaccaagttccgggcggccccgaaatgcgagatgattttatcaacggagacgctgacggctatcagaagaccaagtgttattccgaggactccgggctcccgcacaagttgtctccggcgggtctgcagtgctgtgtccccgaagggtcttggggagaggaggcgcaggaccgcctgaagcacggggtagctcgacccgagccccggagtgaaatctcg

SEQ ID NO: 320822 - DNA, 937 bp, Homo Sapiens
cagaagaagccagagtgaagctcctcccgaaggtggggatgcccatcaccagcttactggcaggagcccccagcctcaacatgtaccccacagcatagtcagtgttgctgaatctgtcaggacttgcatcctcctgacctcggaacaggggactgtgatggcctgtggtcccacgccaggctccatgaaaatcgtaggtcatgatgctaatgaaatccaggtgttgggatatcttggcaatgtcatagctgctgtcaatggtgaccttccccgcagacagtgctgcgctgagcaggagctgctttttccctggctgggcttcctttataaattcggccttcatttccttgattagggtggtaaaatgctgtttgtctccccgtccagggtagagccaggcaaggtccagcccatcaaagccatgggtgcgcagaaatggcggtactgacttgatgaaagtccggcgactctgggtgttggaggctatcttggaaaatctttgagacccaaagttccatcctccgacagacaagagagtcttcaggttggggttcctgttcttgagtgtgttgagcatgccgtagagcgtcacatcattccactcccaggtgtcgatgtgatcgttgcttatattggcaaagctgtagatgatgtgggtacagaggaagcggtcaagggcatctgggaagcagctcccatcgccttcccggtactgggaccagctggtgtagtagcagaccagtttgtatgcagagcagcactggagcagcaccaggaccacaaagcctgtttgagacgccttcacacccattctggctgcagcagagcagggcagggtgtggcctcttcccttgcccacggctcctggtgccagctacctagacagggcctcttccccaggccctgtacttcctttatatacctgtcccactccact

SEQ ID NO: 320823 - DNA, 510 bp, Homo Sapiens
  misc_feature (171)..(171): n is a, c, g, or t
  misc_feature (227)..(227): n is a, c, g, or t
  misc_feature (281)..(281): n is a, c, g, or t
gaactgtcgtgcctcagcccgtgctcctcggctatttggtggacccgcagcctgtcgtgggaattgagggaaggaggaaactccaactgcatcttcttgctggccatgaactccactatcatggcccggaagtggtcccacgccatcttggctctcccactccctctgggnctgcctccgttgaggctgggctgaagatggagcttcagaggccagagacttccccnagccggcttcttccggccctgtctggcaggtgctgcagcctcctggcctccctncctgccgctggcttccggtcctggtggacgtagcaggtccctggggcttggtggcagcgtggctggaaccctgggagttctcatgggaatagttttctgggacaatatcgtcaagatactcaaaggccgtgcgtacttccccatgctgtgtgaaatactccaccagggtcttcaaaaatgcatggttgttgacagtacgggagtcacagaggaccgccacgtggcgtcg

SEQ ID NO: 320824 - DNA, 905 bp, Homo Sapiens
  misc_feature (462)..(568): n is a, c, g, or t
  misc_feature (588)..(676): n is a, c, g, or t
  misc_feature (709)..(720): n is a, c, g, or t
caacttttgagatttccattttatttaatatatcagcctggcaattaatcatcacctttccaacacattcaagcagatgtttgttgttatatgtagccaggtgttagaccaggaagattggaccaaataatctagcataaagtagaagttgaaagcagaagttcaagggtttttgttgttgttgttttttggtaagtcacctcacagcttattagccagcctgtgtttgaaccaccatttgggtaccttctctgttttaataaggcctcatccctgcaccagcatcctaaccatttttctcaaatgggagagacgggtgctataaacaacccaatttaggctagaaagggaaactaaatattttgtgtaacatccaaatactctctggttggccaattttgggttctaaagaaatgggaccaaatttctcccaacctcaggcctggcacagtggctcacacnnnnnnnnnnnnnnnnnnnnnnnnnnnnnnnnnnnnnnnnnnnnnnnnnnnnnnnnnnnnnnnnnnnnnnnnnnnnnnnnnnnnnnnnnnnnnnnnnnnnnnnnnnnatcagctggacatggtggcnnnnnnnnnnnnnnnnnnnnnnnnnnnnnnnnnnnnnnnnnnnnnnnnnnnnnnnnnnnnnnnnnnnnnnnnnnnnnnnnnnnnnnnnntaggcaacagagccagactcagtcctttaaagnnnnnnnnnnnnttctcccaacttcataagtaaactgcctaaacaaatcaggattcattttaccattcatttagcagaagaggaaggtaacagaagttcatatatttcgccagataactttatcaccctccaacccagactagaggttttgatttaattatctcaaatgaactttaattattttgaacttaggatta

SEQ ID NO: 320825 - DNA, 553 bp, Homo Sapiens
accgaactctggggaaagttgttccaacacagggtttcgttggtgagggaaaaaaaaccgcccacccccacacaggtccactggaatggtgtgaatggggttcccaagcgaactgcccatgtgcctagtcccactgaacatgattgaacattaacattccttggggggcattaaattaaggaatgacacagggaagccaagagagtggcttattcggttggattctgaatcacaatcaggaaatagtctttatctggtgcaaccataatttcatttttcttggagcgaattcgaaggaaggtgagatcgttctgggggtcgatgttcaaccacggtgctccgtgccttcaggatgaagctgtgcatgaggctggcatactgggtggtggtggggttgtccatggtgctcttgatgggaatgccttctgtgttcacgacgatgattccctgcactcccttctggctctgcagtcgcttcagtgtctcctccacctctgccatttccgaccgatccggtagccccgcgtagcgaacacttagcgagtcctgtccc

SEQ ID NO: 320826 - DNA, 867 bp, Homo Sapiens
  misc_feature (32)..(32): n is a, c, g, or t
tttggtggaaaatccaagcccctagtccatgncccgggttctcctaggaaaaacggtatggggccatgttccccttacctaatggggcccgcgcgcccaaacgaatgggtctaggaaggcttcttcgaggggccgaggccggccgaccaatttttggttttttgttaatgttatggtatttgagcattttggttatttttagttaaagaaaaacagctttctccaagggcgacaaagtgaactgaaggtcagaaggaagctgggtgcgggcttcctgcaagctcttgctccaaaacctggaagtgaggagagggcgctccggagctctggggaaggttggtgcacacaggggttccgttggtgggggagaagagccgccagcccacacacggtcactggattggtgtgagtgggttccaagcgactgccatgtgctagtccactgacatgattgacattaacattcttggggggcattaaattaaggaatgacacagggagccaagagagtggcttattcggttggattctgaatcacaatcaggaaatagtctttatctggtgcaaccataatttcatttttcttggagcgaattcgaaggaaggtgagatcgttctgggggtcgatgtcacgcacggtgctccgtgccttcaggatgaagctgtgcatgaggctggcatactgggtggtggtggggttgtccatggtgctcttgatgggaatgccttctgtgttcacgacgatgattccctgcactcccttctggctctgcagtcgcttcagtgtctcctccacctctgccatttccgaccgatccggtagccccgcgtagcgaacacttagcgagtcctgtgcctttctgcccc

SEQ ID NO: 320827 - DNA, 1181 bp, Homo Sapiens
  misc_feature (911)..(1021): n is a, c, g, or t
  misc_feature (1026)..(1043): n is a, c, g, or t
ggggtggccggctgggatcagcctttaagatggcgtctcctcaggggggccagattgcgatcgcgatgaggcttcggaaccagctccagtcagtgtacaagatggacccgctacggaacgaggaggaggttcgagtgaagatcaaagacttgaatgaacacattgtttgctgcctatgcgccggctacttcgtggatgccaccaccatcacagagtgtcttcatactttctgcaagagttgtattgtgaagtacctccaaactagcaagtactgccccatgtgcaacattaagatccacgagacacagccactgctcaacctcaaactggaccgggtcatgcaggacatcgtgtataagctggtgcctggcttgcaagacagtgaagagaaacggattcgggaattctaccagtcccgaggtttggaccgggtcacccagcccactggggaagagccagcactgagcaacctcggcctccccttcagcagctttgaccactctaaagcccactactatcgctatgatgagcagttgaacctgtgcctggagcggctgagttctggcaaagacaagaataaaagcgtcctgcagaacaagtatgtccgatgttctgttagagctgaggtacgccatctccggagggtcctgtgtcaccgcttgatgctaaaccctcagcatgtgcagctcctttttgacaatgaagttctccctgatcacatgaccatggaagcagatatgggctctcccgctggttcggcaagccatcccctttgcttttacaatacagtgtgaaagagaagaggaggtaggggccaagcccccaccccatcccactccccttccctccccagatatttatgtgaaatgaactgcagctttattttttgaaataaaaacttttaaaaagcnnnnnnnnnnnnnnnnnnnnnnnnnnnnnnnnnnnnnnnnnnnnnnnnnnnnnnnnnnnnnnnnnnnnnnnnnnnnnnnnnnnnnnnnnnnnnnnnnnnnnnnnnnnnnnnttggnnnnnnnnnnnnnnnnnnacaaaaacctttcccaaacccttttcttttggcgggccggggccccatttagggaaaggtgaacccgggggcctttacctttgtttcccaaaagaaaaacctgggcccaagaaaaaaggggttgggaatcccccccac

SEQ ID NO: 320828 - DNA, 887 bp, Homo Sapiens
  misc_feature (129)..(129): n is a, c, g, or t
gtcccggccagtgccctgacccaccttcacgggcgcccagttcggcactttggggtcgcctgcccatgatggaaaccgctggcggtggaaggagcccgtcgaatgctgaagacccacagcctccggtgncgccgggccaccacagtcaaggcagcattcggcatagggtgtggtcgcccctgaccaccatgcgcacggggtagacaccaatgcccagcgcgcgttctgggggaactgggaaggtgaggcggcccgagctattggtgacttcggtgccaaagtggatccacttgcccgacagcggctgcgtcatgatgtagacatccaccttctctccagtgagcgtgacgacgtccaggggcccgtacatgaagcgcccgcttagcacctgggggcggccctcgcacaccaccgtgtcgctcgcccggtggttggaagtgacgttccggatcttgacctgcgtgcgttttcgctgccacttctccctggggaaggccgggctgtagatggacggctcctcgcattccgccagctgtggccgctccttctcgatcacctggcgcaggatgaacgccaccacgtcggcggactcccagtagctggcgtggaagaggtggggcagcgtgacggtgggaaaggcggtgagcgcctcggggcagtacagcgagtagtcgatccgcttggtcccccaccagcgctccaggatcttaaccacctcactggtggtgctgggggcggctggctgggccggggggtcagtggccaactcactgcccttccagaaggcaccgctagtagaggtgggtgttgagggcaccagcatctccagctcctccagaaagaggctggagtgcgtctgcagagtgtaggccagcagcagggatgag

SEQ ID NO: 320829 - DNA, 1345 bp, Homo Sapiens
  misc_feature (143)..(143): n is a, c, g, or t
  misc_feature (196)..(196): n is a, c, g, or t
  misc_feature (234)..(234): n is a, c, g, or t
ggaccaaggggtgaaaggcccctggggggaataaaggggcatttcgggggccccccacccagggcccggggtgtggctttcagtcttccaggggaagaagggagccaccccggggtgggccagtagaagcccttccagggganccttcaggctggccatcattgatggggagtgcggggtgccaccccaggcagtnctctcctgctcgctttcctctgcccaggggcccggccnctggacaggcggccccagcagcggacggtgtagcccattgtagagggcagtgcctataaggagtatgaggaagccaaggatctgcagtgcatggaaggcctcccagcccagtgccaggctcagtgcccagatgacaacggtgcgcaagctgtccaacaccatgcgggtggtggcgctcagttccttggtgacgctgatgcctgcgaagttgaagaaggcaatgctgctgatgttgcccagcagtgccacggcaatgagcggctgctggcccacctggcagaaggcgtccaatgcatcctccagtgtcccacgagggtttccgctgaaggagccggcggggatgtagtacatgggcaccagcagcagggagaggatcacaaagccaaagaggccctcagtgccaactgcccgcagtgggtgcacattgtgtttgtagacgaacttctcctctagcaccatctggatggcaacgatgatctgggccatgatgatcaacaggtcccctgtgatcacttcgctgagcttgtgctgactgtcgtgcttgctcaggaggtcagccaggcccacgaccaccagccccgcgatggtggctaggatgcccagccactggctcagcaccagcctccggcccaggaaggccaccgagaacaggccagtgaatatgatcactgcaccccgcagcatctggaagctggaggcactggtcatgttcagagccacatacatgaggctggtccctgtcatgtcacagagcgctgggggcaggaaaagaagagggttgaagggctgctgggggtctacgctggagtctgattgccctgcagctctgcatcggaggaggtagaaggcagccaggcaggagaattctcccaggaacatgcccactgcctggaggaagggatgctggaagctgtgctccttgctccctccacagccctcggccatgaaattgtccgcccattttgccgagagcgtgttgatggagccggtaacaagcatgagcccggccaggaacagctggtacttggtccaggccatgtcggcggacgctggggttcgctccagttagcggcgccgggccccgtcacccggggtctcctgcgcgagcgct

SEQ ID NO: 320830 - DNA, 1589 bp, Homo Sapiens
cgtaagttggcaaatttattttaatggcagtatggtaagaattcagtccaaagagcaaagattcattttgatgaactatttgatcatacaacatgcagcggcaaattttcaattcataaactatttttatcactcagtgaggattactattatagttggcataatcatgagaactttttcctgcttgattaaaagcatttaccattaccgttaggattggctatgacatgcaagagggcccataaccccgccaaggatgtggcattcacctccccagcatgctcagttcgtatattaatgggctgccttgatttaggcttgaacatgaaacacaacacacttcaggaacatgtgtctcaacagagcttcctacaccttccccactagctaatcagacacgggtcatcattgtttggcttgacttctccttccagcagcagattcatcaccgccctttgtcaaatagctgcatgttcctctttttcccaggggaggagtgttgtaaaaggaagtcatgtcatcttgtttttcaatttcctttagccgactctgatctttttgaaattcattaaatgcttctttgaccagtctgtctagatctactttgtcttgaaattctagctcggggtttctttccagtacaatggatacaaccataagtaactctacaacgatctgtctgtactgtggctggtcaatatttcccaacgtgtcttcaacaaggagagagaaattcatctcatacatggtcatatctgacagggttggttgctgaggcaaatgcttcccagcaacaatgatcccattgggcgtgcgctccagaatctgccacactcggtcatagaacccggtgggagttctattcaaagacccatcgatctgacgcctgttcagccaacatcttccattctgttgaggctgcagaatatccagcagaagctgtttaacttcactaggtgacagctgatacaagtccaaggctggcttgtctccgccacggatctgaagttcatactccatggcatggatgatccacccgattcgtattttcagcatgccactgaataactcagggttattggagatgatccagccaatatggatgaccagttcttgctgaatgaccgcttccctctcatcatgggtgttacacttataatagatgatgttttgaatcactcttggagacaaaggattagagataacttcttcttcatgcccaaaggcaccccagagttacctgtttgccctgcactaaaacattagtaatggatggggcccaggctgtccactactttacttaaaagacttgctgcacggcgtacaaccgaccaaagtttttggctgccagctcttctatagactctctcaatgtgatcagaaacggtaccttcctttgtgatgaagttggggccttctcttttgagcagtatacccagcaggatggcttggctagccagacaactgcaatcattcagtttttgaagaatttcgtgggtgggtttgtccttccattcactaatgttgacatccggctgctgtcccagttcaggagcactaggggtgctgctttgccgtttgacttttga

SEQ ID NO: 320831 - DNA, 353 bp, Homo Sapiens
  misc_feature (105)..(105): n is a, c, g, or t
gacaggggtcaccaatggttgggcctggacctcctccctccccagcaagccagaatccatccacccgcccttgtccaaaatagcctgccatgttccctctttttnccccccaggggaggagtgttgtaaaaaggaagtccatgtccatccttgtttttccaatttccctttagcccgactctgatctttttgaaattcattaaatgcttctttgaccagtctgtctagatctactttgtcttgaaattctagctcggggtttctttccagtacaatggatacaaccataagtaactctacaacgatctgtctgtactgtggctggtcaatatttcccaacgtgtcttcaacaa

SEQ ID NO: 320832 - DNA, 1222 bp, Homo Sapiens
  misc_feature (455)..(471): n is a, c, g, or t
  misc_feature (476)..(488): n is a, c, g, or t
  misc_feature (1187)..(1187): n is a, c, g, or t
  misc_feature (1212)..(1212): n is a, c, g, or t
gggtatatccaccccaatagtgagggtgacagagaaacggcgcgataaagtgcgaggaagaaacacacccacctatcgcccgggatagacgatgggcgtccagggcgggcgggggaccattgatatttggaatattcagaaaggctccggccttgggacttcccctggtgggtatggaatccccggtgagagaggccctcccgggacctctccctttgtggggatttttttccaggaaccgcttccggggttcccccccgcgggcggtttttttatttggtagagaaaatcccaagcccactagtgccatgacccagggattttccttgggaaagcagggtattgacccatgtttccctttacctttctggggccccgcgcggccaaaacgaaatggttttgaaaagcttcttcgagggcgcgaggcggcccgacaaggtttgttgttgtctgtnnnnnnnnnnnnnnnnntgtannnnnnnnnnnnnggaatctggtgtttattacactcgggggagagaggaggtcactcggtccagcggtggccgcagtgtggggctgtgcacacgtagtaaaggcgcatggcgtcctcggcccgcgcactgtgtgactggaagaacacagcctccttgtggccgcacttttggcacgggtggtcctcggtccgcggcaacgtggggtcctgggacacgtcggcgataatctgggtcagttcgtccacttcgtgcgtgatcttgttgacatagatgcagctgttgtcggcctcctgctggtaatcacagttccggcacgcgtagagcagaatgcggttctccttgtcttccttggggtacagcatgttgttacattcctggcagaagcgaatacccacgaagcccggctcgtaagtcccgtcgggctccatggcgacgcgcagcccgcgcagccctcccagccttctgcgcttgctccgccgcgctacaggtcgcgggaggggccaggcctaggtgcttcgccaaaagagggcggagctgcgcacacgtgctggctccccgccgcctcgggctcggctctctccgcgcagaggtttcatggcttgcttcaatcttttgatatcttagagtaattgcttccaatttttggcatcgccgcctcagtttacagaatagtatggatctggtgccagagccgggaaaacgatgcgcatngtaaaccgcaaaacactgagcatcnaggacagaag

SEQ ID NO: 320833 - DNA, 834 bp, Homo Sapiens
tcgcccccgaacaagagggcgtgtcattgtggtaattgtcctaaggcgggttttttgggaattgtggggtgttttatttcccactcgggggggagaggagggagtgtcatttcggtcccaggggggggccggcagtgtgggggcctgtgcacacggtagtaaagggggcatggcgtcctgcggcccgcggcactgtgtgactggaaggaacacagccttccttgtggccgcacttttggcacgggtggtcttcggtccgcggcaacgtggggtcctgggacacgtcggcgataatctgggtcagttcgtccacttcgtgcgtgatcttgttgacatagatgcagctgttgtcggcctcctgctggtaatcacagttccggcacgcgtagagcagaatgcggttctccttgtcttccttggggtacaacatgttgttaccacgaagcccggctcgtaagtcccgtcgggctccatggcgacgcgcagcccgcgcagccctcccagccttctgcgcttggtccgccgcgctacaggtcgcgggaggggccaggcctaggtgcttcgccaaaagagggcggagctgcgcacacgtgctggctccccgccgcgtcggggtcggctctctccgcgcagaggtttcatggcttgcttcaatcttttgatatcttagagtaattgcttccaatttttgggcatcgccgcctcagtttacagaatagtatggatctggtgccagagccgggaaaacgatgcgcatcgtaaaccgcaaaacactgagcatccaggacagaagccaaggcgcttggcttggttgaaggccagtgcgcatgcccc

SEQ ID NO: 320834 - DNA, 243 bp, Homo Sapiens
  misc_feature (80)..(80): n is a, c, g, or t
  misc_feature (107)..(107): n is a, c, g, or t
acctttcagcatcctaggaatttttatactaaaagcaaaatgttttttccagttagtcttcttcaaggaattactattgnccttttgtcacagggaaaatcagtgtngggaattataatttgagaaaattattacccagttacattgaatgtagatggctaaacgattcttacctcagtgtgatgtataatgatgcaacagggacccttgtaaattgtcatacgccaataaaatgtcacaagt

SEQ ID NO: 320835 - DNA, 484 bp, Homo Sapiens
ctttgctttcatgtttattaaagaagatcactaaagatattgactagagaatgctgtgtgctatttcaattacatttgtttttcttttattaacaggaattttgattcttcaaggaagtggctcaatttcaatttcaggtgaccaggtttatcgtgacttttccttcttgtttacttttcgctaggaaggggagttgtaggggcagattcaggtattggaataggaaaattacgtctaaaccatggaaatcttggaaatggaattggtggaagtgggcgaaatggatatgggtaagggaacacaaaaaaccctgaagctaattcatcgctgtcactgatacttcttttttctcgttcctggtcttgagagactgggaaaccaacagccactgccaagatggctgtgatcaggaggagaactttcttcatctcaaacgtttcagtcagttctttctctctgacgctgttatgagaaatggcaagt

SEQ ID NO: 320836 - DNA, 1068 bp, Homo Sapiens
  misc_feature (243)..(243): n is a, c, g, or t
  misc_feature (288)..(288): n is a, c, g, or t
ctccactccttggctagccaacataacccccaacacccccttattcacagagttgctggtggaaggcgtcggtttttccactctgccttcccccacgggaggcgtctcaccccgctgagataccgcaacaggccgaactagtccctcatcttcatccggatctctggcaccaggggtttcctgagctgaccaagccagagattgcgggcagcaagacaaaggtgagatgaaaccatctccaanatttgctgaacttggcaaagctctggaaaacagccccggccctgnggatgtgagtgtgatgctgctgttccagggttcttggctaacgtggtggcccttgaccacattctccaagtcggggaattcctgggcaaagatcccttccagctggtagttatagacccaggggtaggtgtaggtcagctgcttgcccatcttcgagaactgagcgaagggaaaagacacacagagcagggtctgcccgtaggtacaggcgctatgaggccaactgtatgcagcagaggaggccggtggagggaagttaggtacactgtggaccagccagaagcccccatcgtggtcaaggagcaggacacccttcgtgtgcccacgcatggaagagtcttgagccttgctgggttgaggcggttggtcattgtagagcaggaaggcgagctggctggtgttgctccggtacagcggctgcaggcttcggcccacggccccctccgggctgttgatgagtgccctgccgtcccgccagcctccggagctctcgtccagatacttgtactgcagccctctctgcgccgcctccccggaccctctaagagctggcagcttgtagaccacgaaccagtctacaggctgcccggagtccccgtagcaggtcagggccccggcggggacgcacagcagcgctgccagcagcagcgggatcatagctgctatggggctgagatccaggaatctgtgtcgggactgcggggcgctgggttacatcagaggccaggactggcacctggcgcctttcacttccctaaacttgcctgggaaccggggcgg

SEQ ID NO: 320837 - DNA, 686 bp, Homo Sapiens
  misc_feature (74)..(88): n is a, c, g, or t
  misc_feature (585)..(593): n is a, c, g, or t
ggggagaggaggatgagcagaactcctatgcagcctgagagaagttctctatgtgtctgtatatgtacacctcnnnnnnnnnnnnnnnaacctcatggttgtgctcaggctgacagggaggacaaagagtgaaaaggaagcatctctttcttgttatccaacattgcttcaaagatgcccaacccccgtagtagcaggcagttcccaagtggagggtcggggcagaggcctccaccaaggccatcaataaccaggtgtgagctacaggtctctgtgtaatgtgaagctctcccgtatttcatttctgcacccaggggggccggctctgcaggattgcttacggagaactctgtgtctggcacctctctccacaaggcccaggcgccccagggtcccaccgacctgccccaggaatgcatcacattgttctctggtgctgtaatttggctgcaggagctaggctgaatgcctcccagggatgagaaacatactctccctggcgtcctcccttcgccccagctagcttgagcttctgccctatgaccactgagtgcatttaaataaaaacctcagaaagactgaggnnnnnnnnntcctaattatctctcttctgttaagccatgtagagactcgtgtcctgagtgggtctgagaatttggcaaagacttactggttggtgttcttga

SEQ ID NO: 320838 - DNA, 551 bp, Homo Sapiens
ctgaatgtgcaatatttgtgtctcttggtttctaaccttggcggacctgctcccctctgtactgtccccagtggtatgtatgtatgtgctaggcagtctggggaccccctgtgtctctgaccacccccctgacccccgccattactttcttttctggagtgccatgctggcgaggatccggatgcggcagcaccctctttcgggctgcatccacagagtttgtgtccacactttctctccgagcatgtgggtctcgctgagcagtcatggaatgcggtagagccagtggaccctgtctgccccgaataactttcagtagtatggcagatggcacagagaaagggaatgggctctggggacttctccttctatgaaagcctcctcgagccaggtgctcctgggcaccttcagaagtgatgtcctgtgtgctccacagctcacctgcttgccaaggtacgtctgggtagtagtttctggaaatgactgcagactgtgccaaatgtcttttgagcttctgacctgaccatgcccagatggcataacttttccct

SEQ ID NO: 320839 - DNA, 577 bp, Homo Sapiens
acaggcttggagcagcatctcatcagtcagaatctttggggacttggacccctggttgtcgtcatcactgcagctctccaagtctttgtttggcttctctccacctgaagtcaatgtagccatcttcacaaacttctgatacagcaagttgggcttgggatgattataacgggtggtctccttagaaaggctccttatctgtactccatcctgcccagtttccactaccaagttggccgcagtcttgttgaagagctcattccaccagtggtttgtgaactccttggcagggtcatgtcctaccccatgagtgtcttgcttcagtgtcaccctgagagcctgagtgataccattctccttccggccgaggcctttgccttgagtccatccatgctttagcagctgctcctcagcaaacttcatcccacgactcttgacctctggggtgacattcatggtgagaaaaaagtctctatcctcagactctcaccagagaagaagaggtgatatcatccgtcattgctgggtccgctccgcggaaacatgtgccggacctgacttgtgcgccgccatcttc

SEQ ID NO: 320840 - DNA, 657 bp, Homo Sapiens
ttttgggggggcttgctctctgactgcagttgaggggccccagggtcctggcctttgagacgagccaggaaggcctgctcctgggcctctaggcgagcaagcttggccttcattgtgatcccaagacgggcagccttgtgtgctgttcgcccctcacaggcttggagcagcatctcatcagtcagaatctttggggacttggacccctggttgtcgtcatcactgcagctctccaagtctttgtttggcttctctccacctgaagtcaatgtagccatcttcacaaacttctgatacagcaagttgggcttgggatgattataacgggtggtctccttagaaaggctccttatctgtaccccatcctgcccagtttccactaccaagttggccgcagtcttgttgaagagctcattccaccagtggtttgtgaactccttggcagggtcatgtcctaccccatgagtgtcttgcttcagtgtcaccctgagagcctgagtgataccattctccttccggccgaggcctttgccttgagtccatccatgctttagcagctgctcctcagcaaacttcatcccacgactcttgacctcgtcattgctgggtccgctccgcggaaacatgtgccggacctgacttgtgcgccgccatctt

SEQ ID NO: 320841 - DNA, 1757 bp, Homo Sapiens
  misc_feature (102)..(137): n is a, c, g, or t
  misc_feature (277)..(306): n is a, c, g, or t
  misc_feature (336)..(427): n is a, c, g, or t
  misc_feature (432)..(441): n is a, c, g, or t
  misc_feature (560)..(577): n is a, c, g, or t
  misc_feature (588)..(588): n is a, c, g, or t
  misc_feature (625)..(749): n is a, c, g, or t
gctgtttctgcacacacccaccccccgcggtggggagggtgttctcccccaccttctgtgttgtttgtagaaggcggcggccgacaaatgaggagacaaaannnnnnnnnnnnnnnnnnnnnnnnnnnnnnnnnnnngggcgaaaaatatttatttcccccacgcgcgcccacaaggggttcgtttttccccccgcgggggacttcaagtgtttccccccaccgccgttggggggaggggtctccccctcgcgcgcgaaaagctgttctgaaatttnnnnnnnnnnnnnnnnnnnnnnnnnnnnnngggcggggggcgcaattttatatattgagnnnnnnnnnnnnnnnnnnnnnnnnnnnnnnnnnnnnnnnnnnnnnnnnnnnnnnnnnnnnnnnnnnnnnnnnnnnnnnnnnnnnnnnnnnnnggggnnnnnnnnnngggggaaacccaaccctctttccttttcccgggtttttcttggaaaaaagatatggcccttttcctctttcctttggggggccccgcgcccccacaaaaagtttttaaaaatttttttnnnnnnnnnnnnnnnnnnccccaagaccntttttttcttttgtttttttcttttggccgcgctccnnnnnnnnnnnnnnnnnnnnnnnnnnnnnnnnnnnnnnnnnnnnnnnnnnnnnnnnnnnnnnnnnnnnnnnnnnnnnnnnnnnnnnnnnnnnnnnnnnnnnnnnnnnnnnnnnnnnnnnnnnnnnctaggctaggagcgcaagctcatgtttattcattcatttggtagcgctagaaactggcaactgtgggctaaatctagcccatagacctaaatttatgtttttcttaaccttcacaatatttagaaatcagagcacttcacataggtctacattttcagcttcttttagcaggaatgctccttcaaagggtatctgcattcctgttcccacagcccccagcattccttgtcctttagctgcctggcttctaggcacctgagttcatggttcctgggttagaagctgcagaaaggactgtgctgactccctcaactaaggggtggtactaccgcttgctcctctcagcagctgacatcccagagatcagtttcctttctgggagggactcctcattgaggggggtgcagaagacctgcagacctgcatcaaccctggtctttgaggcttcaactcctgaaaatcaatcaattgagccctacctttaccagacctttagtctctcttcttctgtttctttttggctttctggacagtgctgactccagctctttccttcttgggatgctgctgcctcttcctcttacctctgctgcttgagccagtgtgtgctctgctctctgcttccctagccccgctatccttctcatcccttacatccaagatgtcctcctcctcttgatgctgctgtcttttcttcttgcttttcctgcttcttccatcactgcatgctctgctctctgcttccctggttccaccacctaaaacagtttcctcacctctatcttctaggttcaagtcctcctcctcctgttgctgcctcttctttcttcggctgcatgggtcagcatatgccctgctctctacctcctctgtcctgacactgcctgcagcctccttgccttttcctccttcctccaagacccccattttctcctcttcatccgtcattgctgggtccgctccgcggaaacatgtgccggacctgacttgtgcgccgccatcttcccc

SEQ ID NO: 320842 - DNA, 784 bp, Homo Sapiens
aaaaggtttccccttgggttttcccaagccccaattcaaggattaattggggttttgtggtgggaaaatgggcctgggaattctcccagccccttggctttttcactgcccccaaatcatatgctcgaggacactgtagaactccctaccccactgccattgttcagcagatgggtggctacagggaatgacttgccccaagcaggacagctgagattgccagaagcggtggcggcgtgaagtgggaaacacagagctggagggaccagaggaggcgatgagaatcagcggagagccagggagtttgcttggtttgttatgagaaagcacacccacagcagggtcccagggcctcttcagtaggagagacaaggcctcagctcctgcagccccagtctttgtgttggatgacacaagcatccggtcaatcaaggttgggatcttccccttcagcgtctgcaaagcatccaggtaggctgccagcatgggcagactcaaggtctccacaagggtggtgtgcagccactggatcagcttggtatcccagctcacacttgccagagcctgccgcactctccttgcacacttgtccacagcaacacggcgcagcactggctcattacaagccccttcgttggccaagcgggcaagccggtcagactgcagggctttgaggatcttgttgaatagcttgttctgggccattgtccagccagtcctgttgacatgctcctcccagtcctctggtggaggaggggcatctgcatcagtcctggcaaagatg

SEQ ID NO: 320843 - DNA, 599 bp, Homo Sapiens
gatagaggagaggcttcatcttgggcagaaggactcccaaccacttgtccacagctgccaggtaatctgggtcggaggagcggagaagaatagactctttctctagcagccaagcaggtaatcctcccatttcccactctgcacagatgtagggcccgggcctcaggataaccagcagtcccagctcatgagccagccgaagaaaatattccacatcatggtcctcagaaaactggtactgtcctggccagggctcatgaaagttccagggcacatacgtctggatggcgttcagcccagccatcttcatcttcagcagccggtccttccagtagaagcggggcacacgggagtagtgaatgcttcctgagatgtagcgaaatggctggccatccttgaggaaggagtcccggctatagtcaatttcaaacatcctctgggtggcattgcgcaagccgcgcgtagggcccagaagcagcagaaccagcagcagagggaggatgcgaaccaggaaccccggcatgaccaccagcctcccggctctgcagtcggcgcccaggccggccgcttcgcgtcacttgactaaggacccacggcct

SEQ ID NO: 320844 - DNA, 712 bp, Homo Sapiens
ttccaaacaaattgccaaacccccaagaactgttgccagagatggaggaaaaggggaaagaggcctggaaggacaccccatccttgctgggcttgtcccaaatcttatggcttctaaagaacctgaaaggcattagagctcttttcatccaatttacagacaacgaagccgagagaagtgagttggtgacagagctgagggaaacgtttaggcccccgatgaacggtcctgtgctgtgaaagctgcccacactgttctagatcacacggaatattcagtgtgttagtttttaaagggacactcagtgccctctgccttttccccatcctcttcgttccacaggtctggaagccctggtagctcttcctaacagccatctggccatcaggcagtgggcatgcactacatgttcgtttgatgtaagctgcatttcttgtcaccactcctggcaacacgaccaggcttgggcactaccccaaagcccacctttcagaccctctgcccacagtctataattttgttcctgagataggacaagctctttcccctaagcctgtcccacgtcccacctgggctctttccctccctcctgttgttcatgtctcacatgggtaccaaaagaaaaatgcacacacccgaaatgagttcaaaccagccgaaacaaaactcaggcagtggagactttggacggtgttgggagaagcagctttag

SEQ ID NO: 320845 - DNA, 1253 bp, Homo Sapiens
  misc_feature (561)..(561): n is a, c, g, or t
  misc_feature (597)..(597): n is a, c, g, or t
gttgggcggaaaacaccaagggtttgcgggggggaaatttgggcggtgtttggaccaagggggggccattttctaaagggcgactccataatggggtaagtggccaaaaacttgtttggacccggggacaggagggaagacaccttggggctgagggctcctggggggccccggtcggttcgcccttcatttgcaggaaaaacgcctttgcccttttttggaaagcggtttttctcatcctccggtttgtggcacaaagctgaggcacaggcattggcttgccctccctggttcagggacacgtaggtgaagaaggcactggcggccccggtagcgcttttgtgagttgtccaccacagggtcagcgtccaccaggacctcaatctccatggacttattgcttgtgaaggtcatgcgtccggagatggtgatgacacagcctttccggatcttgtcgtggaaattgatggcatccacagaggcagttactatgttggtcttgcagtggcgtgcagccacaatcccagccacctcatccatgagcttcatggtgacacctcncgtgcacgaagccgtgcagggtgcagtctgagggcncccaccaggtggatcaggctggactggctgtagctgacagtgttcggctctgggttgaggactggctggacgatgtccccgttcctccacttggtctccatgcgctccagcttctgggcttcataccgcttccggccctcctcctcctgctcctgccgggaatacacaacaggaggcacctcgaggaccttgtccacattcttcagcgacaggggcacataccacagggtggccttattggtcagctttttggcacctgtgaggatgttttcggacatcacgttgacctgcacctccacagagtgcttggaggtgtaggtgatctccgcgctgacatgcgccacctcaccgatgcacatgggagacaggaagtcggtgcgctcgacacgagccagggcggccacacagcgctccccgttctggctgttgcaatgccgggtgctgatgatggcgcctgcctcctcgatcatcttcaggatggtccccccgtggacattgccggccacgttggcatcatctggccgcatgatccggcagatctggatggcggacggcgtctcgacgtctgggcccgacatgctgggggctgcggcggcggatgcggcgggcggctgcagaagggcgcaggtgtctggcaggcccggcgcggaatgaat

SEQ ID NO: 320846 - DNA, 578 bp, Homo Sapiens
ctttcgcagaagtttatcatggcaacgaaaaagttcaaagaagagttttagcaggcttgatggattgatgagattcttatttctcagcaagatcaaagctttgcaaaatgtcattcgcagatctggatccaatacggtatgattgcaggagagaagatctttcacctcttgaggaaaattacttaggtactctgggtagcagtgactaatctgtaacaaagcaaaggctcttctgaagttgctctctttctctcctataattcagatgcatacatttaggatgttctgtgccataaacatcaccagctctgctagttctttgctgagtgtttatttggttgcaatttgaaaatctccacattggatttgtagtgattatactgctgtagaaactcctcgatgtaggccggcgggtctcgcttgattagattctgtaactgcggcaggttgctgggaagcttgttgttgtttctgttggacattttggctgcagacagacttcgcggcgagcagttttaaaaaaactcagacggccggcaccccgcaatccctgccagctgcagcttggactcgtgttt

SEQ ID NO: 320847 - DNA, 792 bp, Homo Sapiens; identical to SEQ ID NO: 125597

SEQ ID NO: 320848 - DNA, 1164 bp, Homo Sapiens
caaggaggctttttaagggggaagaattttcatttcttctaaccagggaaaggggaccagaaggctttcccattccccccattttttccttgaatggggaagaagttggaccctggaagttccagtggcctgaaacctcagaaatttagggtaagggagctggaccccagaggaataaagttttcaagtagtagaaggggcatttcctttcagtccatggatttggggcttctggcatgaagcaagccaggggcctggatgttaaggatttagatttcagtgggagaggaagaacagggcttgtaaccagagtggagctcctcactctgcctccccatcctggggccgagagagcaggtggagttttctttgtagctgggcccggaggtagcggaggtcttgctgatcaagcccgtgagccaggcccaggtagagggtaaggaggaaagcaaggaggagacggtccgtgcccagggtaggcaccacccacagcactgtcagcagctccacacacactgggtggcgcaggtgggagaagagtctgagagcccggggagacttcagggccagaggctcgcccagccccagcacatggtagtatacctgtttgaggcccatgagctcagcatagtcaaagacgagaaggatgttaaagatgaggagccaggagatgacatggagcacaaagcagaggagcggcacccaggtggcccatggctcagcccgagcctcccacaacacagggcctttgggtatgggctcccagtaccgcatcaccagctgcaaggccagggcagtgcaggccacatacagtgacctctgaaggaccccaaagtaccgggatgtccatgccttcactctttcagctgccatgaggctgtgctgcccaacaaatagaagcaggagccccagatcccatgccaggggggcaaggatgctgcggtcctgcagggcagccagccatccctggcgggcatccggaccaccagactccgggatccctccaagaagtggccgaagggaggtaaagcgcacgaactccactccggtgccaaaggccaggatgaaagaggcgagggcagcagggatcaggagcagtgcaggggccatggcgagaaatcgacgcgtggtcgacgatatccctactctccggaccaggttacc

SEQ ID NO: 320849 - DNA, 451 bp, Homo Sapiens
actcggccccatggagacgccgccggccgccgctggcgcatggcggggagctgtggcgcggggccttccaggagtctgagctatgagtggcccctgtggagagaagcctgtcctggaagccagccccaccatgagtctgtgggaatttgaggacagccacagccgtcagggcaccccaaggccgggtcaagagctggccgctgaggaggcctcggccctggaactgcagatgaaggtggacttcttccggacgctgggctattcatccacggagatccacagcgtcctgcagaagctgggcgtccaggcagacaccaacacggtgctgggtgagctggtgaaacacgggacagccaccgagcgggagcgccagacctcaccggacccctgccctcagctccctctagtcccgcgggggtggtggcacccctaaagctcccaacctggagcc

SEQ ID NO: 320850 - DNA, 638 bp, Homo Sapiens
  misc_feature (85)..(85): n is a, c, g, or t
caagtgctcctgctgccaggcgcagctgggcgacatcggcacgtcctgttacaccaaaagtggcatgatcctttgcagaaatgantacattaggttatttggaaatagcggtgcttgcagcgcttgcggacagtcgattcctgcgagtgaactcgtcatgagggtgcaaggcaatgtgtatcatcttaagtgttttacatgctctacctgccggaatcgcctggtcccgggagatcggtttcactacatcaatggcagtttattttgtgaacatgatagacctacagctctcatcaatggccatttgaattcacttcagagcaatccactactgccagaccagaaggtctgctaaaaggtcagagtaatgcagaatgcgtgccttcatctcagatttgttcatcacaggtggatcccatgtgtcttcagtagacaagtcacctttgtagctagcaccagtgccagctccatgccattgcaccttctttagtcttgattgcccttcccgcatttattggtgtattaaaatgactgaatatgaacattaaggactccatgaacctgggctaatgggagactgtagagaaaatgaaaaaagatccaccagaggacatcttggggagggggagggagctggg

SEQ ID NO: 320851 - DNA, 537 bp, Homo Sapiens
  misc_feature (18)..(18): n is a, c, g, or t
  misc_feature (35)..(35): n is a, c, g, or t
  misc_feature (53)..(53): n is a, c, g, or t
  misc_feature (66)..(66): n is a, c, g, or t
ccacggtaccccccgatnccccaatgggatgaatnccattgccaattgccaanggaaaaaccatgncctacaatgtggaacaggcacttggcatgttgttcctggccataaacataacattgagaagtccccttgcctgatctcccctaatttcactcccctttccggatgagtggacagtggaagataaagtccctatttgaacaagcctttagttttcatggaaagagctttcacaggattcagcaaatgcttccagataagacaattgcaagccttgtaaaatattactattcttggaaaaaaactcgctctaggacaagtttgatggatcgccaggctcgtaaactagctaatagacataatcagggtgacagtgatgatgatgtagaagaaacacatccaatgggatgggaatgatagtgattatgatcccaaaaaagaagcccaaaaaagagggtaatactgaacaacctggtccaaactagcaagattggacttggaagaagagagtatcagaaagtttacaacatcgcc

SEQ ID NO: 320852 - DNA, 467 bp, Homo Sapiens
gacgacatcggtgacacctctgccgcactttcggggagtgcagccttcgaacctgcggtgactgtcgtagtcctcagagcagggcacctcgatgaatctccctgccacgacctcgccacggcgggccaggacctctgcgaccccgtcgtcggcccccaagctgctccagagcaggagtgcggtgagcacaaagccagcccccaggcccgcggtccttagccatggcctctgccacagcctctgcacctcccgcggggctcggtccttcttggtgctgctccggttccggcgctcggccgctccgttgccctcgggcgcattggttgcggccctccgctgaggagccatcggaccaggccgccgcggagccgggccggacgcgggcgccaggcccggggacgaacgccgtaacagggagcgcgaggcaggcacggcgcagggacgcgagtgcgacgcgctcggccatc

SEQ ID NO: 320853 - DNA, 732 bp, Homo Sapiens
agggggagagcttaaattagttgcccggtttttggggtgaactcgaccttcaaattcctgtttccagatagtactccaacagctacaaggtctccctgtgtgatggcttctaccacaggttcaggtaaaggcccactgttgccatgcaggtcatgcagccatagcccaccacgtcaaacccaagctgagacagataaggcatgactccgctttcttgtaggtagtaggtgaccacgccactcccaggagacaggctagttttgatgtaaggcatcacgttcaggccagcatccacagctttctttgctaacaatcctgcccctaacatcacagacggattactggtgtttgtgcagctagtaatggcagcaatgaccacagaaccatgagcaagggtgaattcagtgttatcatagataaaggtcttatggtcattatgatgttcaggagcaacttggaatcctttaaatccttgcttgtctccaaggcagctctcaaagtcctttttcatgtcggacacagcaactttgtcctgaggccttttgggtccactacagcaaggcactactgttttcaaatctaattccacaacctgggtgaagtctgggtcttgagaagggtcattgaaatctcgaaacattcctacagcctgaagatattttttaatatactttaatttttcttcatcacgaccggacgcgtggtcgacgatatcctacaactgggaccgta

SEQ ID NO: 320854 - DNA, 668 bp, Homo Sapiens
ggaccgccgtctcagcctctctgtgcctgatctcctggaggctgaggccttggccccagagggccggccttactccgggccacagtcttcctacacctcggtgcccagcagtctgtccactgcagggatctttcccaagagcagcagtagctccttgaaacagtctgaagaagaattggattggagccaggaagaagccagtcacctccatgtggtggaaacagactcagaggaggcctatgcctctcctgctgagcggagacgggtgtccagcaacggcatctttgatcttcagaaaacttcccttggaggggatgcaccagaagagccagagaagctatgtggaagcagtgacctgaatgcttctatgacatctcaacattttgaagaacaatctgtaccgggggaagccagtgatggcttgagtaacctccccagcccttttgcgtacctcctcaccatacacctgaaggaaggccggaacctggttgtccgagatcgctgtggcacaagtgatccttatgtgaaatttaagctgaatgggaagacgctgtacaaaagtaaagtcatatataagaacttgaacccagtatgggatgagatagttgtattgccaatccaaagccttgatcaaaagctacgtgtgaaggtatatgatcgagatttaa

SEQ ID NO: 320855 - DNA, 1688 bp, Homo Sapiens
  misc_feature (86)..(86): n is a, c, g, or t
  misc_feature (88)..(88): n is a, c, g, or t
  misc_feature (322)..(330): n is a, c, g, or t
  misc_feature (387)..(387): n is a, c, g, or t
  misc_feature (425)..(426): n is a, c, g, or t
  misc_feature (446)..(446): n is a, c, g, or t
  misc_feature (539)..(539): n is a, c, g, or t
  misc_feature (708)..(708): n is a, c, g, or t
  misc_feature (1678)..(1678): n is a, c, g, or t
taaacaagaccggggtgccgggttgaatgttcaacttataccaggggcgacggctttgtgtatgcggagcagtgatgcttattcancnaagggatggccctctatcatgagtagataaatacacaggggtgcgtggggtcgagaatgtggggggggagtgatttgtacaatgcaagtcagaaccgaaatgcgcccctgttagtagcaaatactttccttcctttcacctgtatgtggggaggggaaaatacctctacaaatttacccccccgcctatgatacgccgcataaacacagaaaagagcggcggaataaataggannnnnnnnntgtggagatctgtaaacagaggggataaaatgttcccaccaggagtgggggggcccncgagggtataaaaatttgggtccggtgggcgggacaannaaaaagaaggagtcaacgancacttaagttttgggtcagggtcgttttatggaagggtccaaatatttggacaaaaactgtctcgtggggcccccgccgagtttaagaaatgngaggcgagtctccgtgcttggaaagaggcgacgccgatagacgggtatgtccctcgcaagggaaaaatatggtgtttccaacagggtgcattacatgggttccaccagaaaaggcgaccccaaggcatgcaaaagacaaacagtgaggtgtgtgtctccagagaggagngagccgcggtaataaggtgttatgaacgggtggcgggcgccccagagggtataataaaaggggcgcgcaagacggtcgcgggcacaagagagagcggggtacaaaggtaaaacgcgttccaaatttattgcgggaacactggcggggggtttgggaatattggtgggccggggtttgtcccgccgtagccatgccatgggttgaacccatagggtaagggtaaacgcccatttacgcggacaggtagacctttggccagggggttgtggtggcatggtagtcgggagatcccatggatggtgggatcgggcagttcagtcctgatggtcgccttgtgcgtgcattttggtaagaaggatgctgggccaaggtaacggggatgggctcagagctaccacctgatctggggcaggtgaagaggaagtagtggccgcggagggggtcgagcttggcacgcagccagtccaggttggcttccaggtactccatgcagtagagcaggccgccgttgggccccaggcgcagcgcgtccatcacgtcgcccagccccaccagctcgcccacgtccacggcacactcgtacggcagcccctcgttggccgggtccaggttcaccaccgccacgcgccggcccagcgcgcgcaggaactcactcatgcccaggcagtacgtggtcttccctgagcccggcgggccgatcaccgcctgcccgaaggccgtggtcggagcggcccctgccattggcggcccgcggcccggagcaggtcaactcacagggaaaacggggcaggtagccgcgccggagacgagactgagggcgagggtcccagtacgtatacctcgttggcggccagcgtcactcgcctcaggcggaacagctgagaccgtgtcgcgcaaaaggagataacaggccgcctcgtctgaaacgccaccccgccacggctccggtgtgcggggagtgcgcgagtcncaggagaaag

SEQ ID NO: 320856 - DNA, 1079 bp, Homo Sapiens
  misc_feature (103)..(103): n is a, c, g, or t
gccaaaaactgccccggggaggtaaggtgggggtggtgtggcccgtttctcccttggcggagccccagaccagccggttagctcccaggtcattagccctccnttgtaggcccgaaagcagccttttggaggcagctggggctgagcatcccaaaggagcaaccgcacctgtgccaggaacacctccatcactcgcaccatgtccaactcgactctcactggcagcactgaggcattataggtttggagtcaacattatataccataatgccaccccagcgggggactatggaaggcattggtggccactggagcgccatccttgtcctgaatgtacagcggtgagtgtgcaagctcaggcacgtagagtagaaagttgagcacagggtacaaggaggcagcactggatcccagccgggactccactgggttgatgacatgggggaggctgtgcatgtccaaatagtagctggaggaagctgagtcaaagcggggattcacccccaacattgcatagtaaagaatctgagagtccacagagaagttgccagcggcaccgagggcattcaggaaaggttgcacatagcgccggacagccccctcaatgtcccagtagacatcatgggacttggggtctgggttgagtaaactgaaggtgatctcatagcccaagctggacttgagaggccgcctcttctcagcgctccacttgtcctctggaaggtggtcagccagagcagcagcaagcacatcctcagtcaaagacatggcctgggccacctggactatgcggcggccaatgatgttaaaggcctcccggtgcattatcccccgcaccactgctgtcctcttgggcccaatgtagctcatcatgtcctggggaagaagtgaggagtgttcagatatcacgtacacagtcagggagccctccgcttgttcctgaggctcatctaacatggcttctgcctcttgcacactgcccgatgacagggcctcctcctcatggtccaaagccctccgataggccttctggaaacggcatttgattttcattttgtatttcagaggaatctctcttt

SEQ ID NO: 320857 - DNA, 898 bp, Homo Sapiens; identical to SEQ ID NO: 130884

SEQ ID NO: 320858 - DNA, 367 bp, Homo Sapiens
  misc_feature (281)..(281): n is a, c, g, or t
  misc_feature (343)..(343): n is a, c, g, or t
gtcgccctccgtcgtggcctggcgtggattccgagcgttggtgtctggcggtttccgaccgttggtgtctggcacgcgccaccccgatgtaccagacaagaagacaagaaaatgatttgaggacagcttcaatcgcggtgtgaagaagaaagcaacaaaacgaccactgaaaacaatgccggtggaataacatccaaagaaagggtcccaagtggtacatcgtcatagctggaaacagtgcagagccaccagccaatgatctttttcaatgcttgcgaaanttgcccaaaagtgacatggcaggatttcttgacagggattctggggccccttccccagcttnccattccctaccttcaagattgtt

SEQ ID NO: 320859 - DNA, 1570 bp, Homo Sapiens
ctaatttccctttaatttgtagatttaaccacagaactgtctcgatttttataaaaattgatcccaagatccaccttctgccgtggctgccacagtccaggctgagcttttcctcctgagccacacacgtgtgttcccgtccagcccaaaggggagaggtgtggggcggcggggcggggaggcgccttgtgctgtggcactggacacggtgctcatctgcaggatggccacgaagacaaacggcacagacgaagacaacacaagacacacgagcctggtcttccatcctcaggactaaaactgcgctgagagcaattcacataatctctgagaaacggcttccttacttgtgcgcagcgtgagccggtacatctgggcttgcaggttcggctccaagcgcagcaggcatccaatctgggtggttttcgtgtggatgattccagctcccacgaaattcgcaggattaggatcaacttcttcaagaagtgcagaaccaaatccaatgatcttggctttggtgacttctgtgtccattgggtgctttgctttgaagatgttctgcacttcctgctgtggattgctcaactgcttccaacgttgaaagaaatcctgagaagccatttctttgggctggaagaatttgttgagagtgatgggcagctgcacagacacgttctggaaggtgcccccatacctgaactgaatgttgaggactggcgcctccgtgaagtcggacacgcactctatgttgaccacctgctgcacctgcgcgcccccctccacggtcgggtccacgggcttggtctgcaggttcaggttaggctgaaggtcgtctgaacagattagtgttggggtaaagtttaggaactgcgtggaggtcttattaccataaaagataaacatccgacctaaattctgccgaaattcagacttaagtccaatttgaagcagctggttttcaaacaaacacaccattgtttttacaaacaaacctggcaaagttgtcttcggagccaggagcgagaggcgcgaccacagaggccgagtctgagaacacgtccacgagcagcccgctgccgccggaggagggtgggggccccgcggggccaaggggggcagccccgagacccagcaggtctgccgacggagaaggcgtagacacggcgctggtactggctggggcaggctcaggacccccgttcacgtccacactcctgtcccgcttggtgtcctccaggtctgtcaccgtgctggggcccttcttcttcttgagctttgccaagatggaggactcccgctccgggaatgggggcatctcctccagcacggtcgccagaatgtcggtgctggccacggtgctgagccgcaggtactccacagcacgctgctgcagctccacgtctgcgttcctgagctggctgtcgctgcgcagcacgtcctggatggtgggcttcacctccgggaagaggttcacgaacttgatgtaggtggacaggagcagcgcgcgggtggggacgctgcacaggtggaacttggcctcgtgccgaattcgccacccaggcctcgctac

SEQ ID NO: 320860 - DNA, 1611 bp, Homo Sapiens
  misc_feature (226)..(318): n is a, c, g, or t
  misc_feature (426)..(426): n is a, c, g, or t
tttttaacggccccgaaaaagagggtgggaggcccctggggaaacccggaggggaaaaacatttccatccacctttccaggcccctttccagggggtttccctcctttctttcctgggcctgccccagttccaccttgccaagcccggggctcggggccgcccagggtagttcaggcgtttgtagaaagcagccctcccgcagaaagccctgccgggtcaaatctnnnnnnnnnnnnnnnnnnnnnnnnnnnnnnnnnnnnnnnnnnnnnnnnnnnnnnnnnnnnnnnnnnnnnnnnnnnnnnnnnnnnnnnnnnnnntgatctctgtggtgacagggcaggattgaactcctggaaatggactggaaagaaggcctgccagccagagatggcattcatgcgacagcggttgaggacttcgggccncaggccttgtccacacggtggtaaggaagaagagagtgtccacagggtgcttcttcgagaccacgtccatgagtcgcacctgggaaggggcctctgctcgcacagcgagccaggccagcctcgtcccagggtaccgtcgctctaactccgctgctgcagccttcaccccaagaaatgggtctggagctccacggccaccttctcgtggcccgtagaccagcaacagggtgagcaatgcatgttctcgtggctccaggacattggctgcaaacgcctcgaggaaagccggggctgcagcagcttcagccaccaggagtggcagcaccagctgcactcgggtggcctcagtgacatagggcataggtaggatttccacccggctcagtggccgcagcaggctgaccctgcgagccagggcccgccggtgcccacgctgtgtcacacattccaacagcaggtccagggtgtactccatgccccgtgctgggtcgaagcgccgatagccgttgagcagtcgctgcttctggaagcgcaggcggggctgatagcgccgattgagctgctccagggcagtctccaacgcatcacccacgtgcgccctgctagccccctgtagtgggcacttgggagccccatctgcacaggagaaggtgtgctgctctgtgaagtagtcccagcccagcacctcaaagcgagagtgtggtgtgaaaggagcagggagcccaacgggccagctcagccctgcctccccttcgggggtcagcacggtcaggttccggatctgagcctgcagttgttctatttcactgtaagcccgctccaactccagagcgctgaagcgtttgtggagccggtacatgagggtaccttcggagacagggtgcacggcgaaggcactcaggaaagccgagctcccttccttctcagggtccctatttttggccagttcaaatgagcgatactgctgcccctggtgctgtgagacacagccgacgcccagagagtcaatgaggcagcgtccaagccactcgtcaggacgggcactgagaatgtctcctcggcagccatccagatgtggccgcagacgaagcaggagactccgtgacaacaggtagccaaagcccccatgacagtaccgggcctgctcgcctgcgccaatgaactcctctgcccggcctaagtaca

SEQ ID NO: 320861 - DNA, 557 bp, Homo Sapiens
ccccaatgggtagtcgatgagtcctcctccagcctccccaaccagcgtgttgaggtccagctccaggaattccccggtcacaagcgggaggctggagaaggtgtactggacacttcccagtatccccagaggaatcagagaatccacgaggcccagctggtcattgacaagacccagcaccacatccacgatggggcagagcaagtcagggaggacgtcggccaggactcggttcactaaattgtccacgagattggggagaagccattgctcaacacatctttcgtcaccctgaggaccgtgtttgtctcgtggctggtgccacacacagccaccacagacagcgcagccacacaccaggccatccacatgctggcactgcttccctttttgaacttctgctcccaaatcacaaacaagttgtatctcatacatagtagacactcaataaagagcagctattgttattactttgggactgttatttcagacccccctaggaggtccctgccgctgagtcttgagaagtcctgttccccagcccctctgctttttgg

SEQ ID NO: 320862 - DNA, 1298 bp, Homo Sapiens
  misc_feature (496)..(496): n is a, c, g, or t
ggcggagtgaccacatagagtaaaaagaatgtaaccctctttggttttatgtgttttggctcaggttggacatacttatataaatgtgattgacattgaagctaatgatcttctacaggaattacctgtgagagaagagccttcaaatgataatgttatcaaacagcaaagcgatcatctagcagttccatcgtctgcagagttacattatatggcagcttcagttactaatgctgttcccccacataattttaagagtcaagaagtaactccagcttgtctggatggaaaaagcttgagagcaggcattacagaagtgaaggagcctagtgtcacctcacctacaccatcagacatacagcagaacaaaggtctgccaaaaccagagttccgattcaaaggacagagcacaaagtcagactctgcagaagattatctattgtggaaacggctgcaaggtgtctctgcagcttgcccctgcacccaagctctgcangctcacccaactagagcatctcagtgcctaagccttcagaaaattgacgagcagttgctagccaatacagaacattgctgaaaacatagaacaggatttccccaagcctgaaatgctagatctacattgtgataagattggaccagtggatcacattgaattctcttctggccctgaattcaaaaaaacattagcttcaaaaaccattagcatttctgaagaagtgcgttttttgacccatatggatgaagaagatcaaagtgacaaaaaggagacttcagaacctgaattttcaataacagaaaattattctggtcagaaaacctgtgtgtttcctactgccgattcagctgtcagcctttccagttccagtgatcagaatactacttctcctggtatgaatagcagtgatgaattgtgtgagagtgtttcagtacatccgctccagatgactggattgactgatattgcagacattattgatgaccttataattaaagacggagtttccagtgaagaacttggcttaacagaacaagctatgggcacctccagattgctgctctctgaacactatagtcgtcgaatctcacaagcgtacggtctgatgaatgaactgttatctgagtcagtacagctaccaactctaccacagaaaccattgcctaacaaacccagccctactcagtcttccagttgtcaacactgcccttctccaagaggagagaatcaacatggtcacagttttctaataaatcgacctggaaaagtcaaatatatgtccaaaccgagttatatccat

SEQ ID NO: 320863 - DNA, 1295 bp, Homo Sapiens; identical to SEQ ID NO: 134544
  misc_feature (71)..(81): n is a, c, g, or t
  misc_feature (388)..(398): n is a, c, g, or t
  misc_feature (492)..(554): n is a, c, g, or t
  misc_feature (709)..(844): n is a, c, g, or t

SEQ ID NO: 320864 - DNA, 486 bp, Homo Sapiens
tttcaataaaacattcaatttattggtctttgtggagaattagatgcatcaccagtatattacaacagagccattaatcttgtagcttcatcaacattaactggtttgctttcatgacgctgctgaggaatcagttctttcagcagaggttcaagtgaaatgctttttgcgaaatgtgcaagttccttttgtacatttacaaaagctttatttactctgttaactttttcctcattcataatgtttatcttcttaagattagtggtaactggttttgctttgtttttagccttaaagtttttttggctggctatgtgaaatacattcctggacttcggccctcttaatttgttcttggccattgttgaaacagcaatgcttttgaacgccaacagtattcctcctacagaagtttaacacttgcgtgcagctttttaagctccaggtaacaccatctggcacgtacggcgtctaggaagttccccc

SEQ ID NO: 320865 - DNA, 485 bp, Homo Sapiens
  misc_feature (198)..(234): n is a, c, g, or t
  misc_feature (237)..(237): n is a, c, g, or t
tttggtcgcgtagtgggtgggggcgctgggagcgggagccgccgccgccgccggagctaacctcggggaccgagatgcagctgctgccgcccacccctcgtcttctggctgcctccctctttgtgccccacaggctccccctctccacctcctggggcccatcatgaatggtgccccttccccagaggacggggcctnnnnnnnnnnnnnnnnnnnnnnnnnnnnnnnnnnnnntanttggcgggagttctgtgagtcccacgcccgggctgcggctctggactttgcccgccgttttcgcctctacctggcctcccacccccaatatgcggggcccggggccgaggctgccttctcccgccgttttgctgagctcttcctgcagcactttgaaaccgaggtggcccgggcctctggctccctgtcgccacccatcctggctcccctgagccctggtgcggagatttcgccacatgacctgtccc

SEQ ID NO: 320866 - DNA, 835 bp, Homo Sapiens
cgggtcacggacactgcacgtagctggcaaggaatatgccttggcgcccgtgccctgatgcgtccctcgtaccagttctcgttcacctcgcggatcagcagatgtgctctccctgcggaaagacagctccacctccaggtcccccttgaaggtgtactgggccacagcctctccatactccagcacctggtagttcgggggcttgatgggcttagggatctcatctgcgggcagcacctccacataattagcagggaagatgcccaggcgtccgtggtgctctccctccagccagttcttgtccacctccttgtggatgtagacaatgtcacccttctgcagagtcagctccttgggggactgcgcctggaagtcaaacttgagcctggcggcctttctcttcttctcttccctcctggctgggctgccccctccgttagaggcactagggtctcgggttgaggaagggtagacaaagtccctccgacttaggaaggggcttcctccatcagccattttgtggggactcagggaccgggcggaacccaggtaaggtgcatgtgggtagctggagctccaggctgaggccgggctcctcccagggcgtctcccgggtcctgggctctccacaggatgtcctacttcccgagtcgctgcgcggggaagggtgaggcccggcagggcccagcgggagtgcctgggccgtggcggggccgccctaaccgcgctgcgcccccggcggccgcgaccccggtcctctgctaggagttagctgccctcggtggcgcgggaacggcgccccgcagagagtggcgctgcggtccctcccggacac

SEQ ID NO: 320867 - DNA, 1063 bp, Homo Sapiens
  misc_feature (907)..(945): n is a, c, g, or t
  misc_feature (972)..(972): n is a, c, g, or t
acacacatcttttatatcggatacttaaaaccctcttggtcgttttaaagcaggctggtacggtccggaatccctgggatatcgtcgaccacgcgtcgcctgattgctgccgtttccccgcgcagagctcgccggcgccccgacgggccccggagcagcggcccccggccggaccctagtgcctctaacggagggggcagcccagccaggagggaagagaagaaggtaaggaggggaccaggtgtgggggacctggagtggtcccaaggctgccatcctggatctgccacccgcccaactgagagagcccactctgtcctctcccctgcctagagaaaggccgccaggctcaagtttgacttccaggcgcagtcccccaaggagctgactctgcagaagggtgacattgtctacatccacaaggaggtggacaagaactggctggagggagagcaccacggccgcctgggcatcttccctgctaccttatgtggaggtgctgcccgcagatgagatccctaagcccatcaagcccccgacctaccaggtgctggagtctggagaggctgtggcccacgtacaccttcacgggggacctggcaggtgcgcgctgtccttccgccagggagacgcacactctgcctgatccgcaaggtgaccgagaactggtacgcagggacgcactcaccgggcacggggcgccaaggcactattccctgccagctacgtgccggtgtctcgtgaaccccggcctccggctctgtgacgacggcccccagctccccacgtctccccgcctgaccgctgccgcccgctcagcccgtcaccccagctccccctccagcctgcgcagcccaactgaccccaccggactggggggacagacctcccccccgtcgcactgggnnnnnnnnnnnnnnnnnnnnnnnnnnnnnnnnnnnnnnnaaaatcttgggcacccctgggtccagnctcttgtcccaactctccgaggtcccaagcccttccccctgggaccctggggggaccctccctcctccctaaacaccctctttcaaaatat

SEQ ID NO: 320868 - DNA, 959 bp, Homo Sapiens
ttttaatcattatattcttttatttatagactctgagagcaaggacccaagcacagcctggtgctcttggatagagaagaaagcagctattgtccacactcagaggttgctgaggtgccctcccccactgatctggaatgatctacactgctagtgaagaggagggatggcaagctgactaaataagaaggcagggaaagaaagtccgctttagttctgagggctgtgacattagatgagagtggagccctgggcatgtcagccagccttctgtgtaacgcccgcccaggtcccattgtgtctgttctcttggtcctccactgttgcccacatcttcctccaggcttgcttaagtgcccctcactggagtgcatgagtaggtcgcgttgcagcccagcctccaggctggaggtcagtctggctgtgggagggtcggtcagcagagtcaatttgttgaaaacacctctgccaaagtagtcagcaatcacagaaaagctgtcattggagcacttgagctgatgctggaattgatcatggagatctcgtttctgttcctgggcccggatcatatccatgaccttccggttttcagggaggcaggtggggcagtcagcatcactttccgagtaactctcaaagcagtgttggtggaaggagtggccacacaggaagtggactgagggcaactccaaggcactgttacagatgctgcacttggtcttttggaaaatcttaggactggccttgagctcttggatctccctggcggatacgggtggtctcctctcggtaccgccgcacccgcagctcatcctgtgcaatctgctggctctgtttctgtagtttttggaccaggtagtccctgatgacggagagtgtggctgtggagttgtgggccagggtctgcaccactagaagaggtggcatgaggttcttgttctcgatatgcttgaggacag

SEQ ID NO: 320869 - DNA, 1838 bp, Homo Sapiens
  misc_feature (732)..(732): n is a, c, g, or t
  misc_feature (761)..(761): n is a, c, g, or t
  misc_feature (766)..(766): n is a, c, g, or t
  misc_feature (974)..(985): n is a, c, g, or t
ggacggcgctgcggaccaatcgcgtgcgtctatgcaaatagcggtcgttctggcgaactctgctcccgcggggtgagagttggccgctcttcggcgatgctgcccgcgtgtccttttctccgtgcgcgtcgtcaggcgtgtcctctccgcgtgtccacccacaggccgcccgcagaccacccccgccgcgcgcgggacacgacgccccccgcaggacccgctcatcagcccggaaacccctgagctgcttctcccggaggccgatgcccacccgggagcccccaaagactcgcggctcccgggggcacctgcatactcacccgcctgggcctgggcccccgctgcagggactggcgccccgaggcctcaaaaccagcgccccccgccctccgtgccagccccagccgggaccccacaaggcaaagaccaagaagattgtgtttgaggatgagttgctctcccaggccctcctgggcgccaagaagcctattggagccatccctaaggggcataagcctaggccccacccagtgcccgactatgagcttaagtacccgccagtgagcagtgagagggaacggagccgctatgtcgcagtgttccaggaccagtacggagagttcttggagctccagcacgaggtggggtgtgcacaggcaaagctcaggcagctggaggccctgctgagctccctgcccccaccccaaagccagaaggaggcccaagttgcancccgggtttggagggagtttgagatgaancgaantgtcccctaccaggggtcgctttctcctggattgcaaatgcctcttcagtttggactcagctctgacagcccctcctccaggaaggccttccaggacttcctcctctgggtcctctagctctgacctacagggactccagatctcaacctgttccctggaagtagggcctgctctccatcccagtgaaataaacatgtattagacccnnnnnnnnnnnntaaacccgactcactaccaccaataagtactggcgcgccgcgcactaccccccacatccactacccttcccctctgcccaaaacccccctcctcgacagcaccacctttcccggccgcgcggcctcggatcggccggcgccgcccccgcccggggcgcttatcccttcccgacgcctcccgctcccttccgtctcccccccttcgtttctctcgccatagccatcgcttccgcgcgcgctgtgccgccgccgccgtgcccgacgcccctactcatcgcgcgctgcgggcctcgaggccgggccttgcgggcgggcctaacgtgtccgggcgtcgtataaggctcccctccgcctctcacgccataggcgcgcacgggcggccgcgcgcaccctggtgctacgcgccgtcggcacacccgccgcaacccattggacggccgcgcatgacccacgcgccctcagtacatggagtgttccccatcttcctccgccgtggtctggtcgccgccccctacaccctctgtatgccgtcctggtcggatcgcgcccgtcgggcggcggcggtgcccgcttcctcttcattccagcccctcgcttacacttatcgctctcgtctcgctcagctcgccagtgtgtcccggacaccgcctctgcctatgcctctgtcacctatcctctctgtgttcctgtccccgccccccggcggcgccggtgatattcggttcttcgctccaccgctctcgccgaccggcgtgtggtcgctacaaccgctatggccccatcatggtggatctcctgccgctcatcgccccgccgtcactatgttccccattgccgtgcctctcaacccaca

SEQ ID NO: 320870 - DNA, 1706 bp, Homo Sapiens
  misc_feature (425)..(425): n is a, c, g, or t
ggtgtgaggacttaaattttgtgttacctcccaagagatactttttgagagtatagaacacagctcttgggagtacagttctctacgttctctactaaatcttaataaatgcttgacatagttacagctttaaaacatgagtgatttgccaggtccttatgttgtcaccatagagcaacaaaggtatagggctgccttcctcttatttatttggggacattattttgttatttagataccaaggcctaattaattaagtacctataagaactatttatttggagtaactgagcctgtaactcaggtttatggctgttaagtatagattggggaatctttattatgtcttctcctaagcagtttaaccaaatgtgtggttagtgtttttttattcccctaagacagaaagaacaaaaaatgttttnaatttctcttatataggaaataataggaacgtcaaagctctgtatacctactaagtggaaaacaagaccatcatctaagtgatttgagaaattaacaaaagtagtgactacacagcaataattacagtaaattaaataaagattccctttaagggcagacaagggctaagatttccttagcagtaataatgacatacactgaattgaaaatctattttattacagaaagatcagtttctaacaaatgaaaatgtatcacctgttccttaactgtgtaaataataattaaatttctttgaaactggaatctgcaggtacaggtattctttaatcattattggatcatctaaagtagaagctgtcctgaggaagaggaagcttttgatcttaatactagtatctatataaaatggtgtggatgaacaatcatctaaaatcaatctattttaaataggaatttcctcctgaaaagtttcttacttgctacctactacccacaaaggactgatatggtacagtaccgggattgttcaactttagcaaagatctccaatgcattcttcttctcatcacatctgtcagaatctgctaacagtacaagaaaacagacacctatgaaatcatctaacctgctagcatgtcctttagacagcaacctgtctgagggtccttcagaagcacatttacaatttcataaaacttgtgttcgtatgccaacttgtaatacaggtaaacatcttcacaatatgtgagtaatttcttcaggttttccatgaccatgtcagtaggctgatgttgtttatattttttggaaatctacttcaaatatactggactttaataacctttgctgcttaaattcttccaagtaattaaagtctcctttaagaatcacttgctggtataaaatttcagcccaatctggaacaaaatcgtaggcctcagccacaatagaagcctggtagaaccgaggtagggccagaatacagtccatcagcttgtggcggcccaagttgatgagcattgtgttctggccagtgttcagaaagtgaatctgcagagttatcaacttggtgagccgctgacagtgctgggcctgtcgcacacaggagtccttggcataactctctgctgcatccaacatcagagtcagggccttcagcagcagttgtttcagctggtgcccatccttgaggctgtcctcccagggctgagactcaatcaatttcagttggatgcggcagctgcctcgtggttctcgccaatctcccggcacatgct

SEQ ID NO: 320871 - DNA, 885 bp, Homo Sapiens
  misc_feature (41)..(50): n is a, c, g, or t
ggtacggccggaattacgggatatcgtcgaccacgcgtcgnnnnnnnnnngcaccaaaggcgtatcctagctttattaaagggcccgcgccgcagagtcaatataaaaacacaaaaagtcccatcagtttaataacaataaaaaaaccccaaaagtggaaaactgagggggcaggggaagagacccctgggccaggggcacgaggagccctgctcatggcaccaggcctggccgcagggtcccccggtattgctgttgctacgaggttggggggcagcgattgtcctgtgggagccaccgttctcctgggtcggggaccctcacttcttctggggtgtgctcagcttctgcatgccccggatcttgtccagcaggccagaaatgaaggcctctgtgggtttgtaacagtcaaccagcagctccttgaccctggcagcccgggcatcgtcactctccatgtccaggagctcatccacgtcaatctccagttctgggatctcctcttcctggcagtcgtagaggcgcgtgagctgctccaggatccactcctctaggttgaggcgcttccgtagctccttgcggtcatacttgacggtgaccttcccttggcgcctcactgggccctcatcgtccgccccgcccgggccctctcctgcggcccgggggggctctgaaagtagacgcgtggtcctgggccggcattgcccggcccggggccggggccgcaaaggccggcccccggggtgcggtgttcgcatggggcggtctagagttcctcgaggggccagtttcgcgtaccagttcttgtcaagtgtcctagtagtcgtttaagtaggctggcggttaaatcggctggacgcattggtttggaggacccatcggggg

SEQ ID NO: 320872 - DNA, 748 bp, Homo Sapiens
ggttcgtaaaactcatttattcaacaaagcagtacaagcctccccttcaatcaggacctgcctgcaggggtgggctacttcagtgtcttcagccaatgggagctagagggtttaatactttagtccacttcccttcatctctggccccatcgacaacatggggaaggggagtgagggcctggtagaagggtactaaggccccttatttcgttcgctggtagaactggaagactgctttctcctgctcataggtctcgatggagccgggtcgtagtcgtcggatttcagcaatggcatctcctgcagccaagccccgctccttcaccaggtaacaggccagcatggtgccagtgcggccaaagcccagggcacagtgcactcccacagcctctccccgtgcgttggcctcgtccacgatctgcacgaagcggtcgatctggtcgggggccggcgggcagaagtcggggatgcgcaggcggtgcagggtgaggccggggcagctgtcgctgtgagggggcccgcgctccgtcagggacaccaggtgccgcacgcccaggtccaacaggaactggtagtgggcggggagccgcggcagcgccagtcccgccagccggcccggaagcacccaggagaagttggggggctgcacgcccatcgctgggaaagggcacaggacagcgggtcatgggggccgaggctggccagccccgctccgcccacgcgtcccctcgcccgctccgagccaagt

SEQ ID NO: 320873 - DNA, 439 bp, Homo Sapiens
tgtttattaaatgcttcatttgtatgtcaaagctttgactctataagcaaattgcttttttccaaaacaaaaagatgtctcaggtttgttttgtgaattttctaaaagctttcatgtcccagaacttagcctttacctgtgaagtgttactacagccttaatattttcctagtagatctatattagatcaaatagttgcatagcagtatatgttaatttgtgtgtttttagctgtgacacaactgtgtgattaccaggtatactttagtagacattttataactcaaggataccttcttatttaatcttttcttatttttgtactttatcatgaatgcttttagtgtgtgcataatagctacagtgcatagttgtagacaaagtacattctggggaaacaacatttatatgtagcctttactgtttgatataccaaatt

SEQ ID NO: 320874 - DNA, 476 bp, Homo Sapiens
gtcgggaggtccgggaaagtttctttggaggtccggcccggagcggccatgtcccacggccccaagcagcccggcgcggccgccgcgccggcgggcggcaatgctccgggccagcatgggggcttcgtggtgactgtcaagcaagagcgcggcgagggtccacgcgcgggcgagaaggggtcccacgaggaggagccggtgaagaaacgcggctggcccaagggcaagaagcggaagaagattctgccgaatgggcccaatgcaccggtcacgggctacgtgcgcttcctgaacgagcggcgcgagcagatccgcacgcgccacccggatctgccctttcccgagatcaccaagatgctgggcgccgagtggagcaagctgcagccaacggaaaagcagcggtacctggatgaggccgagagagagaagcagcagtacatgaaggagctgcgggcgtaccagcagtctgaagccta

SEQ ID NO: 320875 - DNA, 992 bp, Homo Sapiens
  misc_feature (906)..(906): n is a, c, g, or t
gtagcgaggcctgggtggcgaattcggcacgagggggtccacgcgcgggcgagaaggggtcccacgaggaggagccggtgaagaaacgcggctggcccaagggcaagaagcggaagaagattctgccgaatgggcccaaggcaccggtcacgggctacgtgcgcttcctgaacgagcggcgcgagcagatccgcacgcgccacccggatctgccctttcccgagatcaccaagatgctgggcgccgagtggagcaagctgcagccaacggaaaagcagcggtacctggatgaggccgagagagagaagcagcagtacatgaaggagctgcgggcgtaccagcagtctgaagcctataagatgtgcacggagaagatccaggagaagaagatcaagaaagactcgagctctgggctcatgaacactctcctgaatggacacaagggtggggactgcgatggcttctccaccttcgatgttcccatcttcactgaagagttcttggaccaaaacaaagcgcgtgaggcggagcttcggcgcttgcggaagatgaatgtggccttcgaggagcagaacgcggtactgcagaggcacacgcagagcatgagcagcgcgcgcgagcgtctggagcaggagctggcgctggaggagcggaggacgctggcgctgcagcagcagctccaggccgtgcgccaggcgctcaccgccagcttcgcctcactgccggtgccgggcacgggcgaaacgcccacgctgggcactctggacttctacatggcccggcttcacggagccatcgagcgcgaccccgcccagcacgagaagctcatcgtccgcatcaagggaaatcctgggcccaggtcgccagcgagcacctggtgaggagtggggcggccccacgatgcanaggagaagctgtggggcgcgggccctgggcaaaccccaccccggggaccaaaggctggggggtccaccctttgggggctggttcat

SEQ ID NO: 320876 - DNA, 1090 bp, Homo Sapiens
  misc_feature (159)..(159): n is a, c, g, or t
  misc_feature (444)..(444): n is a, c, g, or t
aggtgacttacggcgcccccacgcggctctctgatgtttaatttgccacaacccccggggggttgtatgggctcttctaggacacaagggggtccccggcgccgcgcccagccaggttgtatctcccctttttggccaattacggtggggggaccgtgncaccatcttccttacaccaagggtgcttcggcttgggcgaaccttggggccccagggatttccctttgaatgccggacgaatgaagcttccttggtgctggggcggggtccgccgcttgaagggctccgggaagcccgggcccatgtagaatttccaggagtgccccaggctggggcgttttcgccccgtgcccgggccccggccagtgaggcgaagctggcggtgagcgccctggcgcacggccctggagctgctgctgcagcgccagggtcctccggtcctcncagcgccagctcgtgctccagacgctcgcgcgcgctgctcatgctctgcgtgtgcctctgcagtaccgcgttctgctcctcgaaggccacattcatcttccgcaagcgccgaagctccgcctcacgcgctttgttttggtccaagaactcttcagtgaagatgggaacatcgaaggtggagaagccatcgcagtccccacccttgtgtccattcaggagagtgttcatgagcccagagctcgagtctttcttgatcttcttctcctggatcttctccgtgcacatcttataggcttcagactgctggtacgcccgcagctccttcatgtactgctgcttctctctctcggcctcatccaggtaccgctgcttttccgttggctgcagcttgctccactcggcgcccagcatcttggtgatctcgggaaagggcagatccgggtggcgcgtgcggatctgctcgcgccgctcgttcaggaagcgcacgtagcccgtgaccggtgccttgggcccattcggcagaatcttcttccgcttcttgcccttgggccagccgcgtttcttcaccggctcctcctcgtgggaccccttctcgcccgcgcgtggaccccctcgtgccgaattcgccacccaggcctcgctcctt

SEQ ID NO: 320877 - DNA, 1016 bp, Homo Sapiens
atgatccttagatttgcattaaaatatagaagtcttttaaagtaaatgtgaaccttgtctaagtactgtaattccacacaacacattataagaagcaaaccagcatcttaaggaattataaaattaccctatttaaaagccatgctattgttctgctattaccagatttattgtgccacacaaaaggatcatgtgtgtcagcaggggccgtttggaacaaacctagtcattaatgagtaagatactcctgttagttcagggaccaagttttatgacccagaggcttaatgatgtttggatatatttcaaatcggcgtgcttacctcactgatttaaattattttctaaatagtggccattgtagacctgactcaggctgaagctaaatagagaacaatttagaaagttaactaacaatacagtgcattctacccgtagggccaccatgcccttctgcccctggctgatttgatcctgtgtctgatcccattgcaccctgactgggcagtccctacagaaccagtgttaatttgaagggcctccactcaggctccaaatgtggcagccaaagagaacaatccaggaacctacatttatttttaaggacaaatatttcctcctcagtggtcctaatgttcagggctttagagggaacccaggtggtctcttcaccctgtgtcctagaatgggagagtacgtagacagtgttgataaccccacactggttataagtgcatctttatagtatttggggtttcttaccctttgctcttgtactagtacatatccagtttaagagctgccgcatgtgttgctcccacgacaagcacttgtttttggggcactctcctcaatgtctgagggtggcggatgacatgcgtcggcctgaacctcgaaaccgacctgtcttcgccttggtctcccgcgggaaaaacatctacgccggagatcgggtgccatgatcaccacacacaggaggccactccacacagagcgccgccccgtcacgtactgtg

SEQ ID NO: 320878 - DNA, 512 bp, Homo Sapiens
ggtagatgattgtgactgcgagcaggatcccggttccagacccaatggcgcttaggaagtcagccaggaccgagagggccccgatgcacagcccaccaaaggccgcggctgtggggatgtaccggttgagttcatggaccatggaggtctctcggtggcctctcatcaccatctgctgctccttcagctgctttgcaacgtctttggcagaggaacttgagacctcaatccacgttttggagaagaatgcacaggagcccagcatgaacactatgtatacaactgcatggaccgggtcttctaacacggagccaaaagattctggaggggacaggtaatagcaaaggccaccaactggataagcacgtgctgggcccccagaagacgtgtccgaccaggtgcccagcaggctgaccagcaagttgccactgaagcgagctgagagcatttgggagatgacataaaggttggacaccagggcagactgcaggatgatggggatgttggacgta

SEQ ID NO: 320879 - DNA, 976 bp, Homo Sapiens
tcaaggccagttaagacaaaatgctatgactttgaaattcacagaaagaaataacagtttagattaggtcttcaggtattcaggatagagataatctcctgaaaaacctgaatttcagagattcttagactggctgccaaaggatgaagctagtgaaggagaaaaagcttaaattccatcttgagctcttggattgtgataatacaatgatttcattaacttttcatttctgtatacctgttcatttggaatttaatgcttgacttctttgttcattttggatctaaacttctcttttcttccttccccattcacatctattagaagactgcatcaccatttctttggcccccttactctgttgtcctttcccttttctttcagtttttttaatcgcatgtctagtatattaagtctccatagccctcctgatgcagtagacagtgctatgctgtggatataataccaaccagaaattggcatttataaacctgttaagagactttaagcatgcttcaagaggcagttgacccactggaatttctataaggctggtacccttctcagagttacagaatcttgggtgctgtctctagtctgtgagggaggaactcccagcatccccattgcccacaaatggaatcctcactgtattcactaggagattagaaattaaggtttcttcactacttctatggtagggttgtctgaaattccctttcaggctgtgggtactggtcttgggttctagtcataaggggttcccttataaggagcaggccggagggggagtacacttttcatggccatttaattttggatcctgcccctttccaggcggcttcttttcaaaagatatcttcaaaagaatagaaacctcctgggcctggggcacaggtgggctcccacccccttttgggagaggcccaagcgggggaggtggccaaaatcaaccctgtaagggcccaggggaatt

SEQ ID NO: 320880 - DNA, 730 bp, Homo Sapiens
  misc_feature (659)..(659): n is a, c, g, or t
agagcgaatcaaaaactgtctgaaaaggggcactggtacctgcttttcaatggcagcataaattcttgctgccccggggcaaacttccaatttattgcacgttcttggccagggcgggggtggggagacttcctatttctaatcagaacggtactgcaacccagaatccatgcctcgcccattctgtccgtgggactgagactgggtttccgtgcatgattgaaagccaggcacacttaacatttataacaatacaatacaaatatttacttaaaactcacaaaaacataagcacctttaatccatcgggaaggcacctgcagaatgacatttggcctctaaatggatcgtgttggaggttgttaaaaacggaggctttggtgatggtgggatgacctttacgaggcttaccttggaacattttttgaaggtcaggggaaatacacatcttcaagttgaatttagaaaaaaatatagtgtccaaatctggcagtccctcccccaacccctgagacctattcacgaacaggatggggtcgggcgagctggggggctgggaggcatggccccgctcccggggcgcgtggggtgtgggacagagcgtgggggcgggcccgggcgctggggtgcagctaggtcatgtgattcagctccaggtngggggcgcggttccttccctctgttctctccgggctggggtcccacaccccgtggtgccgaggcgtagatg

SEQ ID NO: 320881 - DNA, 628 bp, Homo Sapiens
  misc_feature (388)..(426): n is a, c, g, or t
atatacaaaagcactgtactttatttaactccatacaaaatgtgattaaaaacattaaataggtgatgttttattttgaagagcattaagtcagtttttaaaatgtagttgttttaccttggtcacctcagccattttttattctcctctgttacaagcatgtgctatacacagcaactttctggcttatatcctttaggagtgaacggacttctccttccagtcttgctaattcttgagctttatcttctaagtatctttgattgtcttcatattttctttctaaatctttgagcagttgcagcttgctatttgcttgagctaaaagagtttttgcttcattttgtagcatttcggctttccttctggcatcagctgactcttcagnnnnnnnnnnnnnnnnnnnnnnnnnnnnnnnnnnnnnnncatcaagttcaccatctaaagtcttcttaacatcttctgcactttgcttcacagtatatactactttttcaatatattctgcctccccggagttttgggcagctttccgcttaagttcttccacattcctctctaactcgctgatgcgctgggacgcgttgaacaaggtttcctcagaagctgctgtttcagactcaatcga

SEQ ID NO: 320882 - DNA, 689 bp, Homo Sapiens
cctgggtggcgaattcggcacgaggcatcagagcctgcacgccaagatggcccagcccgtggggtgagcagctgacttggccggaaacccgggggaggcccagccacggcacatcctgctttgttcaccactgggactctccttccatctgtggccacctcccgggctgtccgagggaccccagggtacctcacactcggagctcgcctgccctgcttggctctgaggacctgcccagcgctcaaagggaacggaagccttcccctcccgcccccgatcttgtcctctttcccccttctgcgcctagcgttcctcttcccctctagtttccctggagccccaacacattcctgggcaggggacagcaggggtgggcaaggactcaggtctaggtcccttcccagaagcccccgagcctcatttgactgtgtggctctttggcccccaccctgtggggtgggtccatgggtcaggcctctgccctaccaacttgtgcctttcagtgggcgtggaggactggccttggccccccagggggctgctggactttgggagagacagcccacacctgtgggaccgcgggtcttagtcacggcggcaggggctttctggccccctcccactcccgtttccaggccatgaccactctgccctgtcctggccatacggactcggcctgcctttgccct

SEQ ID NO: 320883 - DNA, 757 bp, Homo Sapiens
  misc_feature (84)..(84): n is a, c, g, or t
cattaagttctttttaaaaattaaaaatggttccaggaaggggtcccacggtttctttcagacccaattattacacaaatactngcagaaagagatacaaaggtttgatcccaggaaaatcctgggagttgttggtaccttatcctgtagttctctgaggagaaatgaaactggctgtccatggagatttcctgatgaagtggtaaggggtgtgttgatgtcagcatgggcatcaacccagacaacacaaaggtctgggcagtgtcgggcatggccactaatggtaccgattgccaggctgtggtctcctcccagtgtgacacagctgtagccatctgacacagctctgctaaccacctcagccagttcctggttggcaagacccactgagcgtggattcactatcaggttgttgtagagatcatctttggggactggagtaaaactcaaatctccaaagtcttttaggtggcagcccaaactggagagccttttcatcaagccagcttctcttatggcagcgggaccatgctccactccttttcttttctgcccttgtgagaacggggctcctatcacagccacggagtggacggatttcttcaggatggaatgcactcgcgtctggaggagacgcgagaggctgccccttagggacatgatccgcagcactgagaatctccaaggcagaggctccgcgcggttggaagccgggagtgagcgccaccgcccgccgctgctcttacctacccgcccc

SEQ ID NO: 320884 - DNA, 864 bp, Homo Sapiens
  misc_feature (103)..(103): n is a, c, g, or t
  misc_feature (218)..(219): n is a, c, g, or t
ctcctagtgttcctttgtttgcccagggaatgtttcgggaaggcttgtggagtgggacggtggggatgaagcggggagggaagcagtggctgcaattgggganctggggggtgggtggaggcgactgtgggggcgacggctgacttgtgacaggcgtggaagtgaggaaggggacggtggaagccacggcagagggggagctgggcctggcccggggnnatcggtgatgggccgattgtagaagaagaaggggcactgctggataaagagttcaatgattgtctggtaggtgcgcgtggctgtgagggcgtccatagtgctgaaatcaggtctcatcaaggtgggccagaagcagatggagaggttctcgctggtcatgagattcaccttgttgttgtggctgaccttgtttaggtgagagatgacatacttgaagacttcgtggttttcctttggaaatttctttaatacctccttaagggcatgcaacttctgctcccggtcgttgattttgtgtgcttccaccaagtcgatctgcatgttatacgggaccagggggtcaggcagttctgagaaaaagctcttcatggcaccagccacggtattcaccgtaaagtctttctctgccaggtccaggttgtggtcttgatcaaactgtctctgcagactctccatctcagacttgttcccgctgacccggtagatgccttccgtgctcagtcctgtggcttcaatgtactcaatacatctttcaataaaaatggggatcggcttctctggagtcacgacagttgttaagggcaccccaaaatagttactctcccaggttgcctttgtgatggatggccggggtttgggctttgg

SEQ ID NO: 320885 - DNA, 443 bp, Homo Sapiens
catcttctattgcaggtcctcaaacattccaaggaaaacactgcttcacctcctgcagacagctcatttccccagaagcctctacagaagcccgtcctcccctgggacagcaggggcaggggtttgcaagataaaggagggtcagctaaggacatgaagcctgcagaaaaggctatcagatggcgcctgaacttaaggtgggaggcccccttctagaaggcatcccgggagcatccaacagcaatgtggcacttagggctgtgggacaaacaagtggaagagtcttttggagacgtggacccttttcccatgctactcacagtgaagcaaaatgcgacaaaagcatccacacacggtgacttagtaaagcaagcaccgtcggggtgctactttcatgacagcatatggtcaagctataaaggtgtgcatcgatcagtcctgtg

SEQ ID NO: 320886 - DNA, 931 bp, Homo Sapiens
ggcaacctccagtttttcctttttaaaataccgggttttagttcctttgccaagattatccccgcaggggggcccacaattttggaaccctcaccaaaaggggcattaggattcgtcccctggagggcagcctgtgtatctcgaaagataaaagcatatggctgaaactggtttctgaggttcattaggatctttcttttttctcttctggggggctttctgctttttccctgcttccaccacgactgtcttctggctgggaagttgcctccggaaatcctcaacaccatcctcgtgaagtgaactagtaggtgaaggggtggttgaaagacgatcttcaggtgagtgggcaggtggcaggatggtgccaccccctaggctcaaacccagctgggaactcagttctgactgatcaatggtggtcaactggctatgcccccatcaagccagatgtcatgtctgtcattggtacatcaattgtaacaggtgggttggcactatactgagttcctatagagtggtccaagtccatggtcaagcccccactcaggagccccccgccctgctccatcaagccatgggtcatgcccacaggcatgtccaatgtctggaccccatactgggctgaaaaactgccatcctgtgaagaggaagggtctgccaggtcatcaaagtggccaaccacatctgagacagccaatgagggatcagaatccaaggagataggtgggatttcaaattcctcatcacccaagcttggtgtatggaatgtctcggcccctgacaggaaggggtgcgaaggccctgtgatcgtcaggtaattgtcatttcctccgggaaactccatcttcacacaaccgctcccaccgtctcagaccctcatcgctcccaccgcccccactggactcggaactgccgtcacttccgcaag

SEQ ID NO: 320887 - DNA, 2121 bp, Homo Sapiens
  misc_feature (802)..(802): n is a, c, g, or t
  misc_feature (932)..(932): n is a, c, g, or t
  misc_feature (2084)..(2084): n is a, c, g, or t
ttttgctgagtacactcccgtaattttaataatattttaggcaagtcctatgacaattataccaacaagtttcttcaaccccaccaccaccccaccatctctatgctttgcttgcccagactcccttcaccctttcctctgctattaccgcttatggttgaaagtaaaaagcatctccagattacagcaaattcagtggccctgctccatagcctggcctctgctgaaggaagaaaaggggtgaaacatgaacagccatcatgggttgtgatgaggcactaccagaagcccagcttgtgtttcaaaaacaggctcttggacactttcccagcagataactcttcactggcttggagaacaggaaggactatttcacaaacaccactgtgtttgaatttctagaggctacccaggccaagaatacatccctgcagtgcttcaccacacactcattgctgcagtattcattgtcccagtccttactcacaatgggagggttctcacaaccagacctcacacatcgaggctggggtgagagtgccacaggagacccactcaccaattcaacatccatctgagaaggagactcaacctcaggaactacatctgtgatcatctcacagatagtctcaggagaaggtgcctccactgtatggcctcagggctgttgttcataggccgctcaggactactttccacagttggtgggactaaggtagtctgcattttcaaagtgggtagaggcacactcttgatctgcagaggaggaggctgttgctgtaaattgattcgaactttctgnaggtggaggctgttgcatggcctggagtggaggaggctgctgcagaatggtaacttgctgctgagtcgggggctgtggcatctgttgtaatggagggggctgtagtcggggtggaggcagttgccatagnaagcagcagcagcagcagctgctgctgcctgcaacactgaccgagtgacaatctgggcttgttgactgggctggatagtagctgtactggtttggcctagttggagcccccgggaggtcaccactgtggctgggataacagtaaccatccctccttgagacatagtaatagaagagggcaacatttgtttggtaataatcaaccttggtgatattgggctgacccccagctccagaagatgcctggtttgccacataggatgaaagggtggagttaacaacaatggatggggacagggcagggggctctattgaagctggtgctggagatgctgggtcaacagtagccataggaggtggagaaggagtttgtgatggtggtgctggatccaattccactgtttccacagtggcctgacactcctggttgtctttgtaagcagccagtgccttcagatactctttcttggcagcctcagttttcctcttatatacctgtttttgctcctctccaagactatcccacatggaggccacaatttttgaaacctcaccaaaagtggcattaggattctgtcccttgatggcagcctgtgtatcacgaaagaataaagcatatgctgaaactggtttctgaggttcattaggatctttcttttttctcttctttggggccttctgctttttccctgcttccaccacgactgtcttctggctgggaagttgcctccggaaatcctcaacaccatcctcgtgaagtgaactagtaggtgaaggggtggttgaaagacgatcttcaggtgactgggcaggtggcaggatggtgccaccccctaggctcaaacccagctgggaactcagttctgactgatcaatggtggtcaactggctatgccccatcaagccagatgtcatgtctgtcattggtacatcaattgtaacaggtgggttggcactatactgagttcctatagagtggtccaagtccatggtcaagcccccactcaggagccccccgccctgctccatcaagccatgggtcatgcccacaggcatgtccaatgtctggaccccatactgggctgaaaaactgccatcctgtgaagaggaagggtccctcgtgccgaattcgccacccaggcctcgctacctnttacccctgaggggggttttaaacgtgtggcacagtg

SEQ ID NO: 320888 - DNA, 432 bp, Homo Sapiens
  misc_feature (22)..(22): n is a, c, g, or t
  misc_feature (28)..(28): n is a, c, g, or t
  misc_feature (75)..(75): n is a, c, g, or t
  misc_feature (81)..(81): n is a, c, g, or t
  misc_feature (109)..(109): n is a, c, g, or t
cccccccgaggggggcccttanccccanggtaagggggcaaaaccattggtcaaggcccttaccccccagccaangggcanggcattagggggaagaccaaaggtaccncctatccccccggccacacctggggtattaccttgttccctcctccttgtggcctaaaggcctcacccaacaaagaccttaatttccaccctgaataaatgaaatttacccatgtaggtagattttaccttgaaaaataatttaaaattgtacaatgtctggtttgaaaattatttattgtggtttttgggaaaaagtgttttctgcttttattatggccttcacatcctaggattcaaatttgaatgtgatagctggcacacggagggatttattcaaaaatggcctgaatcacgttgagcagccagcagaacagagcttaa

SEQ ID NO: 320889 - DNA, 452 bp, Homo Sapiens
ttgagtacactcccgtaattttaataatattttaggcaagtcctatgacaattataccaacaagtttcttcaaccccaccaccaccccaccatctctatgctttgcttgcccagactcccttcaccctttcctctgctattaccgcttatggttgaaagtaaaaagcatctccagattacagcaaattcagtggccctgctccatagcctgggcctctgctgaaggaagaaaaggggtgaaacatgaacagccatcatggggttgtgatgaggcactaccagaagcccagcttgtgtttcaaaaacaggctcttgggacactttcccagcaggataactcttcactgggcttgggaggaacagggaagggcttattttcaccaaacaccactgtgttttgaatttctaggagggctacccgggggcaaggattacatccctggcagtgcttt

SEQ ID NO: 320890 - DNA, 685 bp, Homo Sapiens
  misc_feature (74)..(74): n is a, c, g, or t
ggaaactgaacatcctcctgggaaccactaacccccttggaggccacgaaattgccctgtgaaaagtctgttanttgttggaattttgccatcctaggtctgaaaatctgagcttgaaagccaagtccatcggctgcccaactcgtgctctgtctacaagccacttccattcagtactacagttaactgccacattttttctaagggtatattcatccaaatcgtcatcagagctgctatcagttgcatcggaatccaaaccctcttcaacatgagacaacagccctgtagcagaaaatgcaaatctttggatttccgcagctgtacaccgtgcaaagccattttttgcatcatcccacaatttattctctgcagtcaatgtgttaacttctggcttaatttcagtgcatttaggtaaactattacccaaaattgtggtaggttcatgaaatgtcttcattttggggagttgatgtttcatagacaatttcatctgctgaccatagtgcttaacaacatgctttgccaggagcatctgcaaatgtttctgagttcttctagcctggctaagtaaaattttctgtttgcttacacaatgaagtaaacgagcatgtacttcctcctctttttcagcagctgaagaactaacaggcacatttgagtggccaggtacaattttcttttg

SEQ ID NO: 320891 - DNA, 1012 bp, Homo Sapiens
cggcacccagtgtgtctgttggtgttgggaatggcgggatccgggaaaaccacttttgtacagaggctcacaggacacctgcatgcccaaggcactccaccgtatgtgatcaacctggatccagcagtacatgaagttccctttcctgccaatattgatattccgtgatactgtaaagtataaagaagtaatgaaacaatatggacttggacccaatggcggcatagtgacctcactcaatctctttgctaccagatttgatcaggtgatgaaatttattgagaaggcccagaacatgtccaaatatgtgttgattgacacacctggacagattgaggtattcacctggtcagcttctgggacaattatcactgaagcccttgcatcctcatttccaacagttgtcatctatgtaatggacacatcgagaagtaccaacccagtgaccttcatgtccaacatgctctatgcctgcagcatcttatacaaaaccaagctgcctttcattgtggtcatgaataaaactgacatcattgaccacagctttgcagtggaatggatgcaggattttgaggctttccaagatgccttgaatcaagagactacatacgtcagtaacctgactcgttcaatgagcctggtgttagatgagttttacagctcactcatggtggtgggtgtctctgctgtctctgggtactggattagatgaactctttgtgcaagttaccagtgctgccgaagaatatgaaagggactatcgtcctgaatatgaacgtctgaaaaaaactcactggccaacgcagagagccaacagcagagagaacaactggaacgccttcgaacagatatgggttctgtagcctggatgcagggactgccacagacagcttatctcctgtgctgcatccttctgatttgatcctgactcgaggaaccttggctgaagaggatgaggaaagcacgacagcgatactgatgacattgaccacagagtccagaggaaagccat

SEQ ID NO: 320892 - DNA, 882 bp, Homo Sapiens
  misc_feature (207)..(239): n is a, c, g, or t
tgtacggtccggaattcgggatatcgtcgaccacgcgtcggcagcagacgcctcctccagccagacagtgaccccggtggctgaacccccgagcacagagcccacccagcctgacgggcccaccaccctgggcccccttggatctgctgcccagtgaggagctattgacagacacaagtaactcctcttcatccactggggaggaannnnnnnnnnnnnnnnnnnnnnnnnnnnnnnnnggtctcctcatcaactctgtcttccatgtgggcgctgagcggctccagcagatgctcttctcggactcgcccttcctccaggcttcctacagcagtgcaagttcacagacgtgacgctgagcccctggagtggggacagcaagtgccaccagcgccgggtgctgacgtacaccatccccatcagcaacccactgggccccaagagcgcctccgtggtggagacacagacgctgttccggcgcggcccccaggccggcgggtgtgtggtggactccgaggtgctgacgcagggcatcccctaccaggactacttctacactgcccaccgctactgcatcctgggtctggcccggaacaaggcgcggctccgagtgtcttctgagatccgctaccgaaagcagccgtggagcctggtgaagtcgctcattgagaagaactcgtggagcggcattgaagactatttccaccatctggagcgagagctcgccaaggctgagaagctgtctctggaggaaggcgggaaggatgcccggggcttgctatctggcctgcggcggcggaagcggcccctgagctggcgggctcacggggacgggccccagcacccagatcctgacccctgtgcccgggccggcattcacac

SEQ ID NO: 320893 - DNA, 571 bp, Homo Sapiens
  misc_feature (96)..(128): n is a, c, g, or t
gggccccagcgctgctggaaccagccggcaggtggggcagaaaagcagcacctccccctcaccagggcgaggaggcaatattgaaccgtgaactcnnnnnnnnnnnnnnnnnnnnnnnnnnnnnnnnnctacagggctaagtaaacaccagcctgctgggtttatacaaaatgagtgaaatttaaaaggggcaggagagtttgtccagggactggctggcagccagaacccaccttcaagcaagttacaaggacttgggggaaagtgctgagagcagaggctttagtagggggcagggccagactgctccccactgggaaagcacaccccttaaaggagcccttcccccttgcccagaacgggggatgcttccagaggaaggctgaggcttttctggtaaggaagccagctccggaccagtccagccacagcccacctgcctctctggcatccgccccagtctgggcagctgaccctgagggcagagaaggactttgcttgctccaaccttcctgcaggaaaaccagctgctcaggacccagccctgggcagagggcacggtcggtgctca

SEQ ID NO: 320894 - DNA, 1331 bp, Homo Sapiens
  misc_feature (309)..(603): n is a, c, g, or t
  misc_feature (782)..(793): n is a, c, g, or t
  misc_feature (929)..(929): n is a, c, g, or t
  misc_feature (998)..(998): n is a, c, g, or t
tttaatcacacacatcacaggcttaaactgtcttagagacctttccagttgattggatcacaggctagggatctgtgcatggtgccaggtgaaacccaagtctccccagtgctaggtgagggagggctcaacgggggtaatgtgtatggggtctgctgtcctttgccatcccctggaccatattaactctgggacagaccatgattaggtctgtcaccaaacttttcctaatcattttttatgtatcattcttctttctaatctgttagcagttatctcccagaagtatccctagcatcctgaagcaannnnnnnnnnnnnnnnnnnnnnnnnnnnnnnnnnnnnnnnnnnnnnnnnnnnnnnnnnnnnnnnnnnnnnnnnnnnnnnnnnnnnnnnnnnnnnnnnnnnnnnnnnnnnnnnnnnnnnnnnnnnnnnnnnnnnnnnnnnnnnnnnnnnnnnnnnnnnnnnnnnnnnnnnnnnnnnnnnnnnnnnnnnnnnnnnnnnnnnnnnnnnnnnnnnnnnnnnnnnnnnnnnnnnnnnnnnnnnnnnnnnnnnnnnnnnnnnnnnnnnnnnnnnnnnnnnnnnnnnnnnnnnnnnnnnnnncaaacaaaccaaacaactgagagagggcatgctagtggagggaaaaggagagagtacaagagttgatactgcatcagagttccagggcagatactgacaagtgactgaactttgactgtgaagtcttcccatttatttttgaaatgggagtcgatgccttttgtacgttatcaaagtgnnnnnnnnnnnncctcctttactcagacatagagcatcaaaatatcacgagtaaagccaaaccccagcttttcactggggctgatatcttcctccccatggcccactgccccctcatattccccagcacttggactgtgtcacatggngtattgattgtatacttgttgtcttggcctcatgcaaaaaggcctgggtctagatctagtcagatgagnttttttttagagcatgttgatgatacaacacctgttttaaatgtctggccttatatgttattttggtcccactggttaataatagattttattactatgtatatttactattgaagatgggaatgtgatctgcatagttatcagtctattttgtatgttgtaaaaagcttctaatttaggtttaaggtgggctggctacaagagcactaaaactcctcaccttttaaactgctctttttatctgcttgtgggaatgtcgtctctttcgtggaagattgggtggtctcatgttgaggctgttgcccagtcccattaactcccttgtccccccac

SEQ ID NO: 320895 - DNA, 993 bp, Homo Sapiens
gttcatggtcctgggaacaagcatgctgcaattccacaggcataaaaagcctttcagcgaatgttgcccccccagaaaagctgagtgtaagggcccccttggagaaagcggaccctgggagccgggtgttgagtgggggcttccctctgggaagtctccacgggggcagaatcttgcactttgttgctggcccgctggcgaagccctggtgcccgtgaggggctctggtccttggtgtcatgggtcagcagctcctgcaactcctcaaagagctggatgttgagcaggaacgcagtcttggcctcttctatcaccctctgcctgactgcgggagtcatctccagggagttcatgcgggagcggtagagctgcttgaacttggtggcactggcaatgttggggaaggtgaagaaggccaggccctcgccagagctgggcaggtccagggctttctgggcaatctttttgagcacctggcccccagacaggtcacccaggtagcgggtgtaggcgtgggccaccagcagctcgggctctgtgcgccccacctcgtggagccgcttcacatagcgctgcatggctggtgtgtaggggatgacctcctgccagcggggcccgtaccagaaggccaggtcctgctccagggcagccttgcggtgcagctcttctgggaagtagacaggggcgaagactgggctctccttgttgcgctcaatctcctcctccagggccacatagatgtggtacagggaggccatcaccagcttgaagccgtctcgggtcacctggcccttctgaaagttcctcatgaactcagcattctctgcctgggtgtgcacctccttggtggcctccttcagggcctctgacaaatcctggggcatgctgtcgggttgcggacgctccatccggccggtgctgggctcgttcgtgctggctccgcgggcggcggctgcgctgaggacgctcgagaggaggcaggcgttgactccc

SEQ ID NO: 320896 - DNA, 1067 bp, Homo Sapiens
  misc_feature (100)..(100): n is a, c, g, or t
  misc_feature (104)..(104): n is a, c, g, or t
aatgattacaataggaaagggaaaaattaaatagcctacatatcattaacaaattaatgttccttcaaaaaatacctacaaatttctctgtacattcctnttgnacagcgtaacgatggtctcaaaatcacccatatagaaaagtgttttcaagggatttttcctacagaaaatataggggccctgaatgccaaggcttggaagcccagtacagtgggagtgaaatgtgtgcggggcaaggagaagggcttttctttcctccacttttcaaaggcctgcagccactctgtgactacaagagccagtcctccgaccttttcacccagtgccaatttccaaaattcaacagctaaaaactgtaaaaccgggggtcatacggtgtgcagagtccacaaagccttgcaggtgaggtgaccacgcccacgtcacctggtcaggtgccatcgtcgtgagcctctggtgggccaggtgggacacagcacaccccagggggaggggatagaaacgctcattgaccaaaaaggagcagctgtgacctccacagctgtgtctgtcatgcttgcttcatctaatttctagttagtagctattaatatagcaaataataaatgcagtaataacagtataaagtcagaggaatgtatactgccttggccccagcgtacgaggaagcgtataaaacaccatatcacagattgtctgtcagtaatctgctgttcagccaagagagttcaaagggagcagtttctgcatgtagggaagttggaagacacaaaccccacctcccctgggagcttgtaacaaagcagacagggatgcaaaaataaatgatgtcagcctgcagccaaactccagcatcccacaccgcagctgacccactgctcatcgcgagggcctgccaggagctggcctcccgcactacttgtgagtaaagtgaatatcaaataccaatcttagagtacaactgtaccagcagtaagtatatctaggactgtaactgacaaaaataaactaattctgaaaagaagatagtaagtattaaggtttttgtttactgtctatataat

SEQ ID NO: 320897 - DNA, 1175 bp, Homo Sapiens
  misc_feature (334)..(334): n is a, c, g, or t
  misc_feature (866)..(1009): n is a, c, g, or t
taggatgctcagttgctaaacactgcgctttattttcttaaccagttgtggtgtgagtatcagaattgaaacacttttttgggggtaaaaaatatagcctttacatggacagaattttttttgttgtttcagtgaatatgcctgtaattcagtgtatttcagttccgtcagaaagtgtaaatgttagtttcttggtaaagtccttttcttgcttaccttgactgttgatgtactgattgagaagttcattgtctcgtttgtgattcttccagatgtgatgcttgatattttctatatgcgagttagccatccacacccagggcatagcctggantacagtataaaaatagataattaaaaagatggttgccaagcaaggaaaacttattttatattttcccttccttattttaagcattgtgagtaaatcagatgttgaattcttttgccaagggaattatagctgcaggttctctctcactgccatcaaactgtaaaagattaaactgcgaagtcaagctcaacagattattttggaaagtttttgtattaagggatttagtaacatcattttgttttccaccaggcagggagtagggcttagtgttttaaaacacctctgctttctgatgttgccttaatattctgctattgcagcaattaaaaattgtcttcatgtacatttggaactaacacgtgatgtgatatattcctaaactatgaaacctttttcctagtagtcagctagatcatttgttctgggagtataaagccacccacgtaagttaataagcaaaatcctgactattatgttgttagagaaaaatgctttgctttgtctggaagaaagataaaatagtgaattnnnnnnnnnnnnnnnnnnnnnnnnnnnnnnnnnnnnnnnnnnnnnnnnnnnnnnnnnnnnnnnnnnnnnnnnnnnnnnnnnnnnnnnnnnnnnnnnnnnnnnnnnnnnnnnnnnnnnnnnnnnnnnnnnnnnnnnnnnnnnnnnccacgaaagcacacacaaaataaatcagtgggatttggtaatgtgttttagagtaagaaatttcaggttgttggtgactatcccaacagtcatgttttaaatgtacagtttggggcaagtcatgtaaatactgttggtggtcttccccacacgccccaattttcag

SEQ ID NO: 320898 - DNA, 947 bp, Homo Sapiens
  misc_feature (430)..(430): n is a, c, g, or t
aacctgggaggtgaaacggggcccacagtgctcctccggggaagggggtaaagcccggcaagccagggccgggtgccagccgcgagggcctcggggctggtctgggcgggttagtaacagggggcctgggccaaaagcttggggttcatggccccagttccgaattagcgggggaggggatccccggggatggccaggggtagatgacacttccaagcacttcggagtgagtgaggctccagccccgaccccagcagcaggtaacgggagcgctattcctggaacaaagacaagcactacggagaaatgaagagagagagcagacgggcgcgggtaggtaaggggaccggagggcaagggggagagcagtggctcctggcggggtgagggctgcggggagggggtggcggcgtgcagggccctccccccncgaggcccgagggtcgagggcctaataatcatcctcctcttcttcgtcgtcgtcgtcttcgtcgtcatcccagccaaagcactgtttcatctcatcgaggaaggcccggtaatcacctaggatggggctatccatctcgatgtagggcaccacccactcctcggcttccccggtgaggaggctgattaggaatgccaccttcatggcgtcgttgcagaatcggttctcgttcacgagcatgtaagacgccgtctgcacgataaactcggggagccgggagctctcgccattaaacgtttcggggaagggcaccgggcagctcggcggacgtacctggcgcagcaggctggccctctcgcacaccagcagccgcagctgttccatgagctggctgttctcgatgctcagggcgcggtgccgcatcaggagcgcgtgcagcagcagcaccaactcatccaccattgcgaacggcctggaaggacaggactcgggtcggttcgggtcggccaaggtgcgc

SEQ ID NO: 320899 - DNA, 1208 bp, Homo Sapiens
  misc_feature (576)..(602): n is a, c, g, or t
  misc_feature (902)..(961): n is a, c, g, or t
ggaaaataatgtgaaattctggaaattttctttggggcagagaagagcattagccctgtcttatcattacattgccatcctgttgcactgcagcttgtgtatagcatgctaaaataaatttttgtgtgtgtgtgcataaattaagggtccaattgagattgggtgatgttagtaacataataacaagttgtctggcctgacacagcatcacatcacacacacagaaattagtatatccatgtatgtcaaatacaggttaaaatatcagggcatttatataaagagttgtagtcttctgataaaagtagactggatcccctggggtatttggggagaaagtaactactttggctctacccctagaaatgtccagttttgagtgactgtagtatggatgggttttcttgttttgttgattatttgaggcttttaaaacaagtagttcatgaaagaagctgttggactcaacatagagtagagtaactatttttttagtctggatttctgccctgcttagattttaaaagtataagcatggattgccaattccacttgatgtaaacaaaactttttttnnnnnnnnnnnnnnnnnnnnnnnnnnnaaataacttattgtatcagtccaggttcagaaacttgtggtaggccagttccagatagtttcatttcacctgtaaactgtatcactttgactgatattgtaattttcaaatgtataatatgtttacagatgtgccctgcatttagtctgccttgttcctattttgatttttgttgagtctcctgcctgcttgccaaaagctaggatgcttcaggcccatgtacaattgaaagcagaggcatccttgagctttaaagcattgaacaaactggaaaatgcaacataccacataactgaagtnnnnnnnnnnnnnnnnnnnnnnnnnnnnnnnnnnnnnnnnnnnnnnnnnnnnnnnnnnnngacatataaggttgattaaagggaaaaaaggctccagtttgttttacaggttttaaagttctgctgtgtgttcaattgccttgtgtaaccacttgtcgccttagggccagattcccctctctagtccccttttttaaatgtccattttgcttgcctggaattttaaagttcttccgtctcacaactcacaagaaactttctgggtttgtgacatacagaggttgaattgagtatatatttgaaaagg

SEQ ID NO: 320900 - DNA, 898 bp, Homo Sapiens
ttttccttggggtttccacaaatttttgaaaaatttgggcccattgggattgtttctgggccttgaaagccccccattttttgggggctgggatgttaggtggcttcttgggtccctagggttcaagggttggggaagacttcttgtcccttagggtaatggggggctgggtgtgagggatatcttagtttggggctggcgtgggggtagggcggtcacagatgtcctgttttgtttgggcagggggctctaggctcctgttttaagtgctgggaaagggctctgggtcccaattatgggctgggggtggggtggtattctccaggtcctgggtacagatcccaggggcctaggatccagcctcctgctcttgtcccagtgcctctagtagcaggcccattggcgtccgcttgagaccaatgctctcgatcttgttctcaatcttgttcttaaggttgcgcaggcgcaacgaggcgtgcaccaggatcagaagcaccggcccggcgatgctgaacaggaaggtgcaagcgccgcccgcgacccagagcaccaggaggccgacggcaagcactgcggccaggcaggctgcagggtggctgcggcggcagcggcgcacagctgcgcgggtctcagctgcccacaccagcacgccgagggccaccgccactaccagcgcgctcaggagcgtatgaagtggccgcacgtacccggcgagagcgaggccgatgccgaagcagagaaggtagttggtttggtagtagaggaggttgttgatgacgcggtggcaccatcgctgcgggtcgcatggatccggagccgccagacgcgccgaccccagaacaaagtcgtccagggcgcgtagcggtggcagccgcacctccgacatcctgccggttcc

SEQ ID NO: 320901 - DNA, 1165 bp, Homo Sapiens
  misc_feature (152)..(152): n is a, c, g, or t
  misc_feature (229)..(229): n is a, c, g, or t
gctccaacccttcaggtgggaattctgataaagtccccaaatgggggaagttttcaaacaactggctgtttcctgctttaaaacccttccatcccttggtccttgaaagtctgtgttatcacgacgccatctttcgggaaacttcgcgatgnctgcaccctgacgcataaatacatgtcatggttggccagggtgaactcccctttcataccaggccatcgctgaaccnccatgttcccacacagacagcagctcattcagagctgggatgttagctcctccggtatccggcatccaccactgccttgtgttttcatcataaaacttcacttttctcataacagaagtgttgtaccagtcactgaagatgacgagcgagaggccgttgtccacgtccctccggagcttggcgatctcttcagggaagtactcctcctcactgtccaccatcagcaaagtgccatactgactggcatcaaaacacgtgaagggggccccgaggacctctacaaagtagcccatgcttctcagatgctggtacatatccctgaaattggtgtggatgtgatcaccattccagtctaaagggtcattcttcatccttaaattatccctggggaaatagccaggtggatagcggaggttgtggtactgatcccagagaactctcttgcttcgcgggggagtaggaattatcttcaccttaatggggagctttactgttgaagtctgttctgcaccattttttgactctgtctctgctggggaagccacagtgatcatgacatggccctgagcaatgccttcccaggaagccgctttcttggtcacagaaatggagatggccaggtagcccgaccaaggccataagaccgaggagtaggagaaggcaacttcaatgttgtctccgttctgtggcaaatagggctgccagtcaggcttatctacaattcttcctgtgactcccatgccgttgaggatggtgacattaacaactgtcggcattcctccatagtagatgggctgggagcagtagggccacatgtagggacactcagtcagatctatgtagctggggctcaaacttgcctgtggcttgtagctgttgaggatctgataggctctgagcagatcgagcttgccgtggccttgctcaaacatgttg

SEQ ID NO: 320902 - DNA, 1838 bp, Homo Sapiens
  misc_feature (1582)..(1582): n is a, c, g, or t
  misc_feature (1769)..(1782): n is a, c, g, or t
cggtccggaattctccgggatgaaacgcagcccccagacctgccaactacagccctggggggctgcccctctgactggatccagttcctcaacaagtgttttcaggtccagggccaggaaccccagagccgggtgaagtggtcagaggcacagttctcctgtgaacagcaagaggcccagctggtcaccatcacaaaccccttagagcaagcattcatcacagccagcctgcccaatgtgacctttgacctttggattggcctccatgcctcgcagagggacttccagtgggtggagcaggagcctttgatgtatgccaactgggcacctggggagccctctggccctagccctgctcccagtggcaacaaaccgaccagctgtgcggtggtcctgcacagcccctcagcccacttcactggccgctgggacgatcggagctgcacggaggagacccatggcttcatctgccagaagggcacggacccctccctgagcccgtccccagcagcgctgccccccgccccgggcactgagctctcctacctcaacggcaccttccggctgcttcagaagccgctgcgctggcacgatgccctcctgctgtgtgagagccacaatgccagcctggcctacgtgcccgacccctacacccaggccttcctcacgcaggctgcccgagggctgcgcacgccgctctggattgggctggctggcgaggagggctctcggcggtactcctgggtctcagaggagccgctgaactacgtgggctggcaggacggggagccgcagcagccggggggctgtacctacgtaagatgtggaacggggcctggcgcaccaccagctgtgacaccaagctgcagggggctgtgtgtggggttagcagtgggccccctcctccccgaagaataagctaccatggcagctgtccccagggactggcagactccgcgtggattcccttccgggagcactgctattctttccacatggagctgctgctgggccacaaggaggcgcgacagcgctgccagagagcgggtggggccgtcctgtctatcctggatgagatggagaatgtgtttgtctgggagcacctgcagagctatgagggccagagtcggggcgcctggctgggcatgaacttcaaccccaaaggaggcactctggtctggcaggacaacacagctgtgaactactccaactgggggcccccgggcttgggccccagcatgctgagccacaacagctgctactggattcagagcaacagcgggctatggcgccccggcgcttgcaccaacatcaccatgggtgtcgtctgcaagcttcctcgtgctgagcagagcagcttctccccatcagcgcttccagagaacccagcggccctggtggtggtgctgatggcggtgctgctgctcctggccttgctgaccgcagccctcatcctttaccggaggcgccagagcatcgagcgcggggcctttgagggtgcccgctacagccgcagcagctccagccccaccgaggccactgagaagaacatcctggtgtcagacatggaaaatgaatgagnccacaagaatagagcccggcgcgtgggcagggccagggcgggaggagctggggagctggggccctggggtcagtctggcccccccaccagctgcctgtccagttggcctaatggaagggtggccctggggagtcccctgtttgggaacccgaaactggggcaaaaccctggggctggtggggggggnnnnnnnnnnnnnngagggccttggctttgaaaacccccctttaagtgcaacccgggggccttttcccct

SEQ ID NO: 320903 - DNA, 997 bp, Homo Sapiens
  misc_feature (15)..(15): n is a, c, g, or t
ggttcttccctccanccaaaagttttctctttcaggcttttaatggagcttttcctggaaatcctttgtttttgagtgccagtcagatgccctagactcctgcctctcctctttgtcttcatctcccatatcttttgagatgcattcattttctcactagcttgctctccttggccacattcattctggatcagagaaggaggtctaggtaacactggttccccaaaaccttttttattaaggagctgcctctgagccattttcaggctcttttgataaacctccaactggcagagaatgaccttggtatactggttagggtctactccatcagggcagaatggaataccccagaaatagttcacagtgcccccagtgtcctggagacctttggcatctgctagggtaggtagacagtgcctagatgtgtccccgctaccctggacagctttgagaaaagcagaacccctcccagtactttcctgtggcttcccacactgtgtgtgctcagccgagtggccagtacatctgtcaaaagatttaacgttcacattctcaaacactggctggcttgactggtcccagcttcctgagctgccagagaccggctcctcttcagttttttcagtgtggtcccaaggctcctctctttcctcagcctcgtttccctgactgatatgtgagcctttaaacagtgatggaggtaccagctgccatatgccttcagtgagcccagagtctgtggttttctcttgatgggactgggaagacggtccagtggccagaggtcgagatctggtagcggaagcatcagaaggccggcaactattcaggctttcagcaatggctttcctcaagagctcctcttcttcctcctcctggctgttcacctccctagcttcctgctcactcattttgagagccagagcaaactgttcttcttctgtcatctgtgcgatttttcttttggccaaaccactttgccctcgtgccgaat

SEQ ID NO: 320904 - DNA, 982 bp, Homo Sapiens
  misc_feature (903)..(930): n is a, c, g, or t
gttaactttatgtcactggagtcaatactgcagccactgtcaatttcctggatggttgaggttagaagttgattctttcaaggcaaacatcaagtaattcgatttgtctagatgactgaacagagagaattcttagccactcctttcaaatggattgttcaggtcaagttactttaatgccaggtcagtcagggaatcagagaccttggtgttgacctgtgcagaaagactcgcttgtgtaacgttgagatagatgtcatactgctggtccaggccaaggtagcagtcactcatgaaatataatgtgtagatataccttccaggtatttcaggggtataaaaagaaagggaagcaacatgatgatttcgaatatatcctactcttttcaaagcaataagttctctcttatccacttctcctaatatcaaaaaccatccttcgtcttttgatttgggaaatcgaggagtaactgcacagctctctggctttccctgtaaaccagaaaaaaagatacaacattaaaaatatctagacttcctataccacttggttgtggttaaggctacgttgtcttacttgaaggccatacatctacatagttcagcatatctatctgagatgttttaaattttcttccattctggtttggtgtctttgatatgcaattatttaacttacttcaagattctcagagcatattatagacactagttcgtagttgtaactatcagaatatatggccagttagaataaaaaactctggatcttgacatcaaattagcaaattctcatgctattcctacaattaactttaataccacattggtagatgaacaaattgagacataaccatgttaatcaaatcttccaaaaccttattcaccaaaaacgaatgcttaagnnnnnnnnnnnnnnnnnnnnnnnnnnnngccaatcaagactagactctggaccccaagatgatgagtactatatcaaaca

SEQ ID NO: 320905 - DNA, 1317 bp, Homo Sapiens
  misc_feature (405)..(405): n is a, c, g, or t
  misc_feature (430)..(430): n is a, c, g, or t
tgtaacgttgagatagatgtcatactgctggtccaggccaaggtagcagtcactcatgaaatataatgtgtagatataccttccaggtatttcaggggtataaaaagaaagggaagcaacatgatgatttcgaatatatcctactcttttcaaagcaataagttctctcttatccacttctcctaatatcaaaaaccatccttcgtcttttgatttgggaaatcgaggagtaactgcacagctctctggctttcccttgtggaacccaaagtggactctctgcaagctcacttgaagcacatactcttggtcagcatgcaatttgatccatttgttgtcatctcgtttgtctgcagtcagagttgagacagagagttcattatgtccttcaaactaagtcaatcnccacgagcctttaacacttatgccnaacatttatcactggcaagtgagataagaaattcccatgcctgtttcgtttttgccagcatgtagctcactttctaccatggagctaaatacatggtctttccctccacaggcatggatcagttcaggaaggcactcgatggaggtccgacccctagcatgtgggcccttcataatcggcttccatttcttgaaaaggtgaagatgatggttttctatgtttggtagtgtaagaagagaagagtcctttaaccaccgaccctggatcaccatctgaatcaggttggtgatattcaggacagtcaccagccagccctggtttgcagccacgtccagcattgcctgacatactctgagagcttggtccaagactgttttggtatcagtgtcataatctgggcagggtagcatggctcggctgagatgtgcctgtagcaggagatgtgctttggtgtgagggctgtcaaatgaatgaggatttgattcaatgggaagacattttgccagttcactattcatatgatcttcattgtgtctcactggcaaatctgtatattcttctgcatcacttagaattgaaagcagttcttcagtactgcattcaggcttcaagcggtccttgaacattttaactgtttgatgcttcaaatagtaataggaggcaattcggccataagttagaggttcaatgctgcgattatcctctccaatttcaatacagtaggaaagttccaattcaatcagggacttctcaatcagatgggacagaaacttgttcacagaatcatggctcacatcacccaaattgtaatagctgggattcatgataagacgtcggaaaaagtaagtccaggtgatataatccaatgcatcttgcttagatgtaat

SEQ ID NO: 320906 - DNA, 772 bp, Homo Sapiens
  misc_feature (75)..(75): n is a, c, g, or t
  misc_feature (289)..(289): n is a, c, g, or t
aactatttatttatttggtaggtacagcttttttaaacacaaaaatagattagataaattccagcttggaacaanctagtgctggttcacaaggttatgctcacccttcaattaaaatcaaaatgactacaagacttgccattagctctcttcaggaccactgctgggtcagaatcagaaaccttgggtgccatgaaatttttacaaaatttcaaatcaaagccaggctttgcagctagataatagatcacttgagtacgaaccacacatgtaagtgcacgtatatttngagttctcaatacaattaccctgatgggcaagaacccacaggtggagagcagaggcttggttcccctagagggccctggctggaggccccaacaccaaccagacgacaggagggccagactgctacccagtactgtacctcctgctccttcaagagcctccctaagggagaagaagatctatacttccactttgtttgctgcacatgtggcaacaagattgctaccctgatttgggacacttgagagaacttgaaaaaaatgaccacccttaaagccctagaaaaaagttgtatgtttgttaacagctatgctgcgctcactttgcattgtgtgttcttgaaagctctgtataaatcaaaattttgacgacacactaaatacactagagaaatacactatagaggaatccttttatagggctgaagactcctttggtaagaaaaatatgctgcattaggggcagctgcaagtttactatttct

SEQ ID NO: 320907 - DNA, 1005 bp, Homo Sapiens
tgcattgagtatgtaaggacagagttagatgagcctctgaagacatctcatatactctgggctcccaccgtttcaggttcttttagtgtctcagaatttccagctaattcttcggtctgcatttcacatatttcaccagataaatggtttttctgttcttcttctaccattttctttcttagatctgcctctgaatatattgtcagtttcagtggtaaatcttcaacttttacaaaatcttcttcatcagacttttgacttatattaccagattctgcttcatagtcattcactaacactggagattcagtatcaggacttccagccagagagctttcaggagtttcctgagcagatttaacttctttgactctaggcactaagggttccatttcaggtaaacgtaacggcaaagggttaggctgttgagttgaatcaacagtaggaggtgactccttatgggcagcactatttaaaggttgctcatcttccaagatattgaggtaacagggtttcacaggacagttattttggtcatttttactagtggcttctcgttccaatgggacatttttgctttctgctgtctttttaaagtcacgttgtaggacctgttcatcatgttcattttcttcagtagcttcagtgttagcctggagggaagtctggacatccacagggccttcttcaaattcttccatttcttcatcctcattttcatcttctccacttccataattagttaaagcctgagtttcagctttagacaaattaatagacactggacatccttcactttcttcatcttcctcttgatcagaaatatcagatcttacatttttgggaccatcatacacctcagatgtttgagtctgcttaactgtttcagtttcatccttgtctttgtcttcatcatcaatctctccagcaggtgagccatgatcttcaagaatccttttagcctctttggcacaagattgtatcactccagttgcttctattttc

SEQ ID NO: 320908 - DNA, 946 bp, Homo Sapiens
  misc_feature (114)..(114): n is a, c, g, or t
  misc_feature (331)..(346): n is a, c, g, or t
ccgccaaaattcctatatatattcacatctccccccgcaagaaaaggacaccctgatcccttactctttacacaaagtcaaatatttttttctccaaaatcaagtaaacccaanctaaaataaatggaataaacttttaatcatacagagaaaataatttttgagaatcaggacaggatcttccactgtgttctcttacaatgtagatgtcttggcgaccactgtccccagaggaatgaaaatccacctttaaaaacagaaccttttatacagtttatacagcacaaatcacaaatcactttagaaacaaaaatgtgttatcctaaatttnnnnnnnnnnnnnnnnggaagcgagaagagagagaggaacggagtattttaatgctatcagtttctattcaggcttgatacaacataaagaagatgtaaacatttaaaataaataataaaataaatgtcaatttcttctccccctccctttcccataaccctctcaaaatttgatccagcccctcctgaacatgtcgtcaagcattggataaattaaaccccttggttgatgtatggccaaaacactagaagcataagaagatgccagattcatagtgggatgactgggtttccttttaaaaagctacaggacacaggcacgcctggaaatgtatacacacatgcgcacacacacagcccaacctgtcaataaatagtgagatgctggcttttaatatgaatgccaaaacaactcaacaagcagaaggtagcaaagactccttaagttttttaaagaaaattcacacatcacatattctattggtccccaaattctctaaggacttgggttacccctctgaccatctgaggagtgcacgggagcacatggtggggtagaaggagaagtatggagtgggagaatattgtaggggataagtccttgagaacaaacatc

SEQ ID NO: 320909 - DNA, 671 bp, Homo Sapiens
aaaggaggaatggtatgaaagaacagacagttcaatccgcttcttgtgcagtccgattggtagttcaagtaaaacagagttgttgcttccacaatgggaagatttacaggtttgggactgaaggacaggaaaaagtatgtcatctgcactaaaaggatctccacacatcagacacataacaattcgcagatcaacatcagccaaatctttgatgctagcagtagaactgaccaggtttaagttacgcttagagtccaggagtcccttcaaaacttgactgatttgcttttcattaatgttgcgtccgtaaccaatgccagcagaagcagggtcgagaaagacacactgaagtttgctagcaatttgttgaccttgctgtattaagctatgcagagtctctccactggtgtctcctctcttgttaaccaaaattaatgtaagggggagatggactaaatgattatcccgccggcccagcgtggactctctactcttctctatactttccactacataggatagcgattcctttgaattgtaaaggcagagacagccgtggggctgaaatgttggcgtctggaaagagttcacaggaagcctgacattcccctctattggcctcagggaaagctcatacattttaccatctatcacatacttgtcatcatttg

SEQ ID NO: 320910 - DNA, 1602 bp, Homo Sapiens
  misc_feature (21)..(21): n is a, c, g, or t
agtactgcccataataattgnacagttttgtaaagacttgtaaaaagtcccagtttctcaggaatatgaaaattatcttcagaaacctggttggggcctttctccaattcctccagccagctgaaatactgccaagctcacttcatgtgcaaggtgatctgcactttcttgtgagtctgcttctgcatatactcggacgacatcttctgtaccagagggccggacaaaagctcgagaaagcttgtacttcttcaccaggtcattgattgcctcctgtaatcctgggggtgtaactgcttgtctttcagcattggtagtgctaataactctcctgtctgcaacctgaactttaagttgtctgtttggaagatctgtatagagagcatcccactgttgtacagtcaagcccttcagagccaagattgcttcaatcaccagcatgtcagaaatagcatcaccagctgcctggttaaacaagtcaataatgtttttaagcatcttagcagcttttcttttcttatcttccagttgttctgctgattgttttatcttcatttcaacagctgtactaatcagtgcagtgccatgcccatttgcttcaaaataaactccaatgtcaaactcttgagccttgtggtgcaaatgttttacaccagtcttagtgcaatagacaggtaccttcataacttcttcaagataccgtgttgaacttccatttgcatatgcagtttgtacaacaccaatattcaaactttctccaatctccaccaggagctctttaaggaaactgctaattaacgttgctatcttgtctccatctatgagatgaaagtggccatctgcatcatggtagtaataaacaattctgtctgcatctccatcaaaagaacagcatctttcattggacttaatttccattccctgtggaggtttctgatgacttttcacaaagtcagctccacataaatgattgagtttgcccttggacccatcattaaacagctgaactgacaggccctgtgagaagtagtgttccatttcccttagcttcagggcccctatgccatttgcacagtcaaccttaagtgatctgtattcatctccactgcaagaagcctgtttggtgagttccacaaaagccttagagagtttctggtagtaaccttctatagttgcctttccatatcggccacccgtgtttcgacaatacaccatgtagtgcagctggggtgttgttaacaagccataatcatggaattgacctcctagaacagtcacaccatctattacagattgtgaaagtttctcactgctgggcctggtatctctaccaataactacaaaggcatcttgttgcagattcacagcttctttctcgctgatgtcaataagcactctctgcatatcttgttcctcagcatttgctaaacaggtggcatgttcctcccaggatggtgccaacatttcacccaaaggatcaaccaattttacaccattgtcttcctcaggattgtgggacgctgttaccatgactcctatagtggattttgtctgttttgacctcaggacagctaataatcccatgcgaaacatgacatgatc

SEQ ID NO: 320911 - DNA, 604 bp, Homo Sapiens
taaagagaatcctcccatgaattctccttgccaaataaccgtgaaaggactcagtaatttgggaaacacatgtttcttcaatgcagttatgcagaacttgtcacaaacaccagtgcttagagaactactaaaagaagtgaaaatgtctggaacaattgtaaaaattgaaccacctgatttggcattaacagaaccattagaaataaaccttgagcctccaggccctcttactttagccatgagccagtttcttaatgagatgcaagagaccaaaaagggggttgtgacaccgaaagaactcttttctcaggtctgtaaaaaagcagtgcggtttaaaggctatcagcagcaagacagccaggagctgcttcgctacttattggatgggatgagagcagaagaacaccaaagagtgagtaaaggaatacttaaagcatttggtaattctactgaaaagttggatgaagaactaaaaaataaagttaaagattatgagaagaaaaaatcaatgccaagttttgttgaccgcatctttggtggtgaactaactagtatgatcatgtgtgatcaatgcagaactgtctccttggttcatgaatctttc

SEQ ID NO: 320912 - DNA, 434 bp, Homo Sapiens
  misc_feature (174)..(175): n is a, c, g, or t
  misc_feature (238)..(238): n is a, c, g, or t
  misc_feature (252)..(272): n is a, c, g, or t
tgtctgaaatctattttatttggtctttgctacacaaggcaacgatttctagaataatcgtcactgtagtgatatgaggaatttacaactttcaatccttttttacttttgctgttaaattatatttcagtgcagatgcttatcaatttttaggaagctccaggaaggaatgannaatacataaaaacgtatctgaagttcgtaaataaataacagcaacataaaacctttaccaacnatggggacgcgcgnnnnnnnnnnnnnnnnnnnnnccacccaccttaaagtgtcaaaagatgtgttgtataaaaataaaccctaacacgtgggaagatcgacccggcgggcacaccaggtccctctcggtgaggacacacagaccctcaatgactccacagtctttgatggtactttcttttctgtgttatcaatta

SEQ ID NO: 320913 - DNA, 783 bp, Homo Sapiens
tgggaattattcattattgcagcttcactggaatgcactgtgggctcttctgttttagcctctgataattctgttatatgttctgtaggcacctgttttttcctcttcctttcttcttcctggtcatattcctcttttgattttctaagaacttccctcaggattttcatctcttcgtgttcaaggtcactgaccacatcagagccatcggttaagcagtcaggtaatacaccatttctctcttgaattattcgaatggcttgcagctgcatttcaatgtttttctggaccatcattgctttaaagatagtaaaatcttctgctgccaacacaggttgcaaaatggcctgtgatgtatgggtctttgcaagaggagaagtgcatgcttcttgaaattgatcttcattaattccaatttctttgaggtaaccttctaacagcttttcaactagttctttgtattcctgatgaatctctgtataggtcaatttgctttcttcttcatcatcaaaaacttcacatttctgttccacaaagtccaagatggggatggaccagtctgggcctcgcaggaaccccgcgatgctctccactacccactccacctcgtcttcttcttccgcagccatcccgccccaaaggggcaacggggaagatccctaggccagaccgccggaccccggttaggcctttgggccacaaggagccgagagggagtaggggaagagctggcccgcagtcgctcagcccccaggatagaagctaccaaccagttaatgcccc

SEQ ID NO: 320914 - DNA, 1180 bp, Homo Sapiens
  misc_feature (1141)..(1141): n is a, c, g, or t
  misc_feature (1163)..(1163): n is a, c, g, or t
aaagatgcaggtggatgtccctaggtctgttttcaaagaactttttccaagtgcttgttttatttattaagtgtctacctggtaaatgttttttttgtaaactctgagtggactgtatcatttgctattctaaaccattttacacttaagttaaaatagtttctcttcagctgtaaataacaggatacagaattaacaagagaaaatgtctaactttttaagaaaaaccttattttcttcggtttttgaaaaacataatggaaataaaacaggatattgacataatagcacaaaatgacactcttctaaaactaaatgggcacaagagaattttcctgggaaagttcacatcaaaaagagtgaatgtggtatatttctaaatgatatggaaaatagagacagatttgtcctttacagaaattactgagtgtgaataaaaacttcagatccaagaaatatataatgagagatataatttttgttaataagacaaaggtaatatattggatacaaagacacaaatgtattgtgtgttcaattattttgttgtcttgagatttaatattctttccaagagcttttaatgaagcagagagctagtacttcattttcactggatacattttcagcatcatgagttgtcacagcctctgagcccctgatctgaagccagaagggctgagtgtattgtaaacttattcttgcatgttgctgtctgggaatggaccacactacagcaggtagttctgggggcgatactgccgaaaggcccgaacacatgtattttggctgcaattgaggaacttgggatgctattaattttgtatttcagcaactgccccttctcctatcccaaagcaccaattactgccctctgcctcagcagtaccagtataagatgacattccaaagactggaggcaactcagcctgagttaattcacaaaattatgccatgctggggcttgagcttgagcttgggcttaggcttgggctcagcttttgaccctcaggcatctcctttcccttcctgtcttcctctcccttctcctctggctgcagcatgattttcttaaatcttcagacactcactattttcatggaacagttaccctctgttccccacaaccaaagacaactcnggggcttcctttgggcccttgntgttaacattggcaaaa

SEQ ID NO: 320915 - DNA, 731 bp, Homo Sapiens
agtattttcaacaagaaatgtgcaattgaaatcaagtgctgtttaagtgcagctaggatttccacaggaagacacttgcagtgaacagagttatggagcagcaaaaacacagatctatttggaaaaagagaaaacatatgcgttgtattttgcttcaattataaaataccatcctctcaaaggtggttctaaattacaaaggactttgatttctaggtagattctgggtagagacttcctttcatattgaggcattaatgacaccttttaacctgggaagcaatatgactggagttgtactttgagaagattaatcaggtttggttgcagaatgaaagagaagatgaagtcaagagattggtttagaggctctagcagaagcttagtcatatttcaaaatgatcaaatatcaagaaaaattctgagctgcataacttgtataaagtaattttcagtgatttttttcatggttatgataaaagaactggattagcagaaacttttaccctgaatcaagatttaatttttctttgagctcatcttaaggatatcggaacatagggagcaaacgatggtgtggctgcctcagtgcttgatttttaacggttttgaagagaatagttacatttcttctcctagtaagaactaataaatacattaacagaaatgaattccctatccctttgtacactggtctatttcttcaaaacattaaatactattgataagat

SEQ ID NO: 320916 - DNA, 1105 bp, Homo Sapiens
tcttcttaaacatatttaatcatgtagtttctggaagataggttaaatgatgaaaaaatgggcgaccatgaacacactctttaatttcatttccaaactggtgcttcattctgtagataatgtcttggatgtcctcttttgataagtacatgggtaattgtctggatagacgcactgcttctccctctaaataacttatcactttgcgaggtctacattcataaacttcctttgcatttctgtttaatatagcattaagaatttcttttaaatctgctactccatagaatgggagacaattagccattccttctatttccaagtaattttcagtaattgaaactcctggtatcaattttatcttgaaaccattcgctgtaagacgaggatcagacaggtaagttgatccactgtatctttggtcatctgctgtcattttatataaaacgtctaaataatgagatccattaaaaagactctctgttaacataattggcttttccagtggctctgcaggaagtttatgattctcaagaagtcttttaaatagcagggcttcttctactctatatggatttaataacattacctctgttttggatgtcattagccatgcatcaggaaacctgagattgtggatcaagcaaggttcatccttctcttctaagtcaactttgttttgtttcttaaaatttatttttaagtttttcatagaaaaggggatctgtaccattttaatattttgactccttcttttttccatttgggactgaaggagttcatcaagttttggttgattagataatgaggtttttaacttgtgcttctgggccaaattccatgcgctggtgggttttatcttttttctgccatcttttagtgacatttgtgactcctgttcaatggctctcttcatttgactattgtatcgttccaagtctttagtagccttctcttcatatttcagtttttcctcttcactcaatgtcttccacagttcttcaatttgtagtgttgcatcctctaaactagtcttaggattttctatgagaaactgaggacgatgatcttgaacaaaaagagcacttgctgacatgggtttctt

SEQ ID NO: 320917 - DNA, 532 bp, Homo Sapiens
atactacaaacctattttatttatataacttcttatgaagtagattttgtacacatggtaggctaaaaattaaaactgcttttccacaaaactgataaattactagattcttggttctttcatgatatcataacattaaatcattaaaaatataaggcaatttaatgtaaactactagcatttacaaaacagtaaagttataaaaaactgtattacaagcaaatgcaccaaataccagtgaacatgaaacaggagtgaagtttgctggagaacattaaaaatcacttttcagtgggttcacttcacattcatgctgcactgggcctgacacgttcagcaccatgaagcagacacttcggcaactagaaatgttacttctgtttgactttttttctaaaatgaaaaagcagtctgtgaaatgcgtgttaagaacgatctatctagagtcgcacagggtccagggccgctgcagttgactcagttgttcccatcctcgttttatttgacaaagtacttcatttggccactctgg

SEQ ID NO: 320918 - DNA, 157 bp, Homo Sapiens
aagatataaaattatcttcttggattgttgtttcctcttcctgttccagatcgatttccagtagtagatggataaccagcaccatttggattattgtgtggtgtgctaggtctatttttatctgccatttctcacctcctttctttttttgttattt

SEQ ID NO: 320919 - DNA, 1083 bp, Homo Sapiens
  misc_feature (502)..(512): n is a, c, g, or t
  misc_feature (995)..(995): n is a, c, g, or t
agagcccaagtgaccaccagaagggacatgtgagacagcaggcagaggccatacatggaggatcacactccctcagacgtcatcagccccatgctttatcctttgactccccctgatcctcaaggccaggtggggtgcccctgctgcatgctccagagaactgtgggcctctcctaccatggctctcaatgcactgttccataactggcttctcccctggacagagccaccctggtctccttgtaagctttagttgggcttgtccctgagtgtgtggggtaggaataggagtgtgttcttgtgtatgttgcaatctttaggctcaggagacaaggagttagacctgagtcctgacatgtgcactcatttgtactcaccattacattctatttaattgctttgagccagacaggctgttttctttaccatgaaatatactaatcattcaaaaaagccttgtgtttaagaagacagcaaaaaacatcacttcaaaaaggcaacnnnnnnnnnnncttggcatcaatgaatatgcacttcagaaatctacagagaacttttttcactttgtatttgttccacagcattctagccaggagtacaaaataggagctcttcaagcagcacatgaagatggcccaggagccttcagccatccagagcagcagagcagcacctaaatctccacacacttcccagtataaccactaagaacacactagacccttggcattaggggatttatcatttccagttctattatctgggaatgactccaagggtttgtgacaagcttttgaaacgtaagtgctaagacgagtgtggacaagtcactgagctaatgaagaatagacccactgtctgcttggctctgctattttgtacctgtcttcacatgtggggaaacttcataactgtgcccacaaatcagagaaattcgcaaaggactaggacaatgtattgcctgtggaacttcagagggcaactgggaaatagtngcaactgggaaatcaactaggcttcatacatagggcgggtttgtttccagggaccaaaagcacagaagataagaaaacttttcaggtg

SEQ ID NO: 320920 - DNA, 922 bp, Homo Sapiens
ttaagttcagttctcccttatggctgcctttcaaacaagtaccttttatctgatgcctgtatcttccctttgttaaggtgtaacttgatgtagggtcaaggtttttgtgacaacaggcagactccacacagagaggatatgatgagaatatggccatcacctgaaaagttttcttatcttctgtgcttttggtccctggaaacaaatccgcctatgtatgaagctagttgatttccagttgcactatttccagttgcctctgaagttcacaggcaatacattgtctagtcctttgcgaatttctctgatttgtggggcacagttatgaagtttccccacatgtgaagacaggtacaaaatagcagagccaagcagacagtgggtctattcttcattagctcagtgacttgtccacactcgtcttagcacttacgtttcaaaagcttgtcacaaacccttggagtccttcccagataatagaactggaaatgataaatcccctaatgccaagggcctagtgtgatcttagtggttatactgagaagtgtgtggagatttaggtgctgctctgctgctctggatggctgaaggctctgggccatcttcatgtgctgcttgaagagctcctattttgtattcctggctaaaatgctgtggaacaaataccaaagtgaaaaaagttctctggtcaaattctgaagtgcatattcgttgatgcccagacaaagaaaaaggtgccttttttgaacttgtaacccatgttatcgcgcacccctccaaggttttggggggccgccttccgccctcgaaaaattttttctaaaaccctttcgttttgggcgcggcgggcctcaattagggcataaggaaaaatggggcccttaagctgtgtattcccagaagagaaacctcggcgccttgg

SEQ ID NO: 320921 - DNA, 608 bp, Homo Sapiens
gcatcgaacatgtagagactatttttcttgtcatgattctctaaacaatacaatcaaacaactatttacatagcttttacaatgcatgaggtattaaaagtcatctagagatgatttacacagtatactggaagatatgcataggttacatgcaaatatgccatataacaaaggacttggcatctgtggatttagagggtgctggaaccaatcccctgcaatatattgggggataactgtatttaaaaaaattgaaactacttaaggctttatcccatgtttacattcatagggtctatctccaaagtgagttctttcaagtttctgaaattaaagtactgaatgttttcccacattccatacatttagagagtatctttccagtgagtccttttatgtctatgcaaggaacggagagaactcaatgctttcccacattccttacattcatacagcttctctccagtgtgagttttttcatgtcctcgaaggaaacgggaacgagtgaaggctttaccacattgtagacattcatagggtttctctccagtgtgaattctttcatgtcgtagaaggcaagtgagccaagagaatgcctttccacattc

SEQ ID NO: 320922 - DNA, 774 bp, Homo Sapiens
tttttttccacttgtaaaatcattttattggtataaatatacatatgaataaaatacttccagcctgtaatgtaagtgaatatttgtgaaatgtcttataaagagtagtattttgatttttacaggtgtcaaagtattctctcttaaaatcacacattaaaagctaatatgcagacagaaattaaaggccttcaaaaacatgaatattcataaaacctcattccaatcaactatatacattaatctgggcacatggtaaaatcagccatgggcctctctcactctgttcttagctgtgctcgttgatggtatgcaaaggtcaccgaccaagctttaaatgtacaattccacatcaggaaggaagaagttccccatgggagaaggtaaaaaccatacccaagatctaatatatataatctatacaaattattagtgtgctctgttaatataattacaatgtgcaattgcatacatcaagaataaattgctatattgagtcctgtgcggatttgacacaggtacacttagcagtactccgaggtctgctgtggtgttacttgtgtgagtgtgtgtccagttatttcatttatctccaaaaactcatcttgcagggcaatctgtagctgcctcagataaattcaagtagggcccatgggataattgctggctttcattaaaggcatatgaaggaatgtttagaaatcaaatgcaaagggttggaggaagaccaaacaaatgtgctttgattaccaagaaatggatctgtttttatac

SEQ ID NO: 320923 - DNA, 833 bp, Homo Sapiens
  misc_feature (99)..(133): n is a, c, g, or t
  misc_feature (709)..(718): n is a, c, g, or t
aaactaacacatttaaggaactttgataactttaatttctttacattacaaagaagaaaatcctccaaatgaaacagatatgaatatagtttatggttnnnnnnnnnnnnnnnnnnnnnnnnnnnnnnnnnnnaatatacttcaacccagtgacaacacgtaacttggaaactacttaccagtaacgtgtactgaaagactaaccttttccaagatgagtaaaaaaaggagggtggggtggggagtgctgtttactttgctgaaacaaggtcagagatgacacatcatgaataatcaaaagaaaattattctatcaaagctcagtatctagctgatacataacacttatttgagcacacatataatcactgacttattaaacactattactcattttctaagtgtaatcgtccatttcattctcagaaataatagtataattgaaaaagaaatgatataatctcaagcaagtggagaaatttgaattatctaagggaaaaaagtaattttaacatagtgtgataattacatttgaaattagttatatgtataaatttaaatcttgcattatatcagcaatagagtattcaaagatccttcttgttatcttcccaacaaggagctatcatgtatgctaggtacaagagactcctcaagggaaataaaagcctcaccaatcaatgtctcaaaattcattatgtccacaggnnnnnnnnnnacccacaaaaatgctcttaggatccctccaaacttagttataaacaaaaatgtagttatttaaagtgaataaaaattaagatgacatcacctttgaggcaatgcattcatatcag

SEQ ID NO: 320924 - DNA, 665 bp, Homo Sapiens
  misc_feature (346)..(374): n is a, c, g, or t
gtaaaattttaaaaatttaaatttattaggatttattaacacaattacacagaataaagttcaggatttcattaatgatggtcaccaatatgtgcttctttgtggctttttaacccataattctcatgattcaaatttattcatattatagttgaatttcatacacagcttcacaatgtggatattacaggtccaccagtaaaattaatgaaaacatatctttcatgaaaggcacataaagaatctaaactaacacatttaaggaactttgataactttgaatttctttacattacaaagaagaaaatcctccaaatgaaacagatatgaatatagtttatggttnnnnnnnnnnnnnnnnnnnnnnnnnnnnnaatatacttcaacccagtgacaacacgtaacttggaaactacttaccagcaacgtgtactgaaagactaactttttccaagatgagtaaaaaaaggagggtggggtggggagtgctgtttactttgctgaaacaaggtcagagatgacacatcatgaataatcaaaagaaaattattctatcaaagctcagtatctagctgatacataacacttatttgagcacacatataatcactgacttattaaacagtattactcattttctaagtgtaatcgtccatttcattctc

SEQ ID NO: 320925 - DNA, 870 bp, Homo Sapiens
  misc_feature (31)..(31): n is a, c, g, or t
  misc_feature (48)..(48): n is a, c, g, or t
  misc_feature (55)..(55): n is a, c, g, or t
  misc_feature (106)..(106): n is a, c, g, or t
  misc_feature (124)..(298): n is a, c, g, or t
  misc_feature (300)..(316): n is a, c, g, or t
aactatttaaaacccgtaacttgtaagtagnaaataacagttccctantgttttnacactgtgggcctgaaagaaaaaaatcccatttgtttccttccttgccccnatcctctgcagaaggtgnnnnnnnnnnnnnnnnnnnnnnnnnnnnnnnnnnnnnnnnnnnnnnnnnnnnnnnnnnnnnnnnnnnnnnnnnnnnnnnnnnnnnnnnnnnnnnnnnnnnnnnnnnnnnnnnnnnnnnnnnnnnnnnnnnnnnnnnnnnnnnnnnnnnnnnnnnnnnnnnnnnnnnnnnnnnnnncnnnnnnnnnnnnnnnnncaacacccagatagatacacatactccttcagacttacagacctaagctgcatttatggggtagtgatgaggtttagaacatatacatattttgttaaaattccccagatgattcttggtatgaacgactatattataaattttaagatgtacttagaaatccttaagacatctagccccgtctctaatagacaacacatttatattgcagatattacttttttttcagtttatgaccaggtatttatgaaggactattggcagggaaaatatgaatatgttaactttagcttatggcatcaatttactaaggaacaacaggctcaccaactgatgtcaaacataaaaacccccacatcagtctgatacgatatggtactactttgaatctgttactagtaccatcttgacagaggatacatgctcccaaaacgtttgttaccacacttaaaaatcactgccatcattaagcatcagtttcaaaattatagccattcatgatttactttttccagatgactatcattattctagtcctttgaatttgtaagggg

SEQ ID NO: 320926 - DNA, 1058 bp, Homo Sapiens
  misc_feature (18)..(18): n is a, c, g, or t
  misc_feature (43)..(43): n is a, c, g, or t
  misc_feature (66)..(66): n is a, c, g, or t
cccttaaaaacaaaacantgcaagtccttaacccaagggtaantaacggcaaactgtccgaaaaanccatcttgtccttccccaacaacagttggggtgaactcccccgttttggaacaacaaaggatgagccttggcccttgtttccttttgggaggggatatatcccactgagatgagagggccaaactccgtttttcacgagattttttgactttgagcttcattttcttcttgtcaggatcatgtacaacagcatgcctagtgagactttgtttcattgcaaatgttttgccacagccagcatgttcacacacaaaagggcggctttcctcatggaaggagaggatatggctttggagattaaacacagttgtataggttcttccacagccttctcttggacagcgacatacatccctttctggggcatgagttttcatgtgttgcttaaggtaatctttgcgtttaaatgttttccggcatacttcacatagtatttcctctttatgggtttctctcacatgtttcagaagttccgtccatgtttttgccacaaaggaacatcctttttgacatacatagccctcgtgggccttggcatgtcgtttcagcttgctgggtgatgcaaagtgtttcccacatccttcctgggtacacttgaatagaggttcattggtatgctggcactgatggattttcagctgctgatgtttcttaaaggtcttcttacagtcttcaaaactgcatatatattgtttttgttgattttcatgtttgcgttcaaaatgtttcttcaagtttgattttgtgttgaatttttgatcacagccattggctgcacaaacaaacggcttttctcctgtgtgagtcagaatgtggcggctcagatggtagtccctgatgaaggccttgccacacccttcatagtcacaaacaaatggtctctcccccgtgtgcttgcacaggtgcgcgtcaagcttccaggctttgctgtaattggcgctgcagtcagggaaggagccctcgtgccgaattcgccacccaggcctcgctac

SEQ ID NO: 320927 - DNA, 1430 bp, Homo Sapiens
  misc_feature (125)..(129): n is a, c, g, or t
  misc_feature (134)..(134): n is a, c, g, or t
  misc_feature (136)..(139): n is a, c, g, or t
  misc_feature (143)..(152): n is a, c, g, or t
ggggagacccggcagattttccccttttttacaagaaagctgggttcaggaaacagttatgagccatgtgccaatttcattaccttctttctccgcacccgacatagatgcctcgagtttttttnnnnntggtngnnnngggnnnnnnnnnnttctgcatcagtaattttaataaagaaaagcatgctctgagagaaagctcgctccttggtctgcagtcctttaaacaaagcagtgcagttcttagccaagggtaagtactgcaactgtcgagagcatcttgtcttccacacagttgggtgactctccgttttgacacaaagataagccttgcccttgtttccttttgggagggatatatccactgagatgagaggccaaactccgtttttcacgagattttttgactttgagcttcattttcttcttgtcaggatcatgtacaacagcatgcctagtgagactttgtttcattgcaaatgttttgccacagccagcatgttcacacacaaaagggcggctttcctcatggaaggagaggatatggctttggagattaaacacagttgtataggttcttccacagccttctcttggacagcgacatacatccctttctggggcatgagttttcatgtgttgcttaaggtaatctttgcgtttaaatgttttccggcatacttcacatagtatttcctctttatgggtttctctcacatgtttcagaagttccgtccatgtttttgccacaaaggaacatcctttttgacatacatagccctcgtgggccttggcatgtcgtttcagcttgctgggtgatgcaaagtgtttcccacatccttcctgggtacacttgaatagaggttcattggtatgctggcactgatggattttcagctgctgatgtttcttaaaggtcttcttacagtcttcaaaactgcatatatattgtttttgttgattttcatgtttgcgttcaaaatgtttcttcaagtttgattttgtgttgaatttttgatcacagccattggctgcacaaacaaacggcttttctcctgtgtgagtcagaatgtggcggctcagatggtagtccctgatgaaggccttgccacacccttcatagtcacaaacaaatggtctctcccccgtgtgcttgcacaggtgcgcgtcaagcttccaggctttgctgtaattggcgctgcagtcagggaaggagcagatgaacctcctgggaagcgcggggcgcggcggggtcggagctgagctctcgccggctgcaatgaacgcgtcggcgatggtcaaggacgacaccgactcggcgaccacggccggcggatccagggcgccggcgcctccaagcccagggccaggcgcgctgccacgtgccgagacacgtgccgggaaccggcgcgcccggcccacggctcccc

SEQ ID NO: 320928 - DNA, 756 bp, Homo Sapiens
  misc_feature (125)..(206): n is a, c, g, or t
  misc_feature (254)..(311): n is a, c, g, or t
tatctgttgatatctcttttgtcatctcgtttggtcatttcttcctcatccctatcatcttcttcatcctcagcttcttctgcttccatagggtcatattcatcttgattgttatcttcttcagnnnnnnnnnnnnnnnnnnnnnnnnnnnnnnnnnnnnnnnnnnnnnnnnnnnnnnnnnnnnnnnnnnnnnnnnnnnnnnnnnngcctgattttctccgtttgggttttggttcatcagtttcatcatctcnnnnnnnnnnnnnnnnnnnnnnnnnnnnnnnnnnnnnnnnnnnnnnnnnnnnnnnnnngtcctctttctcaggaagagacagtaatgatttgtatatacggacaccaaaatctctttgaagcatttcgttgaaaagttccgcaaacaatgaaacctcaaatgaatgttctttattatcctctaatctgtagtccaataggacactcaaagacatgatgctacaatcaaacttgccactttttgcagcccaatttggatgtacaatgatggccggttcatcaggcaaaatatatcttctttctcgacgctggcgttctatttcctcttgacgtttcctttcttcttcctctttatcgtcttcagatttcctatcatcatcctcatcctcttctttttcagatttctctaactccttctgttcttctttttgttcctctactttaagctgttttgtcaatcgggctattaactgggattttaatcctttggaactaagagctcga

SEQ ID NO: 320929 - DNA, 1884 bp, Homo Sapiens
  misc_feature (76)..(76): n is a, c, g, or t
  misc_feature (263)..(297): n is a, c, g, or t
  misc_feature (1600)..(1660): n is a, c, g, or t
  misc_feature (1697)..(1780): n is a, c, g, or t
gaagaataccaggtaattcctgtgagttcaggtccaggaaagcctgctttgtgggatctttctgtgggactgggcncaggtaaccctcctctctccccacagtgaacttgtacttgtaaaacccagctgcattgattgtcatagacaacctggcagaggaaaaaaaagcgagatgtggccgggtgcggtggctcacgcctgtaatgaatttttaatgaatgcttttagagactgatcaagaggggattttttggtgatgagtnnnnnnnnnnnnnnnnnnnnnnnnnnnnnnnnnnnttaagcatcatgctattttatgattttgactgaaattttaacagatgaactaaaaattttaaaacctaataattctataaattaaaaatttctaggcattttaataaaagaaatttggtaattaaatactacagtcaattaaactgatgaactttattggagttaaaactataacaaagttcatcttaaaacactttgcaatgcggaattatttcactcaaggagtgtttaataatttgaaggctaggaattacaagcaattttcaaaagcagaaactcacattcataaaactttatacatcatttgaactaaaatacatttatactactaaaatcaaacatgcatcaccttcaaacattcttatatcatgatttttatatattacattatttaacaccattcctcatcactacatggattttatcatacactggcaccattctccttggatttttgatctttgtcttcattctttacattatccttcttgagaacagtgtggatttcatccattaccgtagataagtttctgattgtcttattcatttggttttcaaattgtaaattcatgttttccgaaatctttaagttttcttgtaactgactaaggtcctttttaacttctctgagttcaccagagaggcttttgttggaattctccaaatttaatatggttttttcatcttcatctgttttttcttctagtaactgcagcttctgttctacctcagctcttactttttcgctcttttccaatttttgcaagaggcttcctacatctaccattgcaccattgtacacaatgaggccaacattttcttccacatcctttgattcctgctttactgttggtgttggaagtaataatctgtttcctagcatatcttcctgcaatgactcagactcttcatggttctcttcatcttttgaggtgtctgttaatttccggtaaaagcaagattcacggagcactactttattaagaagcttctttacctgagcccgagaaagatgtagtccaagagtataaagtatttcttccaaatccttttcaagaaggtaaccacaatgactttgatcaaaataaacaaaagccattaacagatctctgttaattgtgatcatttgagtcttttctttttccttatctttagagggcctctccttgcagtatctgttgatatctcttttgtcatctcgtttggtcatttcttcctcatccctatcatcttcttcatcctcagcttcttctgcttccatagggtcatattcatcttgattgttatcttcttcagtttcatnnnnnnnnnnnnnnnnnnnnnnnnnnnnnnnnnnnnnnnnnnnnnnnnnnnnnnnnnnnnntttatctttatcatcgcctgattttctccgtttgggnnnnnnnnnnnnnnnnnnnnnnnnnnnnnnnnnnnnnnnnnnnnnnnnnnnnnnnnnnnnnnnnnnnnnnnnnnnnnnnnnnnngtcctctttctcaggaagagacagtaatgatttgtatatacggacaccaaaatctctcggacgcgtgggtcgacgatatcccgggaattccggagccggtacca

SEQ ID NO: 320930 - DNA, 507 bp, Homo Sapiens
  misc_feature (95)..(186): n is a, c, g, or t
  misc_feature (222)..(291): n is a, c, g, or t
gtcatctcgtttggtcatttcttcctcatccctatcatcttcttcatcctcagcttcttctgcttccatagggtcatattcatcttgattgttannnnnnnnnnnnnnnnnnnnnnnnnnnnnnnnnnnnnnnnnnnnnnnnnnnnnnnnnnnnnnnnnnnnnnnnnnnnnnnnnnnnnnnnnnnngcctgattttctccgtttgggttttggttcatcagnnnnnnnnnnnnnnnnnnnnnnnnnnnnnnnnnnnnnnnnnnnnnnnnnnnnnnnnnnnnnnnnnnnnnngtcctctttctcaggaagagacagtaatgatttgtatatacggacaccaaaatctctttgaagcatttcgttgaaaagttccgcaaacaatgaaacctcaaatgaatgttctttattatcctctaatctgtagtccaataggacactcaaagacatgatgctacaatcaaacttgccactttttgcagcccaatttggatgtacaatgatggcccc

SEQ ID NO: 320931 - DNA, 636 bp, Homo Sapiens
tttttttaaagagaaatgtaaaactcagtttaatttcaagtttgtatagagaatgtatgccacagtttgtattttataaacacaacctatcttattataaatacaaaataagaaaaagtgatacgttagctgttatgaagggtgaaaacattatataaacttcaaaaggctgctttctgcatctgcatctatgtaatttcatggttctctaccaatttcatttacagaaataatctctatagtcaaattattgttcactttcatgccccaacatgggaagtggtaggtgaatatctgtaggaatacaatttattgtctgctcctccactcagaagtagccctgtgtctgtccagtctacactcagaactttgtcttcatgagcagccagatcatagagaggagccttacaacttcttgtatcccacagcttaacaatgttatctaaagatcctgaaatcagctgctgttcatgggtaggagaccattttactgatgtcacccaaccagtatgtgacgttagggacagcgacaccaaagaaccatctttagttcggggatcccacagtctgatatgcctatctgtgcttccagatgctaaacgtttacaaagtggagaataggaaatacaattaaac

SEQ ID NO: 320932 - DNA, 388 bp, Homo Sapiens
aatgtgctttaaaataataaaccttctggagcatttctcgtctgttaatttgcatataagcttcccaccctcttccactcccaacctctgttgagtttacctcgcaaaacctaaacaaacaggttttacaaagagcgaaaaagtctggggaatctctactgtatctatctctgaatactgtattcagatatgcttagattagattatgcccaagtcagcaaattgatccagttgcttaggaaaatgaatgtcagaatttgagggtctgttttcctaaacctactttaattttagaggaaggcttttcacttcccattatatagtaaaccaagtaaacttctttactaagcaaaatcctgaagaagttaaatttgacttgcaaagtttt

SEQ ID NO: 320933 - DNA, 2512 bp, Homo Sapiens
  misc_feature (1693)..(1693): n is a, c, g, or t
  misc_feature (1943)..(1943): n is a, c, g, or t
ttttgataggctttaaagtgaatcgtttttatttaaaacagggatccatcagaggtggtgaactatcaaggtcaaggttctagagcatggcacagatgaaaggtaatactcaccagcacctcacatgggactcagtgacaatgtcagcaacacaccatggaaggagaacaaacccgatgtaaaaggcacctagctggggagaagctgtggtgttcactgcctctctagcaggtttgcttttgtgcactgtggctaagtctggatgaataatattgggaagggaataatcggaagcgaggctcctatgcaggcagctaccctctcctgattggtgtatactcgccatgtggtaggaggtcttacaggagactgaggttaccaaacaggaatacaacacctctctcccttttctgctctagaaggaaggggaacccttcccccagtatcaatttcagcagcgggcttctaaaggctgttaaaaagcatcctaacttaaaaacaaataacaacagtaaccaaataaaagccagaaaagtggcctgaacttaaatcaatcaatggaaaggtagattcataaaaataaaataaaaactggtgaccagtccattaaccatggggttaatgcctcgtctgaaggaagatgtttacgctgcatccacgatccagcaggcgcggagctgctcttggcaactgtgaatgaatagctaccgtttcccttcaacacaccgcgctgccaccggtgaccgcatgtcaagtgctgaagttagaagagaccccacgttggcaaaggccccccaggcgatgatctgcctgacgcggccaggtctgtgggaaacaagacttacgatctcaaataatgacccccaagtgccctcgcctcttcctgcttgccctgtgcgcctcgacctcctcacggggagttccaaatgagttccatttccctctcagttctaggcactctggaacatctttgattaaccagggtttttcatttctttccaacgccattggtgacttttgacttggaatgccgattccttctcctggaagaatggctttcgttgttgcctgcatgcttgggtgggctgtcttcagaaccttttgtccctttcctgtgatgccaggagatctctggactgtaggtgccatcttcacactccgagtaggtcttttctcggtgaccatagtgttctgcataccaaatcatgccgtacagacagaggaaagtggtgaaagccacgcaaagaagccaaagcacaacatagagtatttgggtcttagagaagagatcttgtccaaattttatgcaaacaatggcctccaggaaaccaatgaccccaaacacccagcattgtgttcctacgcgcttgcactgtgtgtcggtgaggtaagcgtagtactgtctcactgtgggagctgtgatgccaccaataaagagaattctaccccaacttaatggatgactggcttggaacacaaagatatgcttcaagaagaaggtattcaactcagtcagctgccagatgatcatgaaaaggtacactccagctactctctgaaaagaagatttggggtcaaaccatcgaacataggtccagctagcaggagtgaactgcagaacagctctcttgatcttcccggtggtggtatgaaatgtctttgaagcttgccccagtggtaaagtcctcatctnctaaaaaccggcaaaacgaccatgcccagccaaatgccaccgccattgcacaacaggatgtccagaatgacttgatcccacccagcactcggcaaaattggggaggagatgcatgaagaagagctcagtcagctcccaggtaatactgattgtccagcagagaccgtaactacggatcagcaaggccttcatggcccagccccagaaatgtccaaatgcaaaaatatcaaagtggctgataatcctctcnccaggtgatcacatggcagttcacagcatactccatgacatctgcttcccttgtggcgtatcgaagatttggatctagccaatacattagagatttaacctgctcgaaattcaggaagagtaggaataccaggaacaggaagtagagcacactgagtccaaaaaccattcgccataaggctggatgaggtcgagtgaacggaccattggggaaagctaacacactgatgataagaaagaagaaaataacagagaggatgcctctccagatgttgtcttctggaacagagtcatccctggtaaaggcgaagtacatgaggctgacgatggtgaagctgagcagggtgatggtatgcggccggtagaagaagtcaatggtgatgtcctccacttgctgctcgttgatcatccggaaatgcattttgtagttcacatcatccttgcttagggtccggctccccacgcaggacgccatggcccgcctccccgtcctgccgcggtggcggcggccccagcccgagaaggccgggaccccgggggtgactagccacagtaggctaatagccggac

SEQ ID NO: 320934 - DNA, 813 bp, Homo Sapiens
tcatgcccagtcattcaccccaaaataaaattccaatttcaatgaaaaagtaaataacttaggggatctataaatgacactgccaatgtatcttgttcccatttttaacaggaagtccttcatgcaaatgtgtgagtctccccaggatgcatgaagctcccagccttttcgtggtgactcaatagagcaattgtaccttagaaatttgcaaccccctccctgaaagtcttctcccacgttattaagtgcaatgtttatggtaaatgtagaagcatcatgatgaggacgaagagaacgctgtcgttcaggggagtattttactacaaaattcagtagtgcaaatcccttcgtataatagcctgcaaagaccttcagtgtaactggtgcaatgaactcccggataaaatgaagccatacattctccagatcaacttgcttcatgtggatatcatcagttgggacattttcataaccaccagatatacggctatcatgatgttttcccccagaccatttgccgtaatgttccatttcttctaccaattcatcacaggctttttcagaaaatatggggaaccaaaagacatctggacagggctgttcaactatattttcagtgaaaatctttgaataatcacggtttatatacttttccttccagtccacaggattttcaaaaatctgccagaggtcattgttataatgggaagtattgtaattagcagtggataatagccttccaaattcatgtctattagaaatgtacataaatacacccatttctctagcatttcggcaaagagccatatcagg

SEQ ID NO: 320935 - DNA, 825 bp, Homo Sapiens
aattttaatgtggataattggtattcaaattattactcttaaatacattctcttttctcaaagcaaaaagaataaagaaaaacgcaatacattctagtcattgaacatttatagacatttaaacccaaggggaacactagaggtcatttggttcaagttccttgttttactggtgagaaaactgaagaccagagaggccaagtgacaggtccacagtctcataaggagtaagggagtaatggacaaagattagaaaccgcagctctcaactctttgactagtgtcttgtagaggaagcctttcatgctgtactcattatgacaacaacaatattttctatgaaattttctcctttggccttactaattattatccagtgctaacctctctgtctctactccctcacatataaactgacactattattcaaaattacaaaactatttattagggttaaaactttctagatgtacataaatagaaaatcaatgtaaaatatacatgcaaaagatacacatttctacaatgttcagtgaaatcttgatgctgaacatcagatacatttcagatgctgtatgtgtacaaattcaactttcctatgtatatgtggtcactttattttgtgctgtggaccagtaaatacatatgcaagaaacaaaccttcgacatgccatttgattctgaaaaaatgtctttggattatcccaccaatcatattgatgttctttaaaacttcactctcactaaaccatacagcagcatgtgggagaaaagttcatacagaaggaggagggacttacttctcctccttgcgattattattgc

SEQ ID NO: 320936 - DNA, 541 bp, Homo Sapiens
gagtgctaaatatttcatgtcaatggaataacgcaaatgattaagcaacaccccataaaatggggcagacccagggaggaatatatatccaaactgactcatcccagtgagctcaccgcacatgaattacaaatggagcagggtgcattaagcccctctgctggcagaagggaggctgctgcctgccatgcgcctgtgctgagaatggcaggtccccagggagaggagaggccacccccttctctgtctcttccatcacaggagtgaaagcctcagcgcatgagctgattctgtgcagtgctcgacatacagatgagaacactgaggcccgagggacagcctttgacctggtcaccgtgctcaggaggaggtggttacccgcgggcctgagggtgctgactttttagaatgggcgagggcagctgtgtcccagtgaccagaacgattactgcctttaaaaagtcatgaaaatgatcgtgaactgtaccccacaccgagcgcgcgtctgccccccaagactgtggagacgcccccagcttcc

SEQ ID NO: 320937 - DNA, 538 bp, Homo Sapiens
ggaattgaggatctgatggaggttttttatgtatttattttctgttcaccttgtgaccctgtgtcaaaatttataaagatacaaaaggcattactgaaatggtactttctgtaatttgatactatttggcttaatcatcttcacttgactatttgtaatactgttgtaatgttaactctgttaagtacccaagctgcttgtcttccaccaaagagtgctttattaacaagaatctgtgaaaatcacatttaaacactgttgcatgttgtaagaccaggtggtaccttagtaacctaaaacttgcaagagaatattaatggtagctttagaagactcaggaggagaaactgacttcagagttggaagatgttgcaagtcgttcctttttctgtccttcagggactgaagaactgggaggctgcccattgtttggttgccagtcatacaaattaaaatcatatttcccttccatgaatggaagaaacacactattggtttttccccttggaaacagcaatcccaaataatgtcggcttac

SEQ ID NO: 320938 - DNA, 1669 bp, Homo Sapiens
  misc_feature (1467)..(1467): n is a, c, g, or t
ggaacatcatcaagtgtgttcacacgcggggtcggtttaatggagtgtccacgcggagataactgcgatattggaacacctgtgagagagattgttctatagggctggaatattcagagttacattcttggaagtttctgtttttacttgcatcaaacacccctctgttgttctccatcatctttaatagcaactggagaccactttggtcattggtaagggggtgcattctcctcacaaaggggttttatggacttcctcaggcggagagcttctgagaacacaggcaggatggaaaaagactactagccacttttgctttcccaaccccccttaatgccatccttcattgtctttctggcttctcttcttctggcacagtaccattttgggtctgtgccccagtgtggagcaaaacattgcctgtcccattctgatatacttcagaatttgagagcagaagttaatgtggaacaaaagttttcaccatctctcaagccccaaggactggagccacctctggaataatgtgttaaatatctgtatattatatatatgtagagaaaaatctaattttttggtttgatttccttcccattaagaatcttgttttttgatacccttgtctccctgagactctttcttggacacgtgttgatgtggatggcactcctgctctccatcttttatgggcagagagatttcaaaacctgagcaggatcatgtctggcagttactaaacagggactttgtccatggtttgtatcatggggtgcctactgctgtctaaactctgctctcctaattagctgactcttgaaaatgaaatcctaacctctttcctgcctcttttctttctcttttcaggaagagtgtgggtagaaagtccggagggcaacttccaatttaattctgctctgtccggcgcataggctgaattccaaaagaactttcttcctaggatgtggggcttaaagcaccgtcatgtggggtggatcagataattgctcctgtggggccctggcttccttctctgtttgtgcagtatttgtttttgttgtcttgttgagaaatatcccctgtgcaacccacccttggttgaggatcacaaattgaggtgccttccttgtacgctttctgttagtatttttcgtttctgttccttacctgctgagccttcgccagcgtgggtcctgggcgcaataccattccaaagggaacccatcccctacggcgacatttgcctcccctgcggtaaaattaaatacctcttattccttgccccgattcccttccttcctacccggccaccatacatgccgaaccatccatcaccttttccgcccgccccgggaaatttcccttccgtacccacgctttactttccacaattccaagccgacgcgttctataccctatgccgcttcctttcccccgttgcccgtcccttaaagacgacgcggatgntcactcgccgcggccttttccataacccgaatcgaacccaacctcgcacctatcccaaattttccgacattcccatcccggccgagtaacgcgcgcccgcctcccgctttagccagcgtgcaaccatatgctgcgcgcccacacgagttttttgcccgcgtgtatgattctcccccactacgcgcgccccccttttctcccc

SEQ ID NO: 320939 - DNA, 176 bp, Homo Sapiens
tttttaaggagttacaataaaaatctttttttaggtttggtcagtccaggtaagatttactggagtcacagagcaatttgctttaacaggatacaacagttcataaaaactgagtaactttgcccacaaattttttaaacagtcacctaaagagaaaatgcacagatgtatggtgt

SEQ ID NO: 320940 - DNA, 754 bp, Homo Sapiens
agtttctgaaaagcttgtccggatgggatggttggatttccaggcatttctcataaagttgataaacctcatctggacagttaggtggggcacggcaggcgttttccttcttttaacgtattcacaagtcttgtgactgtcatctggccatgggttgggcctatcattttcaggaacaaagccatgggactagaatctgaatcacagtaagtcagcagctcatgcagagtgactccaaaagaccagacgtcagaggcaatataaaatttagattgcattaaacattctggagcataccaaaacacagggctgtcccggtcatccttgacggtgtaatactccttatcggtttcaattgctttggttaaaccgaagtctccaattttcacttggtgttcactctcaacaaggacatttcttgctgccaagtcccggtgaacgtattgccgagaacccaaatagtccatccccttacaaatctgaacggcatattttagctgctgtttgaggtttattttgttcttattctttggaagatattccttaaggcttcccgaaggcagaaattccatgatgagcttaataccatttcctccgtcttctgtgcagattcctttgtacttcacaatgttctcatgatagaggttccttaagatctcgatttcctttttcagatcagctatgtggttacctccactctcaggcttcagagatttaacagccacctgctcccctgtattgtccccttcgggcc

SEQ ID NO: 320941 - DNA, 974 bp, Homo Sapiens
acccaaatttagtcgaattttagcaactttgggatataaaccagcacagatgacagctttaattatcttctcattatctgaatttatattagattctggatctttaggatttctactgcttacaaatccagctccaagaagatgctcagcaaactgtcctttcatgttatgcagcatctgcagtgtgtttgaagacagaaaatattcccagcaatagtccttttcgtatctgaaaccacgtcgcctagcctcttcccagccctcaaacgcattcacaactgttaagtgatcacttctagtatcctttgccaattcctttcttcttgcatctgcaatcttttcttttcccagtggaatgacaaatggatctttgaaactgagactagcagcaatagtgagtactgggtctaagcagcagaacagtgctccaaaaagaatcatttttccaatatgtggctcaacgggtaatcgtgccaagtggactccaagaggtgtcaattcttcttgtttatccaaagcgttcagctccatcaggtgtcttatggagagtaacactgcctcatttgatggtgggtccattaatctactcagaaaataagcaattccacctagccttaaaatctttatttgtaaacaaagttcttccaaaggagttctcaaaatttctggcagttgatagtcatctagaagacttgctctaagaccattatacagatgatagcaatgaccaggttgaactcttccagctcgaccttttctctgtttggcattagctttactaacccactcagcggacattgtactgatattgttctgagtatcaaaatgcgtctcttttatttttcctccatctatcacataaacgacatcatctatggtaatgctagtctccgcaatgttggtagcaattactattttccgaacaccaggaggggttcttttaaacacctgtgtctggttaactgtaggcatca

SEQ ID NO: 320942 - DNA, 600 bp, Homo Sapiens
attacagcaatatgaagagatcatacagtccactgaagaatttgaaaatgccctaaaggaaatgagatttttaaaaggagatactacagatttgctgaaatacgctcgtaacatcaattctcattttgcaaacaaaaagtgccaggatgtgattgtggcagccagaaatctaatgacctcagaaattcataacactgtgaagattattcctgattctaagataaatgtgccagagttacccactcctgatgaggataacaaactggaagtacagaaagtatccaatactcagtaccacgaagtgatgaatttagagcctgaaaatacattggaccaacattccttttccttgcccacatgccgtatcagtgagtctgtgaagaaattaatggaactcgcctatcagactttactagaggcaacaaccagtagtgatcaatgtgctgttcaacttttctactcagtgaggaatatcttccatttgttccatgatgttgtaccaacatatcacaaggagaaccttcaaaaacttccccagttggctgctattcatcacaacaactgtatgtacattgctcaccacttgctgaccctcgggca

SEQ ID NO: 320943 - DNA, 1552 bp, Homo Sapiens
  misc_feature (492)..(492): n is a, c, g, or t
cagtactttctgggacatcttcatccatctggccctgcacagcatacagaagatgcattctgtaaactgatatgacctcctggtgttgtttcttgcattccgccagctggttctggagctgtttgacttgctgctgcagcgcctccagctgctgactctgccttttggatgagcttgttgagtaggagagctgggagaggctgttcaaggcctccttcaatttggtgacttccttcgacatctcatttatctttttatctttatcttcctccagttttgaagagctctcagcgtatcttttcatttctgcaagttcttcctgagcttgctggaatttttgcagaagttcatttactttttgctctttggatttcaagagagtctgaatattttccttttctcttttcacctgtgagacctcacttctaatctggacaacctctgaatggaccttctctttctctttcacagattcctttaatttcgatgccnacacactcacttcactctctaaggatgactggagtttttcataggaagaccgaggtaccattgcatcagtcatagcagctttctcttctaagagttgtttctccagctttgctacttccacttccttgcttgcaaggtgttccttaagattgcttattttttcttccatctcttttgctgcagtccgcagcgtggttatcacttgcaaatgttctgtgatagagacagagttctctttttgtgcatccaccagttgtttgagctgggtcaactcattcaacacttttgaatactgagacttcatttcagacagtgcatcttctgctttagccctggacacgtttgtcaattgcatcagtttctcatgctctgctttatggatatattcagctgtgacatcctctagagatttcctcttcctgtaatcctccagctcagcctgggcttctttgtacagctgtgacagctcgctcacctgtttattgagttcatctatcatcctattcatggcttctttcatgtcctcagcttcatcactggcttcctgtgtcatctgactttttagtgtgtcttttaatttcatgatttcttcttgggcttcttggtatttctcaaacaaaaatgctttctccttattcatattctcaataacagagcaatatgaacttttcatttcctcgtactcttccacaggtggcttaatcactgtacctttctccctctctaccagtttttcctctaactctctcactttctctttatttctttcactttcttctaatgcattctgcagatcctgctttagcacatttatttcctcttccgtgaccctcagctcgtggaaatgtgaataattatccatgctttcaggtgagacaagaccgagtttcatctgcttctgcacactaaggacttctttcatagcctcctcgtatttgctctgagtttctttaagtttctggctgaggtcagagctgttctctgaaatctcagtgttgtttaagcataccagttctgcccttcgggattggagttcgacctgtagctgttttctctctgc

SEQ ID NO: 320944 - DNA, 1226 bp, Homo Sapiens
  misc_feature (28)..(28): n is a, c, g, or t
  misc_feature (30)..(30): n is a, c, g, or t
  misc_feature (60)..(60): n is a, c, g, or t
  misc_feature (840)..(865): n is a, c, g, or t
ttaacaagcccccccaggaatgccatcncnagttatgaccaccctgggtcatcaatcacnaggtccctcaacccactgccaccagccgggtctgaaggaggcaaggagcggtgggaggatgtcagggaggagatgaccagtgccttggccacaatgcgcgttgactacgagcagatcaagataaaaaagattgaagatgcatccaaccctctgctgctgaagaggcggaagaaagctcgggccctggaggctgcggctctggcccactgagccaccgcgccctcctgcccacgggaggacaagcaataactctctacaggaatatattttttaaacgaagagacagaactgtccacatctgcctcctctcctcctcagctgcatggagcctggaactgcatcagtgactgaattctgccttggttctggccaccccagagtgggagaggctgggaggttgggaggctgtggagagaagtgagcaaggtgctcttgaacctgtgctcattttgcaattttatcagtaatttgacttagagtttttacgaaacctcttttgttgtccttgccccactcctctccaccagacgccttcctctctggatactgcaaaggcttgtggtttgttagagggtatttgtggaaactgtcataggggatttgtccctgtgttgtcccatcgtgccctgccgtgtttggtccgcagcagcctgtgtttgtccccgctggctcacgcgttctgggagctcaaggccaccttggaggaggatgccacgcacttcctctctcggagccctcagacatcgtccagtgtgccagacagcataggagtgagtgtannnnnnnnnnnnnnnnnnnnnnnnnncacacgtgtgtatgagtgcgcagatctgtgcctgggatcgtgcatttgaggggccaggggcaggcagggctgcagagggagacggccctgctggggcttaggaaccttctcccttcttgggtctgccctgcccatactgagcctgccaaagtgcctgggaagcccacccagattctgaaacaggccctctgtggctgtcttctattagctgggttccgggagcagagaggagtgaccgggcactggcactgcgatcaggaagactggacccccaagcccccaggacccaccctcccccagctgctcctcatcatgcgacagcgtgggatcgacgatatcccgggaattccgagccgtacca

SEQ ID NO: 320945 - DNA, 1041 bp, Homo Sapiens
  misc_feature (570)..(581): n is a, c, g, or t
  misc_feature (655)..(678): n is a, c, g, or t
  misc_feature (777)..(777): n is a, c, g, or t
  misc_feature (966)..(979): n is a, c, g, or t
attggtgttaaggtggtaatttcccccatataagatttagaatcactgagtttgagctagatgaaatttttaaaatttctggttgtctcattagactgatgaggtgagttttcttcttcatatgaacagctagttaataacagcagagttctcactcagtgctcagtacttaattttccactgcaccacaactgtcttaactaaatgtgctgtatttttctttaaaagttaagagttctatttggtgttttcaggaatatacgtgaaaagacatgccatgttttggtaaataccatcagagttgtgtaaaggcgtgtactaagtgcaatcttaatttgtggaaataatcttcatttacccctcctaaaactacactcagtataaacactttcccataaggtgtgtgcagtaaaaatgttatattactccaacactggcaggagcacagcacagcagccttattggagagagccttataaaagtgattaaatggaggcattgagctcattacctttaagtttactttgtgctgacctttgttcctgttttgagaatctcatgtaattattnnnnnnnnnnnncaattaaaacgaaacggcggggcctagctgtgtataaatgatccttgctgaatatcttaaggttttttgtaagnnnnnnnnnnnnnnnnnnnnnnnngcttattttcacattaaaatgaaacctcttttgcaacttaagaattctatggaaaagcagtttttatcatattttgtgtccatgcaccatttttcttanaatggcttacaaaaaagaatgtaaacaatttgtgatctggccagttgtacttttagctcccagagggagagttggtggtattatgagttgagtaaaaaccatccaggggaacttgagggagcagtctgttgccagtaatgttccttgtgtgccattaaaccacctccagatgagtggaggaacatcacnnnnnnnnnnnnnnaattggatttggaattgttgccgtgtactaagaacttggacctaaataaaatcccacaaagc

SEQ ID NO: 320946 - DNA, 1138 bp, Homo Sapiens
cccaggcctgcattcaggcccccttctccaatttgggccccttcctcctcttcctggccttttctccggcccgagagtttggtctactctctcccttatctgaaagctgttcccaaattccttcttcaaaaacttcgccaaagattcccggcagcataagtcctctcttcccttttctttcacagtttggcagggtttggttagcttcttcataaatttgtttgcatttagtcaaacttccttcttttcgtgaagacaactcaaactggagcaaagctgatccatcccttgacatgctgcgtccgttgaagcaaccgccggtaaaggtttcgtgttctttctgtttcttcctgctcaatttcaaaatcaatatatgatttccaaagcacctctggcatgtctaaacgtggctgactgatggctaattcatagattgcccgtgctctgtcaatatcaccaaggattgtctctaattcagcgaatttaatccatgaggtacaattttcaggtccaaattccaggaacttttcataaagcttccggcatctgtcaaattctcgaagctgtagctccaattctatgtaaactttaaataatttgttctttggacatttgcctatggaagttcccaatgctcttctggctaatgacagattcttctgtcgtatttcaaactgtgcatacagtatccacattttggcaaatgtgaactttttgtgaggaattagttccaaagaggcttgatacacctgtcttgtcctctcaggatcctttgcctccaattcttcatagagtgcatagttgatccaaagataaatgtagcgcttccagtgcctcttctcctgaatgggtgggacattggcaatggccctttcatagacttctctcacggcttcagcttctgcgtcactttctaccaagcgcaagtaatcaaaccatgcatcataattgtgtggattcgccttcacttcttcttcgtactggaatctccgtttgctcacaatgatatcttcaataccccgcctatcaccaaacttcttctcaaagatggtataatttttaaagagttcttgggcatcttgttttgaaattctgtccagggcatacttgtaaatcactcgtaccctttcaaactagt

SEQ ID NO: 320947 - DNA, 750 bp, Homo Sapiens
caaaaacttcaattgggattcctcaatttcacacttttcctcataagtaagttttagcttctccagttctagctgctcaccagcagatgcagctttgccaaaatctgcattgtcatgggaaaatggtcttttggaggtttcgcccaccccagaatcttcacctgttgtaatccaagaattgtgcatgtttccggatgcatccagaagtgtttgttccctcagtgtctcctcttgtctttgagattttagctgttgctggagcccttcgttttcaagcaacaactacttgtattttatttttcattccagagagttcctccttgcagaacttaacttctgcctctaaatgatgaatatattgagactggtcattaatagtatgaacaaggtcgtgcatagtaggcatattggtttcctcatgttctaatgacctcaagggggtcatttttcttcttcttgacggagatacttcactttccttatctgcttgttggcgcaacaaatctttgagctgattaacagcatggctctgttgtaattcgggccaggctgtcctggcgtcctcatttcccacactggtgctaaaagaaagatttggtgcatcttctccaatagtgacatcgccttctttcagggcacatgtcagttggtgaatgcttctgctggcatgttctgcaagaacaaccatgtcacacccaagcctcatctttaaaaggactggcagcttctgcttcctcttgaaatgtttgc

SEQ ID NO: 320948 - DNA, 518 bp, Homo Sapiens
caagaccagattagtattttatttttcccttcctaacactcaaattcatggcaggtgaaaagataatagaacataatcaaactaacatataaacacaattcaaaaacgtttaaccatctattatagctctttgttgtaaaacacacaaagttaaacagaaacatctttatataaattatccttaataatctgtatacactgtaaaacaattgaaaattcacaccaagatcctagtgcaagcagtggtgtacaaaagtgcaaacaaggttagtgattaacaacttaccatcaatataccacttcaacatactttacattcagccaaatactgaaggtttcaccatgggaaaaacacttttatcacttttaaagtaacttgactatgttcaccctgagtgctcttgcctcagtatggcaactgattatgagttcaggttaagagcaacaccagggaatacagaaacccacgttaagttggccattctgacatgaatctatacttgaaaatgaaaacaatc

SEQ ID NO: 320949 - DNA, 562 bp, Homo Sapiens
ggatatttatacatacacactctttttaacttcttcttcatttgctgtctcagccactttaaaaacaagtgatgcatctctgaatctcaagttttctgttggaacatagccatccaaaaaaatgtttatgccttctcttacactaaaaggcatagtgacaactccataggcgcttggtacaccatataaacagcagatgaagtcggagagatagtctaatacacttagatcatgttccaccacaatgatatatctatctggatttattagagatcgtatagtaatagcagcctttaaacgctgcttgacatctaggtaactagaaggctcatcaaacatgaaaatatcagctttctgtatgcaaacgacagcacaagcaaatctctgcaactctcctcctgaaagatcttcaacatttcgttcttttaagtgggttaaatcaagctgctgacatacaattgcctgtgtctttgtttcatcttttcggtccaaaatagatcccactgtcccctttgcagccttaagaatctggtctacatattgaagtttgatgatggctttt

SEQ ID NO: 320950 - DNA, 889 bp, Homo Sapiens
gggggtgaaaataagacaaaaataatagttttagtgaggatggtgctgagtaaacataaaaactgatttgctctcagctgatgtgtcctgtacacagtgggaagattttagttcacacttagtctaactcccccattttacagatttctcactatatatatttctagaaggggctatgcatattcaatgtattgagaaccaaagcaaccacaaatgcataaatgcataatttatggtcttcgaccaaggccacataataacccagttaacttactctttaaccaggaatattaagttctataactagtactccaggtttaaccttaaaattaagatttccttaaccttaaccttaaaattgatattatattaaacatacataatacaatgtaactccactgttctccctgaatattttttgctctaatctcctctgccgaaagtccaagtgatgggagaattggtatactggtatgactacgtcttaagtcagatttttattttatgaagcttttgagactaaatttcaattcaccacccaggcattcaaatccaaacttttttatggcacgcgaaacaatattgaattcctaattggtcttgaacctttttgggttaaatctcaggcaaaggccagtttctttaaaaaacctctggaattctgaacccaactgttggtaaatttttttgccacccaatatttcacttttctggtaagaacttctttaaaaaaacaaagggctttaaatttgggaatgcgccaaatataatttcttgaaccggtttaaaaaaatccctcggtcacaactggggaaataaggggggaatcaatagacctcttgacaataaccgccaactttgagggggggctaatttttacgggacctta

SEQ ID NO: 320951 - DNA, 1068 bp, Homo Sapiens
ttttgaaatgcaggatatgatgagtgggatgattttaaaaatgcctctttaataaactacctctaacactatttctgtggtaatagatattagcagattaattgggttatttgcattatttaatttttttgattccaagttttggtcttgtaaccactataactctctgtgaacatttttccaggtggctggaagaaggaagaaaacctgatatagccaatgctgttgtagtcgtttcctcagcctcatctcactgtgctgtggtctgtcctcacatgtgcactggtaacagactcacacagctgatgaatgcttttctctccttatgtgtggaaggaggggagcacttagacatttgctaactcccagaattggatcatctcctaagatgtacttactttttaaagtccaaatatgtttatatttaaatatacgtgagcatgttcatcatgttgtatgatttatactaagcattaatgtggctctatgtagcaaatcagttattcatgtaggtaaagtaaatctagaattatttataagaattactcattgaactaattctactatttaggaatttgtaagagtctaacataggcttagctacagtgaagttttgcattgcttttgaagacaagaaaagtgctagaataaataagattacagagaaaattttttgttaaaaccaagtgatttccagctgatgtatctaatattttttaaaacaaacattatagaggtgtaatttatttacaataaaatgttcctactttaaatatacaattcagtgagttttgataaattgatatacccatgtaaccaacactccagtcaagcttcagaatatttccatcaccccagaaggttctcttgtatacctgctcagtcagttcctttcactcccaattgttggcagccattgataaggaattctatcactataggttagttttctttgttccagaacatcatgaaagcggcgtcatgtactgtgtattcttatgaatggtttctttccatcagcataatgatttgagattggtccatgttgtgtgattcagtggtttgttc

SEQ ID NO: 320952 - DNA, 1031 bp, Homo Sapiens
cgcggtgtagcgccgggggagtgcacgcgagggcgaatagtgggggcaatcactgttaaaaaagggggtgggcgatgttgggacagcataaatattgcgagaataaagaagggagaggagtgggggtataccccaaaaagaaaagggagtggcccgttaagatgggactgttacattaaattcctctgtcggggtattgttttttaatataatgcctgtgcaagtcaatcaggccggagccggtgatttttatactgcgggggaagaggtggcaaaagcccttgaggggtcaaaaaagcaaggggggggtatacaaaagggggatcacagctttatggcgccgagtgttatcgcgccttaggccaaaacgggggggaaagcgcgggagtaccataacggggaatggttataggaggagggtttttttggggggggacaaaggcggcccgagcaaggcgtaaattcgggatacagggcgagtacgagggccccccggcgccggtttggcgtcattcccccgccatttgcgttggcaatgtttaatgtttcacttttgcagaactgaaatttgtattcaaaggcacagaaggaaggaaaggcagttatcagagcatgaagtcacagataaaggatgctgaataaaagcataggactgctcctctttagccttaggaaaataaataatgcagtattaaactagatttttatttttattatatttccatgtgaagacatcacccaaatgtcagcggagcaaaagactttatggtcagataccaaaggcgtacagttgatcccactttggaataaatgcccagaaggtaataagcattatcagtgagtgagagctctaggcacaaaataagttctcattcagaaagtggacagagatatgaagcagtgaaacatatagctttaaaaactggaaatcattcatgacatttgttttcaaagtaaacattatctgcatttcaagaactgtaattttcaaaagtagaatcaggcctgattaagtaatatttatgacttac

SEQ ID NO: 320953 - DNA, 909 bp, Homo Sapiens
gtaaataagaaaatttgtcttgatttccttctcgggtgcaaaatttatattctagtttaaggttgctgttacatacattgtcgtctccacatccctcttttaagaagtgaacatcaatatgagctgtcttgggttcatctgaattcagaattggaagaacttctggaagtgaattcactcgcctacgagagcttggctcttggatctccactgaggcagttatgggaatgggacgcagtttatctctgatattatcctgtagccacagggtttcctccatgcacactttctgtttctgcctcttcagagttagttcttgagtatatttgggctcagaaccttggtttcgaaactgaactcttgaggatagcccagattttcttctttctttttcagcttcaagtgtgcccacaattgatattgaaggattataaccagcggggttagcagtatattcaaaacaggatttaacctggaggcatatcccactaggcgccccacacgctgttttctggcggaggtcaattctgttaggagttactgtgatggttttctgaatattaatcacaggccgggatctgaaaatagttactgaatctgagagggaaccaacagcaacatcagggtaggaatttcgatcaaggtccatgtttccagcaattgaatatccaaaatgaggtgatatacccttgagaacctgtgttggtttggtatttattccatttgcagatccatgatagataaaaacctttcccaagtcatcatacggagctccaactgcaatatctgggtagccatcttgattaatatctccaatattttttactgcaatgccaaacatagaatctttggttccattaagagcgattggcttcacattattccatctgccttgctggttcatgtaga

SEQ ID NO: 320954 - DNA, 919 bp, Homo Sapiens
  misc_feature (550)..(580): n is a, c, g, or t
aaaaaaaagatttccaaaatgccgttttcagaacctgggttttaatagcagtattgaatttgtaagcttagtagttgcagaaattgaacactaggtggcactcagttatcttaacaggggaagtactgatataattgttgacttttcttttactatgtgtaagaaataccccaaacatgaaaagattgttttgatcatatgcatgtatgtagaatatttttgcagagcagaaagattatgttagaagtgtgatttttattttcagaagtcatatacatgtaagctacaattttgagtgctttataaacacttaagatatatatataaattttaatttcatagcaacttgtaaaaaataaaatacttgttgaaaagcctttttcaacatatccctaagctaagggaagaggaaggaataacaactcagtgaaaagatggtctccagtttctgaatgaaaaagctacagctgagaaataaaataaaatgtcatgctgcagaatatgttatacccttattttgtgttaaggatatattttattatgtgaatgnnnnnnnnnnnnnnnnnnnnnnnnnnnnnnngcttgtattgggaattagctttactggtaacttccttatttagtttttagtggtcaactctaataaaatgaaactagggctgagctagttagccctcactagccaaactgaaactctatgcaacattaaaagaagagatccatcatgtagcttgtgacacttttattttattagtcaccggggaacttttcagtgatgaaaatacacagggtaataaaccttcacatggcttcaaaaggaaaacaagcaaatcttctctaatctactcttactataatttcctaagtgtacaccaaactctggatttaaaaatctgaagtactatagaacattaagttg

SEQ ID NO: 320955 - DNA, 240 bp, Homo Sapiens
aacagggtatgtttgaaacagccaaagatggggatgaaccaagtgtaaattgatctaagcagcccatgcagtttgtgttgaatcaacaaacagtgttttgttgaagtgaaattattttctgaaatgacttgttaaaccagttttgaggacatactcaaaagtagagtaataatggctcctgggatggaaaaatatgaaatgaacctggaacattctattatggggccacaaaggaaatct

SEQ ID NO: 320956 - DNA, 544 bp, Homo Sapiens
tgctttatagattttgaagtaaaatattttggtacaagttaccaaccaattaaattagcttttgctttttcagtcaactttcggactcgtcctctactagaagttccaaaagttaaagaggtgtcttcgaacaacagctgcctttgctcctcttcagagtcatcctcattatagaaagctgtccttcgaccttgatttctagttctcatgtggggttcagagcctttgagttcttcaaactcttcttcctcatctataggatcatctatcttttttcggttacttctccttaacactttgacacttgcagggactaggagatctgcatctaatttttgtgtcttcatcttccttttgggcttcctacctccacgattctttttctgtaacaaatcttcctttacattattagtttcagaaagaaaattgcatgttgaagaaggaagtacttcatctctgatgggatgcacattattttgctctaaatcttctggctttgcatactgtagctttttgggctttctaccccttttcttgtgtatat

SEQ ID NO: 320957 - DNA, 717 bp, Homo Sapiens
aagaaggatattttcttggacaaccaatccctcaaccccggccacagagatttgcctactatacagatgacctttctagtccaccatctgcacttcccacccctcagtttggtcagaggacaacaaaatccttttttattaagggacacaagggctatttttgtgttatttcttaaccacgtattgatgcagagcatttgtttaaaacttagccattaaccgtctgaatcgtttccttttcttccgtaggaaagttgtgaaaatagcttaaagtgctttctttgcccatgtaaatgagaactcaactgctgtttacagtgtcagattaacatttgaaaggtgtgatttctccaatttaccctctttggatggtgccaggtggacgtgacatctcgtgcctgtccggtgcgggtgcgttacagatggacgtagctgctttggttttccagtcctcaagggaatactgaagatgctgactgaaggggattggatgttgattttagaagatggagaactccagccacctttgtaaagcactagtgtttgtcatttatgtaagtcaggtcggctcaggtcttgatagtccgtcttggtgtgaggcatgcctgtcacgatgacctagctaacactgtgcatcttattgtgaggccagcttgtcccctcgaaccctctttggccaggtaaacattgtattgtatcagctccagctacagattg

SEQ ID NO: 320958 - DNA, 602 bp, Homo Sapiens
gcctgaatctatctgagcccttctctccaaagagtttttcctgctgagatggagagaacctctcaattagcttgtttggatctgtttccaggtgatcttcatcttcaacaagcagttgcataattggctcatgtaaagtggctgtgaggaaaagtttggcagaaaacagtccttcagaaaaaagtttaaataagatgctgaaggcacaagttcctctcctcaaaagtcgcctagggttgtcactttctttaagttcaaattcaatcaagtatcgcaaaacctgaaggaggtagctttcatcttcttgcatgatgcaattgccatacagggaggtaaaaactgtgtaaataacactttgtgtgttctcctgattaagtttctctccagcaaccaaagaggaggcaataagacgaggattttccctcaatcgactcaagaattctccataagcagtctcctgaaatcccaattgcttatacccatcaacaaattgtgtatcttccaaaattttggcatgttggcaacattcagcaggggaagcttcagcactggttatgataagccgatccaaattgattctctgttgcttcgcaatccatgct

SEQ ID NO: 320959 - DNA, 902 bp, Homo Sapiens
ttacaactgacaaaacatgactttattgaaataagcattctgaaagggcatcatgttccttgcaaaggaaatgggaaaatgcattatctaatatcttcatattgctaccttaatagcttcaccagttattactcagagttttaaaatgagtttattaaagaaggttcttaggaaggcaacaacttttgtccttaaaaagaagttatggtttttcatgctgtataataaaggtgatgtaagaggctacagagttacaagtttctttctactggaattctctggtatagcacagtgtagtcatttctgcaattctagaataaataaaaagtctcttctatgcttctcttcaaaagcaatgaataacagaagatggtgtaaaaaagtcatattttttctattcattctgtagtattggagccagtatttttaccatcacaggctacaattttcactttatccactttaataagttctgtcacctctctgaattcaacatcattcagtacaaaagtccacacattatcgcagaatctgtacgtatttagagagcccctgaaattgactctgttcctgaccctctgagccagtgctgcatttatagccttatcaaactgaagtagaacttgaagggcaagttggggggtgatctgttgagactgtatgagctcatctaggctctcctgaagactgtttcccaaagtagtatttctgtataactgatatgccatggcttaggaggaagaatttgtttttcttattcaagcttgcattgatgtcctgtggggaaggcgcttcccgccgcggagcggacagaagccgccacgagcccggcaggaggttcctacttctccgaccacctctccagccgccgcagaaaccgcagaactgagctgacgacccgg

SEQ ID NO: 320960 - DNA, 613 bp, Homo Sapiens
  misc_feature (381)..(419): n is a, c, g, or t
gaaaatattgcgttgtaaggctgacgtctttttggacgaggacaaggatcaagatcttccttaatataacctctttccatacaagtctgagtggaaggaaaaccaacttcccaaaaattctctggtgtgttgggtggaatgtagcggaatcggtgtcttgagcaggaagccaatttcttttctctttcttctgctggcatatctgcataataaatttcacattccttacacgtgtgcccaagcagttttcttctctcctcttttttccgaaccacctcaatatgaggaaaattttgcaagctagtctctctttcatcacctttaaaatacggctccacaaacgctttctgcttgactttgtcttgtttatcaccatgagtnnnnnnnnnnnnnnnnnnnnnnnnnnnnnnnnnnnnnnnatctgctgcttgggagaaactgtctgccaaacaggattcatactcttcatgtgttgtccgatcaaacatatcttccaagctatcattcatttttctttcttcatttgaacttttttctcccttctgctcttgcttcttcatttttaagagaacggtttcactaaccaatgtacagtccatgtccactgtctctc

SEQ ID NO: 320961 - DNA, 615 bp, Homo Sapiens
tttttaccacttcttttccaaacattggaatgtatatattctatttttgtagttaacacttatttccatgtccaatttactgtggaactatatgatttacttggaattatatgatgcagtaactactgtttttcccccatgcatcatgtacagaaaatgaggatgtatccacccccctccccaacccagtgatttggaagtttctttacagtatcagtagtaacatggacaaacttgttatttttttcctgctatacttaaaaataagggaaataaaactgtactgttttccaattgtcagatttgacatttagaatgttatttgtcaaatctacagtgacaaagcccttttacttaggtttagcttaagaacatgcgtatttgtatctacaatactacatgctaaaaataaaacagtatttgtccaatatattgaacttgtggtatgcccttccagtttaaacgtaaactgaaattttacacccagcttatgtttctatttttgtatttagttttaatgccctatacataacaatttaaacttaatgctccttaactagttttaatgcataccatcagttctttcatacaattgcctccctattcttattttcc

SEQ ID NO: 320962 - DNA, 1559 bp, Homo Sapiens
ttaaacagacaaaattcctaagagccgggcatgagctactcaagatttgttttgttgggttaaggtttctgacaaaagattctggtttaggcagatgcccctgacagttcaagtagcctcacggtggtagccagagcgctgtctacggcgaccgagaacacatggactggaagacagcctgccctagatcacccgtggcagtacatcttcaagctgccacattcaacatatgaccacagacatctttatagttccatcactggctgccatctagtatagcaggaatgcgtgggcgaaggaatacaaatttgctgggagaggaagagaatagtatctctgctagctgcctggaaagttggccccttaatcacaatgacaactaggacatttcacttggacagtgcattaaatttatagattttttaaaaagtacaaagactaagcagtaagttctgtcactgacgcaaactaggatgtcaaagaaaaatagattaactatttttacctaaagtagtgcaaagaaatctggcaaaaaatgaaagtgaactcaatatctgcacatcagtaatggggcagaattttatttaaaaggctagtggttcaaatactattgcttgaatagctctggtagatataaaatgtagtaacatctgaggtttgtacacatgagcaaaggagctgagggccagctcacaaagggatatttgatcctcagtcaagagagaagctaaaagcgcatgctgcaggagtaacctaatggatttatttggaccatactcccaccttctgacaaacagaaaaagacgtggatagaaaactgtctttccacacacaaaaatctggcttaattcttcttgctatacaactatacctcagctaagaaaaaaatctcttgtgaaaaactcaacctgggctactaaaaataaaaaggaaatttttaatgtcgtaaacaagtttagtaaacaccatgtggattttctgttgttaatgaagacatgatacattcaaaaaagtatgtattttttaaaaagaacaaaaccaaaaaattttctagaaagagacttcacaagaaaaaaatgagcccaaggttcatccctcaatcagaaatcggtcttagcacgcatcagtaagccctcctccaacatacaaaagcactgaaatttgcctttcaagtacgttactgaatttaaacattaagcggaatcactgcagagcatattttgatgggttacttcaatacccacctggtccagttcaaaatatctatagatccagtttgtacatattccacaggtatactgataaaatcatctattatcccattttttttaatggcagttcttatatagctcgaacattaagatcaacaaattctcagatgaagtacattaataagacacctcagaagtgaaacaaacctagtttttactaaaatgatgggataaaggtagtgtctatgctgaagagcagcttcacttgtttccccacagataaaaggcccaaaatttttggaggataatttaaaaactaagccaataaggccaggcacggtggctcat

SEQ ID NO: 320963 - DNA, 918 bp, Homo Sapiens
ttttatcataaaacatctttttaatgtgaacactacttcatacaatgaaaaactatttacaatgtattgtttccagattggctgcttttacatcatctctacccatgtgctgactcggcatgtatcttcagccagggagcttcagtccaattgcacattctcctcgatggctctccaaggaccccggggattcagggaacccgtccacttacattctctttagtaattatggctcagcaagcatgccaccaaaatcatctagaacccagagactctggcaaccccatataagtaaaaatgtgtagatcaggtttttttctccaataaataataatttgacaatccaatccatttccatcttaagaaattgttttcacttaggaaaatgtttctcagtggagctagagtgaataatctttcttcatactggaactgagttagaatgtctttgtatacaaatatagcatattttggccagcaatataattgcctgttaaagagtttatttgccttcacacgcaggattgctacatacattcacagttttaatagactgtaattagctattccagttgtgctttaaaatcccgaatattattctcattagtgagtgcaaagcaaatgtcccatctgactacaattggtcctagagttataaactccataatggtttattgtaagtttcctcattctccagtttcatcgtttgctttttcgggtatgacttccaagctccggcgtggcttctggacatcagcattttcggtgcctggtttattcagtccacatgaaacagcagcaaaatggatttgtttcaggttctccaatgtctcattcttagcatatttcaaaagatctgcttgtccctttaagatggtaatattccaggtaaagctctccactgctttttgtagtttt

SEQ ID NO: 320964 - DNA, 1457 bp, Homo Sapiens
  misc_feature (47)..(47): n is a, c, g, or t
  misc_feature (205)..(234): n is a, c, g, or t
  misc_feature (787)..(787): n is a, c, g, or t
  misc_feature (884)..(884): n is a, c, g, or t
ttaaaaaatttttttagagggccgaggcggccccaacaaggaaattnttttatgaattttcatccttttttgaacacaatggtgcaggggcgggggggtaatttgattattggaggttttcctttccacaaaaaaggaataagctttaattattctttcaaaaattatagaaggttgtagatgcaaaaatatgccatttttattnnnnnnnnnnnnnnnnnnnnnnnnnnnnnngcactccccaatacccccattccataggattaacagctagtatatatggtggtgtgtatgtatagtgttgtatttcaaccaggtatatgtacatttttttaggcacttagaccttatctccataaacattatcgtcaatgacatccagattttagaagaaaaagtctggtgaagtttccatacttgaatcaggattgagtatgtctttcttgtttttcctggtcttgatgaccttgatgtgactatgaattacagatctcaactccccggtattcccacttttcggtgccaattcaaagcaggtgagtttcagtttatctccttcctcacagttgattgtggtcagtcgtccatgcaccaccacttccatcttccctgtattatcttgtatttcataataagtgaattcaccccttacatttttcttatgtacctcaaacaccccattcacaaaacttcctttagtttgtgagcaaagctgattgattttaggagttacgctggcacttctattcaatccttttgggatctccatgtttcggtcagcattcancatcagccacaagtgtgaaaaggatatacttccaggaacccattgcggcaaccataatttgctatggcaatgatcttcttggggtgaacttctcttntaggtcaatattaaaaaccttcactcggaagacttcattctcagttgccactgtggcatgaaacattttcttctgctctttgggctcatatacaaatgattctgttgcgttcagcaccatcacttctttgaggtcactctgggcactgtcttctatggaaacttcttcaggttcagtcttcagtcttggtttcaacgtggttaagaaactgctgcttggtgttgatggaggcatctgaggagtgtggggatggctctcagctgggcctatgctggtcatgaacggtcctggaaaatgactcccttccttcagtatctgcatcctcatgaagtcattcattttggagattgtgtcttcacttttcttggttaagaaactgctggttggtgttgttggtggcatctgaggagtccgaagatggctctcagggaaggttgtgctggcctctgaaggatttggaagctgactctgttcctggggtagcttcatgctcttggggtcattgtttctcgggtttgtttttttctttatctggataaaactatgcatttctgaaatcagttttgacatctg

SEQ ID NO: 320965 - DNA, 571 bp, Homo Sapiens
gagcctcactttctgtgcttctcctctttgtcactgcttttggcgttgttgtccgtgtggctgttggggttgttgctgaggtacattttgtccatggccttgagggcctcggtgagatagttctgcagggccgtgaccgcggcacacaccgcggggctgccgaagccgtgggagatgaggttgaagtgggtcaagcagctctggatgccgggttccaggatggggttgggccgtgagttccccaggggagatcggtcctgagccagcaggtcggtgaactctttgcatatctgttttgtagccaggagcatgttttttcttgtcacttgctcattgggatcggaatgttgtcggttgagaaattcagctactgctttggcaggaaattcggtttcgcacacgtacccaaagtccctggctaggtggacagcttctccctctactagtgatgtgagcagggtaacgttggcagctttacgtctccctgcaggcagatttaatcctatcggacgcgtgggtcgacgatatcccaggattccggaccgtaccagccgcttataaccagcttaga

SEQ ID NO: 320966 - DNA, 280 bp, Homo Sapiens
ggggaaaaaaatattagctttattaacactcaaagtgcccttcatttatattcattccatagtccagaaggttacttattagagtaagcctttgcaccacaatctttcaaaaaaatgaacatgttagaaaaagccgttttcattgtgctaattattgcaggcctttatgcacgtaaacctcaacaaaatgtgtgccaacaatatacaaatttccatataaacaaagtcattgatcactaacaaaatataaacatggtttcttttatattagatttttttt

SEQ ID NO: 320967 - DNA, 826 bp, Homo Sapiens
agcccattccagctaaaaaccggttcctttaaccccaccaataggcgatttgactccgtatttaatttcaatgagcacatttcgttcatgttctgcaggaaaactaggctaggtctcaatagacaccagtcacagttactgagcaagtaaatactccacacttgcatgcctccctttatttcttgatgtctccagtctcatctggctctctctcttgatgctctctttcccacctcatttcttttaactcttgtctgtacttccgttcgatgaaccgcttctgatgggccatctggggaaaattatatttttcaagcgcatccattgctgctcccatttccgcttgctgaatacttggtcctttcccacagcctattctttctcccttgaaataaacagccacagtgtaggttcgggcatgggatgggcccactgtctgcagagtcttgtacagaggaatgtctggctcttttccttctgtcctaagtgtcaagcaacactgctgaagctgggatttggggtcattccaatcctgattcaaaatgaactctttcaatcgtggaaagaagcagacattcatgaaagtatgaacatattccaaatccttatcaatgtacagcgctgcaataaatgattccaaaaggtccgccaaggtcttggtgcgaagcgccacaggcctcttggtcttgtcgttggttatggcgtactcctgcatgcccagctcctccgctaccttggcctgagttctattattcaccaaagagcttcgcaacaaagttaagtgtccttcatgatgatctgggaaatgaatgaataagtactctgt

SEQ ID NO: 320968 - DNA, 1293 bp, Homo Sapiens
aaggaaacctaagccatcaaaataacttttatttgtattttctacataaacacacagtggcaattcatggcatttggtatttcgtccagacgtgaaaggtttatgaaatcagcaaatgccattttgaaaagagtattctgtcaaaaataatttaccaaagttcaagataggcctgttcagcaaaatccaatatcattctctcagtactttataaatggaattttcttctacttgtatccatttcccggggcttatggacccattcatactctccatatttagaatcaaaggttcctttctgaagagaccttaattttaaggtaaaaagaggtccaagttcctgaattcccactttcttttcactcctgaatatgtatctgtgaaatgtgaagaatatgtaatcccgttgattgtggaatgtggcaacctgctttccgataaattgaggattatgaggaaagagagatgcaaacatacgtccaattgaatgacccagccgtgttgtaaaattattcagaattatttcagggtatgtgttctgtggggtccttgcttcttctcttaatttctttacgaagacgaacactgctcattttaaaatgagcagttgggccatttggcaagtgactcaaaataagtccatttggggttttacgatcttcattaataacaatcaggtctgtgaaatctcttgcgatgcactgtggaataatttttttcagagccagtcctcttctgtaataaacatgtgagtttggtataactgtggagagctgttcacagagtcgtactgttctcccatgaggtctatctgatgttgtgatgagaatcttgggagaagtctgtttgttgaagtaagaagcaaattcatctgtagcttcatcataagcgacctcttcatcattagggtctactgtggtttcatcatacactcgctggttgtcaatggtcttgggtacaggctttggtggagccttatcgccaagagcctctctttcttttttaagttttttcttagctgccaacttttccttccgctgctgctgtttccaccgcgtgaacattaagtgtcgccgctgtttgtttttaatctccgaaatgctaaagcctggcggaaaggcagccgctttcgggggttggaccccgttttccgtcgccccatccccagcgcctgcagcctcctgaagttcttcggcagcggctttccgttttagacttttcttcccgctgctgccgctcttatccccggctttcgccatggtcttggctcctttgcttccgtacggaaacccc

SEQ ID NO: 320969 - DNA, 756 bp, Homo Sapiens
agggcgtgcataggaatgtaaacttttgctagtggctatgatgtgtacaggagatgatctatcgtaaaatgagcactgcatcagtggactttgtggactggtcgcgatatttgccaattctgttagccagtccacttcattttcacggtaagtagtttctggtatgtctgaggtattttggttccaagatgatcttgggtattcttgatgtgaaacatctgaactcagctggtacatgccagattgggtaggatcactttgaactgcctgaagttcaggaaggtcatcaagctccatgtgttcatcacaggagttatatccaggtgaagatggcaaattctcattacactgcagcaactccaatgagtcattcattcctgaggctctcttgtccatcaccaacaggagtttctgtactgcattaggcatctgatttgtcttcacttcccacaccatgttatggtgctctgactttattatgaaatttagaagctgcactacacaggtatctctcttcagagctatcctctgtgtatgaacagtgctgttcttggggtccacagaagcacagctgcagtctgtcttgtcttccccctccctctgcagagctctttggtttcctcattctttccagctagaactttttcttccctacagcaggtcctgcagtttccaacattcaccaagtatagtacactaacgtctctttgcaacttctatcatttcttcagcactttgtcttagttatcaaccacc

SEQ ID NO: 320970 - DNA, 533 bp, Homo Sapiens
aaagagagcactcacattcccagtctctatgaaagccacccgtctccagcttcctttgcaatggttctcagtgcagattccttatttattaactcttaagagagaaactagtcatactatgtgagttctttaaacacctaatattaacagtttagataggagattttaactctttccatagaagtatttctggcatcttaagtatacagaatataatttaacctattttgataactaaaaatccttaatgaatatccggtactatgcttcacatacagatgtgagctgcacagtcaaccttatctgaactgaaaacatttcccatttttacctttattatgaaatttagaagctgcactacacaggtatctctcttcagagctatcctctgtgtatgaacagtgctgttcttggggtccacagaagcacagctgcagtctgtcttgtcttccccctccctctgcagagctctttggtttcctcattctttccagctagaacttttttcttccctacagcaggtcctgcagttt

SEQ ID NO: 320971 - DNA, 852 bp, Homo Sapiens
  misc_feature (752)..(752): n is a, c, g, or t
ggggaaggtgaccaagtcagccatcggggtgctctaactgggggttattatgacacaaggaagtctcgacttgaattgcaaaaagatgttagaaaagcagaagaagaactaggtgaacttgaagcaaagctcaatgaaaacctgcgcagaaatattgaaaggattaataatgaaattgatcagttgatgaaccaaatgcaacagatcgagacccagcaaaggaaatttaaagcatctagagatagcatattatcagaaatgaagatgctaaaagagaagaggcagcagtcagagaaaaccttcatgcctaagcaacgtagcttacagagtttggaggcaagcttgcatgctatggagtctaccagagagtcattgaaagcagaactgggaactgatttgctttctcaactgagtttggaagatcagaagagagtagatgcactgaatgatgagattcgtcaacttcagcaggaaaacagacagttgctaaatgaaagaattaaattagaaggtattattactcgagtagagacttatctcaatgagaatctgagaaaacgcttggaccaagtagaacaggaacttaatgagctgagagagacagaagggggtactgttctcacagccacaacatcagaacttggagccatcaataaaagagtaaaagacactatggcacgatcagaagatttggacaattccattgatataaacagaagctggaatttaaggagctttcagaagagtatggnagcgctgggaaaaatatggaaaaagaacatatggatgctataaatcatgatactaaagaactggaaaagatgacaaatcggcaaggcatgctattgaaga

SEQ ID NO: 320972 - DNA, 1752 bp, Homo Sapiens
gttaaggataagtcgaataaggtatcctaaaataaaaaaatttttatttaagaactgaaaaagacttttttgaagttaacattttagaaatatttaagcgtttatcataaacattcacatacatttatctctgtaaagtggcccaagaacagttatttcccttatttagaaaaaaattcaaagaaaatggctaattaaactttgattttattatgtacatggatactattaaaaaggtgaattcgtgaaattttaagattgtgtataacacataaaagtcaaacttctaatttggtaagtaaataatcctaaacttaacacagtggttctttaaaatgtttaaatatttgtcttagatgctgaatatagacaaagagaactgtcatcttaggagtaaacacactataactctgtaaaaaaagaaatcatagaaaagtaaggtagtatttctcaaataagtcctcccatgctaaaaccacagtgacgcgcagacactagcctagaacctattccagtactgcaagtactgacaggctgcaaacaccagtaacaacctgcctggagccttgaccttgaaaacaaatggctgttgtgaactgatgtgaccaaaccaagagatggttccttacaaaaacaaagcaaaacacaagatgaaaatcaagcagaaaaagaaaataatataaccttattttgagaacacgacttcatctcaaaggatactttttgtatattaatcctcacagattaataagagcacttaaaataattttgtgtagatccagaatacaacaggtgactaagttaatgactaacacaatttacagacttcaaaattttgaattccaaatttcacagcataacagatgactataatatactaccctaatcaactcttatttagtgtctatacagcatctacagagctcttcatccatcatatttctcctcttagactttctgtgttcatgactcatgtttcatccatgttctgtcggagaactgctttgggaggagcagagcgagtaagtgccatactccggtatgggcctgtgtggtggccacgttgtttttcttgcaagagtgatcttggagataaaataaattgagtcctcaaaaaaattccaatgactcgccatcttccttgtccatcagaaactgatactctccgaatctgaccatgcacctgtatggcaggtccattttatttaggtagcccagctctctgctgtccacgatcagattggtctttttactcatattgttttatttcaaaggagagaactaagctgttgaattttttaaacagctgcagagaaaactgaactcgggaaacctgtttgtcctgaaaagtataatgacagatgttggaatttcggccaaatttcaccacttcgctggaagggagtttctctctgttaaaacttattgactgaaatattccacactgcaactggccaggatggtaaaccgtcatctggagacaagttactgtctcttctgtgtcagcatcttcaaaactggtcatgatgtgcacaaggcccacctggggctggggagtcagtgaactctcttcagctgttcggctctcccggctcagagcgaggggaatcgaggagactgggcgcaggatgggggtggacacccggccgctgctcctccgcgcgggtaagtgtgagccccggggtgcggggaaccgagccagggaccagtgaccgcgagccgccgatcctcccgcgctcccgcgcgcgcggc

SEQ ID NO: 320973 - DNA, 466 bp, Homo Sapiens
gggcattattttggtcttaggctatatttcatcatgaatatacagtcatattattgctttttaaagtcagtgtaattctgattgacagatgacataaatatattgattagaaaataaaatatgattttccaaccattcctagacagtgttctaacatgactaactttaattgccagaagtaaaagcttttattttacatgattacacttcattgtactaaaatatatcacaatctctatttccttgaaacaaacagtttccctaatatggtattataaaactgtttaaacatataaaaatgttgtgggaagtgcatatttatagtccaaccacttaaattggacatcattttggtatatttgctttactacatatctctcactctatccaccattctatccaattatcaactcaccgtttcttatttatgtcaaagtatatatttttcttacatacttaacatatg

SEQ ID NO: 320974 - DNA, 624 bp, Homo Sapiens
tgggtgttaactttgacagctgagagtgggcttgcaagaacacaatctaaaagtgtgtttcaattgagtatctctctagtagaataggagttcatcctgaaaagctgtgactcattaacccagtaaacatatacaaagtaagcttaaaacactataaacatgagataagggaaaatgaatccagagttctcatattaataggtagtgaaacaataaggctttttagagcagactttgttggcataaaataacctggcttctatccctaaccctttcctacctttcctctccgtcaacatgtcctcatactgaagacaaacttgtttcaatgatagtcttcattttcaaaaacaaaaaggcaggcagacagaaataatgatgttttcttgcactaagaaggtactacttgtacacatatatcaaaacctcattctgcaaagtttttgaaggtttcaatgggaaatttgattttattacaaaataaaacattttttaatgttaaagtttatatattccatgcttgttttctcattcactggcatggatgatcaggagctgcctatatatgaaggcagaatcagactatcaggaaaggagctggccagggccatagccagtcaagat

SEQ ID NO: 320975 - DNA, 628 bp, Homo Sapiens
actttattgatctcaacgttttaaaggcccagacatatcacttggatatgaacgagactgccaaacaagaagatattttggaatccacaacagatgctgcagaatggagcctagaagtggaacgtgtactaccgcaactgaaagtcacgattaggactgacaataaggattggagaatccatgttgaccaaatgcaccagcacagaagtggaattgaatctgctctaaaggagaccgagggatttttggacaaactccataatgaaattactaggactttggaaaagatcagcagccgagaaaagtacatcaacaatcagcttgagaatttggttcaagaatatcgtgcagctcaagcccagctgagtgaggcaaaggagcgataccagcagggaaatggaggagtgacggaaagaaccagactcctctctgaggttatggaagaattagaaaaggtaaaacaagaaatggaagaaaagggcagcagcatgactgatggtgctcctttggtgaagattaaacagagcttaacaaaactgaagcaagaaactgtagagatggacattagaattggcattgtggaacacacactactccaatcaaagctgaaggagaagtccaacatgac

SEQ ID NO: 320976 - DNA, 1244 bp, Homo Sapiens
  misc_feature (784)..(786): n is a, c, g, or t
attttgtgactttaattggtaaatatgttacaaaaccaagtacttaatcttttacatcatgtcttcagctatttgtattttaaccagtaatttcaatggtctgaaacatgattctgagcttcacataatatcttaactgtggaactcaaaagtttgatcactgaatttggcagttattattacctaggtacccccgctgttacacaggtgtttagatacgtgttcctgaatgaagctgcttttgaattttgttatgttgaaatgcaagaaataacaatgatggcagcaattaaggtcacagaaatcattaggtaaaggaaaaccaatgaggagttctgcagttttcttttaataagtaaagtgagacttgggtggtgggaagaaggaaggtgggaagaaggaattagacactctgcctgccactctgcgtgtgtgtgctctcgcgcacgtgctgtctatatggaagccactcccttttctttcctttgaaactggtaaggttaaaataggggagaaatcctacatgttggaatgatagctttttggaaaatttaagaaactctccaggctctccatcttgatttatgcttgagttgttatgtgccatatttgctttgaactctgattatcagaagttttactaaaactttgaaataattcactttcatctgctttctagattttgtacatctcagtccataaagcaaagcttgttgatagtgtagttttctaaacgctgcaaatttgcagcctttaccactacaaagaagtttggatgagggannntttttttctttgtcaaaatagttcctgtttctgtagaaatttcatttttagattaaactgtgatggatgagctatcataattcaagtatacatttcttttttctatcagatattcattgtcatgcagtagtagtaaaaacatcaaagatgcagcaagcttattaagtattattttcctaaaagaaataggaggcattttcatctttattattgtacttttggttatgcaaacactttgataatataaacagttatgtcccctataaatctggtcagcaacctcttttgattttgttgggtaagttaaatagtctgtagtaggtagagtactgggtacaagtggtccaaactaagataagagactaaaataaaatgctaaatcttaaaagaaactgggtttatgcactaaacgttttgtgccttggtctaatattaacatgatgtatgtgtaaactgac

SEQ ID NO: 320977 - DNA, 472 bp, Homo Sapiens
cggcacgaggggaaatcacttttcagcaagtaatgtctcagattgcgaatgtgaaaaaggatatgattattttggagaagagtgaattttcagccctcagagcagaaaatgagaaaataaaactcgaactacatcagttaaaacaacaagtaatggatgaagtgatcaaagtccgaacagataccaaattagacttcaacctagaaaagagcagagtaaaagaattgtattcattgaacgaaaagaagctgctggaattgagaacagaaatagtggcattgcatgcccagcaagatcgggcccttacccagacagacaggaagatcgaaactgaggttgctggtctcaaaaccatgcttgagtcacacaagcttgataatattaaatatttagcagggtctatatttacgtgcctaacagtagctctgggattttatcgcctgtggatctaataaagtgtctatttaaagtg

SEQ ID NO: 320978 - DNA, 1183 bp, Homo Sapiens
  misc_feature (1096)..(1096): n is a, c, g, or t
  misc_feature (1109)..(1109): n is a, c, g, or t
gaagatgatcttgtattgctttgttggcttcaccagcttctttcaaaagtttgtgtagttcctctactgcccgggttagttcattgctctttgcttctgagtcatcagcggcactcttgtacaaattagaaagttttatgtgggcatttaattcattgtggaatttctcttccatactggcctgttgttccttggcctcttttaatttggtcaacagatcctccacatgcttttgaagatgttcatttgatgtttttaagccattcatttgttcttccagtctagaaacctcttcttttttattttcaagattacatttaagctctagaatctcattccctttttctcttccaagagccagaagttcatcagttttggttttcaactctgtattcagccatgtattctgactatgtagcaattccttttcttgctccaagcgtttttctcgatacttaacagaaacatcagaagcttgaagttcatccaattttaactgaagttcaccctttgttgtattgctttctttaagtttttcattcagacgtttaacatcctctgttaagtattcaagttcttgagatagtctctcattggttctaattaagtctcttttctcagcttctaattcttcctttgttcttgtaaattggctctgaatgggcaatattgcgatcctgagcaatttcaagttctttgtttttctcagttagtgccttcagttgattgttgagtttctctagctcaagccgcaagctttgacactctcgggtttcattcacaagtctctcctgactgtgggacaacctcttttctgttcgctctcccacctttaaatttctccatgcccgccccttcaaggcccatcgatctcggaattgctgatcagcaaggaacttttcaagtttgttctggacagacttgggccagcttgttcagctccgtgcgctcccaggacttgctgcaacaccgccgcccatgtcggtggggcccagggaccccagtggcagcggccgacggggtagaagcggagaagaaaggcgaagaccagcaggacccagacgcctgggccgccgcctctatcacctcgctcggntggctcgcgcgcngcccgcccgccggagactcccgcggcgggaccctgggaaatcgagtccaccctcagcggcagcgtttcagcaac

SEQ ID NO: 320979 - DNA, 657 bp, Homo Sapiens
gcatgagtcaaaattacttcatgaagtatgagatgtcaacattatgtaaataaaatttaatattgaaaaagtgatctggaagccctgtgaatttttaccctacacattttggaggacatcacatgggttaaagaaaacaccacaaaatctcatttgttcagataatcatttgaatgtttacatacatttttggttatttatttataactaatttaatttacatttcctcatattaacatatcctcttatttagtatgtaatcaaattatgttagtgagaaaaatcctcatagtaccttgagttgctgattctgagaaaacactaaacatgaacatgtacaaaagaggcatttgaataaaacagcatgtgcatttttttaatatttgcacagtttgatctttgcatttctgtctggagaaaatatgaacaaaacccaggtttaccatgctaagataatggttcatatgactgccataaaagtagtacatacaaacaatgaaaacaaatcacatccttaggttccatgattaccgagatgatttcccctgccctaagtgctttattatatttcttaaaaaatataggagcagcagcttatcacaagtctccacaagtgcattaatgatggaatcaaaacaacacaacagattcataagg

SEQ ID NO: 320980 - DNA, 986 bp, Homo Sapiens
  misc_feature (221)..(230): n is a, c, g, or t
  misc_feature (551)..(560): n is a, c, g, or t
  misc_feature (648)..(672): n is a, c, g, or t
  misc_feature (853)..(861): n is a, c, g, or t
ccacgcgtccggtgaataaacttgaacacaaatacacgaagttccatgtcatgtcttcagttgtagaagtttttcctctttaaggtaaagcgaccaacttgaactttctctggcaacacgattcgcagttatataagggaatcagtgttcacgtctctgtatatatttatttatgtgtaatttaatgggaattgtaaatatggtgagtctgttttaagccnnnnnnnnnnatttatctgatcttgtttacctcttgtttagtgggttttgaatcttccctattagttcttcatgtggttcatggtactgatttagaaatccagtgtttgggggatttttttctctgggattcatgaatttagccctgttgtagcatgttaaaggtgacaaacagctggacaaatttttaaaaagtaaaataaaattttatctataattagtattattacatttagcttttcattgaaccgaaagaaaaaaagtgatattggaccctggaaagattttgaaacttgagtggtttgataacccttctatgtattgtagggagnnnnnnnnnngtttattttattccactgtcctcccttaaaagcatcatttgagcaataaatgaatattgtctttaaaccaagggttagggaattttcnnnnnnnnnnnnnnnnnnnnnnnnnttctgttcaaagaacttcaaacatttgggaccacctggtattctgtattttcactggccatattggaagcagttctagttgcattgtattgagttgtgctggcagtagtttccatgcctgtcaatgtatcatagtcctttgttgcccagataaataaatatttgatacgctttatgtcgannnnnnnnnattcagtggctgtctttacccaggcgtatttttgttcttggcagtattttttattcagtatggttacagtaattgagtttaaactctccttggcaattgctccttgcaataagcagctgaaccca

SEQ ID NO: 320981 - DNA, 773 bp, Homo Sapiens
  misc_feature (185)..(266): n is a, c, g, or t
tagcatgctgtttgttcttcaagccgactaacagtgtgatctttatctgtaatctcttgtctatttcttgaagcagctttcttgctttcttgcgtcaattcaaaatactgttcttccagaaggcctcgcgccaactgctcagactcagcttttgtttctgctagatccaactgagtagcaagagnnnnnnnnnnnnnnnnnnnnnnnnnnnnnnnnnnnnnnnnnnnnnnnnnnnnnnnnnnnnnnnnnnnnnnnnnnnnnnnnnnctgggttttataaagtgtcgagaaatattgctcagcttcaagctgatcttgtagctcccgcatctgtccttcatttcctctatactgtttcgtaagctgagctaactcaaattctaataatctctttgcttccaataaagtatttatttcctgtttcatctgcttttctaaaccttttaaattgtctgcctcaaatgcttgagtcttcaattcattttgtaacaacagccgcttatttgattcctgctccagttgcagggttagattcttaacttcatcctccatcctttctttaattccagtcaaatgttctagtttctgctgagattgcttcagatcaacgtctagcatggaacactgtttctcaatctgaacaacccgattttcagccttctctcgagcttctctttcttctttcagctttttttccatctcacacattgccacagactttgcctcttcaatagaaagatgtttgtcagttaaacgagctttggcctcgtgccg

SEQ ID NO: 320982 - DNA, 455 bp, Homo Sapiens
  misc_feature (359)..(359): n is a, c, g, or t
  misc_feature (363)..(375): n is a, c, g, or t
tttgcaatgttttgtacaaactttaatctctggaagctggtggtgtgaagctcaagctccaattcgttctaaatctgcacagttcctttgaacagagacagctgcaaggagctgaatcaatgggcctacccacctatttgggggtgtctatacccgcactaatccagagagccagtttgtccccatttccccctaagtgttactttaccagggtttccaaaagtgtgtgcccgtgggttcgttagggattagggatggggaatagaagggagcctctcaataaatacctattgaattatatggataattggatccattatctattcaaaaaggggagatggggagggggtgggaaaganggcnnnnnnnnnnnnnaggaggaaagcataaattacccataggtccacaaattccacatttctctgcatctcttctacctcccagtatggtaagta

SEQ ID NO: 320983 - DNA, 522 bp, Homo Sapiens
atttggttttttgaatactgttaaaattttttaaaatgccaaaaatgtgaatacagtttcccagagaaactgaaatgctgtagcttctaccaaagatagctggtattaaggtgacctaaagaaccatgaactcatccaaagtacaaacgtttacaattcgagccaatcttgtttacattctctcaaacactcaaagctgactcaataaattcccacgattcctgcctaacttgttacttggtatggtgggctaatggtactgaaggtggtttccatctctgggctactgtcctatccagaacacacgcagctgatagaggagaggacgctctcccatcaatgcaaagcttgaaacccagtttctaatctagacacagcccaacccccagacatgcatacctggaatggattcttttgtgatttagtacccaacaaccatgtcaagcaagtacagtaactcaggacaaataacttgttccccctgcatcccatttcttttagtttttagagcctatggactct

SEQ ID NO: 320984 - DNA, 1047 bp, Homo Sapiens
tgagccaccgcgcccggccgggagtatttttataaagcctttttgtacagattaatcggccatgtccaggttattggttttgatattttataggacatttgagtggtgtggcgatgtgtagagaatgtgccagagctgcagagacagtccattctgggctgctggctttttgcccttcctgcatgatttccagctactgtgacctggatgctgggaacccaggcatcggctccaaaaattagaaggcgagtgctgagaagacttgtcacaggtttctcaaatcagaatatactcagtcatagtggttccctgggaagccccagaccctttgacttgtgacattactggtttgcagacataataactacactcagaggaccatggaggcagagggatcatggtttcagggcactgaaaactctacgagccaagaggactagtgcatggactgaaagtcaggcatgccctcaaataggctgtattttctttccaggaatgtaacctttcccctttttcttctgacctgagccaagattggaaatcagaaagtctcctgtacatggagctgaagaggggctgctgttttccgaatgttttccatttcacaggcgccacctgcttgcccggggttggtccttgagaagaccccccaatgttcattgcctcagaacgggagcagaatgccttttaggaaatttttttaacagtaatttgaagttatatagaagtttggtaagaagaagcagttgtttctctctttttctccctcatttcatggaggtgttaatgatcatggctggccgtgatgtacacatgggctgattttcattttttcagtttcatagctgagaaattcagctttgttttagttgaatcatcatattggaaagcagacattgaaagttttcttttctatctttgttatgaatgtgctatggccccttttggagacttctattgggtaatattctatgtgagagaaggaaacttggtattaaatgttgtggaaaataatgatgataataataaagtatatgctgcaatggt

SEQ ID NO: 320985 - DNA, 893 bp, Homo Sapiens
  misc_feature (76)..(76): n is a, c, g, or t
  misc_feature (149)..(149): n is a, c, g, or t
tgatataatgtttcttgccatgttttgtttttgacttagcctataaaatgttttcgaaaatttgccaaacatttcncccagacatacaaaatagtgttgaacaaagaactgagagtttttagagcacttcggagttcttttacttcttnacaaaacctaattattgataaatccaaaaagtgtgcataacaatgtatgtataaagctcttggttcttctttcttgaattctgctgctattttattaaattttatcttcaaattagtggtgctatcataggcctggccatgtattttatccatatcaactccaatttgctgcagataagttttgatagtcctatgtaagtgggtcccagtcatctcctcagtatcaacaaaacccaagaatctttccttaattaagatagcctttgatgatttttgtgggtatcttacacaaattgaaagctgttctttcatggcactattgattgtctcatcacatatgattgaaaatgctgaggagtcattgatctcattcacaatatcctgcaacatttcagtctttattatttcgataatatcactttgaatttgtgtactgttatagaagtcaacttgtgaattcataagtcgaaatgtttcttctcctttatcttttgctctcatttctaacaattctaaaaaattgcctttattcacagatgaaactgactggtcgtttcctcttaagggtaaacactgctttccaagaaataaaatattttcaattataagctttaggtactttttatttccctcaatctgtttcgaatgaatagataaatcgtcactgacagctccatcacaaaattggtattctctccaaaattccaatgacttcaaatgcatttcacttttttcatgctttct

SEQ ID NO: 320986 - DNA, 530 bp, Homo Sapiens
gcacaagatcaagttcggcgtgtccggctgcacgcgcgaatgcgccgaggcccagggcaaggacgtcggcgtcatcgcgaccgacaagggctggaacctctacgtctgcggcaacggcggcatgaagccccgccacgccgagctgatcgccggcgacctgagcaaggccgacttgatccgcaccatcgaccgcttcctgatgttctatgtgcgcacggccgaccgcctgcagcgcaccagcacctggcgcgacaacctcgaaggcggcctgggctatctgaaggacgtgctgatccaggacagcctgggcctcgccgccgagctggaggcgcagatgcaggccgtcgtcgacagctaccagtgcgaatggaagaccgccgtcacgacgcccgaggtgcgccaacgcttccgttccttcgtcaacagcgagacgcccgacgagcagatcgtgttcgtgaaggagcgcggccagatccggcccgcgcgcgccgaggaacgcgacgaagccaccgtttgaatggagcagcaac

SEQ ID NO: 320987 - DNA, 2130 bp, Homo Sapiens
  misc_feature (287)..(295): n is a, c, g, or t
ccaggggtattaaatttttatataaaattcaaagacccaaattttcgccaaaattacctcctcaattactaaaaataaattttctagttaaataaaacttggactttattacctgcagcccagcactggttacagcactttcaaggtttataagattggattcattcatgtgtagtgttgaaagaatgtactcaaacaattaattaagacataaacaccttttctaaactgtgctatagcggaagactcatccatgtagataactctcccttaataccaccactttnnnnnnnnntcatcaataacaaaataaatcgtgggtgaaaaaatattttccaagatctctggacacatgaatgatctcaaaaatgtacaaaaacctctgtaaaccagtactgtatccaatacatctatcaaacttattagatactgaacaaaactgtagcaaaggatatctttcctacattctcctgagtgcttaatattaaaattgagaatatagtgcaggccacactttcatgtggtcaatcaattgtttgttattgctttatacagcatgatttaatgttccattttcatgaacaatttgtttttcttcaaatatatcctttagaaggacaaagtcagattcgtgactttttcgcagccggtggtgtgctaacttggtccacattactgggtgtgacgtggagtccaagcttttgagcctgaatatgaaaaaatgcttgaagcctagttccagcttttgcttcacttgtgttacgagggttgtattcaaagcagttcgaaaacattaactcaatgtcatcaataaactcagatgctaatttatattcacacttattcactttttcacgaattatatttaaggcaatgggctttttgatgatgtcatagtagtctgggacctggattttagaaacaagtttcaaaaaaggccagctgtcatcatgtcgtaccaattctacaacaagttgttcaaaagcagacaattcatgaactcctccctgtcggccagaactccttcgacccagtgtcacaggcgatggctctggagattgtctttttctgcatcttcttttggattcactctcttggagagaaagttttgaagcaatatttacagatcttgactgttcacttgactttgtggcaatgactctgaagttagggaagttgggactattttctggtgtattattagcacttttcctgcctctgcgttttctacgaggactaagcaattccacaaatacatctgcttgcagtgggccatgactgtggcgagtagaacgactggcaattcttaaagattttgtttctgtaggaggagcagagtttatctttcttaggcttctaccagttttagaagaaacagttgttttgggtgtgctctgctgactccttgaagggtatcttccaggttcttgttgttggccacgacttgagaaagaagagctaagtttccctcttgttttaactggcaatctaacttgtggtcttcctcgtttgggtaggctgacttcttcctcttcttgaggagtcatcttcatcttgttctacctcatactcttcctcctcactttgaccttcttcttcatcgccatcaacttcatcatcctcacctcccatactgtcttccacatcttcatcactttccaaggatggtctctgtctagaggagagtcttctagaacgttgctttggtcgacattctggacaaaaccagtctccttcaggcacagtcttgagctttggtcgaacacagtaggtatgatgacccctatcacagccatcacaaagaaccatgttttcagcatcgcctttctttcgacatatcttgcaacgcgcattcagtatagatttagaccatatcacgctacgatccaaggtggataggtgaagaaaaacttgggatagactagcagaagaaaggagagactctctccaacggtccagaactgttttataagaacgcccactgtcactggcatcaagtggagctttcagaaaacgccgctcaatgccctgctctatttgaaagagtgccattgccagataatgaaccacactgctcactgattgtggtgtacttgcatttgttgatacagtacttggagtttctgtttt

SEQ ID NO: 320988 - DNA, 771 bp, Homo Sapiens
  misc_feature (659)..(659): n is a, c, g, or t
  misc_feature (665)..(665): n is a, c, g, or t
  misc_feature (670)..(670): n is a, c, g, or t
  misc_feature (703)..(703): n is a, c, g, or t
  misc_feature (709)..(709): n is a, c, g, or t
  misc_feature (720)..(720): n is a, c, g, or t
  misc_feature (748)..(748): n is a, c, g, or t
agaaaaaataaattatttactgagggtagttatgttaaagttttgcgaacttaaagggctgactttagttccttcatggtaatggcttgagtaacatcatctttgggattttttaaatactggtccagtctaggagaacctggaagatgactagaggtatttcagtttccctagggagagcttcgttatccatgtggatgataagtctgcttgatttattattaaatcattatagcagtgaagtggtgccattttctctctcttaagccccatttgaaaggctagagaaggggatatatatactatgttcaaggtttgtaaggttgttaatgtacataattgcagattgcaataaaagcttagatacattttgtaaacccaacccactaaatgagcaggttacaagacaaatgtcaccagcctcaagtattttatgaactatttactgagggtagttatgttaaatagattataatgtggtaaattatttcctgaatcctttatcacaggaaaaacacagaccctcataaaagggataattaaaacggatgtgtctgaacatttagtgaagatgagacttaaaacatgaaagtgtatttgtgtattttgagggttttaggaaaccggttgccttaggaggttaggacttttggaagggnaaaaanaaaanggatacaggtcttttccccggggccccaggggngttgtnttagtctgtgncctcttgttgatgctgtttatcttgggntttgaccttggggggtacggctt

SEQ ID NO: 320989 - DNA, 844 bp, Homo Sapiens
agattttattgatgatatagaagaaaaaactcctattagtaatgaagtagaaatggaatcagaggagcagattgcagaaaggaaaaggaagatgacaagagaagaaagaaaaatggaagcaattttgcaagcttttgccagacttgaaaagagagagaaaagaagagaacaagctttggaaaggatcagcacagccaaaactgaagttaaaactgaatgtaaagatacacagattgtcagtgatgttgaagttattcaggaacaagcaaaagaagaaaatgctagcaagccaacccctgccaaagtaaatagaactaaacagagaaaaagtttttctcggagtaggactcacattggacagcagcgtcggagacacagaactgtcagcatgtgttcagatatccagccatcttctcctgatatagaagttacttcacaacaaaatgatattgaaaatactgtacttacaatagaaccagaaactgaaactgcactagcagaaataattactgaaactgaagttccagcacttaataaatgtcctaccaagtaccccaaaacaaagaaggtatgattctaatgaatgtaagaactgtttttctaacagtttcttatattaattatattgttgttttaaaaattggatttttaagacctcataataataagaggcagtttttatacttgcagattttaaaactaagaatgagaattccaaaactgtaaaattaatataaatgtttgcattactgtgaagataaagttacattcagtttatcaggacttttatggtattgcaattcatgatttctttaaataagtttgtctactttatgtacaaaat

SEQ ID NO: 320990 - DNA, 963 bp, Homo Sapiens
attaagttgatatttaaaagaattttgatttttaatcaccttccacaacgatttgatataccttaaactccactttcattttttataagagaatcactttcaagggaaaaaaatggatgttactatattttaaaatctgctttataaaaaagtgtataaatatcaatctgccagatatacttcctatccccaacacagctgtaacactgactaatggggtcatgaccatgaagcaaattttacttcctaaatagaaatgtgtaggtggcagaaagcgtatttttcagcaggagtgattctgttggatctctttacaatgtcagagcagttgttagaaatgttagtattttattcggtttcttgctgtgaaggattatcacaatgttgaagtgatggctgttcacccagtcgtcatcaccgtcatcatctcaatcttgggaatcatcagcagtgtcccccacacagagagacaggtatagtggtgcagtttagtgacagggaatccagtcttagatcctgtttatatcacatttttgtgaatttacacaaaattccatttatagctttaaaactgtactacataacacattactatactactacaaaatatccttctctataaatgcactgaatattttcttgggcattttattaggccttttttagcattattacaaatgctaacaacaagatacttcaaaccaccaaatataaagtcagcttcttaattttctgaaatttagttatttgagttaataagaattctgtaggaatactgacccatctcttttcatccaaccttcaaaatagttaagcctatttgcccatctcacctaaccttcaaaatagttaaaacaaaaacaaacccaaactagctatatataacaagaatctttcaattcccaaactattgaaagaccctaagtcagccaatctatgaaattatacaagatgaaggtgacc

SEQ ID NO: 320991 - DNA, 1293 bp, Homo Sapiens
  misc_feature (99)..(99): n is a, c, g, or t
  misc_feature (128)..(128): n is a, c, g, or t
gcccctacctaacagtgtaacctgggcaatggccttaaccccccaccgggaatcccccagggtagggatttccctgaaggacccttaatccctaagccnccccaaagttgtccctaccttttttgaanccctagggtgctcccttttgttttaccagagccagggtcaccttgatttgcctagctggtggcagaattggcacccattaccccaggtctgactgacccacccagtcagaggcactttatttgtatcatgaaatgatttgaaatcattgtaaagcagcgaagtctgataatgaatgccagctttccttgtgctttgataacaaagactccaaatattctggagaacctggataaaagtttgaagggctagattgggatttgaagacaaaattgtaggaaatcttacatttttgcaataacaaacattaatgaaagcaaaacattataaaagtaattttaattcaccacatacttatcaatttcttgatgcttccaaatgacatctacagatatggttttgtggacatctttttctgtttacataaatttatccacttaaaatgtgataatgtggagacaaagcaagatttgattacataaacttttctctgcattggtcttttcactatcttatttgctaacttttcttatttttcttcaacctccccaccctccattttttggatattaaacagggaaagcttgctacattataaagattgttggcaccatttattttacacaaaggctaaaggttaacttttggaaatgatgagctacttttatatatgtgtttactcatgctttgtgatatttctggatcattccagtcataaagacttattacatgtactatttcttgctacctgtgaaaaggtatattttaaagaatgtataaccaacagtccatttactttttattagtatgtagaggatttgtatctaattcatggaatgtagttttacagtagtttgtcattgtaaatggagcaaagtacattatcttctaaaatgtacattatgtaagaattgtaaatatacttaagtaatttgtatgccaaacaattacattacagtcaataaacatctcccctcggactccgccacaacccactatccccgcaatagcctgggggcccggcttcgcacccttcaaatagtttctctaaacacattccctttggacgacgcggggccctactaaggtaggggaccccgcggccttttaatcgtttcctaaagaagaccccggccccctgaacaaccggattgagatccaccaccc

SEQ ID NO: 320992 - DNA, 186 bp, Homo Sapiens
aaatttcagatgttttttattcaaaggttctcaaaagaaataaaacagaaaagctaacaatctgatcaaatgtacagttcaaaaatgtcttttggcgtttaacaacaagtcctaggaaagaaaactacagagttatcttgaaccggacaaataagttaccactgggcaagtctgtgggcactaggt

SEQ ID NO: 320993 - DNA, 1539 bp, Homo Sapiens
  misc_feature (159)..(159): n is a, c, g, or t
  misc_feature (354)..(354): n is a, c, g, or t
aaaaaagttttaaaggtaagggttggtttgggttaaccagcacaaattaaaaccctttttaaaggattatagttttaccaaggggtggttaaaccttttaaacccgggagcataatgtgcatcgtatgcctttctgacattagcatgcaaaaacaaagnctatttgttaaaatagacttatttttgctccaactaagtaaacatgtaaaattattttaataagctcaatagcttagaaggcatcttgttaaaatgaaaatatttaaaacaatatctagcactgcaacccaaagctaacagacaactgcaatgccactgtgacatatttcagcaaaatataaaaaatgaaaactntccaagttgtagaacattggtttttcaaatgtaagactgttcacatgtgtattcacatgttcacaagttttccaaagggaaaatactaattttttattggcatcatccatatccaggcaggctgtagttgagtcaccaatagctactcctaaatggagctgctattttttctatgttttctataaagttatttacatctgtaacaaggattccattattttcaaagacttctctggggatagtaggcttgtctgttaggaggacagcaaacctggcatcaatatgctgaatttgcaggtttagcaaacatttcagaatttctgcttttgttgatgatcgagagtcacactggtgataatgaagcaattcaatgatatttgcactctgaaatgacttcaacattatgttcttcttatgtgcagttgaatccactctttcattcttcttttagctttttatttttccctgtagtgaggcaaccactttcattcttccatttccatttagtttttccaggatttttgataatttccttcagttgaactaatgttccagcttctagtatcttgtcatctgatatcacaaagcctcctgcacgaaacagttcttggtaggtgtgatcaagaacatctccagggctgtctactccagcaaagatgacactggggaaatgcttcagcttcagcaaagaaggaatctgatgcaaatgtgatgatatatcttcatttctgatgatgatgattagtgtatcattctctctgtggaaagcttgacagaagtgctgaggttcaatttctgtatggcctcctttcctcagaaggttctttgttcttacaaagaatgatttgtcttctgtttcgacaaggtagaacaggaaggtacttttacaagcctctttcacaacacttcttagtttgacgtgcaaattggtgcacacgtctatgattatgtcttcataggaggctgaccgtcctgggaaaggcagatacatctcttgagcagtggcttctccagaaacatcatttagctctttgtcttggaaaatgaattggttgctattcttcatcaccttgttgaattcagcatactcattgagaataagtgaaatatcattccgagattccttcacagtactgttgtatttcagtttgttgaggtggaatgaaacagtgtgatttctttgcc

SEQ ID NO: 320994 - DNA, 554 bp, Homo Sapiens
cgccagacaccgagccaatcaccaccccgtcgccgcgcaaggccagcatggcccccggcggacgcggcgcactgccccaggtctggaccacgctgtacagcaccacctgctgcccggcgcggcgccattccagcacgctgcgcaacacattcagatcaacactgtccatcaggccttcgcctcctgccaaacacgtagctggttttgataaacagcatctatgagttgattaaaaaatatcggtagtcagctaagttaactcagcggcaataaaaaagccccgctatgcagggcttggtgcgtcaaaaaaccagcttagttcaatagcggttgggctccatctccagcacaaccttgaaacgcttttcgatgtcctgctggatgcgtagcgcgagcccggcaatctcctggccggtggccgcgccatagttcaccaacaccagcgcctgcaagcgatgcacaccggcatcgccatcacgaaagcctttccagcccgccttgtcgatcagccagccggcggccagtttcatctgcccgtcagcctgggggtaagc

SEQ ID NO: 320995 - DNA, 969 bp, Homo Sapiens
gcctcaattttgtcataaaagtctttgggaagtttggaaaggatttctacagcttctaaaagctcataagcatctatttgtggcacctcatcaccatcatcaccacctccttcagcatctccaccagcagactgttgttgttccaatttagcttctagttcttgttgggaacgaagaaatcgagtaggtctaggagcacttgttggcagtttgacccattcttcttttagttctttcaactgaacagagtttatattttgtaatgggggtctcagagcatcccgattccatctgtaaatctcccacagcaattagtttggcttcatctcgaacagccttctctcgagactcaaagagttttggcaacactttgataattggcttaagcaagatgattttggaaccaaattcacttaaggctttcctcagtgtctctatacaggccactatgatcttgggattcttattgtccaagcctttcaggagctcttcttgaacagcctctcctttctcaatctctatgtacataagacagatctctatgcccagctccttggctttagctttaggttgattgaacaccttacttacaacacctgacacaacttctcctgtggtttttcctgctacatgggcattttcaacataaacaagtgcagcttctaatcctttcaattgaaccactgcattggaatcagtgacaaattttttgatcaatcctaaaaatttggaccactctgggctcttttcatcctttattttctggaagatcttcagggcctcttcatacccacttaaccttgctttccacagcttgtgttcacatttctgatcaactggcagtttcaaccactcactgtcatctcccattgtgcttccaggttttccttagaattaagagtatttcctcagctgggtcagaaccaagcggcctgctctaagccgtttgaaaccgcttgggccgccccc

SEQ ID NO: 320996 - DNA, 391 bp, Homo Sapiens
acttttaaaaaacatttttattactttcaagtttatacagtaatctggcacaagcttttgccagcattcctgccaagtacaaatgcttggacctccccttaatcaacagataaaatacataacttacatttaaggggagtggatacctcaaagtgcttaagtaaaaatttgttctctttaatagtttgaactgtcccttgttagtcgtgtctaaaacattgccctgaataatgagaaatcacaagctaatgttttacttattccttatatggtaagagactaccttttaaagcaccattttccatttggcatttcaccaaggtctaatgtccctggaattaatttttttgttttgccttttgaatatcgataggggttcatctgaattaaa

SEQ ID NO: 320997 - DNA, 1079 bp, Homo Sapiens
  misc_feature (17)..(17): n is a, c, g, or t
  misc_feature (71)..(71): n is a, c, g, or t
cgaaccaaatctctaangctttccttaccacttttaggaaaggaatcactctcaattctgcaagttgttcntattttcaaagaggtgtaggtgtgctaagaatgtgattccagggctgccttttttctccttgctctgttgacattcctaacacatcttaaagacaatgaaagcatcctaaatgaagagcacaattgcatttattttatccaatatgcagataagtctaagaaacttgggaacagttctgtatacttggtgtgtattttcttcttaaactcttcttttggctaagtcagcaagcccatggttactagcgtcccaagcaaacctgtcaacgtgaaacacgtgtgcccagatagaagacgggtagtacctgaagtggttccacttcctttatttggggttgtttcatgaaaatgcttggttgtcctggaaacaggtgtactccgtgttgcttgagcatttggtgtggtggtttttgtggtggttttctgagaagttggtgagacttctgtagttggaacatttactgtggtaggtttctgaactgttggtgggaccttggaagttagagattttcctctgcattcaggtggtgggccactccactctccttcatcattattcacagtacaataaatagagtgctctccaatcatggtgaatcctttattacatgcatacgttacagactgtctatatccataatggtcacgttccccttgaattattccattgtcaatttgtggtggtgctggacaataaatttctctgcactctggcaacgggtcactccactggacagagctgcctgaaataagacaaaaactagaagtcgagccaaataatttgtaccctgtgttacatgagaaggagatggttgcaccaaataatatgccacctggtacatcaatctgaccatttcgtatttctcccggattagggcatgatttctttttacaaaattcgactgctgtggaccattttaaattctgaaggcaagttagttttggtgatagagaaggttctcttctgtaacctggacggcactcatattccacaacagtaccgactgg

SEQ ID NO: 320998 - DNA, 564 bp, Homo Sapiens
aaaggctcaatcaaggaagtgaggtgtgcaataaggtagcaagtaaaacgcagttgcgtttttatgtcatgttagagatccatacaattttccactcacgggatttttgttgatggctgaattcttgtggattcataagaggatcatgcccttagcaagtacttttgttttgttttaaattaagagattcccaaatgcctttttccccctcatcttgaaatgagatgagtttttatgtgtaagcaatatttatttaactattctataaaattattgagtgcctactgaggcctttaagcaccgctaacattcctttccatcattcttttaaatgacataaaataattgtgcaatgttcctgatgatgtaccccacaagctgcattcaaactcaaatctgtgggaatgagtgactcgacaaaatgtaattcggatcagatcctcatcccctgactgtgtgaaaaaagtactctccttctagtgaaggattgtcacagagtttcactggatgaaactatgacccagtattcttactgtattttacatatgcctgtaaattatttgc

SEQ ID NO: 320999 - DNA, 1210 bp, Homo Sapiens
  misc_feature (896)..(951): n is a, c, g, or t
  misc_feature (1069)..(1143): n is a, c, g, or t
ttttaatcaatataaagaattatattctgcttcagaatgaaaacatttccagaacattgtgggagcctcgcttgttcatcaacattacctgtttttatcaaatactgtcatttgtgcaacaaatgtcttttccccatcctcacgatttcattttcttctggctggaagctcttcactgacatcaatattttcatggtttctccattaatcattccattaaactctcttcttcttggacgagtcactctaaatagcaacgagtaagacttcaccatgtggctgttactaggttcaaattcattactggaaactgcaagggacgggaaatttccaggttttgtttgattgaggtcaggattcaaaggcacctgctttttacctgtgggaacttgccttattggacaacatacatcctttctttttttgtggcaaactttcacaagcaggacttccagggtaacagaattttgttcattttctgagtttggtgatggcttatcatttttgtggaagaaaccaaaaatgtaagctgcaaatgagctgacaagctatgagattcttgctctcctttcattttctctacttttgataacatatcatcaactttaaatgttttccttttgatgtttgttctggagtttcgatgagacatgtaagtaagagttctgtgcaaaaatattggtgctatgagattccgagttcaaagaaatctatagatctgtgttggcttctcaaaggcctggaggaaaagctcgtggtcagcctggacgtgctccattttcgacttcttcaccggtaacgccgcggaggaggaggaggccgagtaactgccaccgcctccacagcccccgccgccggatttgccgctcgaagccgtcgccgccgaacccccgaannnnnnnnnnnnnnnnnnnnnnnnnnnnnnnnnnnnnnnnnnnnnnnnnnnnnnnngcttctgaggcgccatcgcggttcctgcctccttccccggccagctactcgccgggcggccccggagagtaagcgcctgcaataccaaccgctcgccccagcaggctccggctgaccnnnnnnnnnnnnnnnnnnnnnnnnnnnnnnnnnnnnnnnnnnnnnnnnnnnnnnnnnnnnnnnnnnnnnnnnnnnaaagtgtctcctcagagccccgctccgcttcggaggccgatcccgggaatccggaccggtccagcct

SEQ ID NO: 321000 - DNA, 740 bp, Homo Sapiens
  misc_feature (628)..(652): n is a, c, g, or t
gattgtattcaaatttttattttttgaacaaaaatttaagacaatgattttaaataataaaacatggtatatattctagacactggttttttttaaagatttattaaatttagactcctatagttctgttgtgatgctttcttcaacatttatattatttcttaccattttatcatcactccaagcttgctaaacaaagaatctctctgttaagtgaagttttacattaaggaaatactccactagcacactgaacaaacctacagaactgtcctagtttatatttacaaaacacaagaagtctgtccagccattttggttttgttgttacactgtccatactgagatcagcagagagctaagtaatacacaagattacgcttcggcagtgcaaaggatggcatcaaccaaacttcattaaacagaccaacaagtacaaacatggtgagcaaagttcaactcaggtaatagtgattaaaaacaaaacatgtagtgggtcacaaccagactggttttcactgtgcaactttcctcagggaataatacccattcacagaaagaaaggaatatgcatccaagcctttgttcataaagaaaatgcccttcaaacaaattcatcataaggctnnnnnnnnnnnnnnnnnnnnnnnnnggatgaagcagttggcccagagaaaagcttaaatataatgtgtacggacgcgtgggtcgacgatatcccgggaattccggaccggtac

SEQ ID NO: 321001 - DNA, 387 bp, Homo Sapiens
ttttggtaacacaaaattacccaaggtatagtaaacaaagaagacacagacaataaaaactaacagatgccacattttgcaaacatagcatttggctagaggcagaattataaggtatacatattaaaacatacatccaagactctcctcctcaatttgaaaccatgtttatcaagtttttacttcattgtatataagccaaaaaattaagagaaccttgatttgttcctgaaatacaagatttgcttgtattattactggaccaggtagactggatatgtgaatgtttaattcatagttagctagctttaccatcatctcctgaatcagctgctgaggatgcctgtgcctctgcccgtaactatatatagagtatgctttcaaaac

SEQ ID NO: 321002 - DNA, 1388 bp, Homo Sapiens
agaaaactcttttgtgagtgagtgattggaacttagagactcctgttgccagaatcagactgccctagaacagaatggacaatgcagggaggagaattcacacaaacagcacctgttctgaggcctgtgccagcccaccaggcctgctcaaatgtggtctttacttcaagtgcacagaggcacatgaggtttctggtgataaaccagcgtcttaccgctgttttaaagtcctatccccatgggcttttcacaattcagttccgttttttttgctgtacttgataaaatgtttattctcatacaggtcaagtacactttacttctattcacagtgccgtagccaataacaacaaaagcgcttacaaatttggggggcgtgattttagtacctttatttgaagtgtaatcattttaaattattattattttaactggggcagttatcagtggtttaaacaggaactttagtggcttcaattcgtttaagaaacatattaagtttgagggaaaaatttcccatgaaatatttggaacgtaagagtagtattgattagagaaaattaaataagaaacatagtatggtagccaaattttttaaaaaatcttgaacttttctgtaggtcagttttagaactgctgtgaaaagtgaaggttgccctgtggagattaaaattagagttgttttcataactgacagcatggtgaatccatttgagtcaaagtgaagaatttcctcatcaagtgactatacatttgtttttgtgtgctcaaaagaaatactcaaacacagactgatattaaccagccaggtaaattgaacgacaatgtggcattaggtatttggctgtttattggtcgttaaatactatggttttgcaatatgattgatggtaaaagagtgatgtcatattgatactagagtagcttgtttttttagtaggtgtgggaccatctcttttacaagtgcaactcagtctaggacagccatggatgcagtgtctggagttggaccctctgagcccgctggctgccccagtagcatctgcattggtgaccaaggacactgcactttgaagaggtcgccactgggttatttagtgtcttcactgcttttgttaaaaattgtaaaattttgtacacaaaaagttgtgtttttgaatatcaattgtttagacacacctacaatgataaataagtgcctttaaaggcccctctttccatgaaatacatctgtggtttagcaaggaaagtacaaaatagtttatgtagttggtataatttttatttgtgtcttcatgtagaaaaaatgaatgtcataataaaatataaaacttacgtaaagaaaataaagtcattgtccaccttaatagctaaggtccacaagggta

SEQ ID NO: 321003 - DNA, 1258 bp, Homo Sapiens
  misc_feature (59)..(59): n is a, c, g, or t
aatcaaagaacttccccagaaattttgttaccaattctttcatcgatcttaaatttctngtgtaacagggtctataggatattcaatcaaatatggatgattacaacattacgaaagtagcatcattatattctgcagcttcagattaacttcagattctacagggatattcacttccacaacagctctttctcggtccacctctggctgtatttgactgatcagtttttccaattcattagggaaatcatctattttgctgtaatttattgattttctagttcgtcgttttggtcgaccagtaggacttaactcaattgtttctttctcactggatccaaacatgtttgcaattgtacggttcacaatggctgtataaaagatctcctgcttctttgaaagtggagcataaacgactactcctcgtttaggaggaacttcaagagcaacatcagacttcagtcttctcaataagaaaggtgttaaaatctggtgcagcatatgcaatacattctgttctctttctttagcaataatatcttcagcagtttcagaaagactagtgatgtcaaaccaagactcaaagcttttcaagtcatcaaatacatctggcaacaaaaagtttagcaatgaccaaagttctgataaattgttttgcaagggagtaccagtcaaaagaagtttgttatcagcattgaatcgttttaactccttgattagacggcacttcatattcttaatcctgtgtccttcatctactattaagtatttccaatagcaatgctgtaacgcatttcggtctctcatggctatttcaaatgacgtgattaccacaggatgaatctgcaaagtccctttccgtttgtaaatatttcttaccaatttttgacgttcctcctgggttccatgatataacattgtagggatatctggtgtaaatcttttgaattcagccatccagttaggaagtgtagacaaagggccacagacaagaaaaggtcctggtactcctctctgaatcatcaatgcaatagtagcaatgcactgaactgtcttacccaatcccatttcatctgctaaaatgccattaattccattttcccaaagcatcctaagccattccatgccttctacttggtaccatcgcatcactcctccagtgaagtgctttggttgttgaaaaggtactggctgaccattacacttccggactgggtcaaaaaagaatttagtattctgcctaaccgtttcagacaat

SEQ ID NO: 321004 - DNA, 832 bp, Homo Sapiens
  misc_feature (39)..(39): n is a, c, g, or t
  misc_feature (55)..(55): n is a, c, g, or t
  misc_feature (57)..(57): n is a, c, g, or t
tagcttttcgagggccgaaggcgcccgcccatggttttnttggttgttttgtttncnttttcatataggagaatggtttattataaaagactgtacataaaatttagacaacaggttatatacaaattaagagaacaatccacttgaaaaatggaaagtagaaggtagctagctgatcactaatgatactttgtttgtttaaaattaacaaaggcaaaatgcatatgaaatagtcacattgatttggtagcaataatggtctttaattttcagaaataactgttttgcactagtcttaccattcactatgctgttataagtctgtagcatccagtacataactgtaatttgaattccaaacaaatcctcaataacacagaaacccacacttgagtgctctactttaatatcctaagcaatagagaattatacacaagacaagaagagaaaacatccctcagccctcccttcaattaagaggagacacacaaagtgcatgtgttgcattttgattatgtcaaaagacaatccaagtctgttggttaggtaaatctctgttcactgattaatacatgacccaccttctttcccaattattttattttaaaattctaatgttgctagtgccaggtaatggattaaagagtgcctactcacaaatcaactgtatccacttttacaatatgtaaaaggtacttttaacttcctttcattgaaccagtgtacaacagttcactgtacaactgaaggactgacatggcaatccttaagaattttacctacagaatgaatgcacacaatttgacacattttcttagtttcaaaagattcc

SEQ ID NO: 321005 - DNA, 595 bp, Homo Sapiens
cagtttccagtcatccagaattcaagccactaatgtcaccatataaccatcaactgtgattcccttcatctatgactatttttaagaaatgtaagatttggataagtcataatcacagatcagaaactgcagacattgaggcctggatggccgtttagagagaaagagttaacatttcagtggagacctttcctatcttgtatttcctacagtctcctcctatcttcagtgcagtgttctggcagcacctcaagctcactgtcaccaaatgggattcaacgtctttcctcccaaacatgctctacctcaccatgtcgatagatgtacagtcgccccactactggcttaaattctaaatcactgaaaaccatgtaacaggcaaaagtgcgagacaaagtacccctcaaatacatgtggctcctggggtccatccgactgagacttgtatttacttgaatggcatcagaatcctgctactaaccttctaacaaacttggaggtaatctttgatgcttacctttccttaatccccacatccaattagttgccaactcctcttggttctgtcctcttattgttcaggccctcttagtct

SEQ ID NO: 321006 - DNA, 790 bp, Homo Sapiens
taaaagtacaaaaaattagccgggcatggtggctcacacctgaattccagctatttaggaagctgagtcactgcactccagcctgggtgacagaacgagagtgtctaaaaaaaagatttcctatataacgctacttttacctgagtacataaaagattttggaaatcgtgggaaaaaaatattaccagctataagctatttaaatactgttgatagttatcagagggaaatcaaaatcatataaacagcatactcaaaaaaatgagacaaaagttcaagagtataatattttttattcactgataaactaaaagccaatttcttggtatttctcatgtatacttcatttattttattaataagcaaagccctgtaaggggagcctttgcctagtcctccgactctgattcatcttcatcttgactaatctggaagtaacgaagttcgtaggtctccttgtcagatgcaaccactcgaagccaatcacgaagattgttcttcttaaggtatttcttggtaaggtatttcaaataccttttagagaactgtttctcagaaacaactgtgattttattcttgaagcgttcaatgtgaacaacattcccgagatttccagttttgccattgactttaaccttctcccgtagaaattgctcaaaatttccagaatcaaaaattccatcttctactggatgagtaaggtccaaattaaacctccaggttgacctcttgggcttcctgtctttctgcggcgccatcttgcgagtcggccgcgagagcagagaggccc

SEQ ID NO: 321007 - DNA, 621 bp, Homo Sapiens
  misc_feature (322)..(351): n is a, c, g, or t
tgaaaatacaaaacaaaaagagagaacttgcagcaggagcctttggaactaaaaaaccaaatgctgacgaaatgaaacaagccaaaattaatgaaatcagaacattaattgacttataatttgtgggattttagtaagaagactactatatgtgagaggcgtgatatctggatggaagttgggctggatgatctccaaagtcgtttcaactcttaaagacatcttaatcctgaatgtaaacaattgttatgtgtttagaatcagaatttgattttgaacttgagtaattcatccttacagctatctgtagaattagtcatcnnnnnnnnnnnnnnnnnnnnnnnnnnnnnngttaataagcaaacttatttgctgcagaatttgggttgactcctgagcatatttaaaacaaagaagctagaaatttagcagtcagattaggtaggtggttttatttcaaagggaaactttaatccaaagaaagattaattactctaacaaacaagagaagcttcatgtttgatgatacagatttaagaatacctgagacttaagagtgttggaagtcatttgatagaaagatgagatcggagacaatgttgtgttatagggcacacattg

SEQ ID NO: 321008 - DNA, 462 bp, Homo Sapiens
gtggattagattttaatgtgaattttggaagtacacaaaatgttcaaactatagcatgtatatatatcaagttggcagtataaactacttgcaagtaactttagaacacaagtgtttgcccattggtagtgagatggattctaagttgagatattagctagaacattccagttggtaagttgtcatacatatttaagaaatatgaatccaaactagattgtgataattccctcataacttcacctccacctgagtttcggactctgctatccagctgcgtactagtcttcatcagatgacacaggcatctccaacaccgcattgactgggaacctgaactcgcttatcttctggttttccccctaaaatttgttctttttccaaattttctatcttggagttgccctcttggaattgccctctaccatctatctagacacttttatcaggaacccagagaac

SEQ ID NO: 321009 - DNA, 408 bp, Homo Sapiens
gctagtttcttggccagtttattcagctcctttgatttgtctgcacctaattttaatttcttctttctaggtttgtccattttctttaactccttggacttctgttttccttctccaaaaagttgctctaccttttctagcttccgtttccgtttcttctctgaagagtcctttcctttcacttttagtggtttctcttccatgctgtcatcctccatgatatgcaagaatctgtcttcagagggtgggtgtgtggcctgcaaaatccgccatatgtgttgagtctcgtccagagatacttccaggagatctccaaccatcataagttcttccagttgtgccttagctccaggtgacaactccagcactggaggttccaaacttcggggcaccaaagggctcttccga

SEQ ID NO: 321010 - DNA, 414 bp, Homo Sapiens
cccccctcctcttttgccaagttccttggcccagtttattcagctcctttgatttgtctgcacctaattttaatttccttcctttcctaggtttgtccattttctttaactccttggacttctgttttccttctccaaaaagttgctctaccttttctagcttccgtttccgtttcttctctgaagagtcctttcctttcacttttagtgggtttctcttccatggctgtcatccttcaaaaatataaatttagggaacaattttaaagcaagacagttaaaaaacagtattactctcttatatgaggtacctagaatagacacattcggagagacagaaagtcgaacagaggttaccagaggctgaagggaagaagaaatggagatttgtttagtgggtatagtttctgttgg

SEQ ID NO: 321011 - DNA, 988 bp, Homo Sapiens
agaagaaggaatccacgatgttttatcaaccagggaatttagattttgtatggatctcaaactagaacactgtttacatccatagtgatgtattgttccttgtataagaaatggtgctgaaaggtccaaaagttccaggtcttcgtggccagatctcacaggaattacactattaaacttgtttggagagtttgcaaatttcacctgagtgtccctcctttctatcaaaagtagacattcatttgaaaagcgggagaatcccattatttttcccaaaatgaactgctacttttcgtcctttttgatttttagtggtccagatttttgaatcatataatgatgtattttgtagcttgacatctggggttttagttgcaccatcctgaaaaattatatccaaatcgccctcatgtggaacttcttgcagcaaatgacatttagggcaatgaagtttaacagactgaaatagtcttctgggcttatatgacctcaattttgctcggatgcggtattgttgaggagctttttgtttcaaaatggcacatagtggtgtcctctccaaatactgatgatctgtaagtattgtagcagatagctgttgacatctttctacctcgtataatgatactgatccagagcttggaaagctgtcgtcaggttctgattgacagataacatctgaatgctgattggctgtcaaatttgcagattctaaatcctttttcagttgatccacatcagagttactttctggcaagaccctgattccccgaccgtaactggtacctccatgaagatgaaactctaaacttaacattgtctgattctctgaattcattgattgaagtttggtatgaaggctatagattctaagaaagcttccaaccttcagagatcttgccacatgaacatggttatcgtagactaaaatgtctattgtcagatttgtagccgatggatgtgacttaaatccctcgtccgaattgcc

SEQ ID NO: 321012 - DNA, 267 bp, Homo Sapiens
  misc_feature (76)..(76): n is a, c, g, or t
aaggtgtcgagtacattctttgaaagccaactctgcataccacattgcagaactggtatgggacttgctgaaacanctatggctcacaggttgcctgtgcagtttttcttccatcattttcttctttctttgaaaggcagccataaggacctcattgtctatcttctccacctaggattccaagtccatgagcagccagcttataatcatcagcaggtgagcttttcctttggctacagaaacaagttaattaacacccaaataccc

SEQ ID NO: 321013 - DNA, 1161 bp, Homo Sapiens
cttttagggaattaaactgctgcactttccaaccttaggaaatgttcagggactcagaattattgcttccggtgacgtaggaacccctgagattcctgtaggtttcttcaggagaagtgtctttccaagtacttgaggaagccacaggccagagaatgccttcccttttccatgggtggaatgtgtaatgtcactccaggactaacttgcggagtcacggagtgtggaacacatctgggttgtgcacagtacactatccagaggaaaatcacaagcgacactactctgcagctaaactagtcccaagtcagaagattaaactagccaaaactttgcacaatagtttagagaaaagctctagggtgtggagagtacgggtcttccgtgtgttcctccatgcaccaagcagagcacagtatcattccttaagctataaacgaaaacccttttgtataaatatttaaatagtaacagacacactgaactaggacaaaaatgacccactgggaaagaaagcctgaggtatccctttagttgccatgtttcttaaactgggttgcttacacccatgatcaacacagtccatcttcctacagcactgattttattcagagatttaggagaaatgttttgtcttagaatgaaaagggactggtagatattaatgaatacatgataggagtacaaaagaaaagactgaggaaatgataactttaccaagcagcttcaaggatcaaccacaccctcgatggtaagctttctctttttctagggcgacagatggaaaagtttccgaccaacgggaaggttacgatctggtaccagtccagcactgacaaatggagatatgagctcactcactcacagctgtgctcaccttcatgggaagagtcggccctctactccagtacgatgacacacaaaccctggctgcactggggattatgggatcggcttctctgaaactctcttactttttaaaaatcctgtagaaggatcaggtaacaggaaaatggccggtgaattctgtaaaaggaagtgagtagaactgttttgggttagaaaagaagcactttaggcagccaccatgggaagaaggcgggtcaccttctcactgaagataagagaccaagtgctgatggacagcaacaggcagtgtct

SEQ ID NO: 321014 - DNA, 474 bp, Homo Sapiens
gttggaacaagggtgggaccaaacactattgctaggtttcttggttccatcttatttttttctgaattttctgccactgtcttcagatgagctgaaaggaacttaagtgtttcataatgatgttcaggcaaatcgtgaattagtctttttaatgttttcagacgatctagaggatcttctttacgattggcttcaataaaatcagcatatttatcatttgtgaagagaggctcagggagttttctgaagaaggattttagtaaactgcttatcacattcaaatctcgccatttatcatcttgtatatcaatatcagccattcccttgttgagttcttcttgcatacttgagatggctgcattatttccaggaactctataaatacctgtatattcaagacctctttcttcaactaatttgcaacatatgtcgactattaatggaatataccgattagtatgagatggtggagca

SEQ ID NO: 321015 - DNA, 1510 bp, Homo Sapiens
tttgctcttctggactaagtgttgattcatcaacatcaaccaatagtttatcaaagtattgaatatcatcaggttttaaaaatggaagatttccagatggctggtcattaacacttttcatagttcgatcttcagtttgcatgtggaaaccagtcataccacccaaaggtgttggagtagctgtcagctttcgagctggagttcgaataggaacataaccagctggaggaggaagtaccttatatccttctgggaacatagcatctaattcctcatcagaaagtgggcgatttctctcatcaatttctctttcccaccgccaagcctgaagctgttcaggagtcatactcattatgtgacctggagtaggggtagccatgttcatggctggtgtgccaattggtgtctttccaggggtcagaactggagtgcttccacccatctgactagctggtgtttcatcccaccgtgattttcttttactggctccaggagtcggtgtttcaccaatagaatctccacctcgatctgttcgaggagtctcagcccatccacttccatgcccaggagtatctctcctctgttttgggggtttcaatccccatctgtttttaacgaagcaactggaagttgcgcctcccatggccctggtgtcgcatggccctggtgtatcacctcgtcccaggagtaagcagctcccgctggtgtgtggctaggtgtaggatcccatatttttgagcctggggttgcttccaggagtctcgcttcccctttgcacgacctggtgtctcatcccatcttaaggaaggagtatgcccaggggtctctgcctgatcccaacttgatagttttttgggagtggcaccaggagtctgatcagctgtttgatcccaacgccgttttcgttttgatggaggctgggacgctgctgctccattgacgacttttagttctccagctttagctttttctgctagctgttgcctaatttctcgttcttctttagtcaagtgttgttctcgcattacatccatgtaagtcctagcattcattttaggatcaggggtcttccctccatctgcaaaaggatcaagacgctctggggaaattatcatggtccgcctatgctttttgtattcatcttcccggtctgcaatctttggaggtctgtgctcagcaaatggatcatactgttctgttgactgtggtatatcattaagcaatgccacaggggcatgatatcctggcttcttctgaccaagcaaactcgtagatgatgaatagtcatcgtcatcatcttcaagttcagttgcagcaattgatgtcacgtatccagcaaatctgctgtcacttccaccataaatttcctggtcataataacctgtagaatcgaggcccactccttgagcttcatcaagagctgccttcttgccttgaatttctcgaatctgtgcttcaatatcttcgtgagtcttggcgatcttcgccattttgtccactcgaacacccc

SEQ ID NO: 321016 - DNA, 777 bp, Homo Sapiens
  misc_feature (652)..(652): n is a, c, g, or t
gttgctgttattatcccatagacttatttaataaaatgtctgctgatggagacaaaggcacgaaaggtacgtattccggattagcaacccaggaacccatcacttctgaagactctaaactgtgctgttattttgtttttatatgcattaaaatatttgttttaaactgctgtagatgtttgtgttcaaacaggttaaattgatcagcaaactcaataaaaagtaagatgtataattattaaagttttccatcaaaaaataatttaaatggattatgggaataacataatatttaggagcagggcaggataaatcagttggaacctgcttattttttatttatttgtactctttttcctgttgctgttcttttctgcaggagggaaaacccctgatcctaaaatgaatgctaggacttacatggatgtaatgcgagaacaacacttgactaaagaagaacgagaaattaggcaacagctagcagaaaaagctaaagctggagaactaaaagtcgtcaatggagcagcagcgtcccagcctccatcaaaacgaaaacggcgttgggatcaaacagctgatcagactcctggtgccactcccaaaaaactatcaagttgggatcaggcagaggtaatttctttttgttttttgntattactggtaaaaaatttttttctgttatggactgtattagtctgcttgggttgccatagcaagataccacagactgggtgccttaaacaacagacattgatttttttcgcagttctggaggct

SEQ ID NO: 321017 - DNA, 510 bp, Homo Sapiens
taggaatattctattttagaacttgatagttttgagtataactgtttgagaataaagaatattattttaacagtgattaaaattgtggttttactcactctttctttttaaagatactcctgggcatggaagtggatgggctgagactcctcgaacagatcgaggtggagattctattggtgaaacaccgactcctggagccagtaaaagaaaatcacggtgggatgaaacaccagctagtcagatgggtggaagcactccagttctgacccctggaaagacaccaattggcacaccagccatgaacatggctacccctactccaggtcacataatgagtatgactcctgaacagcttcaggcttggcggtgggaaagagaaattgatgagagaaatcgcccactttctgatgaggaattagatgctatgttcccagaaggatataaggtagtacatcaaatttgaatgaggtggtatttaggatatacatttattttaaatagtgaaaa

SEQ ID NO: 321018 - DNA, 711 bp, Homo Sapiens
  misc_feature (47)..(101): n is a, c, g, or t
  misc_feature (553)..(648): n is a, c, g, or t
  misc_feature (650)..(665): n is a, c, g, or t
gtcccagctagtagggatgctgaggtgggaagatcgcttgaacacannnnnnnnnnnnnnnnnnnnnnnnnnnnnnnnnnnnnnnnnnnnnnnnnnnnnnngagtgagactttgtctcataaaacccaaaaccaaatgttgtgtgctgtttggtattaacagcaaggaatcagataattaaagcagaagtacagacaaaaagaaaattttatggaattagttattggcttattttgaggaagaatggatcagaacagcaaggacacggataaatctaatacctgaaatgggatctcccaacagggaaactcgaggatttcaaacaatgggctagagtcttgttttcagagataaagaaggcatcacatatacagtagccaaccagaatcggagataaacaatgaaatagcaacaggccaattgagttcaactttgaaactcatgaaggagaattaaaatcaaatcagggaaacgaaaggtgaagtcaaaaaacgttgagaatagaagaactgaggagattgaaaaaatgggaggctgggcgcagtggcttatnnnnnnnnnnnnnnnnnnnnnnnnnnnnnnnnnnnnnnnnnnnnnnnnnnnnnnnnnnnnnnnnnnnnnnnnnnnnnnnnnnnnnnnnnnnnnnnntnnnnnnnnnnnnnnnnttagctgggtttggtggcaggcacctgtaatccgaactagcttggg

SEQ ID NO: 321019 - DNA, 676 bp, Homo Sapiens
ttttgtgggtctgtagaaatgaattttatttatttaattcagatttttgagaaatttacacaaaatttcagtgaagatgaaggcaacaaaatattttcaaattgaaacacccagcggtcagttattgtggatactgtcgagagcaaaaaccaccagtgccagtcagcatttggtaaaggaggttttccagctcgggtccaatcccttcattttcttggcaagtaagaggctgtctcccatttttcaggcgacccttttcatcatttctcatctcttctttcaatgcgccacaagaggggcagtgttttatcatattctccttgaattatgtaataccaacagtggaatgaggatgacttccagaagtagaaattgactattatgccaaagctgttcaccaaagttgataaaactctaggtttacaattgtaccccaaggtcatgggactggaccccatcccatagtaagtcatcagtttagcaatgatagagaaaataaccttctgaaaatttgtatagatcagaaataaagtattttttgtggaagactatttttaagtattgaaggtactatttcctttcttgaattcatattgcagatgtacggtgtggatttattggtttatctctgcaaaccttaaagtagaagattgcaagggccaggtgtggtggatca

SEQ ID NO: 321020 - DNA, 677 bp, Homo Sapiens
atttattacactcccaaatatataaaaatttgagtgcctttgcagttgggatggttcctaaaattgcgtatagaattaaggcacataattgtgtgtaaggtcctgaatctggctaaaatacagtggatgtatgttttttaattatgaggcataatttttcattatgtatagttagaatctacaaggcctcctttttgcacctgtagactagaatataactgttattggtgcctttgagtgttatctctcagtggctagaggtgctgtttcaagcacaatttagactagggttgaaccactcattgttcaaatcattggtgggctccaatgtaaaatatcactacatcagtccacaagcaacattaaggaaatctaaaggaaatggaatttgactttttagagtataatgatgttctagggcataatgaggaaaatttttaaaaaatagattataatgatacatattggtatcattaagacaacagatttgagcaaatacaattaaggtgtcttattttttgcatcaagtaattattgctgtggtctttctactccacaaaataattttttctttttgcagttgaaaattaactgcattattaactaattaataaaataaatcaagtggtataagggattagtttaccctcaagccgatgactccatggctactgata

SEQ ID NO: 321021 - DNA, 981 bp, Homo Sapiens
gatcacataggactgatcacttttggcaaaagcacagatgttgtcaataagtggacaattcttcagtgcagcttctactttcccaagagatacatactctcctgcttgtaacttcactagatctttcttacgatctataatctgtaaacatccatcgggatggaattctccaatatcaccagtgcaaaaccacctttgtccattttcatccacagaataatcttctgctgttttctcttcatttttaaaatatcccatggagatgttctgtccaccaattacgatttcacctctggggtttggcttgtcattaattgtataaccgccttcttgccagtcttttagcttaatttcacagcaaataagaggtgctccaactctgccagtagtatagtcagttacttcagtaactgtcccagcaccacatgattctgtcagtccataaccctggccaattgggcagcagaagcagacattcatgaatcggtgtgtctgaggagatagcggggcccctccagacagcatcatgcggacattccctcccagcagggccttgacctttttaaacagtaacagattgcaaagaggtgcatcatatccctttttgatctgttccaatttgtaatcataccctatcttgaacagagttttctgaatataattcatctcttggactttgctcataacattcttataaattctatccatgatttccggaacagcagccataagtgtgggcttcagtacagtacagtctcctttgcttccttttttaattttgctggactggtcagagagtgtaagcggagaagaatatccaatcctgcagccataggtaaagcaagatatctctgctgtcagttctagcacatgagccaaaggcaagtagccaatatatgtgtccttcggtcccagtccaggtattctttcacactggcctgtcattccagctatcaaattgctatgatgcatcatcactcc

SEQ ID NO: 321022 - DNA, 1015 bp, Homo Sapiens
  misc_feature (67)..(111): n is a, c, g, or t
  misc_feature (160)..(295): n is a, c, g, or t
gtggggggggttccccacccccttttttcttgccccggggttttctttaggaagaacacaaatagannnnnnnnnnnnnnnnnnnnnnnnnnnnnnnnnnnnnnnnnnnnnaagggttttataaaaaatttttgaggggcccggggggcccccacaaaannnnnnnnnnnnnnnnnnnnnnnnnnnnnnnnnnnnnnnnnnnnnnnnnnnnnnnnnnnnnnnnnnnnnnnnnnnnnnnnnnnnnnnnnnnnnnnnnnnnnnnnnnnnnnnnnnnnnnnnnnnnnnnnnnnnnnnncagatttaaaaaacatttattttaataagactattgcaaacacattaaaaaaactaaatagtaatattacaaaatctatatacttgcacatttagtatttgtcaatgtgccagaggttttcttcatgaaatttgacttctttgaagtgaaggcttttttccatcatctcttatagctctgactgaataagtcttaatgctttcttcatgttttctatcaataggggtaaatcccgaggctcatatgtgtacaatctgttagagtatcttccagctatgtcagctctaactgttaaagaagggtctacaaacatgattctaggcacatattgcccatcaggtgataaattcttatcagtggtttcatgcataaggtttagcatgatgaacttattctgagccatttcttgtatttcttcattttgggcaaatactttctttagtgcttgagagtattgacaatcctccaggtgatgaataaccattaatggcttcttacttttttgagcataaaagagaccttcttcataagtttgtacccaagtgatgtcatctccccatcctcttgagagtgtctgaggaggcctcttttccttttttattgcaatggcaaggttggaagaaactgtgacgagtaagaggcagagacccaaagctgagtgtagcatcatgtcttctagagactctctcagaagaagctgacttggccagtgctcttgtt

SEQ ID NO: 321023 - DNA, 873 bp, Homo Sapiens
tttttgtgtttgagggattcgacaggggcggggggtgcagggggcaaaagggttagcgggaatgggaatcactattaattgggcggggggttcccttttctccgaacggaggggcgggattatattctaaaaggaaaggtggggtttgagaaagggagttttttaggggggaccgaagtttgggctgcggccggcgggatttaagtaggacaaggaatagatggggttttaagtggcctttcaaaaattggtagtggtgggtgtttaaagggtatttaaggggggtgggggataagtgggagtttttgggcgaaatgggggttttccggccagcaggggggtacatccggggtaaatagggtatgaggcacgggtgacccccaacgcagttggttccccttacattggggggtaccggggagggggaagaacggtttctggcagtggaccgttggggtgaaggagctgcccagggtgtaccgcacggccctggctgccactttggtgcgttccacgatcacacatggtatctgtgctagctggataggactcttcccgtctgtcagtgcctgagtgaggtttaagatctggcctctcatcacagacatgtgattttcaaaagtggctttgtcaaatcctttgtcagtcttaaaaagttcatagagatcttcacataagtcttgtacaaagttcatgtcagaaatatatggtagaatcaagtttcttgtttcttcagaaaagggaacttttgcttgaggaagccaagcccagtgaaatggatatgctctccattcatcaggatgtttaaagggaaatgctagcccattatcaattgcagctattttaataagcaattgtttattatcaatcccc

SEQ ID NO: 321024 - DNA, 872 bp, Homo Sapiens
gcaagaataatgaaaatattctacctcaattttatggagcataagaaaattttttgaggaaggactttactctcaaagaaaaagaaaccttttaccccatttagttaatgaattcctttccaagactgcttttcaaagatttgttggaaaagcctatctagagtatgtcaacccacaaatatgcctgatctcattctgcatgagtgtcagaggaaatggggaagagtactacaggtgtgaaaatatatatatttccaaaatagtaacgtatctattataataaagctaaatatacctttctaaatccatggtttttatataaatactgccaataacatgatctattaaaagaatttttaaaggtcatggtatttttagaaatcaaatgaaccaatttgagccattataatcccctattcttaaacacagggagtttgtattttctcccgatattgtatttggtcttgaattcactggacaataatgatgtatgattcaagaaatgctctgatattctaaactctgttataagaacaaaaaccatagccaggggaccttattaacaattagccatatttgttcttctcttaccaaacaaaccaaatgctgtccaacatctcatgaactataatagtagccataagaggcttcacggtggcttggaaaattggatcctaaagttcttggtagcatatagttgatttcaaatcctctttttaaggacatgccaaaaaagaatggaaatctgccccttaaattaaaatgataccatatgtcttcacaggaagaaacattttagttgaagtaaactttgttctttcaaaggccagtaaaatagtggtccaaagactgtctgggaggccaagacatcc

SEQ ID NO: 321025 - DNA, 1238 bp, Homo Sapiens
  misc_feature (73)..(73): n is a, c, g, or t
  misc_feature (92)..(92): n is a, c, g, or t
  misc_feature (122)..(122): n is a, c, g, or t
  misc_feature (183)..(183): n is a, c, g, or t
ttggaggaacacctcccatgaatacaaaagaaagtcattaatatgaaatagggccaggttcggcaaaggtctnaaatttattaagccactgncgagaaatataaaactgaaggaggcttggntccattatgttcaataaatttgatatccttctcctctctttttgtgcctcttcgctgctcntcctatagaaaagaacgtaagcttctgcattttgtacagtagattctgaaacttcagtgacactctgatcatcaaattcataccagagattatttagattgtttcggcagtaggctatatagtgtccactacttgcagttccatgatggcaaatgactgacagaagatcatatgtcacaatttgagctggactatccttagcaagaaatggctgaagatccaagccttctagcggaaatgaaacatgggtactgattttggtggaaaacattagttcatgtctgaatcttttaaggtggatgcacaaaatctcaggaaagttttgtactttacaaaacttcactccatttctcaactttttgcatttttcacaactgtacatattgtcaccttttagttcatctctggcaaagaaggcagcaagacaatcttgcaaggttactactggaccccaaaaccagctagggacacatgagacaacaaacctcttcacatattccatgaaaaaagctatccacccttgtggagcatatgcttcgccacatgatcctgctttgactatagaagttggatgacttgatgaatgcagcttagcaaggtcttccttgccaggaattggcaaggacagatcttgaaaggtctcgagggttacagacaccctgtcacaagtcagacactgcactgaactaatgattgttccatcaaatatgtctgaaataacacttctgtatttcttgtgctgtttttttctctttggagatgcagactgagcttttttgtgtggtggtgccaatcctggccacaaattgcctgatttaggagggcttgccgataaacgtggattaacaccttcatttgatggaaggatctgtggtgtagacaggtcattcgaatggacatcagtgatatattctgaagctctgctgtgtatttgcactttgacagtttcctggttgtttaagtcgactgtttcagatatagagtctctatctttatcaaattcgccttcagaatttactttattaatcttattgcacatcttctctttttgccaa

SEQ ID NO: 321026 - DNA, 620 bp, Homo Sapiens
gcagtagataaactagtaaaggatgtaaacagattaaaacgagaaattgagaaaaggagaggagcacagattcaggcagcaagagagaagaacatccaaaaagaccctcaggagaacatttttctttgtcaggcattacggaccttttttccaaattctgaatttcttcattcatgtgttatgtctttaaaaaatagacatgtttctaaaagtagctgtaactacaaccaccatctcgatgtagtagacaatctgaccttaatggtagaacacactgacattcctgaagctagtccagctagtacaccacaaatcattaagcataaaaccttagacttagatgacagatggcaattcaagagatctcggttgttagatacacaagacaaacgatctaaagcagatactggtagtagtaaccaagataaagcatccaaaatgagcagcccagaaacagatgaagaaattgaaaagatgaagggttttggtgaatattcacggtctcctacattttgatccttttaaccttacaaggagatttttttatttggctgatgggtaaagccaaacatttctattgtttttactatgttgagctacttgcagtaagttcatttgtt

SEQ ID NO: 321027 - DNA, 480 bp, Homo Sapiens
tggtggagcggccgccgctccccctcgtgccgaattcggcacgaggggccgccgcctcttctccactttcagggtgatgttccctcacccagggctggaactcttcaggcaggatggtcaggaactgctccagcaccagcagctccaggatctgctccttcgtgtgcagctcgggcctcagccactcacagcagagcacccggagttggctgagagcctcccggggtcctgaagcctcatggtactggaagtgcctgaagcgctggtaaaaagtctcaaacgttggcgggttgtactcctgcatccaggtgcagtcttcttcttccaccttcactatgaaaaggtcttcctgctcctgggaagtctcagctggggggtctaagtctataacttctcgggattcggtcattatcattccaactcagagggaagtcttcgaggctggctgtgttacactcttgaccaccgcagtcggctcag

SEQ ID NO: 321028 - DNA, 335 bp, Homo Sapiens
  misc_feature (275)..(293): n is a, c, g, or t
agactgtaaaaagggctgctttagatcctgtagcttactccagttattagttattaacaaacacccaagtctcgaagatatttctaattaaaaaagaaggcatattcagagttctttttaaataaatgttgtttacttttataggcatctttaactttctggattttggtatgccatttaaaaatacttccagatacacatggaaattagtaatactgcagccgtatccttgcaaacacatctgtcagtgtcaaaggtttcaaggttttttcttnnnnnnnnnnnnnnnnnnngcaaacacctatactgcccaaatgggaggattagatacatgg

SEQ ID NO: 321029 - DNA, 989 bp, Homo Sapiens
gattagggagggtggcgccttagagggtatcaaccccttttaaaagaggttttcccaaagggggaggaaaagggaaaattctcgcatttttcacgtcccaaaactggcctccccggggaaaaaggggggggcgcaatccggaatttaagtgtgaaggtgattttttccaccacaggggggggccacaattaaggccccttttcaaaaaaggagggtgtgtaaaaaggcaatggttcacgggagaccccctttttaagtagtggtggctttcttggggagggaattcccaaagagagggttccgccattcttttttggcgataagcttttgggggccccaggggagggttcccccaaattacccagtcggttagccccaaaaccgggaagttaaggtaaaatttccccaattaggggaagaggttaaattttgtgggattcaccatgggcccaccaggcccaaaagtgccccgaggcagagggagggctggtttgggggcttcctcccggaaagtggaaaggctaatccagagctaatttttggaagatcacaaggagtttggggaatgggctgaaggagaaagcatggaagcagggagtccagagaaggtgactatgtgcctaagcagtaagtaaagagagccccatccagaagtaccaatgtgggaagagaaaagaggttaaggcaaaacacattaggaactgtgttaggcttcaggggattagagattaggaaggaaggactgatgaagctaaagaaaaatcaaagatgaaaagaacttagtactaggtacagtattcttctgcacacaatgatgttccgtgatcaaggctctaactctggaaagcatgaagaaatacagtccaaaggacagctctgcagccttagcttcagagctaggaggacttgacccagttagagccatggttccactagactctatctctaaaaagcaggaaatgggtggtttgaggcttcttccttctccc

SEQ ID NO: 321030 - DNA, 1428 bp, Homo Sapiens
  misc_feature (246)..(334): n is a, c, g, or t
  misc_feature (1249)..(1259): n is a, c, g, or t
  misc_feature (1349)..(1349): n is a, c, g, or t
gatatcgtcgacccacgcgtccggcttcagactcaaaacccggcagctcggaggctgccccctcttccaaggagacccccgcaggccacggaagcgcctagttccacacccaaggcccagggccccgcagcctctgcagaagagcccaagccggtggaggccccggcagctaattccgaccaaaccgtaaccgtgaaagagtgacaaggacagcctataggaaaaacgaataccacttaaaacaannnnnnnnnnnnnnnnnnnnnnnnnnnnnnnnnnnnnnnnnnnnnnnnnnnnnnnnnnnnnnnnnnnnnnnnnnnnnnnnnnnnnnnnnctatactaacgttgtttcaaattggaagtaatgatatgtattgcccaaggaaaaatacaggatgttgtcccatcaagggagggagggggtgggagaatccaaatagtatttttgtggggaaatatctaatataccttcagtcaactttaccaagaagtcctggatttccaagatccgcgtctgaaagtgcagtacatcgtttgtacctgaaactgccgccacatgcactcctccaccgctgagagttgaatagcttttcttctgcaatgggagttgggagtgatgcgtttgattctgcccacagggcctgtgccaaggcaatcagatctttatgagagcagtattttctgtgttttctttttaatttacagcctttcttattttgatatttttttaatgttgtggatgaatgccagctttcagacagagcccacttagcttgtccacatggatctcaatggcaatcctccatttttcctctccagatatttttggggagtgacaaacatttctctcatccctacttaaccctacctagcattcttctccatgacggagtttaatgccgtgcccccccggggtgggagtggcaccatgcgacgctcctggctttatttgggtccaggggggcgaaacccggcttcctatccccccctatacagcgccaaccccaacaactatggcgacaatcgcgttgttttccgggggccaggtcccatttcgggggcccgccctcttatcgaagaggggaaagcgcccactttttttaattaaaacgacagagcccatatgatacccgcaatcgctggggggagcaaaccacgcgcggggggagccccccacgggcctataccggcccaaaaaagtgggggaaaggactattgggcgcaccacaactacacatcctaggccgannnnnnnnnnngcgcctccgagaggaaatacccccggacgcacaccctcctcgccaccgcgatccgggcgtgcttccggaaaaaagtttgtttccccgcgncgggatgtggaaaccgagagaactgccgcccggcaagcgtcgcgaccagacaccacgactgcaggggttttctcttccg

SEQ ID NO: 321031 - DNA, 704 bp, Homo Sapiens
aattatttttaagtggtttgcatagactttgtttttagactttgtttaacttttccccaaaaagttgtactcagttgttcaaaggctaagacaacgttgttcgtcttcattttcacatagctcacgcaaggaaacactgatagatttaatggtgagtgcaaaatctttcaacaaataataagcatctccttcattcatcctgttatcctggactaatcctatcaaggaaccatgtttgtagaaatccagtgcataggcattaagcgacattttccttcctcggttatcaaatttctgtgacaacagcactggagcctgagagcgattgacaccgattgtgcctagagtaacatggtttggagtttctagtcgaagcaaatcatcatcaaagttcccagacagacaaacaaatggtgaaattgctactcttccttccttgcagctcatcaaatgagatacgagttgagagtcttcacattctttacctgtgaatttgatttttgacaatgggagttgatattcctgattcatatcagccagtttggaaacaattcgtaggaaagtggtaaagtcctccataattttcatgttatattcatctaaagcatcactaaaatcctcagggagatcatcaaggaacacctttgattgataaaactcgaagtgtgcatcttggaactttggtggaaaatatcttcttccaa

SEQ ID NO: 321032 - DNA, 874 bp, Homo Sapiens
ttgtcacgcttattttcacatagttcactcaaggagtcactgatagcctgaatgttgaatgcaaaatctttcaaacactttaaaagctgtcccaattttactttgccaagggactcatttcacgcttattttcacatagttcactcaaggagtcactcgatagcctgaatgttgaatgcaaaatctttcaaacactttaaaagctgttccacacgcatcccatttttttggtctaatcttgtcaagcagttgtgtttatagaaattgagcacatatgcatttagtggcattctccttcctcggttatctaatttccatggccacagcagaggagcctgagtgccactaacaccgactgtgcgcaggatgacctggttgatagtctctggtcgaagcaaatcattatctgtgttccccgaaagacaaacaaatggtgaaatggctactcttcctttcttgcagctcatcaagtgagacacgagttgggagtcttcacattctttacctgtgaatttgattcttgacaaagggagttgatgctcttttttcatgttcaccgacttggaagcaatcagcaggaaggaggcaaaatccttcattactgccaggttatactcatataaagcagctttaaaatcctccgggagttcggcaaggatcacctttgactgagaaaaacttaaatcagcattttggaattttgctggaatatattttcttccaaacaaatttgccaatactaacacgagcttttcctcaattccttggggaaaaagtgtctttgactgagaaaaacttaaattagcattttggaattttgctggaatatattttcttccaaacaaatttgccaatactaacacgagcttttcca

SEQ ID NO: 321033 - DNA, 483 bp, Homo Sapiens
aactctttgctgaagtccacattttggggttcggtttcttttagttgaacaatttctgttgcaggagtttcatggtctggctttacatcattttctgtaatggcagtgtccagttccttatcatccctccttcgagtctgagtagtcctaaatggattatcccttaaatttgaagggctttgtaagggtgactggtctgaagcaccgataacatttaacccttttttcttctccctcaggcacgcttgttgatgtcttcttattctttccatttgctcttccacagtcatccttggtcgagtactttcagccaaacagagctgttccactgcacttcttggtctttccgttcttagatccatcatcttcttagttttcctcaaggttacataggaagctattgtcgaagattcgggtgttggtgattttgctcttggagggactactccaacaggaaagtgggaacctttaacaactgaagtt

SEQ ID NO: 321034 - DNA, 728 bp, Homo Sapiens
gttcttactggatcttgtcctccattaacgacaacatcaggatgaatcgacattcccaagagacttggacatctatttcatcccttttctccaagggtaaatccatgaacaatcactgtcttataaggtgctctcgttcctgtgcctgccacaccttgttaataaggatgactgacacctaacccccgagctggtcttttccttccaagtaacaaatctgctctttggtacaggacctggaaagacacatacagacccatgaagttccgctatcacaccagatgtccaaaatatcctgaccatggcacatattccaaggcatacagggccaccaacctcagataacgacttcttttggaagaaggtatgcttcagggggaagagtccaccagatatcactgccgtgttgttccactagtttaacaatatgctcagtggtttggctgattgatcaagtattcatccttggtcttatgatgaaacacaggaattggaacaccccaactctttgccttgatatacaccaatatggccgcctgtccatcatttcaaccatgccattcagtgctgatccaggaataaatttcaccttttttaacaattccttggctgcagtcttaatatccgtgatgtttataaaccactgcttgctggcacgaataaccacaggtttcttggtcctcccggacgcgtgggtcgacgatatcccgagattccggaccggtaca

SEQ ID NO: 321035 - DNA, 227 bp, Homo Sapiens
agctctgattctgttgacttgagtttatctggagcaagtcgcagtttagactgcaaatcactgatgacttcttgtaactcagcctctgtctgaaaaactctctgacaaacggggcaacatgactggttttcgtctgttagctgagtaatgaactgggagtaaactgctgtggctccagccagcatggctcgctgttttgatgatttttcaatttcctctttaagcct

SEQ ID NO: 321036 - DNA, 1486 bp, Homo Sapiens
  misc_feature (1361)..(1370): n is a, c, g, or t
aagagtcagagtccgaggcaaaatcagtcaaggtgaaaattaagctcaataaaaaagatgacaaaggccgggacaaagggaaaggcaagaaaaggccaaatcgaggaaaagccaaacctgtagtgagcgattttgacagcgatgaggagcaggatgaacgtgaacagtcagaaggaagtgggacggatgatgagtgatcagtatggacctttttccttggtagaactgaattccttcctcccctgtctcatttctacccagtgagttcatttgtcatataggcactgggttgtttctatatcatcatcgtctataaactagctttaggatagtgccagacaaacatatgatatcatggtgtaaaaaacacacacatacacaaatatttgtaacatattgtgaccaaatgggcctcaaagattcagattgaaacaaacaaaaagcttttgatggaaaatatgtgggtggatagtatatttctatgggtgggtctaatttggtaacggtttgattgtgcctggttttatcacctgttcagatgagaagatttttgtcttttgtagcactgataaccaggagaagccattaaaagccactggttattttatttttcatcaggcaattttcgaggtttttatttgttcggtattgtttttttacactgtggtacatataagcaactttaataggtgataaatgtacagtagttagatttcacctgcatatacatttttccattttatgctctatgatctgaacaaaagctttttgaattgtataagatttatgtctactgtaaacattgcttaatttttttgctcttgatttaaaaaaaagttttgttgaaagcgctattgaatattgcaatctatatagtgtattggatggcttcttttgtcaccctgatctcctatgttaccaatgtgtatcgtctccttctccctaaagtgtacttaatctttgctttctttgcacaatgtctttggttgcaagtcataagcctgaggcaaataaaattccagtaatttcgaagaatgtggtgttggtgctttcctaataaagaaataatttagcttgacccccgagcggcgaggcggcgcggacgagcccggcgaacacgctccgcgcgcccctaaaatgagaccctgcgaggcccgataacacccccccttcttccaagtcccggctgaacgcacgaaagagcggcgtgggggcccgccctccccccctagaaaaacttttcaaaaacccttttttttgggcgcggggcgccccgtgagggagcggaccggggggtaaaacgttctttccccacagaaaaacccggggctaagaaaaaaggcgttgggaactcccccacnnnnnnnnnnccccccgggggccacccaccgcgccttttcaaccacaactccgaggggggggcgtcccagggtcccaccagggcgatattatacaccgggcgggcccccacgcgagcccctcaaag

SEQ ID NO: 321037 - DNA, 963 bp, Homo Sapiens
  misc_feature (72)..(72): n is a, c, g, or t
  misc_feature (132)..(132): n is a, c, g, or t
ttcctcttccttgttgggggtcttttatcatcccccctaaatcccatcttcaaaatgggcctctttagagcntgaagaccccagccaccttcctttatccaggtactgaccaggaatacttctgaaaaggcnttactagatggaagggggtccatctccagccactttgtaaatctggccaaaggctgatagtctgagtgcatgctgtgcactgtgggtaatatcttctttttgctggatggtcatatagctcagagcatctgttgggtctcgctcacaaggatcatgaagaccaggacccccaggaagtagtattccagatgccaaacactccattactcgtctcaaggcctccccagcgcccaaaggtctattacaagtacctatagacttttcacatataagttctagtggccatcctttcaatggtgcccatgtggggactctgttgcacaaatcacgcagaatgcggaggacaattacacatgattttaatccatttgcccttgcctgaaaccatttggcatgtcgaagagacgccaaggcgttcaggcatttctgcctgtccaataagtccggaggatctttcatcgaaacattttctccatccttcttctccaattcgtccctaattagaggtgaggtaagtatcaccttcaaagttagcgtgggctcttttgtattccgaattataatagatgcctcatttacacattgttccacttgatatttctcttctgtgagtttctgaatctgaataggaagattatctttgactgtatttaacagggtctctgtgggtttgtctttgcacattaaaaccagctccaagtccatatcatctttaatcagcaagccttttgcaaccaggccaatcctcattacaccacacaatgtccgaccaccttgatccttggaatagttttctccggcctcatctttcttcacttctgtctcaccccc

SEQ ID NO: 321038 - DNA, 751 bp, Homo Sapiens
tataatttggggggttcaataggatccggaaaaaaaattcatttaatttaaattttcatatgtaaaggaatattacatctttccaggtttcccatagaaggaaatccattttggtatgtatgggtatatccccagagagggagaaaggccaaagtagcgcataaataaaaatccatccattttactacctattacagtatttactcttctacacacttctcagttcatgtatatacgggaggtttcttacgtcctgcatggatgcctgaggttccaccactaaggagtcttgtctctaagtgaagaagtcattaaagctgtttatgtaaagcctgtgtcttggagacagggtgttatctctttatcagtcacatgcattgggtatgaaattgccgattggattggctggcgtgcctgtcactccgcaccgccctgggaccagacagctttggtgaccgagctggagaggggctccagagctggactgaccctgagaaggctccacctcagagcagcacagggaggagatgaggccccactggtttccctggggccaggcctcatgtcaaattgcagaaacagcctgaggacagagccatggagagctgaggagagggcaggcttgtccattccaacttccatctctgcctctgacccacatctgtggaatcagggcggtgaaccagaagcctctggagtttctcagtgctctgatcccgtgaattcctcctctgtccccgtgatttccccc

SEQ ID NO: 321039 - DNA, 705 bp, Homo Sapiens
  misc_feature (59)..(71): n is a, c, g, or t
ccctatccaaagaatgaattcctcaccttaaacagaactcaggagaaataaattgatgnnnnnnnnnnnnnccagtactaacctaagacaacacaaattcacatatacaacttaatatattaaagaccttctgtactggaaggcaggtggctgtagcatttgataagctaattctaatattacaatgccagttgtggtagggattggattcgtgacacaactggacaggacctatgctgtaaagtttacatcagaatttaaatttccatttacttaggtatatgttcaccatgactgttacttattaaggtaaagaacaatgtttaacaatgcaatacctgatgctctaattgtttttgtcgtcgtctgtctcgttcctcaatctgagctgggtccaagagagcagtcatagaacggagaaagtttgttttcttactgtttgccataaccacatccttaataggttttgctatatgctcctcctctgaaggttcaacctggcttccggttgtaggtgtacaaacactgctgacatcagccagctcctgagtgtcaggagagacacagaagtactcaggttgtttgtgtgttgaccgagagaacagctgagattgagaaccaggataactctttaatgaatcaaagtgcattgcccatctgtcatgttcctcaccctttgaatatataattttttcctctattttt

SEQ ID NO: 321040 - DNA, 604 bp, Homo Sapiens
  misc_feature (157)..(197): n is a, c, g, or t
atttggggggggaattcccaagccctttaggtccaggcccggggattttccttgggaaaaccagttaaggcccatgttccctttccctacgtgggccccgcgcgcccaaaagaaaaggttttgaaaagcttcttgagggcccgaggccgcccgccannnnnnnnnnnnnnnnnnnnnnnnnnnnnnnnnnnnnnnnnattaacaagcaacataatcaaaaacaaaaacacaacaaccttaaagctgaaacagcaataagtcaaactgctgccgcagttcatggatgtacctggggtacatgctccctcattgcgaggcaggacgtaggcacatgactgtgcatttaggcatatatgtgaccaagaagaaggagagaaatggaaaacactggagaacagaaagtatcaggaacttttcatcaggcaatcccaaagcgctctgctcttttcctcttctttgcctctgtatcctctgtggttccagttccagctgaacttgtgacaatcccaaatcgctccttcctctttttcagtttctcatcatcttcagactttctggagattgaagagacattcaaaccaaatctttgagctctttccttccc

SEQ ID NO: 321041 - DNA, 824 bp, Homo Sapiens
aaagtcaaactgctgccgcagttccatggatgtacctggggtacatgctccctcattgcgaggcaggacgtaggcacatgactgtgcatttaggcatatatgtgcccaagaagaagggagagaaatggaaacccctggagaccagaaagtatcaggaacttttcatcaggcaatcccaaagcgctctgctcttttcctcttctttgcctctgtatcctctgtggttccagttccagctgaacttgtgacaatcccaaatcgctccttcctctttttcagtttctcatcatcttcagactttctggagattgaagagacattcaaaccaaatctttgagctctttccttcagcttatccaagttaaccataggtttgttatcagatgacagaccttttgttggaactgaagaaatcccaaacctagctgcccgagcagctttcttactctccaagctcacaggtacattgaatcgttcagccctcttctgcattctctcagtctgtggtatttcagatgtaattttcaccactttcttctctgctgccacatcaacagttttttcagggggttcttcctctttgacagggagctcaatgggctttgtttcttcttcctctgtttcatctcccagtacatcttcttcatttgcctcctcttcagcatgttcttcaagatatgcctggagtctgtggataagatcttgctttattcccttggtctccaaaccacgagcaagacattcttgctttagttcggcaagctttagcttatggagctccaccgtctcggtcgccatcttgttacccctcactccactagccc

SEQ ID NO: 321042 - DNA, 464 bp, Homo Sapiens
tagtgtaattatcatttattttgtgtatttgtcacattgtgtgcattgacagcctttgttaagggtgtctgaggagtatggagctgacaggggcattggaatgccaggaaagaacttcttcaactgagatcaaggcttcctggagggaaccactgcaaaaaggccatcaggcagttttcaagttatgtgacagagggcaaagacggccatagggtgctctgagttttgggatggtcacatgacacaatccagcacttgaacctgggggtacatgctccctcattgcgaggcaggacgtaggcacatgactgtgcatttaggcatatatgtgaccaagaagaaggagagaaatggaaaacactggagaacagaaagtatcaggaacttttcatcaggcaatcccaaagcgctctgctcttttcctcttctttgcctctgtatcctctgtggttccagttccagct

SEQ ID NO: 321043 - DNA, 268 bp, Homo Sapiens
aaagaagccatgctagctttttgtagcgctaaatactcttttttcaaatccatccattcgctctttgatagcactcttaatggtataacttcttctcccattttatgtctctctttatgttttttcttatgtttcctttttgttttcaagagagagctatcttttagatctccagtatccttttcctcttcagtagagatttctatatctctattttccttggaagcttctgatgcttccttaatgatgtctttctgaataattttcc

SEQ ID NO: 321044 - DNA, 439 bp, Homo Sapiens
atttagaacccaaactccatgaaaaaggcatgttcaaccaggagacacatctgccgggcttaaactcccatacccagcaaacattgctgagaaattgtttattaagcagatgtagtttcttaagacaatccagttactgaaaaatagaaaagcatttttcccttcccttatttgcaattgtgtttgtccagacagtcattcaaagagatattgctcttgtgattatagctattgcaatttagaagacaaaggattcagtatttaaaactcttatttttaagaacagttataaaagtattgaaatttaaaaagtagtaacatgtaaacattgatacagagactgctttcctatacacatagcagtcgaagacaatatttgagttaaaaacacagtttgtgctttttcccaacaatacattggaaattagctgtttctgtt

SEQ ID NO: 321045 - DNA, 428 bp, Homo Sapiens
  misc_feature (16)..(16): n is a, c, g, or t
  misc_feature (88)..(88): n is a, c, g, or t
  misc_feature (271)..(271): n is a, c, g, or t
  misc_feature (278)..(278): n is a, c, g, or t
ttgccctgaataattntccccctggtttgaataagtgctcctctggctgtggaaagaccatctttggaacgttcctcctaacatgaantccctacaaatgtttccactagatgtaggcagatcttccttccttcctcctacgtctggtgtggctaataacaagttgaaagtttcctccttctttgaaggtactttaaaccactttctctcatctttatccttatctttattgctgttagcgctggttcgaggtttactccctgttttgttnctttgtntgcagctgcagcagctgctttgactaaagctatccaatcctcacttcccatagactggttacacgatccagctgggtcgataggacaacaccagcttagtggatgctgggatttcacctgccccttagcatcctcgggcatggctttaat

SEQ ID NO: 321046 - DNA, 473 bp, Homo Sapiens
  misc_feature (419)..(419): n is a, c, g, or t
  misc_feature (455)..(455): n is a, c, g, or t
taaacataattagttttttaaaaaatttaattttcttgtggcacataacaatgaactctggtgtcaccagcctattgtataattaacttctcgtcttttgttccttatgaatttacatatttaattatctttccatttaatttcccatggttttgctacgttgactaaactctgtaatgagaaagtcttttaatttaaaagactttgcaggtcatgtgtaaccagctttggaaatcattttagggattactgagtgctgtttcataatgctgtatatttttcctgccggggatttgggagtacctagggttatttgtccaccaggaacaatgggctgtaaagggaggaaaattgaggcagtgggtcaggaaggctgctgaggaaggatgccgggtaaaacagggttacataaaaaacanggctgggtttggaaataacccatggcggtttttgtncagggggttttgccttag

SEQ ID NO: 321047 - DNA, 759 bp, Homo Sapiens
agttttttaaaaaatttaattttcttgtggcacataacaatgaactctggtgtcaccagcctattgtataattaacttctcgtcttttgttccttatgaatttacatatttaattatctttccatttaatttcccatggttttgctacgttgactaaactctgtaatgagaaagtcttttaatttaatagactttgcaggtcatgtgtaaccagctttggaaatcattttaggattactgagtgctgtttcataatgctgtatatttttcctgccaggatttggagtacctaggttatttgtccaccagaacaatggctgtaaaggagaaaattgagcagtggtcagaagctgctgagaagatgcggtaaaacaggttacataaaaaacaatgctggtttgaaataacctatgcgcttttgtcaagggattttgcattagtgcatttagtccaagtcagggccaattcagaggatgtggctgaaggcaccgttttggccttttttgtttcttttgagagctctgcatacattcccacttttcctgtcaaagtggacaaaatgaagagtctcatgagtggaggggcattctgatcccaagagaccacccatctgtggagtggctacacagccagaatgtggatgtgaaccaactcaacgtgctccccagagactgaagaagcggcgttttagagctttggtttcagtctcttggaggagattttcagaaatggccaatttatgtgcaaaggtgacttttc

SEQ ID NO: 321048 - DNA, 1357 bp, Homo Sapiens
  misc_feature (1212)..(1212): n is a, c, g, or t
aacagatcaagggctatgatttatgtcattttatagcagcagtatctattaatacatgccttttcctcccatccacctcccccgcacacacacaaagatgacctgggacatgatttttttattcccacattttcttggagcacaaacaactttgttgaggattttggaaggaaagcacaactgggtcctttattcatttctgggacagaaagagggtcagtggacttttgtgggcctccagcttctctcagagtctccccctctgcagcccatcctgggagtgtattaactggagggaagatgggtcttgcagtacatttgttttgcccagccatcactcttttttgtgaggagcctaaatacattcttcctggggtccagagtccccattcaaggcagtcaagttaagacactaacttggccctttcctgatggaaatatttcctccatagcagaagttgtgttctgacaagactgagagagttacatgttggggaaaaaaagaagcatttacttagtagaactggaccaggagcattaagttctgaaattttggatcatctctgaaatgaagcaggtgtagcctgccctctcatcaatccgtctgggtgccagaactcaaggttcagtggacacatccccctgttagagaccctcatgggctaggacttttcatctaggatagattcaagacctttacctcagaattatgtaaactgtgattgtgttttagaaaaattattatttgctaaaaccatttaagtctttgtatatgtgtaaatgatcacaaaaatgtattttataaaatgttctgtacaataaagttacacctcaaagtgtactcttggaatggattctttcctgtaaagtcttatctgcgactctgtctcgggaatgttttgtctgttgccgtcagccgaactttgttatggagggagcagcctcacacaagcagaaacactcctgtggatgggattgtagcctgtattgtttattttagtcaatagacccctctccttaaaaaatggggtttaggtcttccctggttgccatttcatggggcctgggggggtttccctagccagaggataaggggagcccccctttttgtgggacatacccaattgaccctcctttgggcccccgcttttaaatacctttcgttgtttggggaaaacatttaaaatggctggcgcaaaaatttgggggtangaggcttctcaaataacccgcaaagaacccgcaaaaggaaaatgtggttttttcccccagattaccttatgggctctttggccgcgggaaacgccaagcccccccttgggggtggaaactaacgggcgtgggagatatataagga

SEQ ID NO: 321049 - DNA, 1251 bp, Homo Sapiens
taaggcagtttatacattatatcagcagaggggccttatccttccagttcggactttgttattgaagtttttcagtaaaatctatcagacagaagaactgagatcttgtagattcagatatcgtagtaaagtgttatcccgttggctggctggcttaccattgcaacttgctcatcttggctcccgaaatcctgagctctctacacagcttatcgatatcattcataccgctgcagcacgagcaaataaagaattactaaaaagtttacaagctactgccctccgaatttatgatccacaagaaggtgctgtggtggttctccctgcagactctcagcagcgtttggttcagcttgtatatttcctacccagtctgccggctgatttgctttctcggttaagtcgttgctgtattatgggaagactcagttcaagtttggctgccatgcttatcgggatactgcacatgagatcatcattttctgggtggaagtattcagctaaagactggttgatgagtgatgtagactatttcagcttcttattttccacacttacagggttttcgaaagaggagttgacttggcttcagagccttcgaggagttcctcatgtcatccagacacagctttcccctgtgcttctctaccttacagatttggatcaatttttacaccactgggatgtaacagaggcagtttttcacagtttattggttattcctgcccgaagtcagaactttgacatcttgcaaagtgccatcagtaagcatttggttgggttgactgtaattcctgacagcacggctggctgtggtttttggtgttatctgtaagctcctggatcatacttgtgtagttagtgagactctactgccatttctggcttcttgttgctacagtcttctttattttctgctcactatagagaaaggggaagcagaacatctaagaaagagggacaagctgtggggggtctgtgtctccatcctggctctcttgcctcgagtcctcaggttgatgctgcagagcctgcgggtgaacagagttgggcctgaggagctgcctgttgtgggccagctgcttcgactgctgcttcagcatgcacccctcaggactcatatgttgaccaatgcgatcttggtgcagcagatcatcaagaatatcacgacattgaagagtggaagtgttcaggaacagtggctcacagacttacattactgctttaacgtgtatatcactgggcatcccc

SEQ ID NO: 321050 - DNA, 955 bp, Homo Sapiens
gaaatccttattttttaaaaaatcagataggcataaatagttaaatcactttcattctccccaaacctgtagttacagaaaaagttttatgctagaggtgggatgccaagttttcactatccatgaagcagcgctgcatgtcactaggtaacacagatccatccagatggtgtttacatttgatttatttgggatcttattgacatcaggtatacttggaagacatttcttttattcttcagtgtatgaatttaaagctattttttgtaaatatttctaatcagcgataatttctacctatgttctcaaccaacttagccagtttgtttttcagagcctgtagtcttattggaaatctattttatcagtgtgctttattgagtgtggattttgcatactttcaaaacattaaccaccaaataccgcaaagtgcacctatatctcccattaacttatatcccaagtcccttttttcatgtacccttaccacccccagaatatatcactagacttttagaaaaatgctgaaaataactttgctctccaaattggtattgttattactatggaataaaatcttcacatcggtacccttcactccttagcccaacattacttaccaaccgccctattctcttctttgtgcgccatgggcgaacatgggctctccaaaccccattatttcactaccgccttccgaagagcgaaaatatggctctttccaacatcaactggtggcaactggaacggagagtgtaaggcctttaagttatgatcccagaattgacacgtaaacttccaaaaccccttcaatgttacctcttcccgcaacgcatacaatcgcttcacctttcctcccctcctcgacgagaaacgactatattcgtccgacttgatcccatgactttcgttacccgaaaatcactggccctcgtcggagttccacccatctaag

SEQ ID NO: 321051 - DNA, 884 bp, Homo Sapiens
tgcaacatacaaaaattttaattatttttgcaaaaagaaagccaactattcgccttggaaataataatgaagtacaaatagctctgactctgcatttggacaaggatgaaccatgatagatatttagaaagggttttaaatcatgtgtatgttggctacagagtaaaaggaacagagaagactcaagctattgtcaggtgtgtatgtgtcatcagcacacactgggggaggagagtcctcactaagtgccacaacccctgatagctgtcagtctctcatgaagcaccatgatctggcatggactcccaaatgccacttgagagaaggtcttcacagcagactgtgcatctgtgtcacaaaacacggctgcaatgaacgacagtgttcattttttgcccttccaaatgtattcttgtgtatgatcgaagcaaagaaagttgaggatggagaacacgagccttcaccatcagttctgctgctgaagccttctccaacagccctaaggtccgagagcctgatgaacttctgcactgatccgtgtatcattctggaacttggtggccagatcccaaacaaatgagaagagttactattccaaggctgcttgcaacacacaaacactggcctctttacacggagcaggaacaaaaatttagatcctatttgacctaagtgtggttaactattcactctgtatccggctggaagataatggagcaaacaagaattgctgagtacaaaggcacagcagacatgggaggcggggggcaagaaagggtgtggtagaaagccctttggttccctgggacagggagggggaagagtctcatgagcagtagcagcagaggaaacactttccacaaggaagaaggacaaggtctgtc

SEQ ID NO: 321052 - DNA, 763 bp, Homo Sapiens
  misc_feature (247)..(271): n is a, c, g, or t
  misc_feature (670)..(697): n is a, c, g, or t
tcttaactttttattgacattggcaaattaaaatagaataaattaacaagtattttttcaaaaaaatgttttgtacaaaaatactgtcaaaatttcctaaaaagctttcaacacagtagtatcttttcatgtactgaatataactattagcacagtgtcaaaaatgttgaagacagaaacaaaataaaaatctgtgaaatgtttgccactgacgacattccacaccctattatcatctgtacatatnnnnnnnnnnnnnnnnnnnnnnnnnacagccaacttgaaagtgaacagtatgactttcctgatccagaacagtttggcccacatctgtttaatcttccagtttagcatattttaaaaattagtctgtactcaaatgcatagttaaaaaaatgaagcgagatggcagtttgtgcagtaatatctgcccttcgaagttcatgcaaccaactaatgcaatttttcctttcactcgtaaatctgaatgcagttcagtcatttgaaaccatctacaaaatccacaagattaagcagtttgccaagattaatatctaacagttgagcactggagaaagtgagggaaaggagtaaaaacaaacaacgaaaaagaccaagttagctagatatttcaactacataagggaggtgggtgaatgtcaaggctacnnnnnnnnnnnnnnnnnnnnnnnnnnnngtggcagcaattttttttaaaaccaatttgtacaagtttatagtttactttgtttccaagttctca

SEQ ID NO: 321053 - DNA, 327 bp, Homo Sapiens
  misc_feature (250)..(274): n is a, c, g, or t
atttcttaactttttattgacattggcaaattaaaatagaataaattaacaagtattttttcaaaaaaatgttttgtacaaaaatactgtcaaaatttcctaaaaagctttcaacacagtagtatcttttcatgtactgaatataactattagcacagtgtcaaaaatgttgaagacagaaacaaaataaaaatctgtgaaatgtttgccactgacgacattccacaccctattatcatctgtacatatnnnnnnnnnnnnnnnnnnnnnnnnnacagccaacttgaaagtgaacagtatgactttcctgatccagaacagtttggc

SEQ ID NO: 321054 - DNA, 1297 bp, Homo Sapiens
  misc_feature (15)..(15): n is a, c, g, or t
  misc_feature (33)..(33): n is a, c, g, or t
  misc_feature (74)..(74): n is a, c, g, or t
tttattacatctctntcaaggaatgtattcttncgatgagcttggtttaaggcttttcaccacatccaaatctnctttctaggggtcctcttcgatatgaattttataatgattagtaaagggatgacctatggtgtgaaaagtttccccacatgtattacattcatagggtttctctccagtatgaattctctgatgtgcaatacgtgatgagctttgtctaaaagtttttccacatgtattacatttaaagggtttttctcctgtatgaatccttcgatgctgaataagagctgaactttggccaaaagatatcccacattcctcacatcgatatggtttctctccagtatgaattctctggtgattactaagtgatgagttacacctgaatgttttcccacactcgttacatttatagggtctttctccagtatgcattctctgatgttgaatgagagctgaactctgtctgaaggcttttccacatactttacatttacatggtttttctccagtatgaattcgctcgtgaataataagtgttgagtgggagcttaaggctttaccacattcattacaattataaaacttctctccagtatgaatgattcggtgtctattaagtcgtgaaatagaagtaaagcctttcccacattcattgcatctatagggcttttctccggtgtgaattctttcatgttgaataagagaggcactctggctgaaggctctcccacattcactacatttaaaaggcttctctccagtgtgaattctctgatgataacgaagggatgagctagacttaaaggtgttgccacattcattacataagtaggacttctttctagaatgaattctttgacatccagaaagggatgtgctgcaactagatgccttcctacccggattatacttacaagggttttcttcagcatgaattttttgatgtataaaaaggcctgaccttcggctgaaggatttaccacattctttacatctgtaggatttctccacagtatgggttcttagatgtttataaagggatgtactgagagtaaaggctttcccacattctttacatatgtagggtttctctccagtatgtgttatttgatgttgaataagagctgaactttggctaaaggcttttgaacattctttacacttaaatagtttctctccactatggtttttctcatgtttacgaagggatgaagtgttaatggaaggttttttcacacagaccggacgcgtgggtcgacgatatcccgagacttccggaccgggtacc

SEQ ID NO: 321055 - DNA, 756 bp, Homo Sapiens
  misc_feature (33)..(33): n is a, c, g, or t
  misc_feature (55)..(56): n is a, c, g, or t
  misc_feature (106)..(106): n is a, c, g, or t
  misc_feature (145)..(145): n is a, c, g, or t
  misc_feature (195)..(239): n is a, c, g, or t
  misc_feature (691)..(691): n is a, c, g, or t
cgttcactgtgtgctttttggggggttttcaanggaaaatcacgttgctttgcanntctgtgtccgtctttggtcagttgtgaaacctgctcactgtcatgtgaanatggcctttcatctggcttctctctcttaagtgagaaanattgtccttcaggggacatgacatcaataggtttctggaatgagggactnnnnnnnnnnnnnnnnnnnnnnnnnnnnnnnnnnnnnnnnnnnnnggcattgaaactttaaaaaaaatgggttcaactgtttttgcaagaatgtaagaaaagtattctgtgtccttggttaaagaaatccacttgtgaagtgtgcctggaaaatgaaagtttgtgttttttaaagaggaatatttgaaactgctttctatgcatgcttagctggagaaaagtacaggcaggcgtcccatctcccagccacttctcaaaggtgctgctgtgttttaaagaccaggtacagccagggcagtatttgcaaggacattcctgcttactttatccctttggttggaaagctctagatgattcccgcagctcctccagaccccgcctccctgccctccccagctggtctgggaagaggtggtctgctgacctgtggtatctcagaggggacgttcctcctcctccctgtgcaccaggtgggctgcaccctcctgcctattcangatgtggatgccacaggagagcagcaggcagtggaaacttcagttgcactggttctcctggtggc

SEQ ID NO: 321056 - DNA, 785 bp, Homo Sapiens
  misc_feature (488)..(498): n is a, c, g, or t
gcggaggaaggggccctgcagtgccagaaacctagtgatgtcatgtccccggaaggcagtcggtctcactgaagagagagaagccagatgaaaggccatcgtcacaggacagtgagcaggcttgcacaactgaccaaagacggacacagaaatgctaagcaacgtgaatggccagtgaaaaccctgcctataagcacacagtgaacgattccaaactatgaaactgaagaagcactcagtcaagagatcatctgttcccactgagcatccttttgagcctgaggattagggagccaccctgggccctataccccacgtcaccctggtcctctcttccttctgtccacaccacccaagacttcctccactccctctgggagggatggaattgtagtccatggcagtatccaggattagaaccattgcttcattaaataaagtacctttgttgctataaaccagatggagactgtggtgctattttgtannnnnnnnnnnaatggaagggtgttggggtggcagtttttatccttgaagacctcagatatgctaagtcaacctaagcaaagtatactcggtggaaccctagctctgtggggtgatctgcaaaatagagtatcctggtcatgtaagttcaggaaatgctacagactcaaggattatttttggggattcaccatgcacagcacacattgaaggctgaaaagtccttgcagaaaggaaactgacttaactttgtttcttaaggatatttgaccacaaaacccttagtctgcatcacaccc

SEQ ID NO: 321057 - DNA, 546 bp, Homo Sapiens
  misc_feature (447)..(456): n is a, c, g, or t
ccttatttcatactgaactatgtgtgctattttggatacatcagtgatggtttgtaatgtagtgaataaatgcaatttgctaagaatacaagaaaaaagagaaacctatattttaggaataccatggctctgtcagtatcacacatatgaaaatagacatattctttatatgtttttgtgtgcctttccctaagtcagggaatgttattcagactagcagctcatcacggtggggctatgattgtgcttagctagtaggaagtgctgctcttagtagacacatttagcatagagaaaacccggcttctcaccatctccgccttatctatccacttgtaaacaccatttaacctttacataagactatcttccatggtcataatcatcagattgaaactcagagcaaagccatgctgtgtttcttcccagtccatttgtttccaaggnnnnnnnnnntctctgtatcccaacatccttatgacattacactgaaatttttgaactcattttccagcgctaaaatctgatcctctaaaaaatggtgga

SEQ ID NO: 321058 - DNA, 542 bp, Homo Sapiens
  misc_feature (508)..(508): n is a, c, g, or t
tgagccactgtgccagcttgctaattttcacagaagttgatggcaattcttcacatgtaaacagtgccagtgcacagaacctttatatattttttgaagccagtactgtgctctgcatataacaaagctgcttcaaggatgagacctttttctaaaagcatgtaatgtgagaagccggcctgccttattttctttttctcctttttaatgactaaaaatagcttgcggcaagggcacggtgggctcaaggcctggaattctagcacctttggggaggccccaggccaggaggatttctttgaggcctccaagtttgacggccccccatgcccccgcattgccaggactggatcccccacccgagagggaataaacctctccccccaagtgttgggggatgtggcccccggtaaccccccaccctaccctgggaaagccttaacaggtgaaaaagcaacctctctggaagccctcggccggaagggagcagggcttccccccgcaaatncccaggaaaccacgctgcgatggcccaccccata

SEQ ID NO: 321059 - DNA, 982 bp, Homo Sapiens
ggttaaaaacagaaaaatgtgttagaaaacacagcacagagaaactgtggcttcagctcaacctgaccatgtcacagagtccatcactgtcagtcttgcattcatcctgctggtcaggctaattatcaagacagtcaacttctccctccgatgtttccttattccagaccagggtgtgaaagcggtggctgtcaagagtccctgaagatgtcccatcaatggaacgcatacagcagcaacaggatggtacagatcccaataacaccccctaggatgagcgagtcccgccgcttcctcaggttgatcctctggatcaggctgtttacagcaggaaaacgattggccaaagtgttcattttgctgtgaattgacttcaacattcctctctgtgaagtcatattttcttttgttgccatagcaatgcttattgtctcttctatcagacgatctgagtttcgaaggtggtcatgttctttcaaaaatagctcagttcttctgttgtttactccagacccacttttatatgactcaatatcttttcgtactgatcccataagattctccctttcccgtattgccataaagtttgctttggttttatggaattcatgtgtataatcctgcaatatgtctctatgccgctgtaatgtatgcatcagggctgcattcaaggaggggacacctgcactgttggtatattctgccattttatcatttacccctgtaagccttgccaaaagttgttcaatctcaatcgccattgtctcaaacattctgtcttggcttgatccatttaaaaggggtgttgtatcagaactatacctgtcgcgtcttccatctcgggtactgctatgactgtaacttgtacatagtttgctgaaggaaactagtttcaggtcaagttcattttccagctgtcgagcctgtttcctgagatcttcccagtaactgctggtccctgccgccatctttgtcgtccccc

SEQ ID NO: 321060 - DNA, 637 bp, Homo Sapiens
  misc_feature (156)..(178): n is a, c, g, or t
gctccatcacccgccgcgtggtggccggcagccgtgcgatggtggtgcggatatcgttccagcgctgcgcgcgctcgaattcgccttcgatgtcttcttcgctcttcagcacttcggccaggaggtcgacgtcctccagcggcggcagcgacgaannnnnnnnnnnnnnnnnnnnnnncaggttggccgccacggtgaacaggtaggcttccgggttctcgaccgcgtcggcatgctcaccggtgctgcgcagcagccgcagataaacctcctgcgccagatcctcggcatcttcgctggcagaaccacggcgcaggaagaagccgcgcagcagccgccgccgcagcgcatagctcttctcccagatcctcacgctgttcacggccggccaaccaccccaaggctggaaagcaccgcagggtgacggtcatcgatgacagtggcgtttcaactgccggcacgcagccgctagaatgccgcccctgcagtttccagcagccggcacaaggagtgccccgcaatgaacgcacgcaccgccatcaacaccctcagcagcctgctgttcctgctgctggtcgcacacaccaccggctaccagcagcagatgtggccgcccagccgggtcgtccacgtgcat

SEQ ID NO: 321061 - DNA, 850 bp, Homo Sapiens
caattcaaatattcttggttaaaagttcttgggtcatccaatttcaataattgggaatccattatcaggcccaatccagttagaggggttttttcgtccttattggttcaatctcgtgcatcaaccaaaaaatcaagttctttctggttcggggttcttcggaagaccattagctgatttaatgacccttcagggacagacactgatcccctcaatttcactggggctggctgatgtctttttttaacttctatccaaggttctgagtccaagtcaggcaaactggtagacaaacctctagacattgcttgaagaatacttgtttcactgtttttctttgggctcaatgggcttccaattcttggagaatttggggcagactctgtatgtgagcaaaaggcttggcctggtacaaactctggacaatcaatcagttgagagaagtctgttggtggcacactgcgtggaggagggcctggaattggccatttttctggttctatcttttttctcattttctcatccacaatttctacttctgtgctatccttcagtgcctctaagatgagattaaggtttgtagtgagagcctgaacacgctgaaaaccagcaatcagggaaataggcaagaaaccttgttcatccatctttccccgaagaaagaagtctcgttccaaattttctacactgaagtaatattcaatttgacgcttaatatactctttaagcaatgcttcttccacaggatacacctgtacacctgtaccatcatcatagtaatacatcatactggtattaagttctgtttgaaatggttgatcagtcctttcaccatgttcttgataacccc

SEQ ID NO: 321062 - DNA, 1626 bp, Homo Sapiens
  misc_feature (1518)..(1540): n is a, c, g, or t
  misc_feature (1571)..(1571): n is a, c, g, or t
acagcttctggcaccatggatttaagaccatgttggatccaaaagttggcctgaaaccctgaagctgatgcttcacagctgggctgtaagtcagacttgaacccagctgatatgcaaggtcatggcgtgcccagggtggtgacagttgaacaaagtgtatagtacgtgcccagtggtagcgatggaaaaaagtataccaaatggactttgaaggaccaaaggttttaaaagtcaattggtatcacctccacactgactagggtagtggggtgcatttggttttcaaattgggtacttttaacactttagtgcctgactgctgttctttactgacttgattcagtcactcgtagctttattggtctgaaccagctccttgttcccaggttacagacctgcctatcgttccaataatcctgtttcacttgaatgaagggagtatgtcttaaatgtaaagtttctggttctcacactgtactctgaggtccaaatactgtctgtcaatgtgtaacctgatgtctcaaccccccctgtgagaagagtccattatttggtgttcaccaacgtgggagacttcaccggaacaggcttttttgctttgggctctgctatttgtttgcagaacacccaagagcgagcaaacatgctctcttcacagcagtaccttagggttttgccattgtaaatgggtctgatgtgatatgaccaagaccagagaaattggatgtaaatttacatttttgaatatgcttgttgtttcacatgatacatttagggtatgcagctccttttgtagtttttatttttactatttaagtttggaaatgatgccaaatttttgtatttctttaatcaatgtgttctcttcggtgatatatattgcattatatattgatgtgtgtatcaatatatattgatatgtattacacttacacatacaaacacatataagagggggtgaaaaccgtagcctttgcattctctatagcctctgcagagagatactaagcagcaaaatcttggtgttgtgatgtacagaaatggagaagagtattaaaccatatttaagagtgacgagaatggcaaaccccccatacgcatagcttgtcgggccgcctccggcccctcgaagaagtttttcctaacaccatttcgtcttgggcgcggtgggccccccataccgtaaagctggaaccccggggtccatagaggtggtttccccctgaggggaaaaaccccgggggcgccatggagagcaaagggggcgcctgtggaaaatttccgcttccccccggttgaaataaaggaaccgtgctcgccgggggcggggcgaaaacgccgaaagcccgtttttcctggggaagccagatcagctccccgagagggggggagagtcctcctagcacggcgctcatattgcgcacgggggaaaaatccgcacgcctgcgacccgggggggcgttccccacacaggccggaaggcctctcgcccaaaactcgcagaaatagccggcgcgnnnnnnnnnnnnnnnnnnnnnnnttttgcccaatgattctaatggtaacgccgngtgaaaccgtggggggtggggcgaaaaacttcccccctgtttataaacccccgct

SEQ ID NO: 321063 - DNA, 508 bp, Homo Sapiens
caggacggaaaggtgtctttatttcatcccctccccacttccaaagatgcaaaaggcctaattgaatcaagtctcctttccatctggcaggagacattttaataaggactttttaatttcttacatttcttggccaagtgtcataggaatgtggcctcttttgaaatttaaaaatgaagaagaaaaaaagagcaacactaagttaatataatggagcagatacttttaatgttcttaccattgaatatgccatttaagtttgttatacttgaaattatatgatttttgtccagctctctaaattgtcatctccaatagatttagatgcttcaaatagtaaccacattactggtaagtaaacggtggggttattgggtttagcaagtggggaagtaaggggtgaacaaaacacgagagatggtggctacacccctactaagactgccttaccagataaatgaaatcctttttgtattaggccccacatggcagcttaagtcttgctacg

SEQ ID NO: 321064 - DNA, 779 bp, Homo Sapiens
  misc_feature (386)..(416): n is a, c, g, or t
tttgtaatatattcatgaggctggaagtaagaagaattaaaaatttgtcctaattacaatgagaaccattctaggtagtgatcttggagcacacatgaataactttctgaaggtgcaaccaaatccatttttatttctgcctggcttggtcacctctgtaaaggtttaacttagtgttgtcaagtaacagttactgaaagagctgagaaaaagaacaatgaacagcaacgatcttgactgtgcaactcagacattcctgcagaaaagacatatgttgctttacaagaaggccaaagaactatggggccttcccagcatttgactgttcattgcatagaatgaattaaatatccagttacttgaatgggtataatgcatgaatattnnnnnnnnnnnnnnnnnnnnnnnnnnnnnnnattttattaggggcatctgccaattctctcactgtggttccttctctgactttgcctgttcatcatctaaggaggctagatccttcgctgacttcaccattcctcaaacctgtaagtttctcacttcttccaaattggctttggctctttctgcaacctttccattcaagagcaatctttgctaaggagtaagtgaatgtgaagagtaccaactacaacaattctacagataattagtggattgtgttgtttgttgagagtgaaggtttcttggcatctggtgcctgattaaggcttgagtattaagttctcagcatatctctctattgtcttgacttgagtttgctgcattttctatgtgct

SEQ ID NO: 321065 - DNA, 1082 bp, Homo Sapiens
  misc_feature (917)..(934): n is a, c, g, or t
  misc_feature (988)..(996): n is a, c, g, or t
tcttttaaaatggcttttattgagacacttgtagggattctgcaacatttccagttgggaatctttatttccaactcttagggtggctaaacccttttctgaatgccaaaaggcacactctcaccaccttaatgaggaaacacacttatctgtgtctgttccgatatccaactgggacctggaccccaagccccgtggtgtcttgtacaagtctcattagtcctccacgtacaactcagaagcctgttaatcagggagggtaatttccaaataaatgtgagctggcctaaatccagctggttatttcttatttggtaatctgtagtatcttaatttggggacatcctgtcctaagttttggctggtgcatgtagaacttataatctacctgtataacaacagatgcaacatagctccgttccagccccaaattccttaaaggttctagtctactcttgcacttcttcctgtactgttgttgagaagcttacattttagggagaggctggtcaaatctctactctctggtaacagcattagcaagagtctttcttttggaaacagactcagaagttatggacatcagccacttcagacttctttaggccactatccttgaggtgactgaccagcctcctcatggattggagtttcccatcattgttttaattgctggaaatgttggcctaattctgcttccttgtaactttctgctttttagtacaagttctcttgggaatctacgcatggtaaaaataccagctccttccatctttacagccctgtcagtgctgtgctcttcaaagcctttcccttaatagcaagagggccaagagtggcaaatagaggcagagccgcctgcactacagttgttcccatcgtaaggtgaaaacgaacgtttaacttcatttagaagnnnnnnnnnnnnnnnnnncccatcaggctattaagattctgcttgcaaattaatgccaatccatgtttacannnnnnnnnatcattgagacatttacatatatatgcaggctctgctccttaacaaaaggtgaactgaaaaactcaagggtgtttgtttttcagtt

SEQ ID NO: 321066 - DNA, 680 bp, Homo Sapiens
gctgcttcctttaaagtatgagtttattttccgggttttcgtaaatacccacaaattagtgcttttattgctgctatatccaagagctggaaacaatttaaaatatgtacttttatcacatttaacacttacaagagagaaaatggaactgtttgaatttttaaagatgtttttcagatttagtaacatatggaaattgaggataatcatagaaacagctattgaactctaaaataaaaaaattatatggaaataaaaggtatttcatttgaaaaatggctcatcacctctcctgctggttaatacactaatgacaatgaaatggaatcaagtgttatcttctccacatttaaaacaaagtgcttcttctcctgattgccagctttaggtctgaaatgtaaaacaggattaattgaggttccgaacaactcaaatatttcactattgtactttatgctaatgaattattttgtaatactaagaaaataaattggtaaatacctcatatatttgctggattaatgtttgacaggaaaaaacacgaaatggatgaacagctgatcgtgtcgagtgcaatttggtcactgggacacagttacaaatagcactgaatcataatacacaaagagcctagtgtgtgttaaagaaagacgaaagaggagttgggtgcagtggctcat

SEQ ID NO: 321067 - DNA, 567 bp, Homo Sapiens
ttaaattaagcataaagttctgttgtttattttacacaaaggagaccaccaacatttgccataaattcttctaaactctttaagaaggccatcttctgcttccgatccagcgtaggaggagtgctgcttgcagtgagcttgttgaaggcatctgctaatctctggtaaataactgggtcttgctgacttgatagtaatgtttcgaccagttcagaatattcagcctggtgcaaacacaccaacgtgtagaaagcttcgccagccgcagtggtcatctctgtgttgtgcttttgcaaaaccagcatatcaaaaaccagcttaagaaagtgccgtgttgctagaaaaagtgttgagtctgtttcttgtgcttttgcacactgttcagctaacggtgtcaaggcctccaggcaaagctggcaaacctccgaactcattgatgtcattcctaattctagggagtacatcagacttttaaacagatcctcaggaagctgtggtattttttcaggaaaaatctcacagataaatgtgattaatttgtagtactgattacaaagggttggaaac

SEQ ID NO: 321068 - DNA, 643 bp, Homo Sapiens
atatatactgcaattttatttcaatcgcacaaacgaagttagcatgtaggaaacttaaatgaaacaaatttaaacgaaatagttacggtaaaaatagcagaaaactgaaaattctaaaaaggaagtacacctaaaagccatgagaattcaacattcattagtgtttcatcttcagttttgattgacacttgatgcttgcaaatttttaaacaaacttttaaatcatgatgactattctgaagagatttcagcaccagcactaagatttgtacattcagtttgtttgcaattgacttgtgagccatttacatagtggatagtacagacttgtcacaggtcagatcacagtgttgaggaaagcagtgccttcctgtcattagaaaggatcccctaaactgtactcagcttaagacatccaacgtacaagagcacaaaaaccatcataataatgtggttccaaggaacgtggttttgataaggtaaataacttaggcttctgtttcccattttaattactgaaatctctaataatgacacaactgtcatgtatgatagcaaatgtatataataattcattcagacttcttggaaagaacatttagcaatctgggatgatgggaaatatagcatgattcaacactgg

SEQ ID NO: 321069 - DNA, 958 bp, Homo Sapiens
gggacaagagtttactaaatatattgatactgtaaatagcctctctcgctatttactatcttatagtaattcaggctctaattagctgagggaatgaaacacacaaaaatcactgaattcctaagagttccttaaataagcagtactagttacaaatcacagtataagatttaagtgcctgggggaaggatacaatttttagaaattacatattgggtcagttttgttttgtttttggtgaggaaaaggtggtaaataggaaaccatgaatgggaaggatggcaataagtagcaactatactttccaatgactaaagaaagaaaatctcagtatattcgttctcatgaagacacagtcagacactggacaatgtaatgtatgcaactgcaaacgttacaactgcagccagaacaatggctgggtggatcgcacgtaaagcttgccactaaaaatcaaagcagaggttaacaggaaacctggggggagtgtggaaaagggaaaactgttttagctgaataaaggtgaattatataatttataatagctgtggatgagcacaggagagagaggaaagaaaagaacagtcgaaatgagcaactcaccttaccctctgaccctgattagacaggatcaattgtaaagtgagggcttctccatgacaccatagttctgcccaatactgcattttgggataagaaattctacccttggatgtctccgcttcacaataaaacaccgccttaaaaataaaataactgaaagaaaatagaattccgcaaatagttattttttgcacttgaactgaaacgtactgtactgtaaattatgactcattttaagtgacctttaaaatcagatgtatttattatggcttgtgtaattatagaaataaagaaatgggtgacaggcttaacctcacctatgaatgtacagtatgtgggatttgtgaaactgact

SEQ ID NO: 321070 - DNA, 1414 bp, Homo Sapiens
tcaatttccatttttaggggatttatttaaagggaaattccttggggttgccaaccccttggagggattagaaggccagttttcccaacctatttcagccccaggaagggggaggatccctttccaattgaatggtcaccagccccctattggggttaagatgcagtcccacatgggacacttttgctgactccacagggcacaaaacacccaatttgggccaggagtactttcaccccagtttgtcgaatatatgttgattcacctcccatattggggccagtaatgatgtggaacatctgtttatctttttcaaagtatacgtcattaggaatacatgcaatttcatcttgaacttcaacacaagcatgcctggatgcttttaatataattcttccttgtcctttctccaaaatggctggtcgtacatatggaacaggtgctccatttgacacgtgagcaaagctgacaacagcatctagctgagctaacacatcattgagtgtctgcattggttctacatagcctgaagaaatattgacaatttctttaacaatggcatcctgggcttcttcatattctgttttatttttggtatactcttcatttaaagaagtcaatttgctgttggtaaatttaacaccattcttctggatatctacagtactaaagtttttattgttacgaaggactttttcttccttacaggttacacgaaagtaatatccaaactgtgcactggaatccagtttaatctgtttgccagggtccaagccaagatctctggctgcacttattaatgttgactgcatcttcttttccaagtcattcattatttctcttaattcactgagattaggatcaaatgaaggttttacaaggaattcatggttttccacctgatccatatctaaagttgtttctatcatttcctgaaacttggagaagtcagaacgaagatcagtaagaggagtcacaaaaactgccaacaataatttctggtgttttccttcatgtttttccagagcctgtataacattaggtagttgatttataccctgatagagtcggtaacaatcttgtaagtttgctgcttgtctttgaaacttcttggcaagtcggttaagatctgggaatcgacgaagtaaatcttcttgtaaagtctgcctcaattctgcatcttctacaaaagcttccactaaattcaatctctcctctattctgttcttatccatgagaggctgcttaatccactggttaacaagtctttgtccttgaggggttttacacttattcagcaaggcagccagagactgagagccagtggtatcttcaacagaaccctgaaaaaggttaagggctctgactgctgcaatatccaatttcatatactggctgaagtcaaaagtagtca

SEQ ID NO: 321071 - DNA, 533 bp, Homo Sapiens
ctcactgcatgcttctctctttatctctgatatcagatgctcactccaaattgttccatcacaacagattttagtaacagctactcaaaataacatgctgttataactccttaattaaaagcgctttagttcaaaagccacatttgataagcttatttgttaactaaaaataaaatcggtctgcaaatcagaaatttgatgtgaatatctacgtgccataaaagtacatggttcatgtccagttgaaaagtacagctgcagacaaaaggctttctcatgttcaactcagtgttttataagcaatgtagcaaagacttcaaaagaggtggccatttacacaacagtgtaattacttctaaaattgcatttctaattttgccatatcattcaagttccatatttggacatacacttaagacctgtacttcttttataatcaggtggctattttaagtctgcaggccaagacaacactcatgtttgtcaaatttagaatgcacctagcaaacaccacttgcattcatgaaacccag

SEQ ID NO: 321072 - DNA, 559 bp, Homo Sapiens
  misc_feature (48)..(48): n is a, c, g, or t
ctgtaggtgttcctttattttatcaaaaatagtaattttgtataattntaaatcaggaaatctaaggggacatgttacccaatcacaacagctaataaaatgcctcccattacagacccagctttttaaatattcaataacattcacagaattggcaagttagtctccaaaaaattttaacagaaactgcaactcaaaaagtgtgtctatatcagagatggtggtaacttcctcaaagaagttacatgcaaatacccaggggtctcatggtttacaaggtgacagacagacatatgagaaaataatcttgaagaagatagcctcaccctacccaaacttcccagaggggagtcagttattagtcagagttgcaagtgggctgggtgggctgagtggaccaaagcccccaaaaacagcaattgttgggatataaaaaagtactggagatgtttgaaactttcatagaaatgaaaaatcccagccagttaataaacagaatcatttcccaagtcacattttacatataaaacctagtttctgaagataaaggttgcatgca

SEQ ID NO: 321073 - DNA, 452 bp, Homo Sapiens
  misc_feature (347)..(347): n is a, c, g, or t
atgatcacaaagaggccacattttttttaattgacaactcaatctctacatacatacagtattgcacgaattataagtggatcaacaattatattattgatacaaactcatgagcatttacataaaactaccgctctaggttttggtgtgttttgtgtcagctactttagtgaataaacgaaacataaaggaactcagctacttgaattcatgagaatcaggctttcaaaaaaagcatatatatcatctcataggaatacttatgtcaaacccgggggaatcagtaactaagtgacaaaaggggacacttttaaaggaaaagttgggtgataaatatgttaggctanaatactaagaactttagcaactggaccgaggaaccagaaaatgtatgcacactgggaattttaacaaaagattacacattctcctgtacagtgaggaccacattc

SEQ ID NO: 321074 - DNA, 381 bp, Homo Sapiens
  misc_feature (251)..(251): n is a, c, g, or t
  misc_feature (283)..(283): n is a, c, g, or t
  misc_feature (334)..(334): n is a, c, g, or t
  misc_feature (339)..(339): n is a, c, g, or t
  misc_feature (350)..(350): n is a, c, g, or t
  misc_feature (358)..(358): n is a, c, g, or t
cacaaagaggccacattttttttaattgacaactcaatctctacatacatacagtattgcacgaattataagtggatcaacaattatattattgatacaaactcatgagcatttacataaaactaccgctctaggttttggtgtgttttgtgtcagctactttagtgaataaacgaaacataaaggaactcagctacttgaattcatgagaatcagctttcaaaaaaagcatatatatcatctcataggantacttatgtcaaacccagggaaaatcaggtanctaaggtgaccaaaagggccactttttaaaggaaaagttgggtgataaatntgttngggctaaaatncctagggnctttaggccactgggccccgggg

SEQ ID NO: 321075 - DNA, 1107 bp, Homo Sapiens
agggggttaagccaaaacccttaaaaatttcggggccaattttctttttcccgggtaaagggtttcttccgatatcccttacctacccagggttttatttttggatgggtaaatccaggaggaaatttctttagccaggcaaagggccctttcaagttcaagttccattcccacccttagggactgggggaaattacccattcaaggttcagtatctggggtagttaaagataaatcaacttcatatttattaactaaactgagagtagatgctgtggtaaattcaatacccttactagttcctgttgcatcaggttccagagcaaaaggaccagtagaagatagagtttctcctgcatcagcttcactaacaccagggtaggtatccaatactgtgcactgtttagtctcactggtgggcaaaattttctcttcaccaatttccccaacaggactagtaccagcagcacacactgtattatgttccatctctttagcaattaaatgattatttatattaaggtctatatttataccatgttcactttcgtaaaagtcacctttcaggtgttcctcagcatgtggttcttcacctgaatgcaatgcaatctcctgcatgccaatctctggagcaagattttgatcaccagaggatagattaattcctttcataacatgtgatgacatgatactagattccagtatcattggtgtggactctatagccacctcagttggtattacttgagtctgctctgagactgtgacagcaggctcggaaactgtcacagtcgattcctggacagaaacagatggttctgaaacaatcatagaaggttgaaggactgacaccgctggttccagaacaggcacagaaggctccagcgcagaaacaactggcacaggaatggtaacatagtctggctcagccacaacaggaggctccgggacagtcacaaccgaaggctctaggacagttacagtcgaagactccaggacagtcacagtcgaagactccaggacggtcacagccgaagactccaggacagccatagctgaagactctggggcagccatggctggcggctccagaatgctctctgcccc

SEQ ID NO: 321076 - DNA, 1012 bp, Homo Sapiens
  misc_feature (31)..(31): n is a, c, g, or t
  misc_feature (53)..(53): n is a, c, g, or t
  misc_feature (289)..(304): n is a, c, g, or t
gggggggaggtttcgggagctaatattgccnggtgggtgtgggtctgggggtnagcgtggttttggtttgataaattctatagttttattaagacaaaaactgacaatgtagtatgaagtttacatttaaacaaagtttacacagaaatctaacacatgcctaaaagaattttacaacgtagctctagatgcaagtctagacaatatcaagaactgatggttctcatgactcaagacagagcattttgggtatgttacttattaggatttcttaaaaaattgttttggnnnnnnnnnnnnnnnntttaaagtgaaccactgcccaatatgaaagtttaatcttctcctgagaccaaggcttttgaaatcactaaactcttggatcaattcagtgaaacttgtgctgtcagtgactgaaccctgccaacaatggtttcagtgttcaaagctcaaagtaaacggctccaagagttttccccactaagagcatgggcccttgtctttccctactgtcttacctcctctaccaccctcttcctcttcctaacacctcagccagtggcttggatgaacaagctgatatttataacttcgttactggaaaagaaagggtcttctaatttcgggaattagcacctctaaggcagaatgatctgcttgtactgtatactctccaataaaagaccttccctcctcgtcaatttccatctccaaaatggcaactttggtaacttatgaacaggcttagtcctttgtgggaacagcaataagtttaggcagggaacaccttggcttataggtttcagactttcacagcttttaaacagtctctcacagtccttatttatggtgccaatgacatttttttaaaggtaaaatattctggacatagaagcaaatcattagttgtctgttcttttccattgcttcaccatttcccctatcaggccccaaatgttaatcaaaatgatgctacccatctccctttcctcgtgccgaatacgccacccag

SEQ ID NO: 321077 - DNA, 473 bp, Homo Sapiens
  misc_feature (32)..(32): n is a, c, g, or t
  misc_feature (42)..(42): n is a, c, g, or t
  misc_feature (48)..(48): n is a, c, g, or t
  misc_feature (147)..(147): n is a, c, g, or t
gaactggaacccctgcccaaaaaaagggtttncaagtggttncaaaancctcaaaagtaaaagggctcccaaagagttttccccccaactaaagagccaggggccccttgtcctttcccctaactgtccttaacctccctcctaccnaccctcttccctccttccctaacacctccagccagtggcttggatgaacaagctgatatttataacttcattactggaaaagaaagggtcttctaatttcgggaattagcacctctaaggcagaatgatctgcttgtactgtatactctccaataaaagaccttccctcctcgtcaatttccatctccaaaatggcaactttggtaacttatgaacaggcttagtcctttgtgggaacagcaataagtttaggcagggaacaccttggcttataggtttcagactttcacagcttttaaacagtctctcacagtccttatttaatg

SEQ ID NO: 321078 - DNA, 750 bp, Homo Sapiens
taagagtggaaatttgataaatgtttattgacttgctgattcaaaaaaacagtgtagctgagaagtctgatcagctcagaaaagagtggaatttggcaacaaatatgttatccaacaaaatctgagtaatttatcaccttttaacatcttcaacatatttataatataaatattttttaaaaaaccgattattaaactaatactcccctgtaagaacaagaggactaattttcggtgacgacagacttgtgctgatccatcatctggaactcctaaagacctgaatggctgactgggattagtgactactatctggttttactggttttactctactaagcccatgattttgtgttttaaccaattaagaaaattatcccaaagcacaataaaaatagcctaggtctgaataccaccagttttttggcaacagtcctgcttcttgcctttttctcatcctcatctgcagctttcttgaattcatgttcaaaggagctagctagttcattgaagagtcccacctcctcacagttcttcaggaatctagttggagtaggcgtttgatctgcaatgatgactgagtcagttcgggctgggccaaatttcaatgtcatctcatgcttgtgtttatgaactgccaggtggtcctcgtttgtaaatctctgtccacagcccggggcattgcacacaaacggtctgtcgtctcccatatttcatatagcagagaggagaccaagtctagtgccgaag

SEQ ID NO: 321079 - DNA, 626 bp, Homo Sapiens
  misc_feature (60)..(80): n is a, c, g, or t
  misc_feature (566)..(575): n is a, c, g, or t
gttttaatctttattctcttcaattagaaaaatacatactacaaaagtttcacattatannnnnnnnnnnnnnnnnnnnnttcccccagaatcccaccctcagagatggttactcctctttggtaagtattcctccaggttttttaagcatatagtagtacataagcaggaaaaagtaaaatcctactatatataagcaactgctcttgagcaagttttcaaatggttctgacagatcattctgaccaatttctccagggaactttatggattagttttcagagaagattccatgacactgtgggtagacaaacctctaagatttttcttatcatttataataaatgttgtcccaagtgttaaatgtcaaagtttttaaaaatagtaaataaatgtgatacagaggaaaaaaagttcagaaaattatcccagtttcttatcaaaatcagaactcctaagtctcaattccaacaagtaccataaaacgtctttaaaatgcgattttgagaaacaatcacttctttatcataaaatatagctatagaagtaattctacaattttgggnnnnnnnnnngagagaaggtctcactctgttgcccagactagaacacagtagtggcatgac

SEQ ID NO: 321080 - DNA, 1228 bp, Homo Sapiens
tctggaggcttttgtactgaaggtcaaataacctctgggatttggtaggaagtaaaactgggatttatttagcccctggtaagtttctgaggtgaaggattcagggacatctcgtggaacaaacactccccactggattttctctctggagatacccttttgaatatacaatggccttggctcactaggtttaaatacaaacaagtctgaccccactgaagactgagagattgcagcaatattctctgaattaggatcgggttccataactctaacatttaattttgcattccactccaatgcacagctcagcagattccaacagcaaagaatgccattttcagtagcaccaagtagatactttgaacacgtcaatctcccaaagcaaaggtgccttattttcccagctcgttggcaaaatgtacatttaagttcccatgttacagaatcccatattgtgactatttcctcaaaactaactgctagtaaagaaccatcttcggagaaacaacagttagttgcttgatacttgtgataactaccaacaaagtcacaggtccagccaacagcttttttgtatatgtcagagtcatctgttaatatccatactttgaagtaaccatctttgctagctgtaaccaaggtgggctgttcagatttttctgcattacagaaacagagagctgtaatgcagtcttcgtgtggcatgttaattttagtgttaagaataaacccttgtgttttcttattatacatccacagtttcatttgcaattcaagctcagtttccttttcttgccgctgttccactgttgcaagccagttaccaaagcagccaaatgcagcctttgttagttcaatttggatcagaccataatcattaatatattcttgctgtataatatctaaattgtataactgtttatcactctggagagaataaaactgcaggtggccaggttttccattcaaaaccaagctttagttcttggatcatcatcaaaccagtgaagatactcctatctttcactaggccttgaattactgcggatgcttcaaggtttcggtgaataattattatcttattatcagagtgagaagtgcagcataaatctcctgcaggcgagactgagatatgttcaatagcgacgcgtggtcgacgatatcccgggaattccggccggtaccgcctgcttttttaaccaaggtgtttatagtcacatggcct

SEQ ID NO: 321081 - DNA, 407 bp, Homo Sapiens
tttagagtgtcactgatgctttatttacatgcgtcaccatctcttttacaaactagattacggttttaagtggaatacacaaggcaatatctacaaacaccaaggaaagttaagtactgcatctctatttcatttggaaaggggaagattcccaaatcaaactggttttgatccttaagaaaggcggcagagttaattcatggcaacatatggttagacaaaatcctcagtaagaatgccatatgatagtgttcgcattgaaagaaggatgaggtgcttcaaatcaaagtctcaactgcttgactctcaggtgtttaaatatggccacacaccatatttagttctagattatatgggatatgagcaaggaattgaaacagataaagatagtttttacagatacgtgt

SEQ ID NO: 321082 - DNA, 676 bp, Homo Sapiens
aactgcttcaccccaggaacccaaacaggtgagttttaaaaaatattatagcataatttcaaatgattaataaggatacaaagagacttattttcctgtcttttgttattttgtctacttattttgttctgaataatcttctatcacatttccccttctattcacaaaccttcaactcgagttaccctttctgatacctttgttcaagaatgttaattcttatcagaaatccatggcacactagtctggaaaaaaataattttgtgtctttttaaattcctagagtacctctccacttcaatcacaatttaagtccagggcaggtatcctgggctcctagcaaacactacaccccaacaagagtttgggagccaaattattttgcaaacccttaagaacacaaactaaaactaatttatccttatatctctgcaaaaattagcattttgaacatccaacgaaacttcaagtttgaggataatgggcttactgacctgacctttgatttcacgtaactaacaacaaatttctttaaaatctggttaagaaatatgaaaatattgaaaagtaaacataaattccacaaagctgaatggcagcaaaaaatatttcttaacatcaagaacatatacaaaagatgatcattaccacccaaattatctctgttgctcaggat

SEQ ID NO: 321083 - DNA, 445 bp, Homo Sapiens
  misc_feature (57)..(83): n is a, c, g, or t
attcaagtaactgcaaataggaaaccagagagggagctcttccaactgggaaatccnnnnnnnnnnnnnnnnnnnnnnnnnnncaaggtgaagataactctactgcacaggacacagaagaattagaaaaagagattagagaagaccttccagtgaatacctctaaaacccgtccaaaacaggaaaaagctttttccttgaagaccataagcactagtgatccagccgaagtactcgtcaaaaatagccagcctatcaagactcttccacctgctacttctaccgagccatctgtaatcttatcaaaaagtgattctgacaagagctcttcccaagtgccgccaatactacaagagacagataaatccaagtcaaataccaagcaaaatagtgtgcctccttcacagaccaagtctgaaactagctgggaatctcccaaacaaat

SEQ ID NO: 321084 - DNA, 888 bp, Homo Sapiens
  misc_feature (43)..(51): n is a, c, g, or t
  misc_feature (112)..(120): n is a, c, g, or t
agggccggcactacggcgttaagaccgattttgttatgtcccnnnnnnnnnctggcgtaaccgccgctgacatgctgccgcggaggacgggcggattcttcccatccgcgtnnnnnnnnnaaccccatccgcgggggggcgaacgtttttgaaacggttgggtgaccaagaggaagctcaggcccgccccctgtctacccaggggggcaaataaggggtcagggcgggggcagggaattgcggaaatccctctccccttaaagtggtggggaaaaaacgccggtggattgcggtaaggaaagtgcgctggtcattccgagtaagttctttccgagggagggggaagaggggtgaaaaaccttgcaacggaagctgtggcccctgaggccggggccgttcttatttccagcctgagactttcggggccccgttctcccacgttgccgcctatcctgggtagggtagccacagtatcgatgatcgcgttccatctgctttgtcattttgggggggagtttggtgacagtttctcagcgggagggcggcctcttctcttgttagctttttccacatcttcttttgcaggatctttatccacatttcttcgtctttttcggcttcttaagccgtacttcctcttccatttcctccaaattgccgtcttcgatggccttaccactatcagcagaccggctatcagaaatcacagttagtggggataaaattaacaagccagcaaagcagcgagctgctagtctcttcatcagcagcacaataatgaaataaatcacagaagcaaacccccagtttccgactggtgacgtgttgcgcaagagtgcgagccctaattcaacatacagacggctcccatgctcaactgcctctccc

SEQ ID NO: 321085 - DNA, 1244 bp, Homo Sapiens
  misc_feature (1133)..(1180): n is a, c, g, or t
ctcaagataaaaaggtcagcagtaagttctactaacgttgcttaacaaggatttagaaaaggaaatacattctctttgctggtataatggtataaatcagatcttcaaatctatgggaacgagtcatcttctctgtcctctatctcaagaaattagctcttttacagttgtttttatgaaatcttttctttcagttaaatcataagtaggataattttcatagacctttttgcaaatctgtttcattgtgacttcttccaagttagcactggccagtaatttctttattgtttcctttaactcttcatctgtagggggtttcttcaactttttaattaaaggttcatcatctgaactatcctcagactcactttcttttttggaactgttttgattcttcttggtggtgctgctatctgctttcttaacattggcacttttcacagattttttacttttagaagtagctttctgtttaggtttttctcttttggctgtcttttttggtggctcctcttcactttctttatcttcatcatctgaagactcttccttgtttttcttttcatcttcatcactactagattcatctgacagaatttcaggacatttggttcgcttagccttccttgccattccagaactgttccgttcctttttactgcctttgctacaagtttttttagatttcggcaatggtttgccagaaggctttggatgcattaagaaattcaagatcctcttcactagttcactatttacacctgatctctccaaatcaagaacctcacagatgctctttaacatggcatttctaaattttttcaacatttcttccttctttttatattggacacttcctttttcaaatggaaagccactgaactgacccacattcttctttaatgaggacacagtgcctggcctgttgtaaagcagtttgtgtagatttctaagttcatcggttttcttcttacttagaaaaaaatgtatcctctcaatttcacaaagtttctgcccctttccttgtgcaattgtaaatggctctctctgtaaggaagagacttgcattgtcaacctctctacttttttcttttccctcttgccttccacgatgagactctattcttttnnnnnnnnnnnnnnnnnnnnnnnnnnnnnnnnnnnnnnnnnnnnnnnntcctctctgggaccgggcatttcgggttctttctcggacgcgggctgggtgggggttccctccc

SEQ ID NO: 321086 - DNA, 495 bp, Homo Sapiens
gccgccgctccaccattttttggtttttgttgttaagactggggaaagggggactatttattctgccttaaatcaatggcaaataagtcaagatgacattttgtgaatgtagactatggatacactcctaatagattgatgtagtcataaaagggggtcaagtagatgtttttctgttatgtaagcaataatttttccgtgtccttattgagtatggctagcgattatttattacatgctagatgggttctttgcatgtgggttccatataggtgcagaaatttcctcagccactggagggatttcgaccatatttgtcatttggatgagctgttattagattgaaatctacacatcatttcattaaaaattgtgccttagaaaacgcaaagctgttgcacatggcgataaattatggatgcagtacattgaagagagatgaagtcacttccaagtttccaagacttctcatggaggtgtttgctgttttacagg

SEQ ID NO: 321087 - DNA, 662 bp, Homo Sapiens
gttgtcatttatgtatctttaacaaaagataaaatacaaaacggacacaacatcagcctttatgttgaaccaccctgtttaggtaggaaaatgaacattgtttttcattcttaaagtaaataggaattaaatctatttgcattgctgtttaatttcataccaatctaaagctcgacactatgtatatccaaagtacttgacaatttgactcagttactcacaccactgtttctgagatgctgacttaatgcagtatcctacaggtggtttttggtagtttagaaaagccagtgagtgggctgttaaaagttgatatactgatgtcagaggttttgttaggctgttttcactgattctactgtcagtattatcttcacagtgttctgagaagaggcttcaggatcatggcaatctattactaatatccctagaagctatccttataattctttcaataaaccaacttcaggttttgtttttttgcaaattttacaaacaaagtaacagctgctggctataaatattaggatattctacaatttaaaaaatctaatattcatgattgttacataggggcaatcacaatgaaaacaaacggtaatgtaaaccatatcctctatgataaaggaaaggatttctacacctagacttatgtccagaat

SEQ ID NO: 321088 - DNA, 689 bp, Homo Sapiens
  misc_feature (643)..(643): n is a, c, g, or t
taaaaataacagtaatataatcatgattcattttacatgtttctgaatttatattatcaacccagagaaagtttatatcagacaggtaggaaacctctgacaacgacagaagaggtgaactcgacaaaaaccatgctgagtggttctttacctccgctgggcactgagcagggaggtgccgacacacctggtcttgttcacctgcttgttttatgattttccggagcccctttcctgtcagaaccaggaaatgtacatctaatgaaaacgatttcccatgttaccaatcctctctttctgctcattaattcattcaatcttttaaggaggaatggggaatgggaggaaaaccaaacaaatcagttcttagaaggttcaaagttatattatcttgagttataattgtctgtttaatacaattacaccattttctcttctaagaaccttttcatattttaaagaatgacttggctgagaaaaatacttaggaagacatttttaggcgttgctgaatttaaatcattttccaaatactacattctgctcctttttttattgtaatagtttatctgaaagtccccaaaaattaacaaattgcttttactatgcaactttgaaatatcaagtctgcctccaattaaanaaaaacagtaactacttttataacattaaggtcaagtcattgtaaa

SEQ ID NO: 321089 - DNA, 1070 bp, Homo Sapiens
agagaataaggcgtttccgcccccctaccttggcattccataggggtttctctccacgggggaggttcttttccagagccttgcccagggacatggggccaatccaaagccttttcccccatgtgtacactttatggaggtccattcccagggtgccttgtcatgtttctttgaaagctttcccagaggatgaaacgctttcccacattgctgacaggcatagggtttctctccactggagtgggtttcatgtcttggaagggaaccggaaacactgaaggctttcccacattgtttacatgtatagggtttctgtccagtgtgagttctttcatgtattagacaagaactggaatcagggaaggctttagaacactgcttacatttatatggtttctccccagtatgtgttctttcatgtcttagataggaactgtaaaaaggaaaggctttagaacactgtttacattcatacggtttctccccagtatgtgttctttcatgtcttagataggaactgtaaaaagaaaaggctttagaacactgcttacattcatatggtttctctccagtgtgcgttctttcatgcatatgtaataaactgggccaaaaaaacgctttcccacacaacttacatttataaggtccatctccacgctgcactgccatgtgtctttgaaggtttcccaaagaactgaaggacttcccacattctttacaatcatatggtttctttccagtgtgaagcctctcatgtgtttgaaatgagttgtggtaactgaaggctttcccacgttgtttatgcgtatctggcttctctccacattcatgatactcatgtggtttgtgcccagcaccaactctgatgtaacaattaagggatgaatgacccatgactttttctcctctcatactgctttcacaaggacctactccaggaagagtgttcttggtcacaatactatcttgaatctggctagatgtttctccacattgagttccatctttactttcaacaaatctctctaacatacgacatcttagatttttcctgggatatctatattgat

SEQ ID NO: 321090 - DNA, 978 bp, Homo Sapiens
tggggactattaaaagagggaaaggctgtgtaaaaccacatgtggcattggatgacggtttagcgcccaggggaggggtggtccacaggtttttgggtggggaacgttaaaaaggaaaggggctataggaaccagggggggccatccaaagggtttgctctgccagggggggttcttttcaaacaaaatgtaataaagggggccaaaaaaacgctttcgccgcgccaacttacatttataagggtccatttcccccggcggcattgcccatgtgtctttgaaggtttccccaaagaaactgaagggcttcccgcattctttacaatcatagtggtttttttccagtgtgaagcctctcatgtgtttgaaatgagttgtggtaactgaaggctttcccacgttgtttatgcgtatctggcttctctccacattcatgatactcatgtggtttgtgcccagcaccaactctgatgtaacaattaagggatgaatgacccatgactttttctcctctcatactgctttcacaaggacctactccaggaagagtgttcttggtcacaatactatcttgaatctggctagatgtttctccacattgagttccatctttactttcaataaatctctctaacatacgacatcttagatttttcctgggatatctatattgatcttcaatgttctggtctttccatttcattactacacaatccaggttcctgatggtttcctgcatcacatctttgtagagattcttctgacaaggacccagcaaagcccactcttctcgggtgaagttcacagccacatcctctaaagccactgaggccatttcccgacttccgcggtgtcccaggtcctaccgacagctcccgctgccaatgcgtgttccagccagacaaaggctgcctcagaacttccaggtcgtctctcagctacagaacccagcctcgtgccgaattcgccacccaggcc

SEQ ID NO: 321091 - DNA, 1497 bp, Homo Sapiens
  misc_feature (63)..(86): n is a, c, g, or t
cccaaaacggaaatgtttttagaaagctttctcgagggccggaggccggcccgacatgttttnnnnnnnnnnnnnnnnnnnnnnnnttttgatatagaaaccctaggtttatttgttaagctattacaaaaacaaaacaattaccatttgaagtactttgaggacttcatcccagactcacttgttctgttacagaaactaacctaaaaggctggaaattaaaggatacaacctaagaggttataacagcagactggtaaaacatggcgaaaggagctctctctttcccccgcagtctaccaagctcctgtgcattttcacccacatagatctgctagcttacaaatgatgcacacagtcaaggtaggaattataggcctactcagagggtacccagacacagaaagttttagggtaaatagtaaactacaaataccctcttggttaagttaattcatcaagttaataaaggtcatattatctatcttctgctggtgacaacttgttgtctcagtatagtctgtctcaagaaagaactggttcaggttgggttttggaaaaggaaaaagactttcattaacttcactccagagtggaagaggcaccaagttctctcctacacttaggagcagaatcttaaacttgcataaatcattttcagtgatcaacatctgcatcctcaaactgtccagcaactgttggtgtggtatccacctccatcccatcttcataatctcttattgaatcttctgtcctgaccccagccatattatactggctgctcacagactgagaaagcattccttctaatctctccagtgtggcttggccttctgctgttagatgggataatccttcttcataggtgtaaaatgtagggatgtccccctgtccttgttcatgtgcttccacatcatattcttctccatcgtagtcatctgaatcctcatcctcaggatctggatgcaaggcctggcattcgcacattgcagtgaacattgcctccaacgctgatttatcactaggcacaaatctaaattcagtaataggttcaacatcatcatcactgtcttcctcttcttcatcagcaacaggttcttttgattcttcttcaaatttggcattcaccataacatacaaatgctctcctagacagtcacttcggtccctggataatgcatgtaaactaatggtggggtattccagtgagaatcctaatccagagccatctaaccaagacaggcggctctcagcgatgtaaagggtaccagtgccgaggcccttcccgttcagcacagcctcagtgtctggctgctgccgcaggagcccctccgctggcccaggcggcgggaaacttttgaggaagctcatagcagcagagtgcggcaacacaggccctgagggagttggagcacagcaatgcgtgcaccacaccctcgtgccgaattcgccacgcgggggcgggcggttgggtgttggtatgttgttttggatatt

SEQ ID NO: 321092 - DNA, 751 bp, Homo Sapiens
ttgttttgctttggtgtccctcccaagggaggcccagagtttccagtcttctctttgggtcatctgttcccattatctgcatggcatcttccggctgtttgagcagctttggctttgtcggctgcttttctcagctcctccagctcctgcagcaagccactgttctcctcccgtgcgcccttcagcttgtcctctgtgtccagcagcgtcttctggaggttctgtaggatttcttcatgcttggtttttgtctcagaagtggctctctcatacctggctttcagctcctgacactggttgtggcttgtttccattttcttttccaggtccgacaatttcctctccaattctttcttttcttcctcatgctttttagctgcttcttgctggctctgttcagctttgacagtcatgtcctcaatacttttttgcagaaaacttgcattttcattagcctttgtaagttttagctgtaattcttctacatctctttctttcagacgtaattcatcgttcatttttgtcagctgagaagagttatctcctgacatcttcattatttctgcaatgtcattttccagtttttcctttgcctttatcagctgctcttctctctcatctttctctctaaattttgcctccatatctgctaagttttctctcagcttctccaagtcagaagacagcatgttaaactgttcctccttttggtgtaacttatttacagtttcttgcatacttctctgaaccc

SEQ ID NO: 321093 - DNA, 701 bp, Homo Sapiens
  misc_feature (106)..(118): n is a, c, g, or t
  misc_feature (197)..(210): n is a, c, g, or t
  misc_feature (238)..(470): n is a, c, g, or t
  misc_feature (660)..(660): n is a, c, g, or t
  misc_feature (680)..(680): n is a, c, g, or t
agtcctaaatctacccctatgccaaatcattccaagtagataattttacgtgcatctcaagggttagcaccctaaggcatgcttgtggggcattagaaaatgagannnnnnnnnnnnnaaagcagagcctcctaagaacatcaaagttggtcctagcaaaatatataaagtccctaaagcaacttatacttgaaacnnnnnnnnnnnnnnagaggggggcctcattctgttgcttgtnnnnnnnnnnnnnnnnnnnnnnnnnnnnnnnnnnnnnnnnnnnnnnnnnnnnnnnnnnnnnnnnnnnnnnnnnnnnnnnnnnnnnnnnnnnnnnnnnnnnnnnnnnnnnnnnnnnnnnnnnnnnnnnnnnnnnnnnnnnnnnnnnnnnnnnnnnnnnnnnnnnnnnnnnnnnnnnnnnnnnnnnnnnnnnnnnnnnnnnnnnnnnnnnnnnnnnnnnnnnnnnnnnnnnnnnnctgagctactgtgcccagcctaaactttcccacttctctctgtggcttctttccaacctctctccttcctctccccaagtcctgtttctttgaagctggtaactgaatttaagatgatatctggttggtgtttaaggtttgaggcctcccaagggtctgtggcattttggaaagggagattttttaaaantaatttagggtgccttaatnccttttcctcatgatttccta

SEQ ID NO: 321094 - DNA, 1854 bp, Homo Sapiens
  misc_feature (69)..(79): n is a, c, g, or t
tgttaccattctgatgttggagcatgtggtgagaccctcagtgtgaccagtgaagaaaacagccttgtnnnnnnnnnnngaaagatcattgagttcaggatcaaatttttgttctgaacaaaaaacttctggcatcataaacaaattttgttcagccaaagactcagaacacaacgagaagtatgaggatacctttttagaatctgaagaaatcggaacaaaagtagaagttgtggaaaggaaagaacatttgcatactgacattttaaaacgtggctctgaaatggacaacaactgctcaccaaccaggaaagacttcactggtgagaaaatatttcaagaagataccatcccacgaacacagatagaaagaaggaaaacaagcctgtatttttccagcaaatataacaaagaagctcttagccccccacgacgtaaagcctttaagaaatggacacctcctcggtcaccttttaatctcgttcaagaaacactttttcatgatccatggaagcttctcatcgctactatatttctcaatcggacctcaggcaaaatggcaatacctgtgctttggaagtttctggagaagtatccttcagctgaggtagcaagaaccgcagactggagagatgtgtcagaacttcttaaacctcttggtctctacgatcttcgggcaaaaaccattgtcaagttctcagatgaatacctgacaaagcagtggaagtatccaattgagcttcatgggattggtaaatatggcaacgactcttaccgaattttttgtgtcaatgagtggaagcaggtgaggctcactcccatccataattcagcacatttggtctctgaggcaaaataagtccaccattatggttaagactatttattggatacaaatgctattacagtcacaaacaattgtgttcctggctgcggggaagcgggtggcatgtgggttttggggtttttgatcagtaggcgctcccaagtccacaaagaccagtccagcggcgtggcctctgactcatctccagtggtttgtcacctctggccctgttcctgtcattccctatttgtgtgctatctctaagcctgacgtggttttcctcctgtcaaaagtacaccactacaggaaagcaggaaggtttgggcctgcaatgtatgcatattgggtttctcttagtggtctcagactacgtttgtggtgactgggtcctgcttcagccctgttgaatatgcccagcctgtggcatgctggtggtcatcctggcagctggtgggtggcctggtatgctgcccactcagcttgagactcaccctcatgcattcagccagtaggtctggccaagcctgaactgaaggaccatggtcctatcccagcttcatcagagcaatccattgtgacctgagaatccatttaacctctcggtctagaacctccttctggaaagtgaggtattaatacttgactcatgttatcgccaccccacattctaagtcatggttgagtagtaatttggacagtaccttgtaaattgtgtgagattaccttaatataaggtataaccttaaaatattcatgaatcccaggaggttaaaggttataacttttaggtatggtatcgtaatgtactgtcccccagcaaacatttaaaaagccaattttaaaaaatgtatttctgactaagttacattaaggtctctgcctctgtatcttatgtttcttccaggtgcaccctgaagaccacaaattaaataaatatcatgactggctttgggaaaatcatgaaaaattaagtctatcttaaactctgcagctttcaagctcatctgttatgcattagctttgcactt

SEQ ID NO: 321095 - DNA, 1305 bp, Homo Sapiens
ccagatgataattacatatttaatacgtgttgcttttaacagcaatttttaaagtaaacacatcatagaccttataacttattaaagattttatagtgcttacaaagttgattctaaaaaatataccttatttgttctaaatgaataacattatctggaagatataataataaattatagtagtatgttttccaccacgatagttaagattgtgtacacatattcaatatgaaatcctcttaggattttcacaccttcagcctggaaaacataaaagcagattaaagtttggcatacaagatctcagtctgatagtaattgctttaaaactcaaagtgtaaaaatatctacttgacattctaggaaagcatggccacatgcacagacacattctctcactcactccaacacacacgtgtgcacacatactcacaccccagagtactcagaagatcttgcccttgtggatcagacaactgccaccaatttcaaaaactaatggaaaaaattagctaagaatatgtttaaaccatacttaagaggtgctggttgccattaagatctttaacatgcagagaatgccatctcaatacactcttaaacagacttgaactattcactaatggatacacgaatacataagaaattatgtattcatccacccccaagactgcatgtaagatgaaaaacctaggcattccaccaacgagtcatatgactgaaccccagctaaagctacagtggtttgcttcacagaacccaatagaagacagaacccaacagatttagaaacctcattgtgatctgtttggagtttcctatatgctccatgtgcaaaagcaatgagattctgtattgcagatgacagctaatatcactttgcacttttgtgacactgcaagaggtcactgtatttccaaaacatgtatttattctaattaaatcctctaatgttccttacttttaattatatatactgttccaaatttagaaccaaaacaatttaatgctgataacctcttctgctcatcacatatacttccagtaaaacctgtcaaaacagaaaattactctttgggctgtctccagtaacgcaggtttgaaaccagaagttcattttcaccctgtatcaaaacactccaaactctatgaaacaacattaaattagaaactaaccacaaattagggcactcataactcatactgctgtgattagaaaaataaaaaggcacaacagtaagctaaagagaaaataccagctccccatatgctttttgtttgtttgtttttggctttcctcttatt

SEQ ID NO: 321096 - DNA, 431 bp, Homo Sapiens
ccataaggaaattatggtaattccatcccacccccccaagactgccaggtaaggatggaaaaaaccctaggccatccccacccaacgaagtccatatgactgaaccccagctaaagcctacagtggtttgccttcacagaaccccaataagaagacagaaccccaacagatttagaaaccctcattgtgatctgtttggagtttccctatatgctcccatgtgcaaaagcaatgagattctgtattgcagatgacagctaatatcactttgcacttttgtgacactgcaagaggtcactgtatttccaaaacatgtatttattctaattaaatcctctaatgttccttacttttaattatatatactgttccaaatttagaaccaaaacaatttaatgctgataacctcttctgctcatcctgtgccgaat

SEQ ID NO: 321097 - DNA, 743 bp, Homo Sapiens
  misc_feature (202)..(210): n is a, c, g, or t
gcaactttgtctatttttattcttcacatagtgactatgtcttgtttaacagaatttgaacatattaaaatagatgaccaaatactaaatatttagactatgtagtggaacacatgatttatatcagtcatttcttgaaaacttatgagtacttcattgacattacatgcataaagcaaatatctagctgaaacattgctgnnnnnnnnntacgtcattttgccagtaaattaaataaactgcagaaagaaactacttctcaacatgaaagtaaagagaagagaatcaaggcaatgggctttgccacagacagggaatacacagggaacagggaaaggatcaggccccccttgcttgaggcttgctttcctcatctgtagatttaggggtctcaatcaggtcatctcaagttccctaaacttgcttaaaaagcatcaaactttgagttagaccttcagacttccctaactccttttttcctgaattaagctatgacaaagatgaccatatgtcccagttcacctagtataatctcgatttatatctgttgtcctggaataacaattaattgctcctcctttaactctcaaaggtatctccagtcggaagattaattacatgcccctcatacctatgactatattcattttaatcttggtttagatttttaagaaaacacactaatttacttttaagcctacaaatatagcatttcatagcttgctttctcttaacacttggag

SEQ ID NO: 321098 - DNA, 807 bp, Homo Sapiens
ggtatgcagctaaatttattctcacaacaaattacatttaaatgtgtaaaagtggtcaacaggaaaagggcataaaggaaaacaaagcgttctttcaggggaagtaagctgctctggaggccaggaactactgcttgcgttgacacggtgtgagtgggtatctttgccctgaagctgaagttaaactttctactggccgtgtggcacacacgttagatgtgtattaggttaagcctggccaactagagagcgaaggggcttattagttaaattgtgctaatatcagttaggaaaatgcttgtcatgttgtggtgaaatcttgagtttgtgttgcaatgcctgggacatgaacgggccatacaaacagaggaaagctctggggcttccagggcaatggccttgtgtcgagtcatcttacaagtgtccatcttgaaatcataaagtggatttaaaaagaagtagcagtgccacagtttatcaccaagaacttattttaatggaaatgggtctaatgtcccttcatgcaacaagacagatgaacaaaaaacaatggtcctaattagctatgagtgatcttgtatccaggtggaaacaaagggcatgtgtacatgtatatatctcttagatgaaatcacacatgttgtgaagggtagaaaaacgaagcaccaagcagtgctttagtctgcaaaggaaagtttttagccataggcatgttggctagtcgttccccttgatgttgccaaggagcagatgtatgaggtggcaagtctgtgtctatctagctgcttttaaaaaataaaaggaact

SEQ ID NO: 321099 - DNA, 559 bp, Homo Sapiens
  misc_feature (521)..(521): n is a, c, g, or t
  misc_feature (543)..(543): n is a, c, g, or t
ttcggcacaggtaatctcagtgaactatacattgcctaaaaagtggttttgtaatgatttgtagtcacatttctattgggatatgtagaagaaaaggcaaaatgcttaaagttccttttattttttaaaagcagctagatagacacagacttgccacctcatacatctgctccttggcaacatcaaggggaacgactagccaacatgcctatggttaaaaactttcctttgcagactaaagcactgcttggtgcttcgtttttctacccttcacaacatgtgtgatttcatctaagagatatatacatgtacacatgccctttgtttccacctgggatacaagattcacttcataggctaattagggaccattgtttttttgtttcatctgtctttgtttgcatggaaggggacatttaggaccccttttccctttaaaaataaggttcttgggtggattaaactgtgggcactggttactttcttttttaaattccactttatggattttcagggtgggncacttgtaagggtggactcggncacaagggcctttgcc

SEQ ID NO: 321100 - DNA, 1154 bp, Homo Sapiens
  misc_feature (686)..(754): n is a, c, g, or t
  misc_feature (837)..(845): n is a, c, g, or t
  misc_feature (952)..(952): n is a, c, g, or t
ttcactatacaaataattatgttatttattttgaataaaaaagtggccaaaataacaatactaatggctctgtatacaaaccacaacatattcaaggttatctcacatttacaaaactgccattatgtacagcactacatattcacagcaactctattagactctaagtaccagaatcatgtaagcaattgaggggaatcccaaatgagaaagagctaaaaccaatggtagttcatcaattggagaaatggccaaccagcgacttggtaaagaaacagaggttctgttacccttttaacaagtaataactaaaatatgattaccccacagggccttatactgacaaaccacccttccccaaatttccatttcattttctccataatcttccccacttcaaaattttcctaggaacctcagctctaatattagataaaaacgcaggacactgatatgtaatcttcaggaaaagaaggttaagtagtgctaaggatgtgggatgatctggttcaacccaaaaaagccagttcaaacccaagaaagaactctgccctcttctggcaggagtagctttgtagtgttgaacacaggggaagtgaaccacatttcatcctgatgaggcaggaagttactcactcattctacacgtcatgagcacctaccctgtgcaaggcactttacattannnnnnnnnnnnnnnnnnnnnnnnnnnnnnnnnnnnnnnnnnnnnnnnnnnnnnnnnnnnnnnnnnnnntatgtacatatatacaatggagagaagtcaccaacttttctggattgggggatattccaagcaaaatgcattgttatcaaacnnnnnnnnncaacaccaaaagtctataaaacattccacctaatcagatggtaagaattgaaaaagcatctcctttccaaaaccttatgtttttagatgactgttctgtttatttcnaaaaaaaagtcataggtaaacacatatataattcaaagccaagcacaagatttagtacaggcattgggtaaacataaaacatgtatcactatacacaacacagacttatttttctatatagtcttttctataaacaagtttgatattcactttcatacatcaaagtacaaatctgagtcaaagccttgaaaacaacataatt

SEQ ID NO: 321101 - DNA, 1356 bp, Homo Sapiens
agctcattttaaaaatcattttattgtcatttcatggttaaaaaaacatacatgacatgactataaagtaatgagacgagttctcaggtgtgggttggattactgagtctcattaatatatagtcacaatcctgacttgagcttggaagaaaaatatgccttcgctatatgattatcaattttgttacttaaaatttattgagtgccaacagagcactaggcacatatataacacagaattatacagtctctatgttgtagactatattatttacatagatttctcaaagataacattaaagcatgtatttacagaactttagacaaaaataacaatactgtaaatcagcaagtttctgtctagcaaggagcaccttttcatgaatgagagggttttgcagaacttattgtgcaaaagcactttaattccattacacagcaagtccatattattatatagttctataaagctataagaagaaaaacctaagtgggaagccatgatcagtttcattaggtcaaacgcatttaggaaattctctgctgagactgaagcttaaaaggctacagtcatatttacatattatagcagaaaagctagaactacagcatgcaattcaatgaggtggaagaatggtgaatatgaaaaccatttttctaaacctgcagtttgttctcttttctattaatttaattaccactgcagtttctgattttgagaagacattatctttcaaataaatgttgttgcacaaatttactttttaaaagagatttttggataagtacggtgaatagaaaattccccatatgatgtcaactaccaggtgcttgtaagtttgagggctctgaaggccatcctagggatacccacatgatttcagcggtgtctgttgggcagtgccagtcttggaaggtgggccaagcataaattccacaaccttataactaatattagatgaagtttctcaaacattcctttgagacatggcaggacagcgccagggatcctccttcaggaagaaactagattttacattggtactaattcaatcaaaatatttaaaacatttttaatatggaaactgaggctttttcactctaagaatctgcctccaaattcaagctgaagatttggatacactgtgattctgaataaacagtcaagaaacacaacatcaaacaataaaagcttttagccaaatgtacagtatccagtaaaaaaaggcatattgagctttaactgcatcaatcatttgctgttctctacatttgctctgcattataacaagatgaaaaataaatacttggttaatctgcttatttcatgcaaatttgtcatgtaaaggacctctc

SEQ ID NO: 321102 - DNA, 1263 bp, Homo Sapiens
ggaatcactccaggctgtctttgttcagagttaccttgatcaaggaacacagatcttcttaaacaacagcattgagaaatcgggctggctatttatccaattatatcattcttttgtgtcatctgtttttagcctgtttatgtctagaacatctatcaatgggttgctaggaagaggctcaatgtttgtgttttcaccagatcagtttcagagactgcttaaaattaatccagactggaaaacccacagacttcttgatttaggtgctggagatggagaagtcacaaaaatcatgagccctcattttgaagaaatctatgccactgagctttctgaaactatgatatggcagcttcagaaaaagaaatacagagtccttggtataaatgaatggcagaatacggggttccagtatgatgtcatcagctgcctgaacttgctggaccgctgtgatcagcccctgactttgttaaaagatatcagaagtgtcttggagccaactagaggcagggtcatccttgcccttgtcctcccctttcatccctatgtggaaaacggtggcaagtgggagaaaccatcagaaattttggaaatcaaaggacagaactgggaagaacaagtgaatagtctgcctgaagttttcagaaaagctggttttgttatcgaagctttcaccagactaccatacctgtgtgaaggcgacatgtataatgactactacgttctggatgacgctgtctttgttctcaaaccagtataaacacgtggaggtcgaagtcttcagagtccgcaccctccgggatgtgcccttggaagagggtctgtgttcacaattacgtgaagggaggacccttggggaccgccattctaaatatcatgtaggaatttaaaaagccaaaatactaattatttctttgtagtgtgtaaaggaatgtttttaaaagacaaaaacccaactctttgtggatttttatcaactctttactcagagccactctccaatgcaggtcacactccaattatgatggaagatattttttatacttaattgcagtagggactcattcccagacaaagcaatagtcacgacttcatggaaccaatcaatggattgttttttgaagactggcaataaagctgtccattcaattccaaatactggttttaaggtatagccactgatattctttcatgtttagaaattctttctgttattattcaagaaaatgtttttaatcatgctaataaacttttttggagatg

SEQ ID NO: 321103 - DNA, 1224 bp, Homo Sapiens
cctaaaagaccaaaattataatctacattaagataattctgactgtggttaagacttaagagtgtaaaatacaacatcaatattttatcacaaaagtaaagctggtaacaaattataaaaggagccagtactataataagacaggctgggagattaaagctcatcatgataggaaatagtcatcatggagctgtctggccataatctgtggcttcactggtgagaaaccaagtccgggttttccagaatctcttcttcagagagctttttgtcaccattcaaatccatttcatcaattagatgaagcgcctcctcttgtgcaatgccttgattattagggtactacccaaggtaacagctcttggggatcaagcctgccatcgttatctttgtcataatcattcacgaatctgtctttctcaacaagtatccattgctggatcttcatttggcagttggattcccacctgtaatcacccaagaaattcttccaaactaacaaatccatcaccatttttgtcatgttcttctaaagcttcttgaatgacaaattccgtcatataatcaacttcttcaggatgctcaaaagcaataaattcttcaagactcaaaccgggacctgaatcctggttagctttttcaaatcgcttcttgtcctttaagtgaagcttcctaaaggactcctcttctgcatcatccagagcagtgttctcatcaaagtcaatcacacgatcatacatctgaatgttatattcatcccaagtcacagtatcatcactgtttttatcatattcaacaaactgttgttttgcttcttgcatagcataatgcttaaaagacatctgaatccatgacctgagttcactttcagtgagaaagccatctgagtccaagtcgattttctttatgatcgcctgcagtcttttttgctgctcttcgtggccgagtttaacatattcatccacatcttcctggacgcccagcagcgcctcgcggtcgtagtcgctgcggcgctcgcccagcgggtagtgcagctcctcggccttgccggcgccggccgcggcggcgcacagcagcagcagccccaacgccgcggtcctcgggcccagccgcatcgcgccggcccgcggaggacaccgagggacgcgaggagggaggctggcgggggcccgggccggctgcgatgctccgcgggcatcccagcatccgggaccgtaccagcct

SEQ ID NO: 321104 - DNA, 578 bp, Homo Sapiens
actgcttcagttctttaatttcacaattttgagagtgcattatattttccatctctaacaacttctgatccttttcattctgcaggcagattacagcttctttttcatgtttaaccaaagcaaattcattatctttattttgtaaaacctcctcaaggcatactaactctcccttcaattttttaattttgttttcattctcttcagtttcctttattagtccgtcaagtttaccttcatattcattttttaaagacagtagttctttttgatgtttttcttttagtgttatttccagagaacattttactttttcaataatgtttcttatttctactgctgtacattttaatgaatttgagaagtcacactgttctttttgtacaaatgttctaaagtggcaaaggtcttccttaatggtttgtatactgaagtgagagtaatgggcaacaactctacatctttccaactggacattcagagaagtatgatctccaaaatcctccttaccacatacatttgtatcctgcattcgtctactgtctatcgcattgataactgatgaataaagtgattcc

SEQ ID NO: 321105 - DNA, 1456 bp, Homo Sapiens
  misc_feature (646)..(657): n is a, c, g, or t
aacatgacagtaaattggagcaaactgtaaactggacataacttatgccaaaagacgtagttgtacaccatggaaaccccatccctgctcctaatctctactgccattctgaatgccaaagcaagacatccaacatggggcatctcccagagcacatacagcaccaaaaatccacacacagcctaagcttaacccatgtttttgtctgagattgttcaccagagacaagactctgactataaacagaacatccactttcatgagtttcctttactgtattctcaacttgggccttgcttcaagcaggcaaacatacattgaagaatgcactttggtactgtttaaataacaacacatcagcccacttgattccatgccatgtccttgctgacagaaacatccccaacagggcatgccctggtccaagtcctctgtctttgtcaaaatgctcttctgatgagttggagaggaggcagccagcagtggcagtccacaaggatccaggtaccttctccaatcctaaagcagacagcaggttgaataaaaccaatacacaacctattttctaggcaggaggggaaaaggcccttaggacaataatatttgtacaaagagttgagagtaaacaaacagtatatcaggttcnnnnnnnnnnnnctattcgttggcatttaaattttttttcccttgcatagtatctattctctcactaggacttttaagtgctctgctggaggctcagcgttggtaataccatgtttgatgcaaacttgaacccaatgctctcattggtggcacagctttggagggtggtggccccaagaaggggcaatctgcctgctgctatattaatctggaaccagggccaacagctactcttgaactatggtatttgaagagcgagttcattgcctgttttaccttaaatgacaggaaaggaagatgaacaaaccttgctttgccttggcttcaaactagttcttgatttaagacaccagaaagggagagagggagtctgcttagagtttgaggttgcctctcacaagatgacagttaaaagttgccaccttacttaaaaggcattaaggaggcatttactcacaaaggagagagagtaaatttttttcttaagaggaaaaaaatactgataatacatagaacaatctgcacatccagtcttggcactttttccaatttgactgatctctaaactggtgacccttgcatatatcttagtctcttttctacaatcttcttcagaaagctacagcagctaacaatcatgtataaagatgcatttcctagatcatcttcagaagaaaatctcttcagcactttccctagaatctgtctcctgaccaccccgccccagacctgctttctcttttgagaattcataaccaggtatgtttagataccagttcaaaagaccactctatgggttgatgaggaaaag

SEQ ID NO: 321106 - DNA, 448 bp, Homo Sapiens
  misc_feature (21)..(21): n is a, c, g, or t
  misc_feature (85)..(85): n is a, c, g, or t
gcattaagggaggcatttacnccacaaagggagagagagtaaatttttttccttaaagagggaaaaaaaatactggataaatacnataagaacaaatcctggcacatcccagtcttgggcactttttcccaatttggactggatctcctaaactgggtgacccttgcatatatccttagtctcttttcctacaatcttcttcagaaagctacagcagctaacaatcatgtataaagatgcatttcctagatcatcttcagaagaaaatctcttcagcactttccctagaatctgtctcctgaccaccccgccccagacctgctttctcttttgagaattcataaccaggtatgtttagataccagttcaaaagaccactctatgggttgatgaggaaaaggctgcctgaggacaatttaagaccataatgagtttccaatttttaaag

SEQ ID NO: 321107 - DNA, 1534 bp, Homo Sapiens
caaattcgcattttacagtagaaatgcagaccactttggatagctatggctcgatacttctgggtgccctcctcctaagacatcctcttcttacattccactgaacagaaaaccatcccttctactggcatgaacttctgcccaatgaggcatttgctgcagcaagagcacagaaagcactctgtggatgcatgccagctgaaattgttataggtcacgcgctgcacttctgggtcgatggcattgtggcatccttgacacaccacagcgtgattcttcacatagcagggcttgcacacgggcttgtcattgaccatcacgtatatctccccagctagaatgctatcacagtcaaagcagcagaagtgtttcaggtgccaattctggttttctgcctgggtatactcattgctgaatatcagctcgtcacagccagcacatcggggtttctcgctgtcacagtaatgtctgccacagtatagcttctcattcttccaaaaataaatcatgtcaaccaggagttcatggcaggtgctgcagacaaaacaagctgggtgccacagtttatcatagcccagccctttcggcatagatggctgggtcaccttctttcatactcagtttgcagcaatagccaggaatattgagttcttttgtgctcagcagatttgtcctccatggcccccactgctgctggggtgcttctatcccctccaggaatgttcatttgtttggggccttgggcatccatctcacagggaagtttgacatctcctacgtctcacaggttcgctcttatatttcttcacaaactgctccatctccttcacctctctgggagacaactcatggcactttgaagggtcctggtcatgtgcagggagctgctttgccagctgcttcttccggtactgtgccccctctgagcctgctactggctgcttttccttgggtagcatctgcatgtactgcctggccaatgcttgattctggacaggaggagcccactcataggtaactgtattgatggagacattcttcttggcagcaactggattcgtcaatatcataacattgcgtttatacatgggaattccatctgactttagttttgcaatcagagtggtatacttggtgtcttcaaaaagttttcccacttttcgatcctcttcattgctcaagaggacatcatgctcttcttggccacacttgcagttacgacatatttttctccagaagtgcagttcgaatccttcacatttttctttgcattttaaacaaggggctccaaatccttgctcgtgacctaagcccatcttcttcactttgttttccaggtccatgttaacgcgtcctatgggtcccctcctcctcctatccgggatcccacggccgggttcagctggcctccggctccgctgcgaacacgggaaacctgcggaactcccgcggcgccgctcaacagccactcgcccggcgccgtcgaacttccgccgcccagtccgccgcagcgggcctgcggcccggacccccc

SEQ ID NO: 321108 - DNA, 872 bp, Homo Sapiens
gttcttcttaagtgaaacagaagattcagagtcctgtctcccaaaatgcctcaccagggtaagcacagagagtggaatataaaagcttaattgtgtaaacatgggagacacagttctcagtcaacctagccaccaatgttctgtctggccatctgtaagaaatgactacgtttgaaatttcaactttcgcattcaaaaaaagaaatcaattcagcttcagacacaaagcaaaacctaactgaacaaatggcaatagtctacatatctaaacacttgacaattggggaactgtcccacagtgatatgctcaaggccagtagcacctatttataatttggcatgtactgcttgaaggggcaacaggacccggagctaaaatattcaattataaagatataatacatcgatgaatcagacaaaagtagacatatatgataccacattaaagattcatatacagtactgtgctgactttaaagaaaatattttgggacactagaaggaaaagacaataggaaaagaattacaaaggagcatttcagtccaaagccagtccagtgaatatctatgactaggatttccaatctttgatctccaaagaagctgatctaataaattctaacaatacttcgttcacatttgggacacacaacatacttccaagtacagtaatccctctgacgttttggtttcacttgctatttgatgactaagttgtttctggctataaagatcttcctattttaattagccatttaacactacagaggctgctccctttgagagaccagacaagtttcacagaatttgatctaatgaagatgaatggtggggcaaaaagggaacatttcctgggtttttttgcaaacctt

SEQ ID NO: 321109 - DNA, 498 bp, Homo Sapiens
aaaggataattaggataatgcctttattaacgagaatgaaacgttcattcctccttccactccttctcgttggttttctggacacagctcacctgatcctgctagaaacgttgtcagtctgcttgtggcttccctccttgattgactcacgctgtgtgatgtcttgagaagtatctatccacttcatgtgaatgagcactccaatatcagccaacatcaatcattcttacctaaagaataataagaaaaagttaatataaaagacaagggtataaaataaaggtttgaaaatgctagtcaacttcaaaatttaaagagtaaaaatccagagataaagattgggggtaagttacagcataaaaaaataggaagaaacttcatggtgggggggaaatctaaaattattcttacataaaataagtagacacctgaattagaatgaaaactgtattttctttaaaatgtaaaagcctgactctcagtttcaccagtctgagc

SEQ ID NO: 321110 - DNA, 682 bp, Homo Sapiens
tttttgctgtgttccaataaaactttatttacaaatcaggctgtggccagatgtggcccacaggctgtagttgttggacctctaccgtagaccatcatgaggcctggggttcttcgagaacaagaactccttggttgattccccagggtacggcagggccttgggaacctgggtgggttggggagggtctcagaaggcttcttcctttggcaacctgacttcttggaagctcaggtttagctgacgccccagcactgggccaggggggctgaggcaggagatatggggaaggctaggagttgcctgaagccattatcccatcttaggcgacaccgactcctaggcgccctccagagccaagcagcttgcgacttctggtgggcaccggaatcccctgggatgcttgttttaaaagtcctgggccgggcacggtggctcttattaatggttatttcttgtgaaagtttctttttgcctttgcattccttttattctgtttattcccccatgcctcacccaaagagttgcacggtcaattggcccgtgaaggggacgcctactttcaaacaaggcagacaggacacgacaggacggcggctcatagcacagactttggattgcagtggatgggaccagatcctggctccacttctcgctagctgtgtggccctgggcaagctgc

SEQ ID NO: 321111 - DNA, 1554 bp, Homo Sapiens
  misc_feature (602)..(643): n is a, c, g, or t
  misc_feature (657)..(675): n is a, c, g, or t
ttgcaagtcaattagtccatctccttaaagaattcatttgaggtacagacttggagggtaatatttaaatattacagtcaaatcttgtgtgatgtgtagtgtgattgaggaaaattatccttaagaacctaggagcgacttggttaaaaaattttcaagttaatgtagaaatctagcagagaagctgaaacaagtattttaaaaatttttaattaaaaaaacatagaaaaatacatagtcatgctgaaacacagtaaggagattgcttctttaactgtaattaagtgtacaaaaagaactgcagatgattagaatcacctacccagtaagtttttttcttgcattgcttgtgtatagcagcatgtaataagtactagactgtaaattcattgtaatattcagaggtagtattgagtagtggggatatattgcatctctggctaaaagtgcagtttgaatgaagagatggtgaactcaagccgaagaaaagcaccgttggtcaaccatcttatgtcaaaaggtattccttgaagtaacacatatgcttaatttgaggtaaggtggtattcaggtctttcatggaaactgatgcacaatgaaannnnnnnnnnnnnnnnnnnnnnnnnnnnnnnnnnnnnnnnnngattgccccccccnnnnnnnnnnnnnnnnnnnaaattgatgtataactatagcaaaagaaatttagatttcgctcctcccacctcataattaggtgagttcatcatgcattattctgttgtaccttttcattaaattacaaagaggataattttacttgtctagtttccttaaatgctctgaggctgacaagtgttatttattgctaaatggcattttggctctgtaggaagtagatttcctgaaaatgaagtgttgtcctgaaaacaagtgctgtgagtaaatttattactcctgctgatatgtgtgatatccataaatagaagagttggcaatatttgtttgcttacttccctttttgaaaaatgaacataaccttttctagtttgttagctgaatgaaaggatacatcagcatttcgtctcatttagaaataaaaagttaaaaatcatcaagtaagtgtctacaagattatacgaaaaagagaaagtagtatctagtccttatctttggtgttctaaacagaggattcactacagggagtgggttggggtggtatttgaggtgtacacagtgttacacaccgcgttcttcctatatgaatgcccgacgtcacaagtgtgacacgtttcttgtttgcatgcagtgcagtgattgactaaacccaattcggtttttctcacccgcccactcttgcttatcagatcaacaaactattagtaggttaagaaaaaagaaaacagtaattaaaagttgcattgttaagctgtgtcccctgtgtttacagcagtttttcactaaacctgggactgtgaagggattacaaagaaggtgattaatatagtcctttttaaggttatgtgattcggacgcgtgggtcgacgatatcccgaaattccggccagtaccacc

SEQ ID NO: 321112 - DNA, 1008 bp, Homo Sapiens
  misc_feature (141)..(141): n is a, c, g, or t
gggttctttgttggtgacacaggttcttgttccaccgttttcaacagtgcctgtttccagggccttatttctcagggggtaaggaaccttggacctcaaatctcgttggcccctgaaggaggaagaccagtcttccagganggggcgtcaccatactcgccctttgtccccactgccctttctccattctgagctgccgcaggttcccaaggtctttcccctgtcatcatcatcaaaggatcaagtagttgacgccagagttcccggggacctggcgcctcattctgcttggctgtgagcagttctgtgtggcttccctgggcacatgagggtagctttgctcccctgccgcagcctgtggcaaacgctgggttcagttcacagtagttggcctctgagttgagccaggcagagggagacgagggaaccttgaggaacggcaccattgcagggcttaggcgggggcttagggcacagttgactgtctgatcccactcagcgcctccccagccctggcgtctgaggagaccctccgaaccactgctgggctcagggcaggctcgcttcccgtcctgaacacaggtgagtttgggcaggggcttgtgtccacacccgaggactgaggtggcagcttgcagccaatcggcaggtagctctctgactggtgggctttgagggacaaggctcttctgtcctgcatgtgatccaggcaggcgggctggctaccactcttttctttgtttctgaggaggtttcccctgggcaaattctgctctcgggcctggacgccacccatggtgaggctcagcctcttggccacatccggccttcccttggtgaggctgccctcccgggcctggcctggggaggtgccataatgctcctccaggcaccgcagaggcaccgtcctgttgatgggctggaagatgatggcgccactctgctgggagatgggccggcggttgcccacgtagcagcgcaccaggccggggatggagtcgaagctct

SEQ ID NO: 321113 - DNA, 841 bp, Homo Sapiens
tgttccaaattaatttatttattgtggagtattttacatgcaagaacccaattagagagagggtatctggaaggagggccagtggggtggatggatgctctgagcctcgggtgcactgacccaccctccagaaccagctctgcccacagaaacacatgacagtgacaaaaacactaaacttctaggacgagtggacagcaaacgcgacattcaacacattcctcttttcagtagcccccaacaatcctgagaatcctcacaattaagtgcaaactttaggaaataaatatccgtccccctctccgggagagcctggaggtatggacagacagaagcagttctgactcgggggctgatggctgctccctatggctggtggccgcaggggaagcctgacttggaccccacagataggaagggctggtgacgggcactgggggaggcgagcacttcaggggctgacagacaatgtctctggggtggaaacacttctctctgggtggggaaggcctactgtaacccaagtgggtgagacgtccccaaagccgacagtgcagaagctcccagggaccactccagcagtgccagaggctgaagccaggctgcaagcaagtgctcctccacactgctcttccagagctgccccaggggctggcctggccccaggtgggcccatggcctaccccaagccatccagaaggctgggcccaactgagttagagatgcgtgtctgcgggggcccagggtggggtgtggcagcgggaaggaggggggcaggagcgtgagcatcggcagcagctgccctgcgagcatctgttgcccttgggccatgtggagcggc

SEQ ID NO: 321114 - DNA, 583 bp, Homo Sapiens
  misc_feature (452)..(452): n is a, c, g, or t
  misc_feature (455)..(455): n is a, c, g, or t
ttttttttgactttaaatgataaacttttattctgaatatactgtttttgcacaagatttaacacaacattttctgggattataaatattttataacagtattatacaaatttttacaaaatgtttttatcaggctaggtaattttcacaaaagtgtcaagagaacaaaataaaggggagaaaagatctattgttcacaaaagccagttggccttttgcatgaatgcacaccattttaataaaagtattcctaaaagcatgatccgacactcatacaacacaacaaaaaagacagctttactaggtcacattataaactcaactggcatctacacaagacagtatcccattagtttcagtggaatttgagataactgtgtgaactagaaataaggtagatgaagagttgtctaattcttcaaaaatctggaatttttttcaacactcaaaancanttatattggtttgctctttacagaaatgtactgtgaatattgacattctgctatgggaaacaatacaagtttagatgaaaaaatatttaaaattttgggcaagtgaaatagttatttcattctattct

SEQ ID NO: 321115 - DNA, 612 bp, Homo Sapiens
gatgagtggccgcgcggaaggagctggagacggtcgtagctgcggtcgcgccgagaaaggtttacaggtacatacattacacccctatttctacaaagcttggctattagagcattatgaacattaatgacctcaaactcacgttgtccaaagctgggcaagagcacctactacgtttctggaatgagcttgaagaagcccaacaggtagaactttatgcagagctccaggccatgaactttgaggagctgaacttctttttccaaaaggccattgaaggttttaaccagtcttctcaccaaaagaatgtggatgcacgaatggaacctgtgcctcgagaggtattaggcagtgctacaagggatcaagatcagctccaggcctgggaaagtgaaggacttttccagatttctcagaataaagtagcagttcttcttctagctggtgggcaggggacaagactcggcgttgcatatcctaaggggatgtatgatgttggtttgccatcccgtaagacactttttcagattcaagcagagcgtatcctgaagctacagcaggttgctgaaaaatattatggcaacaaatgcattattccatggtatataatga

SEQ ID NO: 321116 - DNA, 1037 bp, Homo Sapiens
aggtctccggaggactgaaggtttttctggtcaagggtcagtgtccttggaccccatctcgttcaagcttacagcgtcggtacaaattcatagtggcgggttgtgagtcttgctctcgcaagtcctccatgttccacgcgggatcagcatctctcgaagtttcactaaatcgccaatgattggtcattcgtcaacctgcaccacaccccaggggtactgcctggcctttgccatcttgttgccaatcttcacctcttcgggtgctgccaaaccactgcaaatgggagaatggacactcattgttgcgttaatctctgccaccgtttcttcatcagtgggaaactgatatatctggaccccattgctgaccagttcactcatgatcttactcttgaatttgtgcagttcattcttggcaatggtgtcagcttttgcaattattggaatgatgttcaccttactgtccagctttttcatggtgaccagatccagggactttagtgaatgtccagtaggggcaataaagtagaggcaggcatggatcctcgtgtcatggtagttgaagagagaacgtttaatcttcaattcctcttgcaggtaggcctcgaactgggcatcaatatattctactatcggcttatagctgtcatctttatttatctggtctccaaatcccacggtgtcaacaatggttaacttcagccgtacattgctttcctgaagctcataacttctggcttttaaccgaacacctggttcattgtgagtagctgggtcactttcaaatttggtgttgaacaaagtgtccattaacgtggatttgccaatgcctgtctcaccaacacaaaggatgttgaaacagaatccttgagaagtagacttgttgaccagctggtcagggaggctgtcaaatcccacatggccagacaaagacaagtttcgaagctcttcattagacggtctccccacggccacggccatcgcagctgcggcaccggctccggctgcgcccgggtgctttccgccgactccggccc

SEQ ID NO: 321117 - DNA, 1361 bp, Homo Sapiens
  misc_feature (391)..(391): n is a, c, g, or t
  misc_feature (393)..(393): n is a, c, g, or t
  misc_feature (808)..(839): n is a, c, g, or t
tgggagctagagaggcgcagtaattggttgagcgggtagattgagaggccacagtgattcctacttcactctgccttattgcgagacgtctcactccgatgtctcacaagttgttgtgtgtgtctagggggaaaggccttatgaggcgtggcagtggacatcgaaggcgggggcacgggaacgtcgagatggggagttgtgtaaagagtaggtagtggggtgtaagactaacaccacgaggccagggtcgttgggcgcagcttctagtcaagaggtttatgcgcggaaactcctgaagaagggggtatgtgtggcgccaccgccatgtggtgtggacttggggcaaaagagggtagggcgcgcaatagtgttgggggagccgtagatttgntnctctcaacgcggggcgcccacggcgctgatgtctgtatcggcacataagaaatacccgcgtgtgcccccggccaggggcccggctattatgggatcgcaggaaagggggggatttttttacgcaagaaatgaggggaagaagtgttcttttcggcgttgggagacgcagtcgaggagggtccgcttatgaagctggaaaggtaaaggtgtaggggggcgatatttacccaggcgcccgcgcggtgggcctaagtccagtagggcgggggagtaccaggtttgtctgcggtcgtattcagacgcagagaagtacgcgagcttttcggccccatgtgtgggcgcagagcagggttctaagaacctcctctggccctccatgtgatgcgccgcatctgcaagccgcgacgggggctgnnnnnnnnnnnnnnnnnnnnnnnnnnnnnnnnccggtcacggattttttaaaactctaaggtcattagcttgacatctataaaatctcctccatgacatgaagccttaaacctagggacagaaacacactgagacacagaaacaccttctgtgcttcaatacacagagcattctctggaaatccctacgacacaggcttaaaggccagtgctgtgcctgaaagacattttgaacaggcaaggagtgtaagctaatacactactgttacaacatggacaaatacttgtaagatgttaaatgaacaaaggaccagaatacaaaactgaatacgcagcatgaggacaaccaaagttaaacccacacactcacacaccccgtctacagagagactagaaaggaacacgccaatgccaagagtggttatgttacagaaggttgggactcggggtgattttgttgttttgactttcatttttccaaatctttaatgagcctcgtgccgaattcgccacccaggcctcgctacaaaaaaaatttaggggggggttgacgag

SEQ ID NO: 321118 - DNA, 1074 bp, Homo Sapiens
  misc_feature (252)..(252): n is a, c, g, or t
  misc_feature (370)..(370): n is a, c, g, or t
cgcctgtcctctctttatttgtagagacgcggttcccgtgggggagaacatttcgtcactcttggtttttcccagataacgcccgacaggaagagcccaaggatctgcgattgggaaggtcccacttacccaagaatgtttcggggagccgcggataattggcccgaaggtggccaccggtgtggagccacgggttaggagatgcctttaggggaccggtcttccggaaatggggggggccccccttttccntctcacaccccatgttccccgcggagaaaggagaggggccccttttgtgctgccccaattaaggaagtgggttatttccctttgtgggggggcctttcacaagtgggtgacattgtgncgtgcaaataagatgttgggtttgagagattctcccccgccgcgggaaatagggaattccatttgggttgccattgcccttccccttgtggccgccccctccaaggtgtttcccttccggtgggggattcctgtcctggggcttggcggcttcaaaaaggattgggcgttggtgtcattccgcgcgttctcttcgttctggtgtcccaggctcaattagaccaggctgttcgctccccatattcctgctggtccccaggggtgttcgccgaacggggtggattaataaaccacgccgagactcgtcggggtcattttccttcttcctgttcgctgctcaagtcgcggtaagccgccttctgtttaccactgtcacgggtcttgtgtatcattggattgtgggtcacccgcttcttttccggtcgaaccacagtgcagccttcgtcgctactgctgccgctttctccgggctctgggtcgcaggccgggcgctttctgcgtccagcagcccctttccgcccaggctttttgaaaaggaaggtgcacacctgatccaccgcctttcctggagaaagctgctctgccattttagagtcctgagctccgaaacagccgtggctgcctgggttgcacttggcccctgcacgtcactccacgttgcgcgctccgccgggagtcgaagcaaaagacactgacggaagagcc

SEQ ID NO: 321119 - DNA, 860 bp, Homo Sapiens
  misc_feature (67)..(67): n is a, c, g, or t
  misc_feature (80)..(80): n is a, c, g, or t
  misc_feature (137)..(137): n is a, c, g, or t
  misc_feature (149)..(149): n is a, c, g, or t
  misc_feature (329)..(329): n is a, c, g, or t
cccccaaaagtagcactgcctgaaaatgtgggggaagaagggaaagaggtggttttccctttccganggcaaaaatatcnacctcaagaaaagaggcccttcctttaaggcctggtttttttccctttccttcccanaacttcctaaangtgcctctttaactcctggttgggggctccggccagcacagctgtggcaggctcaagtggcaacagcatccagcatccagcaggaaactgagtggaaggggatagattccgtggaattgccacacggctcattaatctcatttacactgatatagccctcttttaaagtattggggttanacgggaaaccctttccccccagagaggctggagtatttcttttccaaattacaaagattctccttttctctttgcaacatcattattaaattattcttttctttcacaaaatgatcttgctctctctgagcctgctgaacaatgtgattggcttgctttttcaatgcagaaattttttcctttctagaaacgatgttccgttgatattcagcaacttcacgcaggagctgttgaggtcaagttctccttttccttcatctagccggctctcatgttcaagctgctggaactccaggtcttcaaagtgtttgctttcaacatccaacaggtcagcatccctcttcagttgttgttgtaactgttccctcatggactcaggacaattgtccagctgggtcttctgctcggagtaaagctcctgaagcctctctagtttttccctttcagcatcaagctttaccttctccttggtcttttcaccaacaatgttcttttccagttcagctattttccggtttagatgatccaaaa

SEQ ID NO: 321120 - DNA, 255 bp, Homo Sapiens
  misc_feature (83)..(110): n is a, c, g, or t
ctaaatatataaaaagacttataaaaactagaattttatccaaacattttgtgcaactaatgctaaaatattttaagttaaannnnnnnnnnnnnnnnnnnnnnnnnnnnaaagcaaaataagtttaaaagggaatctgtggcattcaaccgataaacagaagatcactaagagatgaaaaaaagctactcttggagctcacttcccccaacaagagcaccacattcctaacccctaaggcagcacacagagtcc

SEQ ID NO: 321121 - DNA, 747 bp, Homo Sapiens
  misc_feature (477)..(477): n is a, c, g, or t
ggggcttaactctttaaaggtaggttcgtgacccttgagaaaagagttggtggtaaatgtgccacgtcttctaagaagggggagtcctgaacttgtctgaagcccttgtccgtaagccttgaactacgttcttaaatctatgaagtcgagggacctttcgctgcttttgtagggacttctttccttgcttcagcaacatgaggcttttcttgtggaacgcggtcttgactctgttcgtcacttctttgattggggctttgatccctgaaccagaagtgaaaattgaagttctccagaagccattcatctgccatcgcaagaccaaaggaggggatttgatgttggtccactatgaaggctacttagaaaaggacggctccttatttcactccactcacaaacataacaatggtcagcccatttggtttaccctgggcatcctggaggctctcaaaggttggggaccaggggcttganaaggaatgtgtgtagggagagaagagaaagctcatcattcctcctgctctgggctatggaaaagaaggaaaaggtaaaattcccccagaaagtacactgatatttaatattgatctcctggagattcgaaatggaccaagatcccatgaatcattccaagaaatggatcttaatgatgactggaaactctctaaagatgaggttaaagcatatttaaagaaggagtttgaaaaacatggtgcggtggtgaatgaaagtcatcatgatgct

SEQ ID NO: 321122 - DNA, 1919 bp, Homo Sapiens
  misc_feature (66)..(66): n is a, c, g, or t
  misc_feature (215)..(215): n is a, c, g, or t
  misc_feature (225)..(225): n is a, c, g, or t
  misc_feature (287)..(287): n is a, c, g, or t
ccatttgcccccaggcattcagggaaagccaaaggagttattggtgccaataaggacaaacccacnctggccccatgggatcccgggaatgggggtcagggtcagttgaccctgagcattacccattaaaccatgttcaaatgttccccatccccaccccactcacatgacatggctcccgagccctgagatctgtatcccaagaacctcagtgnagaaatcttnatggcagcttcactgttgctcaagagcctgggtattgtagcagcctgggggcaggttgtccntaatgttctccaagttcttcacatcagccagaatcccatctatggcttgtctcccagcaaatggagggtggcccctctgctgacgtgccctcttcttccagctctgacatcatgggccggcagttggctgttgatctgggtcttggctcggggaaagcttctgctccagtaagaccagcccctcttcatctacactgagaggctggtccatcagatgcaggaggccgtctaatgtgttgagtgtgtcttggattgtaaccccagcgttcttggctctggtatcaaccttctgggcttctgtaatcaccatctgtactgcatccatattcgtgtcaaactccagctccttcctttccagctctccttccacttccctcatctcactcttcagagaggccagtcccttttccatggccaaggctccatctgctgtcacattggcttccaagttcagactcccaatctcctgttcaatctcactggagatttccagggcctccccggccccattctttgccctctgtgcatcagcagcagcgctccccagggctctttctgcttgctgggtcttgtcactggcatctgaaaccttctggctgatgtaggagagtctcttcatggcttcttcagcttctgcttttctgttgtccacctgcaggtcaaactctctgaggtttttaaggatgctctcaacttcataaaaagtggcattgcccatactcagtgcttcttgtgctctgcttttagcaagattggcacgggaaagcagctgatctgatttctctctcccactttttccattctgtaagagctgctgtgcttcttctttccagtttcccagattcttttgtgtacgcttgaactcatccatatgcctggttaccaggcttgagagtgaatccgctttttgtttgatcctcttgcttcttccacctgaaaggactgatcactgactccttgaagccgagacactgaatccaggaggcggagactgtgctgataagacctatctgcttcaatttccgcttgagtggcctcccttgtcaactgctgggccagggacttggttttctccaatttttccacaagcccttgcaccacagcaccgtccgggctaccgcttccgcttccgactccttcatgcagggccttgcgcaccagtgagagggcttgtttggaatagtcctcagtttcccttgtcagttgctccatgttactggctgactcaacgtggctttctgctaatcttgtggcctcctgagccagacttttaaagccatttggccccacgtagtggtctgaggcaggaatgttagtgtttcccaaggaagcttcagtttctgccaggctcagctgcatctgagtgatgagcctgtgagtatcccgaactcggttctggtactgacttcccagagcccgaactctttccacagtcatcttgaggtcatccaggcggctctggtagctgttctcttggctcctcaccttggccaactggagaccaagggatctgctagcaccttctgaaatctgggcatctctcagaatgtcctgaagggcctgctcagcctgctgcatcctgccttccagctctgtatcaggtactactccatcaccaccctgagcctttga

SEQ ID NO: 321123 - DNA, 697 bp, Homo Sapiens
tgaactgtgtcagagggagaggggtggtggctaggaagagggtcagaaagaagctagagggaggtcaggagaagggtaacagggaggatgcaaagcagacatctaccctggtcaccccaggatcaggatatctgtccttgtttcatgttgaattcaaaaattggatctcacttaggctttgaaggtgacagccatctctgatagctgagcataagtaaagaaaggtggagtgccgatgcagaaaggaaaatattcagctttcctctcttagatcgcactttgaagatggccttttggagacaatctgacaggttaaaacaggaactgttggaattattctagctgtaactacctattggctatgtgttgattgatcctagaaagaaaaaataatttttcattttagatcttgattgaatttaagatgtatttatatgcctacaaaaggtctgtcttgtaactgttgtataaaataaacctaatctatggtttcatttttaatctaaaaaaagttgtgccttaacaatagggcattgtatgttaataagggaaaacaacctttttagtagatgggggaaaataggaactttttgccattaaaacttaagttcttttgatgtttttaatattatagttgggggagattcattaaaattaaattgaaataaaattatttttgcataacctagcatttaca

SEQ ID NO: 321124 - DNA, 907 bp, Homo Sapiens
  misc_feature (75)..(75): n is a, c, g, or t
  misc_feature (105)..(170): n is a, c, g, or t
aaatttggccccggcgcccaaaaagaaatggtttaaaaaaattttttgaggggccggagggcgcccacaaaaaantatattggtaatggtgggaaagggagaaannnnnnnnnnnnnnnnnnnnnnnnnnnnnnnnnnnnnnnnnnnnnnnnnnnnnnnnnnnnnnnnnngtctgttaaagaatgctttattaatacaaatacacacaaactctgaagcactaagaaatttaaatatctatgtcacagcaaacaggtggcaattcaacatccagggtcgacagaatgcttgaaggagactgcaacagattggattcccatggtggagagggcatcttcacaggtgaaggggggcccagctgaaacagcttttcaagctctctctcctcgtcaaggatcatgagaggcactccactcaaggggaggtgcgcaatctggtgctcttcaggcaggtcaaaactctcaaagtctagaggattgaagggaaagaatttttctatttctggataggcatcatctgaggcaggaacagagctttttgctttaacagtcttctcagtcatctttttggcagaaaagcttggctgtttttgtttgaggggtcccttggtctttacagacttttctgtagctctgttgacagttcccaaagcctttctagtagctttaggtaaggctggtggggcatcgaacgttttgccaaaacgtggtgttgaaacttgagatctcccatctaaggctttgattgaaggtccagaccccagcttcagcccatccttagcaaccacacgggtgcctggttctccattttccttatcaacatagatcagagtagccattctggattattgcaggtcttaacagccgcattcatctgaggccgcggtgaggggacgcggcgcactcct

SEQ ID NO: 321125 - DNA, 827 bp, Homo Sapiens
  misc_feature (212)..(212): n is a, c, g, or t
  misc_feature (238)..(238): n is a, c, g, or t
ggtgaaagggggggccccagctgaaaacagctttttcaagcttctctctcctgggtcaagggatcatgagaggcactccactcaaggggagggtgcgcaatctggtgctcttcaggcaggtcaaaactctcaaagttctagaggattgaagggaaagaatttttctatttctggataggcatcatctgaggcaggaacagagctttttgctntaacagtcttctcagtcatcttttgngcagaaaagcttggctgtttttgtttgaggggtcccttggtctttaacagacttttctgtagctctgttgacagttccccaaagcctttctagtagctttaggtaaggctggtggggcatcgaacgttttgccaaaacgtggtgttgaaacttgagatctccccatctaaggctttgattgaaggtccagaccccagcttcagcccatccttagcaaccacacgggtgcctggttctccattttccttatcaacatagatcagagtagccattctggattattctaagaatgagaaatacatattagatattggggaaggtgggagaagcaaaggtatagcaacataccaaactttctatcctaggagtgtccacacaaaaaaacaagagctaaacagcggaacagtcacgggcgtgagccaacaagtacttaatccagctctcaaatcttccagcctgagtcagaggctctaaggtcccgagcagcgcgcggtttggggctggcactcatcagacagttgccgttggtccagttagcagtccgagaccacgctcaaacgggctcggagccatctaagccccgggcagt

SEQ ID NO: 321126 - DNA, 544 bp, Homo Sapiens
  misc_feature (480)..(480): n is a, c, g, or t
ctgttaaagaatgctttattaatacaaatacacacaaactctgaagcactaagaaatttaaatatctatgtcacagcaaacaggtggcaattcaacatccaaggtcgacagaatgcttgaaggagactgcaacagattggattcccatggtggagagggcatcttcacaggtgaaggggggcccagctgaaacagcttttcaagctctctctcctcgtcaaggatcatgagaggcactccactcaaggggaggtgcgcaatctgggtgctcttcagggcagggtcaaaactctcaaagtctaggagggattgaaggggaaaggaatttttctatttctgggatagggcatcatctgagggcagggaacagagcttttttgcttttaacagtccttcttcaggtccatcttttttgggccggaaaagcttgggccgtttttttttttgagggggtcccctggggcttttacagacttttcngtaggccccgtttgacagttcccccaagcctttccagtagctttaggggaaggccggtgggggc

SEQ ID NO: 321127 - DNA, 966 bp, Homo Sapiens
ttttttttcacagatgcaagtgccatgcaaaaataaattaaagaacagataccaaaacatacatgtgataaaactacagaaggtagatttttaaaagcatttatataaacataatttataatacttctgtttttttccctttatatacagtcacaaagctgtagttatacatttaggatttcctctgctgtaccccccacagcggtaatctgtagcgaccagttctccagcttataggttgggtccccataatgcagacaaaaaaatgtatattgtcatggattcgcggatgaaccaggcgactgcataatcaagttttgaaaaacacagtgtgccaccctggacacccctgagttgaatgtagtcaaatataaaccatgccaggcaatgacacatgaaaaataccataatatcccatctgaacacatggtgggctgcccatccaataattaaactggcaacaaagcattctgaaattggctcacaaattattgtagcaggaagcatgttaattcgtagtttggtccacctgatcattctggattgaaactgagaaattgaatatgagccagagttttgcattgcaacttgagtggacattgcaaacctccaacctcggtcagctatcgctttggccataaagtaatcttcggcaatgtactgagcaaaagctataagtcctcctgcttgatccaacacatcttttctcattaaacaagacatttcctgtcacacattttgaacccgttacattggcagagatatagtatcttggatgtgaagttccaaaatatacctgctctaaggtggcagcaaagccctgtctgtctgctacgtaaggcagcccgtgaaccaagcctactttttctgtcatttgattcaccatgtcagtaagcgtatctggaattactcttattccactatcacaaatccatataagatcatactttgcaacttcatatcctg

SEQ ID NO: 321128 - DNA, 791 bp, Homo Sapiens
gccccccttttccaatattactgtttttctatttaaaccttttgagttgtagtcagaaactgttgttggactgcatagttttcaaaagtttttggtacatttctgactttagaaatctggggtaggaatccctttcccatatgcatatagactattttctgagcttcttcaaaacatgtttcagtgggttcctgaatgttcctgatgatagtctctcttgtcgaactgtcaatgttaatctctctaggggactgtggctggatgtaaatcttataaagcttctttgccctagaaattctgctccaccgtgaggcaattttcttataggtttcacatgccatccagaattgaatattctcgtcactgtgctccatttttaaatatgctgcatagactactggaccatattttgtagccattaaattttcaaaagactgggcccactgtaatacttcctccaaagtaaggtttgaagggggcctcttagattcatctctgcacatcttacaaatccaacaattccgcctgctcatttttcaagcttcaaataaacaatgatcatttttttctcatgttggtggtataatatgtggaaacattccattgacaaatatatcctgtcgagcagtccaccatgctaaatttgatctcctctttgttatgatccgtttgaaatcaggttctgaaattttgtgagacacccagcattttatttttcccagagtaaaaggattttactgtctctataattaccttcgatggcactctggcctcagtatgaatgttctccc

SEQ ID NO: 321129 - DNA, 505 bp, Homo Sapiens
ttctattaagtcatttagagacttttcacctccatattccatagcaagacacagactgccatcattggcttcagtaaaagcacgataaccaacaatgtttggatgatgaaggcttttcaaaatcttagcttcatccattagtctcttttgatacacacttcgataatgatcattacatataggattaatcttttttacagcccaaggagaatgagacaaacctcttggagatcttttcattaggtacacatttaccccagtaccaaagccaagcttctgcataaacggagaggccgggatatttatagttggagttgaacataatacagatttctttttttctgataatttgcttggtgtcttgaaattactgatcccttccattgtgaaagccactctcagtcctcttcaaaattggtcccgagcggcccccagcgagaccctgcagctgcctctagcaccaacacatacgcccggcagctgccgttgcaattcgaaccctccc

SEQ ID NO: 321130 - DNA, 694 bp, Homo Sapiens
tgcagatactttaaccctcttgccatattcaaagcaacttttaaaattatggctgctggaaaaggatcttggctggctttatatcgttcttctattaagtcatttagagacttttcacctccatattccatagcaagacacaggctgccatcactggcttcagtaaaagcacgataaccaacaatgtttggatgatgaaggcttttcaaaatcttagcttcatccattagtctcttttgatacacacttcgatagtgatcattacatataggattaatcttttttacagcccaaggagaatgagacaaacctcttggagatcttttcattaggtacacatttaccccagtaccaaagccaagcttctgcataaacggagaggccgggatatttatagttggagttgaacataatacagatttctttttttctgataatttgcttggtgtcttgaaattactgatcccttccattgtgaaagccactctcagtccagagtctcaccgcctggaaggaaaggtcggaggtgaaaataagtcgtggccaagtacctcttcaaaattggtcccgagcggcccccagcgagaccctgcagctgcctctagcaccaacacatacgcccggcagctgccgttgcaattcgaaccctcctggctttcaaaaagtcgcgcgctgcgccagcttcggccccccc

SEQ ID NO: 321131 - DNA, 919 bp, Homo Sapiens
atgttttcaagagggaaatttttttcgggaaagggccggggatcttataaatgtggggggtccaaaaaaattccccgttcttttccccatttgtgggcacattatctaatacctatcttctacagggtggttccccccagtccagggccttaggttttgtggaagttaaattatttggggggggaaaagggagggaatcccctgggaacccagtacttccattgcttgaacccatttactttgtgacttgaggggcttttgagagaaatggagtagccagatagataaataaattcatagaactcaactctggcagattcatcagcaccaccaacacagtagggagagaacaagattaaaatgggaaaggagtggaaaggaaggggcttgagagggaagacaatgagggcaaggtgatgggagagagaagtcttggccttagagcaagtccagttcgaaggagtggatgctggcaatgggagctctccagaagttgaaggtgctgtactcaaggaggccatcaccttcagggtttttctcctggtctgctgcagttgcttgcccgatcattttgccaacgctgctgtctttgaccttgtaggtggctgtatctgacagacccaggccttccagctccgacagatccagttctgggatgggcatcctccagaaaagaaaggaactgtactggctactcacagggtccctcatagcttcctgttatcaatcaattactggcgtgttccaaagatggagggagtgcctcgggagctccggggtctgcgccgggctggagaaatacaaagctgttggggctttgacggctttgtcttctcactccttttccctcttcagtgactgagtctgtcagttcactctccccctgcaatgcagcccctcctaagaagggcggaaggat

SEQ ID NO: 321132 - DNA, 718 bp, Homo Sapiens
tttaggttcacaattaaaattgtcttgaaagtatttattgtttaataattctttctcccctcagccccatccggccactctctctttctgcttttctgatcatcctaaaggctgaatacatcctcctcctgtgtggaggacacgaagcaatactaaaatcaatacactcgatcaggtcttcatcagataccacgtcactgtgggtagagtgctagttttcaacaaatgtggtgttcttagggctccacaaggtagtcctttctcaaggtcgctgggccactcatggagttgaaatgccgctgcccatctaagtacaacatggactctccatatgtttttgggaaaaccaatggcacttctttttccgacatgaacgtgaaatgaaagacattggtggttgtatgctgcttctcctgcagggaggccacttcactgtgtactctgacttgaatataattattctgagtaaagcatacctgtgaagaaagaaagagcaatgagccaacctcaacaggtttctgaaacatgatgtcatctactgctaccacaaacggtcgagaaccaccaaagctacaagcagtagcccacgcaagttcatatgccttcctcataaggaaaccacccaagatccgattgaaaatgttccgctcctgagggtggcaaatttccaaactcttcagttttgaattcttcatccacactgcattagagggtaaat

SEQ ID NO: 321133 - DNA, 510 bp, Homo Sapiens
caagttaataggaaaaaacaagtgaaaatgcaccgagtgtggattcaaggcaaattccagaaaccattgcaccagactcagaatagctccaatatggtatctacactcctttcacaagactgaactttgtaacatgttaaggtacaaagccagaggactgtgctattcaaggactactgtaagtttattgtttctcaaaaggcaatgagaaaaaaagaagagaatttgtatttcctgccgttttgtcataggtgagttcctttgtgcattttaagcacatgtaagtggttcagcacagtatgcctttttctgtgctttgaaaacttgatatgctcaagcttgtttgaatttattacatctaaccattttgcttgttccttgatttttataagcattcaattaagttagtattaaataaaagaaatttgcagaagaatgtaacttgacatttttggcaagtaaaaaattgtttatttgttaaggattagtaaaccagttcccaaacacaat

SEQ ID NO: 321134 - DNA, 689 bp, Homo Sapiens
  misc_feature (48)..(48): n is a, c, g, or t
cagacctttgcttcttgctcttctttggactgttcagcctgcttctcnagcttgcttcagaagcctctggaacctctcatcctccagcacgccttggtggaaggtcagtctctccctgagctttcagttcctccagcttctgccgcaagtccctcagcgcctgcagctcatcattgaagggctctgccgggtcagagatgcctgaaggtccagttctaagtctagagatgtccgcactgggcattcctgtgttgttcttctaaggactgactggcaaaccgtccttttgaccctcaaactgcggcgttcggtggagtttctcacaaacagtgattttttagccagggttgaactgtcactgtcactccgatttaacctgcagatgtactggttccgctctcctggagaaaaggtctgtgagcgcactatcacactgctcctcacaaacggatgctgtctagagctcaggctgctgcgctctttggggcgaactgccatattgtcattagcggcttcatcagtgtttgtctctttgtcaaccagtgttggtattctagtaggtggctgacttctgaggtctttggcacagttgctttctttcctgttcccgtcttcattcatctcaggcacactagtgcatgaacttaaatcttctgtacagctactgtcctctggcaatttaacttcag

SEQ ID NO: 321135 - DNA, 593 bp, Homo Sapiens
gccgggaccagggaagccgccgacacgttggagaccctgcggatgcccacagccacagaggggtggtccccaccgcggccgccggcaccccgcgcgggttcggcgtccagcaacggtggggcgagggcctcgttcttcctttgtcgcccattgctgctccagaggacgaagccgcaggcggccaccacgagcgtcaggattagcaccttccgtttgtagatgcggaacctcatggtctccagggccgggagcgcaggcgggcgggcgcggaaaggagcagctgcttctgcacggaaggggcgggcgggcggcggccgtcgccttggcctgtcacggtcggaactggcagctacagctcgagcgtcggcgccgccgctaggagccgcggctcggcttcgtctccgtcctctccattcagcaccacgggtcccggaaaaagctcagccgcggtcccaaccgcaccctagcttcgttacctgcgcctccagcggccctgcgtcctctgcgctctcatccttacaggggccctagacggccagaactgagcgacgcggcctcgcctcactccggcggggaccgttatgacaacccgc

SEQ ID NO: 321136 - DNA, 475 bp, Homo Sapiens
  misc_feature (320)..(320): n is a, c, g, or t
  misc_feature (407)..(407): n is a, c, g, or t
cttctcaccacaccctaatctaagctaccatcagcaccttttgcctgcatgactgcagttgtctcctaactgttcttcctgcagcgactctggccctccctgtattcactcgactgcaagcagaattctcctttttgttcgaagttcaattttaatcaagacaacccacctacctgcacttgcacccctagcttaaaatgctcgaatggctttttattgtccttaatgatgaaaaggaaatattttatgtgaccaaatatatttgacctatgaggtcagatatattagggccactatctaaagcatagttccaagcattnaaaatagttactgtctcagattaaaacagtgggctgggcacatcacctcaatagaggttacctattcttgttggccacttaggcctncatatgtaccatgttttacttaataccttcattgtccttaagtattcgggatgaggattacgtgcttc

SEQ ID NO: 321137 - DNA, 941 bp, Homo Sapiens
  misc_feature (44)..(52): n is a, c, g, or t
tgtttagaaaagggagggaaccaatgccggccaggtgggggcannnnnnnnnaaagggagaggttcccagaaaggcccagggggtgggtcaccctttcaaggccttcccgacttccttccttggagtggctgggcaagcaatgcaggggcagcgtctcagtagggcggcagtggcaggaaggggagcggggcggccctcgcagggtcccctcagttggcaggggctgcattgcagaatctgctgtggggcaaagagcttcctggcagccacggcttcccctggctttcctggcactgggcagttctctttgttgtccggcccggcaggctggcctgaggccttcttgaagtagcagagccgacacacggagtggtacttgtctgctcccccaatcacctcgacctccttctctgtgccgagcctcttggtataggcggcttcccggaagcactccatgcacaccgccgtcagcttcaccacgctctcggccagcggcaccaggttcaggatggccccaaatggcttcctctggaaggtcccatccagtgcagccacaattacggtcttcccggcgttggccatggcctcgcagaactccacgatgtcagggaaaaactgcccctcgtcgatgcctatgacagccacgcccagggcctcctgggccacgtctcggagcaggcaggcgggcagtgcctccatggtgttccggtcatgtgtgcagaagctgctgctgtagcgagtgtctttggcatacttgatcaccaggcacttgtactgagcaatctggaagcgacggacgcgtctcatcaactctgtgctttttccctgagaacatcggcccgagaatcacctggatctgcccccgggtcttgctgggggagccaggcagcacagtgggcaggttaatgcagctcattgcgcgtccgggaagttcacgaac

SEQ ID NO: 321138 - DNA, 1439 bp, Homo Sapiens
ctcttgaacttttcaattagttaatttcataagctacagcagaggcgtggaccctgccctctccacacttgaagagataagcccctgggatccaagtcccagcaaggttggtgccacccatcttggtgaaagatgctgttgttcctgtggaaaccatcaccagaggtaggaagggctttgagcccaaaaaggaaacaagagggcgtgaatccaggccatcctcaggggagggtgggagcccatcccaggcagagaggcctaagcctcagtgtgggccaaggctcaaaggtgctggcacaggcttcccagggagaacagaaactcagcagtgaaagccgcagaggggaagaagcaggctgatgtcaacagcgtggggctctgtccctcaccccaaggagagggagtgtgccagatcccaggccaccaagcggggccagctccagcctgggcgatcgtcccagcagctgagagggaagctttaagcagaccagtgggtaggagaggagggagcatgcggcaggtggggcagccacacaaaggagagttcccagaaggccaaggtgtggtcatcctccacgcctcccgacttcctcctggagtggctgggcagcatgcagggcagcgtccagtaggcggcagtggcaggaagggagcgggcggccctcgcaggtccctcagttggcagggctgcattgcagaatctgctgtggggcaaagagcttcctggcagccacggcttcccctggctttcctggcactgggcagttctctttgttgtccggcccggcaggctggcctgaggccttcttgaagtagcagagccgacacacggagtggtacttgtctgctcccccaatcacctcgacctccttctctgtgccgagcctcttggtataggcggcttcccggaagcactccatgcacaccgccgtcagcttcaccacgctctcggccagcggcaccaggttcaggatggccccaaatggcttcctctggaaggtcccatccagtgcagccacaattacggtcttcccggcgttggccatggcctcgcagaactccacgatgtcagggaaaaactgcccctcgtcgatgcctatgacagccacgcccagggcctcctgggccacgtctcggagcaggcaggcgggcagtgcctccatggtgttccggtcatgtgtgcagaagctgctgctgtagcgagtgtctttggcatacttgatcaccaggcacttgtactgagcaatctggaagcgacggacgcgtctcatcaactctgtgctttttcctgagaacatcggcccgagaatcacctggatctgcccccgggtcttgctgggggagccaggcagcacagtgggcaggttaatgcagctcattgcgcctccgggaagttcacgaacccgagtactctcatcccggaaatccggaccggtcca

SEQ ID NO: 321139 - DNA, 781 bp, Homo Sapiens
  misc_feature (49)..(140): n is a, c, g, or t
  misc_feature (627)..(627): n is a, c, g, or t
gactggaacattcaaaacctgttgatgggctcaagaaattctcaagaannnnnnnnnnnnnnnnnnnnnnnnnnnnnnnnnnnnnnnnnnnnnnnnnnnnnnnnnnnnnnnnnnnnnnnnnnnnnnnnnnnnnnnnnnnntaccatgttgcccagtctggccttgaactcctggactcaagggatccaatgacaggcgagagccaccatgcccagccacatttttgctaaattctttacactggtgaatctcaaagaattctctgatcatcacaccatatcctgctaagtgtgcaattaacctgtggacttcagttggacactttcagattagcattagctatgtggggccaccaaatgccaactgttaaattatcactcaaagataaatgacacttgagtgtgctgtttgagtttatacctctaaaaaatgcttatagtaccatgagactagtgtgccaacgtgtctggctgccaacgtgtctatagctgagccaataagaattagtctctagagcctctgtttccaaggaagtcaatctctagattcccacattggctgcatgatggaataagccaggggctacgaaaaatactgatgcctgttgaagcttggaggagctggggnttgggggtgtaagggcagtgatgatcacatatgaaatagaactggggagtctttagtgttactgggtggcaatgttgaaatgcatgagggttgtttattgtataatgaagtatttttcacatgaagtcatatgaagtattccattccactgtat

SEQ ID NO: 321140 - DNA, 1108 bp, Homo Sapiens
  misc_feature (800)..(800): n is a, c, g, or t
ttttcttctttccttttggtaaggttgaatgcacttttggtttttggtcatgttcggttggtcaaagataaaaactaagtttgagagatgaatgcaaaggaaaaaaatattttccaaagtccatgtgaaattgtctcccattttttggcttttgagggggttcagtttgggttgcttgtctgtttccgggttggggggaaagttggttgggtgggagggagccaggttgggatggagggagtttacaggaagcagacagggccaacgtcgaagccgaattcctgggtctggggcaccaacgtccaagggggccacatcgatgatgggcaggcgggaggtcttggtggttttgtattcaatcactgtcttgccccaggctccggtgtgactcgtgcagccatcgacagtgacgctgtaggtgaagcggctgttgccctcggcgcggatctcgatctcgttggagccctggaggagcagggccttcttgaggttgccagtctgctggtccatgtaggccacgctgttcttgcagtggtaggtgatgttctgggaggcctcggtggacatcaggcgcaggaaggtcagctggatggccacatcggcagggtcggagccctggccgccatactcgaactggaatccatcggtccatgtctcgccgaaccagacatgcctcttgtccttggggttcttgctgatgtaccagttcttctgggccacactgggctgagtggggtacacgcaggtctcaccagtctccatgttgcagaagactttgatggcatccaggttgcagcctntggttggggtcaatccagtactctccactcttccagtcagagtggcacatcttgaggtcacggcaggtgcgggcggggttcttgcggctgccctctgggttccggatgttctcgatctgctggctcaggctcttgagggtggtgtccacctcgaggtcacggtcacgaaccacattggcatcatcagcccggtagtagcggccaccatcgtgagccttctcttgaggtggctggggcaggaagctgaagtcgaaaccagcgctgggaggaccagggggaccaggaggtccaggagggccggggggacc

SEQ ID NO: 321141 - DNA, 866 bp, Homo Sapiens
gagggatgtctttctggtgtgggccccaaagaccaaaccttaacatttttgcagcaccccctgggaaattgtcattgacgccccccctttgcgatgcggagtctggcgatgctggccaggtctctggtgaagacgctttggatggggacgtccaacttcagcattctccatcttttcacagtcgatgtacagctgggccctgtcttcctgcacaaacagggtgatgctcttccactggccggttgccaggagagcttcttcccacagacaccacgtgctgctttccttggacggtcaggctgaggtccagggtgcccgccttgccattggacaccacgctgaagacctggccagagtggtctttccgctccagggccagcagcgtgccccgggtcttcttcatctgcctcagggatgccagaaggaggaaacccttttctgcccgcacagcatccaccaggtcttggaacttgtcatcaggcacaggggggatcaggttggcatcctcgatgcggaaagctgggctggaagggtcggggcccttcaccagtcggcgcccagaccccttgcgggcggccccggtgagttcaaagatgtcaaacacgctgttgtctccgccagactctggaatgcggttggtgccacacacatgcatcaggaacaggacgcctagtccccaggccagccccatggtggagctgttggtgcccagcagggatcctgtgtgtaccggagcgcggcggccgggagcggtggcgagggcggcgagggctggaggggcgcggggaatgcctgtgcgtccggagtagaggttgctcctggagagcgacaggagccctaactgcaggccagtcgggcgcacggct

SEQ ID NO: 321142 - DNA, 351 bp, Homo Sapiens
ggcagctacacaatattttagcttttagctagacatttataggttttcatttgttgaaatggtaatcatctgcatgtttttgtcacttatttcaggttagtgattgcctaacacttataagccaaaataatctttgcaaaattccatacctaaaattttgaaagcccctaatgttttcacacatctttctgtattagttatagttttgtgaaatctttgtgtgatcttcaaacattatcatttaatgtacaatactgtaaataaactgtgcatggcttttatacagctttagtaaatgtcaaataaagtggtacagactcattacaacaagtttctcataaaaatacaata

SEQ ID NO: 321143 - DNA, 873 bp, Homo Sapiens
agcttggagacattaccccttcatcagaaggaattttcggatgttttcttgggaagctgttttggtccttggaagcagtgagagctgggaagcttcttttggctctaggtgagttgtcatgcgggtaagttgaggttatcttgggataaagggtcttctagggcacaaaactcactctaggtttatattgtatgtagcttatattttttactaaggtgtcaccttataagcatctataaattgagttctttttcttagttgtatggccaggcagtccccattttaggagttggcttctgcaaattcaatccattgagctaactgttggggagcaatttggtagttgtagacatttgcagggaagggagatgtctgattctaaatgggagttgatgctcaggtccccagccaggtttgcatccagccctgagacatgtaggaaacacctttcagacccaggctctgaagatcccagaagcccaaggattgaagggaaaaggtgacctggtaactgttcaggattgctcaggtttgagatggattgcaatttagattaacagagcccacacagctttaagtgcttcattcatgtattttttacatgcccatgatgaaagtctttctgaatgattgatgatttgtacgttataaggaagaattcacatgctttgtactgtgagtcttagaggcatctccgtcgccagaagttctccgacgggacgtgcgattccagaatgcaatccgggcgtagaagtcgcgcaccgggggggtgtccacgaaaaaattttcgggctttggtctcccggccttggaagcatagtcctccggggggcgccttgcgcggggcggccagctccttgtcgacgcgggctg

SEQ ID NO: 321144 - DNA, 470 bp, Homo Sapiens
  misc_feature (299)..(299): n is a, c, g, or t
tgcattgtttttcatttttatataattaatgcattattttcccttttgattggttcttttactattgcacttgaaaaggctttctccaccttgaagctcagataaatcctacctgtgtttccacagtgctttgaattatttcatattttacattcattcttcatctggaatttactttgatgcacatgatatcttcagctttgttctcttttctttcaaagatcctggaagttttaacttcgcgccccgcctgttcatcctcagcagctcctctggggattttgcagccacagagtttngtgtaccctgccccgagccccctctgtggtcagttccatggcccttcctggcaggaagatctggtacaagcgcggcccaagccaggtaaggcctgcaggaagggcagctatgctgagcagtagaaggcacatcttccagaaagccttttgattttacgttggtatttatta

SEQ ID NO: 321145 - DNA, 1064 bp, Homo Sapiens
  misc_feature (862)..(959): n is a, c, g, or t
  misc_feature (990)..(1004): n is a, c, g, or t
gttgctagccgcgccgcgctccgcttttgtcgttctttcctttgtcttgtatgtgtgttcttttctctccctctttcttttgtgtcggtcctctccttcctggttgtttgttttttctcctgttgtcccttggtgtatctgcgtttctctatgtaccgtgttcccccggttcggtattttctttggtatcgtcctgtctgtccggggccttattgtgcctgtcccaatctgtgttgttttcggtcctctcccttttctcttggtggatctcttccctacaggttcggaacttggcccctgcaggtagcccccgaccttagcggtactttaatcaacgcttgggcccgcctggtaaaactggcggaaatattataactgactctcaatgcccctgtttgtagaagctcctgggaccacccgtggaagtcccctcaggaggcttccgcgatgtcctaggtggctgctccgcccgccacggtcatttcccttgactcacacgcgccgcctggaggaggaggctgcgctggacaacgccggtggcgcctttgcctgggggagcccagcctggagctctggcggcagcgcttgggagcggggcctcggaggctgggcctggggaccccaggttgggcggggcccaaggaggtcgggctcaagggttttccagagaatccccatagagctgacccgccagggcggccgggcccagataggcaccgggcccccgcggtgacctgcggacccgaagactggagccagcccactgccaaatagctgcgctgacccccaatgctgtgtcctttaaatgttttaattaagaataattaataggtccgggtgtggaggctcaagcccttaatcnnnnnnnnnnnnnnnnnnnnnnnnnnnnnnnnnnnnnnnnnnnnnnnnnnnnnnnnnnnnnnnnnnnnnnnnnnnnnnnnnnnnnnnnnnnnnnnnnnccaacgaaaataaaaccaaccaggaaaccgnnnnnnnnnnnnnnngggcgggcgctcgccggacgcgtgggtcgacgatatcccaaggattccggaccagtacca

SEQ ID NO: 321146 - DNA, 722 bp, Homo Sapiens
gaaatgtggataaaatttttatctttataatatcaatattgctgctttctcagcctggtgcaacagtcaagacatcacaaggtttctgaacacgcagtattcactctgccatataagttggagcaataaaatctgataggactggtattcatcatttccagttatttcaactgcaggaccaccttattcgctgcttccaaggactgtattagattctgcagctcctctctactcatttcaatagaataaggttttacttcaccattttcttttacatctagatgcaggcttaaaagtggcattcgtaatgcagcaatcttgtcactggaaagtgcaagctttacctgccaatcaaaatcctgtagctgtgcagaggaaatagcaactatttctcttgacagagcctgtttgatttcatctttcctacttttcacgcatttcatgatagtttcttgatgaagtgaattcaactgattcaactgctgaaatatctcttcatcaggtaagtttttaccaactatggctttgaaaaatttggcaatatcttctaaaacgtgcatccattcttctgattcccaaacagtgtgataatcttggttcacaggataagctcgaccacaaatgccatcaattattttgtgaagaagctgcgggcccagctcggccggcagcttctgcagccgccacaagggcgtcccctcttccggctccatccctccccc

SEQ ID NO: 321147 - DNA, 1268 bp, Homo Sapiens
  misc_feature (374)..(374): n is a, c, g, or t
  misc_feature (791)..(804): n is a, c, g, or t
  misc_feature (864)..(892): n is a, c, g, or t
  misc_feature (1020)..(1047): n is a, c, g, or t
  misc_feature (1132)..(1132): n is a, c, g, or t
  misc_feature (1136)..(1144): n is a, c, g, or t
atttggactttgcagagtacattctgggcactgtgcacaaagccaaagccctggagtttgacactgtgcatgttttggatgattttgtgaaagtgccttgtgcccggcataacctgccccagcttccgcacttcagagttgagtcattttctgaggatgaatggaatttactgtatgttgcagtaactcgagccaagaagcgtctcatcatgaccaaatcattggaaaacattttgactttggctggggagtacttcttgcaagcagagctgacaagcaacgtcttaaaaacaggcgtggtgcgctgctgcgtgggacagtgcaacaatgccatccctgttgacaccgtccttaccatgaagaagctgcccatncacctataggcaacaggaaggaaaacaaggggggctacctctgccactcctgtgcggagcagcgcatcgggcccctggcgttcctgacagcctccccggagcaggtgcgcgccatggagcgcactgtggagaacatcgtactgccccggcatgaggccctgctcttcctcgtcttctgaggacaaggcgcacgttctccgcagtgcagagcagcttgccgaggaccccgcgtgaagaaagccagcgaggggggcttctgctccctgagactctgggttcacccacagcactttctgaggaagaggacaccagcccaagctggacctgccatttctccactccctacagacagccagtctccacttgcctcccctctggatgtatctggtcagggaagtgggggatgttcttttgatnnnnnnnnnnnnnnttttatgtatttaaacttttattacaagatttcaattaaacaggcaccatagcactgtcnnnnnnnnnnnnnnnnnnnnnnnnnnnnnccatgtcggccgcctcggcctctaaaataggtaaaattcactatcatattttgtgtccccaccttgatgttacatgactctggaacaatatgaactggatttaagaatgttataatagaagtcttacnnnnnnnnnnnnnnnnnnnnnnnnnnnncaaccaagcccaacatatacatctaccatctccagcgcgcctctatccctacgccttttttatccaccattatccaccacaaagntgtnnnnnnnnncccccgccccccaaaaaaatttttaaaaccctcttgtgggggccggccccccaaaggaagggcaaaccgggccacccttgtccccagagaaaatcgggcaaagaaaaggggtgggctccccccc

SEQ ID NO: 321148 - DNA, 812 bp, Homo Sapiens
acacgtgcgagtatgtgtctcatttttttcatggtcgtaagacttctattataacattcttaaatccagttcatattgttccagagtcatgtaacatcaaggtggggacacaaaatatgatagtgaattttaccttttcttaggaaatgatcacaatttcattgaaagtacaggataaagtgaatagccccttaacgacttgtgtactttattgtcttcaatagaaagttcaaatatttccattttttaaacctctagaatattatccggacatttaaaatattgatatttgagtttacattaaaggacatcatactctgaaaacaggctggctttaaatatagtttgactgattgtgggggtacttacggacagatttctttaccaagtaccagtttcttatatttaaaaaaaatcagcaagatagaatttaaaaaatcttcatttacaatacattgtaaactgcagacagcaactgccacatacatcatagaccagcacaggtaaaaatcttttttccggatgtctataagactttgtatcttcctttatttgttggttggtatgaattttgcagccggatcagctcttcttttatgagcctggtgatttctgcctttgctttctgcacagccagttcattggcactttcaattgccaagtaaatcttccgctcgcctttcttgggttctttgccaggaggggaagtaggttcctctgattgtaattgcggcttcagagtattcactgattctctgcagagcttccttagaggtaactttccaacctacaatctgggggaagccattgac

SEQ ID NO: 321149 - DNA, 711 bp, Homo Sapiens
  misc_feature (650)..(650): n is a, c, g, or t
ctggtatggaggtgactgctttgtaaggttttgtcgtttctaatacagacagagatgtgctgattttgttttagctgtaacaggtaatggtttttggatagatgattgactggtgagaatttggtcaaggtgacagcctcctgtctgatgacaggacagactgttggtgaggagtctaagtgggcttagtttgatgtcagtgtctgggctcatgacttgtaaatggaagctgatgtgaacaggtaattaatattatgacccacttctatttactttgggaaatatcttggatcttaattatcatctgcaagtttcaagaagtattctgccaaaagtatttacaagtatggactcatgagctattgttggttgctaaatgtgaatcacgcgggagtgagtgtgcccttcacactgtgacattgtgacattgtgacaagctccatgtcctttaaaatcagtcactctgcacacaagagaaatcaacttcgtggttggatggggccggaacacaaccagtctttttgtatttattgttactgagacaaaacagtactcactgagtgtttttcagtttcctactggtggttttgatattgtttgtttaagatgtatatttagaatgacatcatctaagaagctgattttgctanactcctgttccctacaatgggaaatgtcacaagaatgtgcaaaaataaaaatctgaggaaa

SEQ ID NO: 321150 - DNA, 1604 bp, Homo Sapiens
ggaaagagaggaaaagagaaaatggtcagaagcacaacatataaggttaagaatttaaaagcatcttacattctgccctaatggcagcataattaatagcaacaaacggccgtcttgctgcctgccgcagccggagggtatttttgcagacctgacgagcaaattttgtgaaatatgtagtatgaaggaagaaagcttggcgggtcttcactgcagactttggactcccagtgtttcggactggcattccctgcatggcctggcgggacacgtgacttctaacacgagggtcctctgtagttgggctaggagataacttctcttcttctgactgggtgggcattttcaagcctccatattttttccaataaagccaacaaattgcacataatctacactgcatattaggtgggccccaagaataccactggtgagactgtgtagcatagcagctctcacaggctctccctaagagaggattctgaggctggaacgtggtccccacagctccattcacagcaacaggcttcccattactagtggatatttggttgggatttggtttgctgtaggttgggatatatacttgtttcagtttacctctcagcttctggctgctttttagacgtttctgttgcacatatctgtcagttagttttccacagtgtaataatattcaatgatgctagtcaatgatttccaaggaagaaaatcttgccgtatggtcatttgaagtctttgccatatttttccagtgcctcttcaaataagctagcttcagaggctgaccattcctgccatttcatctctgcataaaacaggtcctccgagtggtactaagacactaatggcactgctcaaatcatagctgtgtctatacaatgtatccatagcgtgaaacaaggtgatgtcttgggaagttgcagcagcacttatatgcaaactaggctgcctcacagacttgctgcaatccagggctctggcgaatgtcccaacagcacgtgctacaactaaaaactggtcaatctgtcgatccgtaagtgggctatttggatcccaaactttaacttccaattttgattgttccctctcatctgattctccttctaacagcatttctggaatgtctgcttgatatctaggtcccactctgatttcacctttgtcagctaatagtgttttcaatgaggggtcatagaccaatgagtagaagaaggtatcctccttatcaagatatgacaatactgattctgtctcattcagaagggcaacactgcactttcccctgatatgtgttgcgggcagagattcatactggcgtgacaaaaagagttccctatgtttcaactgatgtttctgcttatcggtcaagtcagcctcaactgttgtttcagattcttcctcaatttctttagcatgcttatctgcgagcattataagtgtgttggaaatatcacgtcgtctataaaagcatactacttttgcttccacgttgccacttgcagtcttgttgagttcttctatccttcttattaggtatgggttgctggaggaattctcaaagtagacataatctccgacccggtacatgttggccgccatgt

SEQ ID NO: 321151 - DNA, 715 bp, Homo Sapiens
  misc_feature (18)..(18): n is a, c, g, or t
  misc_feature (35)..(35): n is a, c, g, or t
  misc_feature (44)..(44): n is a, c, g, or t
  misc_feature (145)..(145): n is a, c, g, or t
tttaatgatggcaaaacntggcaactcaaaaaaanacttgtcantaacgggggtttccttctcttttttcctacatcctccccttctgcttcacaccatgcccacaaccacacatggtcccccagcaggaaaccccaaggtggcnaaggagccagcacaaagagggctgataaatgcaggcgaacttcaggtcgtgcagcttcaggcctgaagatgatcgaaaagcccatgtgggggatgctgagcttaaatccaggcgttttccatccctcctggactctctccatcagaaaagaagtcatccacaatcggggaaaaacattccaatgagtaaaacatcagggtaggttgcttgaggcaaagccacctttgggcggcaccgcatatgggagacccacagtccactgcacactctttcaatgtgccaggggcctgcggtgcatcctacatagggacaagcctcacaaaatcacagcttggcaggctgcagcatttgacactggtacagtatagcaatggcaaattatcataaataatttggcataagtaaaatataaattacatagaaataatatttttgttccttcttctcatttctcctctcggtcctcacaggctctccccagcccagctcgcccagctcgcccagctcgcccagctcaccacaggtgagcaggaggcacagagcactcaccatggtggggtggcatggggt

SEQ ID NO: 321152 - DNA, 897 bp, Homo Sapiens
  misc_feature (24)..(24): n is a, c, g, or t
  misc_feature (46)..(46): n is a, c, g, or t
  misc_feature (60)..(60): n is a, c, g, or t
  misc_feature (72)..(72): n is a, c, g, or t
  misc_feature (81)..(81): n is a, c, g, or t
  misc_feature (90)..(90): n is a, c, g, or t
  misc_feature (96)..(96): n is a, c, g, or t
  misc_feature (102)..(102): n is a, c, g, or t
  misc_feature (123)..(123): n is a, c, g, or t
  misc_feature (129)..(129): n is a, c, g, or t
agacttgagtgaagtcataatctnatcggtgttgattttgaaatcnattggttcatctcnataatacggggnaaaaccgcnagctttttnacctcnaatccnagcaatggcagcggctccaanacaacnacagcaaggaccaggggcaccaggaggtccaggagggcctggttgccctgggtggcctggggagccctcagatcctctttcacctctgttacctcgaggccctggtggtccaatgggacctggatgtccactggttccatctttgccaggaggtccactgggtccaacaggtcctctggggcctgcaggtcctggactgccgattgcaccctgctgaccagcagggcctggagaacctggggcacctggattaccagggaatcctcgatgtcctttgatgccagcagctccacgttcacctgtttcacctttgtcaccacgtgggccttgaggaccaggagcacctcgggaaccagcaggaccgggagcaccagcagggccagcagggccactttctcctctgtcaccactctttccagctggaccgacaggaccaggtgggcctggatgaccaggagcgccaggggcaccaggagagccattttcaccacgatcacccttgccaccaggagatccatctcggcctggaagaccatctgatccagggtttccatctcttccaggttcaccagctgtaccagccagaccaggaagaccctggggtccagggggaccacgttctccactgagaccgttagctcctggtttcccactttcacccttgacaccctgagggccagggcttcccctaggacctggcatgcctggtggtcctgcaagaccccgtgctccagtgatcccagcaatcccaagtgggcctggagcggc

SEQ ID NO: 321153 - DNA, 1129 bp, Homo Sapiens
  misc_feature (215)..(262): n is a, c, g, or t
  misc_feature (291)..(299): n is a, c, g, or t
  misc_feature (307)..(401): n is a, c, g, or t
  misc_feature (629)..(629): n is a, c, g, or t
  misc_feature (703)..(703): n is a, c, g, or t
gtgaagaagactgaaacattcctgattagtttaattaatgagaaaaatgtggctgagttatgacctaaattattaacagtgatcttcagtctgacatgaaatctctttttacatagccagtattaccaaataaatggtactatcttgcagtactatgagtattctgctcccatccttttaagccagataagtaaacactatggacatattactannnnnnnnnnnnnnnnnnnnnnnnnnnnnnnnnnnnnnnnnnnnnnnnaaaggtactatttatatcttttatgttgnnnnnnnnncttgaaannnnnnnnnnnnnnnnnnnnnnnnnnnnnnnnnnnnnnnnnnnnnnnnnnnnnnnnnnnnnnnnnnnnnnnnnnnnnnnnnnnnnnnnnnnnnnngtacatgccatggcacccggcatgaggtgttatttataatatgcagattcctgggccctacaagcaacctgaggaatcaaaatttctaaagcagaccaagaaatctccatttttaaacaagctctcacaggtactacttaggtattgatttgagaaatcaatgatataaatccttttaatctgatcttactatttaatcggagatattgactaaaacaaaaacaaaanccttttctctattttgctgatatttaaattttcacatttgtagaatgtttcttagtatatgtccttgtaacatnaggcattctctaataattaaaaaatttaggggcaataatactgatcataatactattctcgaaagcactctctccaaagtaaattttcactttttaggaggagttgtaggatagtgaaattcttcattaaagagttagtgataaactaactagtcttcagtcaatttagcagttcacatagtttattcagcaatataacaggagagaacctccattgtaagagacataaggcagatacagggtgcatctctggggtacattcttcatacagactaacaaataacttcaggtttcacaacatgtagcaagtatgatttgttgcacaccaacagccattcattcctcacgttttccttgctaaaagagccctggtcaggcacgggtgctatgcctgtaatcccagcactgtcggaggtcagggcaggt

SEQ ID NO: 321154 - DNA, 1225 bp, Homo Sapiens
  misc_feature (614)..(634): n is a, c, g, or t
  misc_feature (812)..(836): n is a, c, g, or t
  misc_feature (884)..(895): n is a, c, g, or t
  misc_feature (1004)..(1014): n is a, c, g, or t
  misc_feature (1147)..(1147): n is a, c, g, or t
cagcgtgggcccaacaacctgattcctttagggtcctccggcgcccagggcagtggtggtggcagcacgagtgcccactatgcagtcaacagccagttcaccatgggcggccccgccttctccatggcgttcgcccatgtccatcccgaccaacaccatgcactacgggagctaggggcccgccccgcggactgacagcaccaggaaaccaaatgatgtccctgcccgccgcccccgccgggcggctttcccccttgtactggagaagctcgaacacccggtcacagctctctttgctatgggaactgggacacttttttacacgatgttgccgccgtccccaccctaacccccacctcccggccctgagcgtgtgtcgctgccatattttacacaaaatcatgttgtgggagccctcgtcccccctcctgcccgctctaccctgacctgggcttgtcatctgctggaacaggcgccatggggcctgccagccctgcctgccaggtcccttagcacctgtccccctgcctgtctccagtgggaaggtagcctggccaggcggggcctccccttcgacgaccaggcctcggtcacaacggacgtgacatgctgcnnnnnnnnnnnnnnnnnnnnnatgaaaagaaccagtgtcaatcccgcacacccctctgtgaagccaggccgggcggggccgagccagcaccccctctccctaaactcaaaggggcccgcgggggaggggtgctccattagtagaatcacgggtcgtccaccggtctccccagtcgccgctttgaatgtcgcgggggtannnnnnnnnnnnnnnnnnnnnnnnnttgatttgttacgtggcccggcgccagatcggggacacccccccccannnnnnnnnnnnagggcggcccggccaatgtacatgacttctggtatccgcccccgatccgagtgcggtgagcgtacgccgcggccccccgcacgtcgtcgggtcgggaagtaacacgcgnnnnnnnnnnngatgaagatctgcctgtttgtgctggcgggcggtcccacgccgtcgtttcgcgccccccacaacctcctcggccccctgcacataatgtataatataccctccgcccactacaaccaaccagacctaggagtncgcccccagtatctagctccgagacccccttatggacgtgctatctctaacaattgtgcccgggggcaggcagcccgg

SEQ ID NO: 321155 - DNA, 1196 bp, Homo Sapiens
tttgtcctccttttttatacgcaaaaacattaattagtaagagaagagagcacaacaccgattagtgtttcactcatcaacatcgtggttgtacaaatgataactcactctgtcgtggtaagtacttactttgtcacctggtagagtaggctggtcagccacgtgtgtccatccgttgttcaactccgccttgcggctgttggtcactgtgttcccgctcacacatgtgtgcgtgattctgtctctgtgacctacatcgtggcgtcttgtcatctgtgtatgagttagtgttgctctggattccctgcttggcgctaatgtctggtacagtgtcacggagggaccctgttcattcccggagtggccctaatggatggtcctccgtgtgacatccgccaagttcctgtgccgttacggtccagctttccaggtgactgcagcccaacccaggatatctggttttaaatgccaggacactttgcctgtagggacacgtgttgtgacacgaggctcttcctaagtcaggagctagtataagcccagcctgctgggggttccggaggccccaggtctagaggtgtggagggggagaggaggggcttggtggtcctgaccactcctgaggcctgtccaagggctctgggcccagcactgcaggatcctgcgagtgccagcagctgaactaagagccccatggagcgtgtgggacagatggggagccagggaggggcgctttcatatgtgactaaggcacagaagagatgggccaggggccagatggggtagaacaccaggccctgtgtggataggggccccgagaggagtctgggaccattccccccacctcccagctccccactgtgtggccacccctcccggtctccctgccggactgccttcccccagaagctggtctgaaacgtggagactcagacctttcccctgaaacgggagggagaagccccaaagagagagaggacccagcatcagcctgggaaggagggctgggagcccctgagccctgaagcagccaggaagcaagggctctgcccaaagctatcgaggaaggacccaagtgagccggcagtgcgggcatgtgggctgtccttggtaggccagggggaaggggcatgaggcaggcagaggtgtggccgagcgcgtgggtcgacgatagtcccggaaattccggaccggta

SEQ ID NO: 321156 - DNA, 780 bp, Homo Sapiens
gtgctagaaaatgagataaatgttatcagtttgggtgaaaaagtagagagtaggggtaaaagctgggcattgcaaaaggattggtttaagaaatactgtctaagggttagctgtcaatggttggagaagaaggagatcctccttcctctcacccatacattttttcttctttcctctttttcaatgatcacagaccattgggtctctgcaaatccacattttcacagggaggaagtcggaagtaattggagcgacggagtctcctagggggcagaccagccatctgacggcaaagctcatctttcatagcttcgtgttccttacagacaagacgagagcagatctccttgttgacgatgtacatacgtcgtaaactggtgaagcataactgatgaatgcattgtttaaccggccgatgcacagagtagagccttgtgcaggtaaatttctcatcccagcactctgcagtggtatttttttcactgagggaggccaagtcatctgtggaaggtgcaatatcagccaaaacagccaaaactgtttcatctgtagcgggatcattcaccagattaggatcttctgtgaatgtttctggagtcgcttgagtcacatcgtctcctcgttgactattgacccccaggggtatccagtcagaggtgatgatgaatgcagctagaaacagcagcaccttgggtcccaagagcgacatattgtctatggtgttctgctctttccaccgagtcctttggctgctgaatgtgtctctctcctcttacgctg

SEQ ID NO: 321157 - DNA, 499 bp, Homo Sapiens
caatgatcacagaccattgggtctctgcaaatccacattttcacagggaggaagtcggaagtaattggagcgacggagtctcctagggggcagaccagccatctgacggcaaagctcatctttcatagcttcgtgttccttacagacaagacgagagcagatctccttgttgacgatgtacatacgtcgtaaactggtgaagcataactgatgaatgcattgtttaaccggccgatgcacagagtagagccttgtgcaggtaaatttctcatcccagcactccaagtcatctgtggaaggtgcaatatcagccaaaacagccaaaactgtttcatctgtagcgggatcattcaccagattaggatcttctgtgaatgtttctggagtcgcttgagtcacatcgtctcctcgttgactattgacccccaggggtatccagtcagagggtgatgatgaatgcagcaagaaacagcagcaccttgggtcccaagagcgacat

SEQ ID NO: 321158 - DNA, 881 bp, Homo Sapiens
  misc_feature (217)..(225): n is a, c, g, or t
accgctgggtttttttgttagcgaattttgtttctgcgcgggcggcaaaacgagctccgcgccacctatagcgctctgtgatccggggattccctctattacttttcccgccgtggtagtggtcacggatattgggtagattggagtggcaaaggacccgtggggtcccttgcatcggttggattgggtttagttttttggtatcggcgttggcgannnnnnnnntcggctatatcgtggccctggtcatgtgttcttcatgcatggtgtggttcccaaggaggaagtttttatttgggaagagtgcggttctgctcggccctgatcagctctgccctgcccaccccatctcagccaggcggctttacttcttcctgatcttcaggtctttcttcttcctgatttccttggccagctccccaatcaatctccagtactcattgaacttgagctccgagtcctgattcacatccaagctcttcatcttctcatcaagagagcccacatccttgagcagatggggcaactgctgggtaaccagctctttgaactcgttgacgctgaggctatccttccggccctcctgccttgcaaaggtgaagaaggtggtgaccacggtctcaatggactcctctagctctgtcagtggttctgctgccattaggaccctgaggccaaagctgatgtcctcaaggggctagctgacctttgtcagggctgacccggcaaggagatggggtagagtgagctggagcctcagggctgaggtttataagcagcggggaaggaggagagagctgcttccaagcccggaggtgtcaaatttccgtggtcgattctgaagaccagagacagcccaatcaggccgcttgccctgagcc

SEQ ID NO: 321159 - DNA, 1003 bp, Homo Sapiens
  misc_feature (629)..(630): n is a, c, g, or t
  misc_feature (635)..(636): n is a, c, g, or t
  misc_feature (646)..(646): n is a, c, g, or t
  misc_feature (656)..(657): n is a, c, g, or t
  misc_feature (897)..(908): n is a, c, g, or t
gcctgggtggcgaattcggcacgaggccgcaccccagggggttgtgagtgcctgtactaaacccgtcctggagcagggagtcagagacgccccgttccaggacccttgtcaccgggagacaggagcggggaggatctgtggggtcctgggttcagcactctgccctgctgccgctgaggagaggtcagccctgacaaaggtcagctagccccttgaggacatcagctttggcctcagggtcctaatggcagcagaaccactgacagagctagaggagtccattgagacggtggtcaccaccttcttcacctttgcaaggcaggagggccggaaggatagcctcagcgtcaacgagttcaaagagctggttacccagcagttgccccatctgctcaaggatgtgggctctcttgatgagaagatgaagagcttggatgtgaatcaggactcggagctcaagttcaatgagtactggagattgattggggagctggccaaggaaatcaggaagaagaaagacctgaagatcaggaagaagtaaagccgcctggctgagatggggtgggcagggcagagctgatcagggccgagcagaaccgcactcttccccaataaagcttcctccttgnnaagannaaaggagggnagaagagaannaaaaaaactcgaggcatctatgtcggggggcgaaaaaagaggtaatggaatggcacatggccatagctggttccctgacccagctttcttgtacaaagggggaaatcttgcgggcctccctataggggagtccgaattaattttcggataacgcccggggtaacccttgcaattaatggaatccggcgttgcggtcaccccggggaaattttaaccccccccctaaatgaggcgcgggcnnnnnnnnnnnnggggatctcaaaaggagaatcctttcttggggagaacctctcttttttttctgtggcaaaagaaaattctgtggcggggcgtttgcgacagacac

SEQ ID NO: 321160 - DNA, 443 bp, Homo Sapiens
cggcagtaagcccagaacttacaattaacactggatccactttgccacgcaactttcctttgtttatagcagctccaaattcaggcattgaatgaaacacaaaaggaaaatcttccccttcaatttccagatgggcaggagaatccagcgttccagttgccagcgctacattctcagcaaagaggcagaagggaacatgagaaccatcagctattcgctgataacccctaatttcccagtttctcttgataaagtttgacttctctatctgtaaatgctttgttgaaatatctctgtcttgaatatcatcatcatcttgatctctgtagagtcttgatacggaagttatgtaagtattctctctgaaattcttctgaagacccatgacttttacataatgtttatagtagcgagctatttcctctggcataactcgatcccct

SEQ ID NO: 321161 - DNA, 963 bp, Homo Sapiens
  misc_feature (104)..(129): n is a, c, g, or t
  misc_feature (171)..(180): n is a, c, g, or t
  misc_feature (220)..(267): n is a, c, g, or t
atgcccaagcccttaatttatgaggcccgcgggtgtttcctttggggaaacgagttatatgcgcccggtttcccactgccgcaaggggggggccccgggcgccnnnnnnnnnnnnnnnnnnnnnnnnnntttttttggggggcgggggcggccccacaaatattgaatgtnnnnnnnnnnttagctaattggaaggtggtggatatgaggctgtgtggannnnnnnnnnnnnnnnnnnnnnnnnnnnnnnnnnnnnnnnnnnnnnnnggcagatgtagtatggggatgtgggttcctgtgcagtcccaggtcctgtgatgtttattgaaggaagcaagggcagggctggggtgccgccctcaggcctggatgtggctcttcgcactgaaggccaagtagtagatcacaaggccgatcgccgcagccagcacctcagtggacacccagggcccgttccaagtgccccgatggtccacgctgactgtaaacagaggcgggatgatggaaatgtcctcgttattcctctgagccttcctgaggaggctgtaggactcctcgtcgaagaatctaacctcataggtgcctgcgtgggcgctcttgtggtccaggctccaggacacctgataacgccccacatcctggcctcgagtgacagggaattgttttccaccgacgtcagcatagagagccatgttctggaccctgttcttgcatgtcagggagatctccacaatgaagacggtctcagtggaaatgacagcgtcagaagtggtgtagtaggaaggggtgatctggggctccaggcaggcctcggctgagcagcgggagaggctggacagcaggagcagcgccagggcgccgagagatgccatcgccgccatcgcctcttctctgcctagaggaaaagaaaacgagctcccatgaacacgaggggcaaacgaggaagagcgacgcgtaagtccc

SEQ ID NO: 321162 - DNA, 1149 bp, Homo Sapiens
  misc_feature (954)..(997): n is a, c, g, or t
atacagaaagggagatccatcagtagcatgactctttaatcattgttatttacaatttatcatctgacagacttacagagaataaataaagaaaagaaaatatacaattggtatcacgtttctttttctaatacagagaaattttacatattctatttggaacgtctatgatagttttaagcagaaattaaatccatttgccctttaccccttgacaagacacatcatcttccaaagcctgcagaagggggcccagatgtttcctcatcacaggaagagtgcaccacatcgctgcagaaactcagtcctcagaaaaagttaccaggcaacaaggtagaagaataggatatcatgaataataaaggacatataatggataggctagattacagactcttggtgtgtttgcaggaagccagctttcaattgtgtccaagcctgttttcaagaaaacagtttttcactgaaagtgattaccttatcccattgtgcttcccttgagtctctgcaaattcttccttgacatgttcattgtgattgtggatgagcacaggctagcttgggactcagattattttcctgcaaggcacctgacactgttgcatgttgttgacaaggtgtctgcaggagaaactagatagcttgtttcaaataggctgggtatgaggccagagtctggtctctccttttgattcggtgtcctgtggagaactacctttcattgctgtctaaatgcctcaaaaaattaagcagttctatagatcaatttctccatcaaaaagtatacaaacagagaatgcacttcaccaggaacaagtctgagtaatttttttctctttcctcacttgaaaataaactctccatgttacaagcaaaacaattctccctacattcactctagttaactggatgagaagtttttgtttctatcttatgttcattcaaaaaaacaannnnnnnnnnnnnnnnnnnnnnnnnnnnnnnnnnnnnnnnnnnntagtaagacacacattgttataatcttgaccccttaaataggggacttaaaaatgtcaatcataaaactcaaaactgtaatccacaaaactggagtttcaacttctccccaggttgccgctgtgtttgcaattaattggtctaatgggtgtt

SEQ ID NO: 321163 - DNA, 539 bp, Homo Sapiens
  misc_feature (93)..(93): n is a, c, g, or t
ttctttccaaagccctgccagaaagggggcccccgaatgttttccctcattcaccaggaaggagttccacccaacattcgcttgcagaaaacntccagtccctccggaaaaaagttacccaaggccgaccaaggttagaaggaattaggatatccatggaataataaagggccatataatggataggcttagattacagactcttggtgtgtttgcagggaagccagctttcaattgtgtccaagccttttttcaagaaaacagtttttcacttgaaagtgatttaccttatcccattgtgcttcccttgagtctctgcaaattcttccttgacatgttcattgtgattgtggatgagcacaggctagcttgggactcagattattttcctgcaaggcacctgacactgttgcatgttgttgacaaggtgtctgcaggagaaactagatagcttgtttcaaataggctgggtatgaggccagagtctggtctctccttttgattcggtgtcctgtggagaactacctttcattgctgtt

SEQ ID NO: 321164 - DNA, 589 bp, Homo Sapiens
tccttcaatcacctcacacttatatctcccataatcttccagagtgaggtctgtgatgaccagagaagcatcactatcactgcctcccttcagaaacactctaccctggtagcctccataggtttttttgtggtatcccatggaaacaaaaacatccacttccttgaggtaatccgaagttagcttggtccacttaattcggattttatggattcctgagccaaatgctgtagggtctcgataaaatttacatggcagtgtaacattgccacctctgtgtgaaaacacgttggcttgctctgcttccacaagtagatgggggccattttctgcttggatgtgaatagctctgtcatgatccagagtatagttgtctgaaagatgatcagcccagcagattgaaatcagcaccagaagaagtagactcttcatctttatagcccaaagaatcttcttcacttgtcctgaaatccaggagttcggatgctctcaagttctgcttaagttggaaactggagatcaagtgaagctagcgctctttctcctcaccttaagtttgtctctgggcgagtgtgagagtgtgtgtgtg

SEQ ID NO: 321165 - DNA, 459 bp, Homo Sapiens
  misc_feature (67)..(67): n is a, c, g, or t
  misc_feature (82)..(110): n is a, c, g, or t
ggaggcagagcttgccagtgagcccgagatccacgcccactgcactcccagccctgggcgaccagangccggctccgtctcnnnnnnnnnnnnnnnnnnnnnnnnnnnnntaagatatgatgattgattacttggaccagtgttagaccgacctgtgttagacgaacctgtgttgcctattatattggcagcaccttccattagcaatagctgaaaaattcagagaagaatttagaactttcactttatttttgccattcttcaagaagttgctgtatatttcagtctggttataccttcaattgatcaataacttcaattataggaaaggcatcttctataattttaaattactgtaaaaaaaagataccttttaaagccttggattatacttaaaaattgtaatggaagaaatgcatattaagttatatgcagatattaaacatatctgattctgaa

SEQ ID NO: 321166 - DNA, 382 bp, Homo Sapiens
ataatgtgtttgtcactgacaagcattcatgttcatcccactagtcttttattgcagtcttttattgtcattttcagccttatgttggagagctttgctttctcatcatgttcacattgtcttaagttttgtgagcttctgagaaagagcttggtaaaggtttaaaggggactttgttccaccagggagcattttatttgggcgtctcacccttttctaatgaaagctgttgtaagccacctctgacttggaaattctgaaagtatgaatattttttatatcttaattgtaaaatgccagttctccattatttagatgaatagtagaacactgcaccctttgtgcagtgtttttgtttctctactgcattcctacccccacc

SEQ ID NO: 321167 - DNA, 904 bp, Homo Sapiens
gcagaagtccggggctggcaagcgcttcctgcgcagcgcctaggcgacctggagtttgtgacgctgtgatggtctagaggctggagattcaagttctgggtgccatcattttctggttctgttgatgaccctcttccaggttacatacagcttacatcttgcatcctcaagcgtttttcttataaggctaaaaattcacaaagcatatatcaatgaatcaggaggatctagatccggatagtactacagatgtgggagatgttacaaatactgaagaagaacttattagagaatgtgaagaaatgtggaaagatatggaagaatgtcagaataaattatcacttattggaactgaaacactcaccgattcaaatgctcagctatcattgttaattatgcaagtaaaatgtttaaccgctgaactcagtcaatggcagaaaaaacacctgaaacaattcccttgactgaagacgttctcataacattaggaaaagaagagttccagaagctgagacaagatcttgaaatggtactgtcccctacggagtcacagaatgacaagttaaaggaagacttacaaagggaacaacggtggttggatgaaccgcaacagataatggaattctcttagtggactaccccgggaatttgaaaataaggggttgaacctttttcctgagtccagaaatcttttaatggcactgaaaaactcaaaatggctttaatattcagaggacttttgagggggaaagcttcttgggataccctttgggccgaagtgtccctagaaagaaccattgtttccctcctcggcctggcgataacaagcggggtgcatgcgacggaagcgcggataagaggctctttctacgtacattcctttctggtgaagaggaccattgac

SEQ ID NO: 321168 - DNA, 456 bp, Homo Sapiens
ccgagttttataagaaatttattttttcacagatacagaacataaatccaagaaaaattattattatttttcacaattatgactaaatcatgttatttctagttatttacaagtactacaatgttctatgcatttcttcatcctagacattaataaaacacatccctttggtcttagatacttctctttggtctgtgttttctcctttctgaattttaatcttctgtgatgtggggaaatttacgtgaaccgtttacataaccaatttttttccttggggcagggtgagaaaattcccccctagagattccctattgtgctaagaggaaaatcctcaaaggaggtcatctgcgcccatagccttcgtctcagagcaaaaagaattaaaacatcatttagagggggcagcttccacgcagaggaattagttccaaccagagaggtggtaaggagagg

SEQ ID NO: 321169 - DNA, 484 bp, Homo Sapiens
gccgccgctccaccatttttttcgattcttccatactcagagtacgcacggtctgattttctctttggattcttccaaaatcagagtcagactgctcccggtgccatgaacggagacgacgcctttgcaaggagacccacggttggtgctcaaataccagagaagatccaaaaggccttcgatgatattgccaaatacttctctaaggaagagtgggaaaagatgaaagcctcggagaaaatcttctatgtgtatatgaagagaaagtatgaggctatgactaaactaggtttcaaggccagcctcccacctttcatgtgtaataaacgggccgaagacttccaggggaatgatttggataatgaccctaaccgtgggaatcaggttgaacgtcctcagatgactttcggcaggctccagggaatctccccgaagatcatgcccaagaagccagcagaggaaggaaatgattcggaggaagtgc

SEQ ID NO: 321170 - DNA, 1062 bp, Homo Sapiens
  misc_feature (978)..(978): n is a, c, g, or t
  misc_feature (999)..(999): n is a, c, g, or t
  misc_feature (1004)..(1004): n is a, c, g, or t
  misc_feature (1031)..(1031): n is a, c, g, or t
aactttcataatgtattttatttttacagtaaaattaatttatgtaaattgatagaattttactaatttcactcccaagttacattaaaaggcttacatatgtttgataatagcatatgtaaactagaactctgaatgatatccattggtcataatacgtactatgtagcggtaatggtgacttttgtgattgcacaagtctagagatgccccaaatgacattgacttagacatctggttattctaaggctgaaactgaagttgaatagaaggttttagtcaaatactgagatgaaaactgaggcagtcctggcgggggggagtgagtgtgtgtgtatatatacacacatagacatcatgcttctaaacatttacagaaagaaagggtagattatctacaaaaaaataagaatcagactgatatgagatcttacaaacctaacccccttctctttcctaaactccagattctcatatttctgacttcctatttgatatttacacttcgatatttaccaggagtcttcaacattttgttcaaaacagtactcttggttttcttcctccaagactactccttactcatatcagcaaatagcagctcttttcaagtgctcagtgtaaaaacctacaattaatccttgatttctctttcagtcagcctatactaaatcaatttcatttaaaatatctcggctactactctgcatctccactgctaccatcggcctctccagtcacattctccaagagcactctatctcatttaaaagacaaaatctctgcagtggcctgtgatgctccttaatggcctacataatccagccctcaagcaccctccgtgatctctgttaaactttcccttggtcactgtgcttcagccacattaaccagcttgcatatttctcacattcaccaagcttgttcctgccttggggcctttgtacttaccatgttctgttctgaggaatactctgnctcaaggatatcctacaactnatctnactgtattcaggctctctggctcaagnattaactggatggaaacctgtcatccctact

SEQ ID NO: 321171 - DNA, 901 bp, Homo Sapiens
  misc_feature (205)..(207): n is a, c, g, or t
atggttttttccgggttttgaatgtaaacagttttatttagaaacagataggtacctgttcgcattgcagaatataaaacttggtttacactctataaaaaataaccaatatccaaattcaagagagctagcattcacagaacacacaatatgggtgtgtagctactgttcaccagcctcaggcttgatttaaacaaacaaactnnnaaaaaatttcaaagggatcattcaagatgaccgtataatgcttgctgctgtctttgcagattaaggtttgcttttcaagtgcatgattttaacataaggcctgggctctctgcacctagtgaggtgtgaggctctcttgccacacagttcacactctcacttaactaagccagagttggtggcattattaaattatcactggtcttcttaatagtaaaaatggggaacccagagggcaggaaatttccattaccctatattggggctaaacttaaaagagtatatccactatcaagagcttagtacaaaggctggggtgaagttacattatacctggctttttaccataccagggagcccacctcaacatgactgtggaagaccaaaggatatacctaggttcagattataataaatcacccagcaccacctgaatgtattatccacaaagatatagcaataataaaggttatatatacatatatttatcttggtaacctgagggctaaaaacgtggaatacgataattcttctcaagaggtccatctgtaagaaagggacccaaaaggacagtgtttgtgttgcataaaatatgggtaaagtggagttgggaacaaagggtggtttctttagctctttccacatctctctttgataaggactgaaaccctgttgattcatgataaacgtttcc

SEQ ID NO: 321172 - DNA, 1181 bp, Homo Sapiens
ttataatggaaaagttccgactagcaacatagcacatgtacagaagaagagaggatatcctacctgctgaaaattcttttctttacagggaggaaaggtcaattagaaatacaaagggaagaagaaattcaccagtttacaccataactactcttttacattaaccactgttgtagatgaaagtctgcagtctcaagggcatggcaggtgttctgtatagtctgggccatcttccttaaagctggtgttcaccaagtacaaaagcgcctaccagaaatatttgtcagcgtccaacagacatggcaaggctattccatattcttttcttttcaggaaagctctgcccttctcatgatatcccatagctaacataagggcttttctttctgatgggggaattctgattgatctgcctgtctggttagctatgtctaagtacggtgtcatttctggatccaccactgtctctgctgctctctttgccagtatttctagtcctctcttggtcctctgaatttgtttttctttgagtttggcctcattttgctcctcttcctctaactggaagtttttcctcgcgtcctcttcagattgttttagttcaagcaccatcgctttcacattgtgagccacgccttgttcttcaagggttttccctagttgtagttgcttcttatttatgacaattttgatataattttcttgaagtccaaaggtttcagctattttggacctcagttctctgccagtgatgtgcaatcgggtctccaacaagtttttcctatctttttttagtcttggtggtaaaaacacctcgattgtagcaattcccgttgttctataattgtcatttcctgttccacgctcaattgccttgcaacgtatttcttctattaccttttctacttcattttcacagcattctagtctgtcagagtactgcttagcaaggtcctttaatgccaaaccaacttttttattttcatctgtatatggaggtttccaaagttgaatcctgtcttcccttaaaaactgggtcaattttgcttgaagatatttcttttgtgccatccccccgccccgcggccgctccacccctggccaggagaggtgcccagtcggaccgggaaccggggcgccacccggccgtaatggacactctgcgttgataccactcttcc

SEQ ID NO: 321173 - DNA, 1015 bp, Homo Sapiens
atgagccactgcgcccagtatatatccaccactttaccatccacattagcatttcattagcttctctttgcccttttagttaataaccccatctcagggtgattcactttcataatccgtattaccatggattaattctgcatagcaaaaactatgataggtgtgttaagtaatgaagtttggggaatgttaataagatgatttcttttactgtagatgaaatacatcgtaagagaatccctcgtgagaccagatcagttacatgtatatcttggcctctcttaagtctctaccatttattactgtacttgagttaggatttgggagtgccactgaacactaaaattattctgtctggggtatttgaatggtatgagacaaaaatccattttaatgttttatcaagttgagatgtctcacatgagtagttagtgctgagaatcagacacaggcacatttgggagcatggcgtggcaagaagctttgctttttcctgttcctattgtactcaaacttgtttctacatttttcattgatttctcttcgtactagcactagggcgcaagagaagccgtactggaatattacactactcagcacaagacaggtttaatctttttcttgggggacaagattggaaaattgaggtctgagcagacctgaagagaggcatccagcaactctgagattaaattcatcattgatcaattcgttattgtttggaattgacgtttagctgtgttcctcactcagatacgtgcatgatagctgcttgctaatttgggtcttagctcacatttcacctagaatgtatgggtctccctctcccctgcaaaatatccccactgttgctaatctgtctgcctcataatttccatgagattgagcatcttgtttgttttgtcaccactatataacagcatgttggaaacaaagcagtaataaagctagaaaaaccaagcgaatacactggattaaaaaaaatactgtttcctagaattaaagaaataaatga

SEQ ID NO: 321174 - DNA, 472 bp, Homo Sapiens
ggagtttttagtacttttactagtgattgtttggtaggtggggttacaattacgggctcttccttatagttgttcactgcctgtggagggtttggtagaacttgggatacgatgtaccgctcaagtccaaaatctgaaagttgtggactacgtggagacttctcagaaatacaactgcttgcaacaggaggatcagacagatcatctttcacatcagtcttctgaaaattttcacaattagacaactctgggtcagagttaatggcttcttgctcgtgtactgaatttttcttgacacgtggactatatccatacttctggaaatactctcttattttcataatatccattgaatttttttccattagtacttttgttgcctttatgaaatcaatgccttcttgattttccaatcttgctttatcaagaagaatattaacatcatcctttagagtctgaacttctgaatgaa

SEQ ID NO: 321175 - DNA, 519 bp, Homo Sapiens
  misc_feature (33)..(33): n is a, c, g, or t
  misc_feature (36)..(36): n is a, c, g, or t
  misc_feature (44)..(44): n is a, c, g, or t
  misc_feature (47)..(47): n is a, c, g, or t
  misc_feature (70)..(70): n is a, c, g, or t
aaataactttttgaatgaaagcttgtcaaattnctncttttaanttncatcgtaacgattccttccgtgncctggcacttctttatctgggactgaaagagttttgctgggtgacactgactttctaaatattccagaactatttctaggtactaaggccatgtctgtggaggaaggatgcaaaggatcccattctctgggagatgaagctggtttcgctgggtcaccaggactctttccggagatacgactgcagtatccgggggcaggcacggcaggtgaggccagtgaaggcagcggagtcacacgtacatcccttccagctctgttacctgcacactcaaaatactctgcaccttgtagcagtatatcccacttgggtcaagtatttccttcttaattccatttttcaaagggctttgaggcactgcaggtgctaaggcccaagcaactgactcttcctggtctgacgtggcatcgacctcaccgctttttgaatcggctcccaggactgtgcgg

SEQ ID NO: 321176 - DNA, 1563 bp, Homo Sapiens
  misc_feature (1552)..(1552): n is a, c, g, or t
ttttaaaattctaattgagcaactttattcacataatttctacaccaagaactcgaggttatctctgatggaaccaatttcactaatatttactttaagggcagagaagtcaaccaagtcctcacagtctcaagaatcaaaaacaaaacaaaaatacaaacagagagcaagtgggaagataaataacactccgaaataacctagctacacacttttagtttccaatttttctagcatgaaatcacttttctcttccatcctgtaagacgtgttctctcctctctcttctgagttgggctgtgaagagctgccctggtctcccggtctgacggtgttgtccaccccatctgaggcacccagggaattgccctggcgtccggagccctggggttctgatagcctgggtctttttgcagggaactgatggtccctcgtgccatccctcgtgatggcacgagcaacacatgtagatgaaggagcctcaattgcagttgagcccagtagactttttctgcaccccaggggtgatgatggcaacttctggaaaccctggaagtgagggtctggatttaattttcctaagaagccttctgtttgatatcgaacttccatacttgctttatctgtagacactccaatacataaaggcactgtcatctgcccaggagatttgaggcaatacttttgatgaagcttgtcaaattcttctttaatttcatcgtaacgattccttccgtggcctggcacttctttatctgggactgaaagagttttgctgggtgacactgactttctaaatattccagaactatttccctgaacgtgaaggtcagatgtctgctgcgggcgagttgcgctgtgtgtggggttggtctttggaagtgatgaagatgaatcgctcttgggcaggcacctacctgcttccagagatcttttgcctaggttttcaaaagcctcacttaaactttttgcttttgctttgctggaaggtaaactcagcctgcgggtttctaagccctgaaggccaccaggactcgcaggaccccctctgtacatgttcatggcccaggagtccgggaggcacatccggcgaggctggttcctgggactcaggcaatattcccgatgaagctgatcaaatcggatttcaatctccctctgacggttctctccatggccctgtcgtattgttggtctggaaactatttttacaggagaaattaaccattttaatgtcctaaatctattttcctcatcaagattatatgttgcactggagtcgaagtaaatcaaggaagaatacttcgagggtgtcactttgcgctccttccaacttggatctaacttatggatttggggtctgttgacttcaagaaaagctttttccaattttaaacctgtcttacggcaagaaacatctaatacgttcttgcaatctcttaatgcccctgtccctttcacaggctcagagcagggtatgaagttctccttggagctcctctgagaacgtctgggctcctttgcaatatgttttgttcatcccgctcttatnatccgggcctc

SEQ ID NO: 321177 - DNA, 1093 bp, Homo Sapiens
  misc_feature (322)..(322): n is a, c, g, or t
  misc_feature (705)..(728): n is a, c, g, or t
aagtgataagaaagaacagtttatttggcaggtttgtttttagtgatacacaagtaacaatatatcttactatcaatgaaattttatattcagggaaatacaatgattccaagctttcatgggaaaatattgcataaaaaggcaaaaatagtcctaccatattttctcagtctagaaaataagtcaaaatgactctaaaacaaaaatgctagcaataccttgtgttgctagaataatcccacatggccacatctaggaggccttcgaatccaagttcttagagggctccttgagaaatttttgttggtagatcccccactancaaggtcctctacagtgagaagttgtagatcttgcctgatttctgatgcctttgccatatgcttcaaacaccagttgactctggttctatcatcagacttgcagtagataggtggccagttccctgggttgggatgaataaatctataaaggttttgtaacacagttgcttggttatgcccacgttcaaaatttgaaataggaatcttgtgactagaatcacttgcagcctgacaatgaaatcgaaatcctcgtggaatttcaccaggatttataaaactgtggaaatctgccataataccttcttggagagaatacttaacacagccaatttcacaagggaggaagcgctgttcacaatgaggaggtagctcgccatggctnnnnnnnnnnnnnnnnnnnnnnnngcctccaaggagagcttttaaagacaaagctgacatatctggaggtgaaacattctgctttggtacaagcatgcctggcctcctcagtggtgtgaaaacaggtttctgcttctctgagggcccagggtcctttccctgagcggccctccattctcgagccatttctgcgtatttctccttttcttcctccctcagaagcgcccagtctgaggagcagtaagggatggcatcagcaacgcgagccacaggcaggcctcgtcgccgtagttcggggatcttctcctttgggccgccgggggccagcacgtgaccgagaaactttggcagtcgcggcagcgggcggcggggcggaggcgcgggaggcg

SEQ ID NO: 321178 - DNA, 167 bp, Homo Sapiens
gaaattcacagtccattaaattcttcccctctcttcttttagcaaacttgtaacatccttttatatcctttcttaacagaaggaaattaagcaaacaaaccagtcttttgccttttctttctctgtttcactcccccttcttattttatttatttattgaaattgcc

SEQ ID NO: 321179 - DNA, 1041 bp, Homo Sapiens
  misc_feature (127)..(162): n is a, c, g, or t
  misc_feature (169)..(169): n is a, c, g, or t
  misc_feature (172)..(172): n is a, c, g, or t
  misc_feature (312)..(312): n is a, c, g, or t
  misc_feature (654)..(654): n is a, c, g, or t
  misc_feature (818)..(818): n is a, c, g, or t
  misc_feature (868)..(870): n is a, c, g, or t
  misc_feature (880)..(915): n is a, c, g, or t
  misc_feature (919)..(920): n is a, c, g, or t
  misc_feature (923)..(924): n is a, c, g, or t
  misc_feature (926)..(927): n is a, c, g, or t
  misc_feature (929)..(929): n is a, c, g, or t
  misc_feature (1024)..(1024): n is a, c, g, or t
gaaattcacagtccattaaattcttcccctctcttcttttagcaaacttgtaacatccttttatatcctttcttaacagaaggaaattaagcaaacaaaccagtcttttgccttttttttgcccccnnnnnnnnnnnnnnnnnnnnnnnnnnnnnnnnnnnnccccttntanggccagttaaaactgctgcccggacagtaacatatcccggatgagggtttcgatgggggttttacctaccaaacggacgaaaaacaattgctctatgaactgaggaggagacggtgcggagggaagggaggcgaagcaanaagctttccgaatctcgtcggctggttggggtactgggctcctaacgtattcttccaaagcacactgagacttttcctgcaagctttccacatgggctacatcagagagaccacaggcatctgaaggtgaacaggactatggccttgaggcagctgtactcggctgagtcaacgtgcagcgccttgagcttctccacttgctcttggaagatccgtatgtggtccataaaggcgaccacccggtcggcggacatgggcgaagcatgcaggccggcggcggccaggagcggggcgacgtggaggggcatggagcactgcgccgcattcaacacaaacagctcngttccaggtgaggcgaagccagggccacctggtccgtgatctgcaggtcggggaagaaggggatgttccgggcccactcgacggcgctgaagagcatcctcgcggccagttcgcaaatgttctcgatacccatgatgttgttgggctgcatgcattggctgccngaagcgtgacgtgggataggggtccgcgcgcaccagcagggaaatatatnnnaagggggggnnnnnnnnnnnnnnnnnnnnnnnnnnnnnnnnnnnncccnnaannanntnggctgggtcggcggatcctgcccctctgcaccgcttcccgtctcatgcccactttgaggcactttttgaggcggcagtactggcactggttgcgntggtgctggtcgatggg

SEQ ID NO: 321180 - DNA, 355 bp, Homo Sapiens
gtgcggagacaagtcgagcggcaagcactacggccagttcacgtgcgagggctgcaagagcttcttcaagcgcagtgtgcggaggaacctgagctacacgtgccgcgccaaccggaactgtcccatcgaccagcaccatcgcaaccagtgccagtactgccgcctcaaaaagtgcctcaaagtgggcatgagacgggaagcggtgcagaggggcaggatgccgccgacccagccgacccacgggcagttcgcgctgaccaacggggatcccctcaactgccactcgtacctgtccggatatatttccctgctgttgcgcgcggagccctatcccacgccgagccctatgcagtct

SEQ ID NO: 321181 - DNA, 1498 bp, Homo Sapiens
  misc_feature (1416)..(1416): n is a, c, g, or t
  misc_feature (1449)..(1449): n is a, c, g, or t
  misc_feature (1464)..(1464): n is a, c, g, or t
  misc_feature (1488)..(1488): n is a, c, g, or t
gggtttttctcgaggagctctcctgggcgggtgaagaaggagcttcttctccggagtgcgccggcggtggcgcctgcggacctaactagctccaggttaggccgagctttgcgggaaagcagcggacttgaaaatactggaaagaccaatcactggacttcttcccttgagagtcagaggtcacccgtgattctgcctgcaccttatcattgatctgcagtgatttctgcaaatcaagagaaactctgcagggcactcccctgtttcctaagaacgaaaaagtgcaataaaggccattcgttacctacttttcagcagcccacaagatgtagcactattagtgtccccctcagaggcttaatgttgcctgtggagcagtgcccatcccagcccgtttctgcccaccagttgttctcaggaaccttacccatgctccagcgtccttcacctggcacaggacatgcaagataaatagggcaggcacgtgtttgggtgtcctctcttttctgataaaatccatcccgtgtttgccacacgccctccagtcctcagttcccactgcctaacgtctgcccccgtgtagatactgagaggtggtggcagtaattgtgggccttatcagccgctcagttccaggcttttgcccagggtcactgttgccccatgttcggagaacctggcccacctgtcttggctttctcatccttcccaacccagtgccgtttatttcagaagcttcctgggcactgggcttggatgcttcgggcttctgactgctccataaggttttgactggtgaaacaggggcccagatgacaacctctccttcgctccacaggtacgcgggagcctcaggttctctcaggggcagcaaagtggcccaagctgcccctgacagcacagggcctgggggtggctaacgagagaggccttacagtgccggcatgcctcctcttccactgtcgtccttcctcagagggcctcacgccaaacaaacggccttttcgtgtgaaacatcttcagggcgggaaaggggccacttctggctttgttagcaataactgaccttcagtttacccttctgaaggagcagggactcagcacagaattcactttagacggggctgaaggagtgtccctcctctatgtgaaaagaaaattgttttattcttcattctgactttttaactgtttggctcacttccagttagtttgaatgaaaataataattttctacttggagttgaagagggcagaatccgcagctctcatcattgtgatgtgtagcatgtctgccctctgactggacatcattgccattaactttcttctggggcatcacggcaatgtcacgatgcccagacttgggagccaaggcaaccttgggagtcagtccacttcataaaaatatgggtnacacccatttttaaaattttaagttttgttccntaaaaggtcaacttnagtgggttaatttattaaaagttngtgttacctt

SEQ ID NO: 321182 - DNA, 953 bp, Homo Sapiens
  misc_feature (459)..(467): n is a, c, g, or t
  misc_feature (617)..(627): n is a, c, g, or t
  misc_feature (750)..(778): n is a, c, g, or t
tgctttttcggaagaacaacaacaaaaaagaggtaaagacgaatctataaagtaccgagacttcctgggcaaagaatggacaatcagtttccttcctgtgtcgatgtcgatgttgtctgtgcaggagatgcagtttttgtgtagagaatgtaaattttctgtaaccttttgaaatctagttactaataagcactactgtaatttagcacagtttaactccaccctcatttaaacttcctttgattctttccgaccatgaaatagtgcatagtttgcctggagaatccactcacgttcataaagagaatgttgatggcgccgtgtagaagccgctctgtatccatccacgcgtgcagagctgccagcagggagctcacagaaggggagggagcaccaggccagctgagctgcacccacagtcccgagactgggatcccccaccccaacagtgattttggnnnnnnnnntgaaagttctgttcgtttatccattgcgatctggggagccccatctcgatatttccaatcctggctacttttcttagagaaaataagtcctttttttctggccttgctaatggcaacagaagaaagggcttctttgcgtggtcccctgtnnnnnnnnnnntggttcccccccggaccccctgtgcgtgtcgaccaccactggccaaagggaaactgcctgcttgtgactcttgccggtagacaatggtatatgtgagtggtgggtggggtgtgcgcgttgacnnnnnnnnnnnnnnnnnnnnnnnnnnnnnaggcaaggtgaacctaaataataaattattagtataaaaataatttgagtctgaatcttatactactggcagcgagagaggttactagaaacgaagaaggaacggggactcaactggatatatctcaacatatgtctactatattttgccttctgtgactgttatatagagtgac

SEQ ID NO: 321183 - DNA, 466 bp, Homo Sapiens
  misc_feature (296)..(304): n is a, c, g, or t
  misc_feature (423)..(423): n is a, c, g, or t
  misc_feature (445)..(445): n is a, c, g, or t
tttttttcgtgacacaaacatgcattcgttttattcacaaaacagcctggtttcctaaaacaatacaaacagcatgttcatcagcaggaagctggccgtgggaggggggcccaggcgcaggggcccctggggacccacccccaccagcaggggaccacgcaaagaagccctttcttctgttgccattagcaaggccagaaaaaaaggacttattttctctaagaaaagtagccaggattggaaatatcgagatggggctccccagatcgcaatggataaacgaacagaactttcannnnnnnnnccaaaatcactgttgggggtgggggatcccagtctcgggactttggggtgcagctcagctgggcctgggtgctccctccccttctgtgaggctccctgctgggcagctctgcacggctnggatgggttacagagcggtttntacacggcgccatcaacattt

SEQ ID NO: 321184 - DNA, 1700 bp, Homo Sapiens
  misc_feature (135)..(152): n is a, c, g, or t
  misc_feature (880)..(910): n is a, c, g, or t
  misc_feature (1163)..(1176): n is a, c, g, or t
  misc_feature (1500)..(1556): n is a, c, g, or t
aatgagaattatgcctgaaatctggcaaaccgaaaaatgttgctattgcaacaaagtggcaaaagctaaaagtaaggatttatcttcaaacataagctgagataacgaatagaagcaaaacgattggctactagnnnnnnnnnnnnnnnnnnattaggtaaatttgaaaaataaaaatgacttggcacttttaaaggtaacttcaccaaagaccgaagagccagtaaccagtagctccaacttgtctcagcatcacatcttctgtgctctttatttttgccggaccagttgcggttaggagaatgtgccttttttgtacctttgcatttaggttttataattttaattgatgtatggacacacacaaacaaaaaagcatgaaggaagatttggatccaagcagtgccacactttacatcatcactacaagtgttcaagtgtaaagaaaaccaattttgaaactatgaaattcctgattcataaatacacagttatttctactttagtacatataagataattcactgttattaaagctcttttattaaggcaattgcatatgttttaaaagcaatggtaaattaagttgtcttccaaaactgtgtgacttgtctggtcagctgtgtatgatcagttatctacctcagagtctattttcttttgtgctgggacaggttgctggccctccctgtttccacagaccaaatcctcctagctcaggagctagggctaagcagttatttctttcaagtattttttagttcttaaattttatgcttgtatttgatgatagatgtcagtgacatttcatagtttcaaaagtccttgctgctctgagaagtgtagattctagtgaaaattacatagtcataagagaaannnnnnnnnnnnnnnnnnnnnnnnnnnnnnnaaagttgtggtattattggttctatgctccctggaatattactgctttgtgaaagtccagactgaacgcagcaccctctgtgtacctagtacagttataaacctgggtctctcactacttgatatttttgcattagttaagacagaaatttgatagctcggttagaggggaggggaaatctgctgctagaaatgtctgaactaagtgccatactcgtctgggtaagatttgggaaacataacctctgtacatnnnnnnnnnnnnnntcagttaaacttcacatagtagacagcattaaattataaaaaaattaatttatgaagaaagacctttggtacagattgaaaaaaaagattttcatagagatatctatatgatcaagagagttaattttattttggtttactagtgcacagactggcagtggtaacttatggtcgggttaagatactctgtagtttctttcctaggaattgtggttaaggcaaaagaatttcggaactggtccattggatcccagaatggttaggttttctgtttaaatttctttgtgaaaaacccttggatttaaaaaactttttgcaatttcnnnnnnnnnnnnnnnnnnnnnnnnnnnnnnnnnnnnnnnnnnnnnnnnnnnnnnnnnaaaagaattccgggggacaatagtgccacccccttgtgtcaaagaggcccaaggagggaaataaaaagacggcggggcacaactcggggaaacggcggggtactgcacagccctggctgctacagaaccaccaaaacccgcgat

SEQ ID NO: 321185 - DNA, 1135 bp, Homo Sapiens
  misc_feature (83)..(83): n is a, c, g, or t
  misc_feature (103)..(129): n is a, c, g, or t
tttggccccaatgttccactttaccttactggggccccgggccgcccaaaccgaattggtcttagaaaagcttcttggagggnccgaggcggccggacatgtnnnnnnnnnnnnnnnnnnnnnnnnnnngcttattaaactagttttactttagcaccgttcttagtggagcaggattcttgatcatggggtggaattttgtgtatctgggcttcatgggatgcataaaattttccagttggtaagcagcaggtgccgagggtctggatcagaaaaaaaggcaggcagccgggttcccactcgccttccatgagctctccgcagctcaccggccatcacttgaagcaaacactcctgagggagctggttgaggaagggcagacatccggcttcttgccctggtacaactggcagacaagggtaaggagctgggtctgatcttccaagggtttcccattgacggtgacccagggcacatactcgtgcggtggctggagagcatctgtccgctgggcgttggcgtgcatgagctgcatgccgcggtcccccattgcacactccatgatagtgtctggcgacagccctggggcgtagagctgcaggcatagtggcagacttctctccatgtcctcaaactcttccatgcagacaatggtcaggaaggctagctccatgtcaagttcatccaacacgcaggcctccaccttgttgaatttgcactcctcttctccatgctggcacttgaactcccacctgccactgacattttgttcctgtgcgtttccgtagggcaccagcgtgacattgaggatctccatgaccaacagccatgttgggaagagctcccggatcaggaaggctcggcagccaccgcacagtgcttcatagtagagggtcacattgacaagcggtgcattggacttcttcaggggcccccgcaggtatagattgcctgtcttgtagttaactggtggcccattcccaaagaagtctaacgcttgcagaggggacgcctgcaccgccgccgtggggacgtccagcagcagcagcagcggtggcaggaacagcagaagtggcgacagggtcatcgcagcaggggcaaaggtgtggcgactgcagcggctgcctgggaaat

SEQ ID NO: 321186 - DNA, 522 bp, Homo Sapiens
  misc_feature (369)..(369): n is a, c, g, or t
attaaactagttttactttagcaccattcttagtggagcaggattctggatcagaaaaaaaggcaggcagccgggttcccactcgccttccatgagctctccgcagctcaccggccatcacttgaagcaaacactcctgagggagctggttgaggaagggcagacatccggcttcttgccctggtacaactggcagacaagggtaaggagctgggtctgatcttccaagggtttcccattgacggtgacccagggcacatactcgtgcggtggctggagagcatctgtccgctgggcgttggcgtgcatgagctgcatgccgcggtcccccattgcacactccatgatagtgtctggcgacagccctgngggcgtagagctgcaggcatagtggcagacttctcttcatgttctcaaactctttcatgcagaccatggtcaggaaggctagctccatgtcaagttcatccaacacgcaggccttcaccttgtgaattgcactcctctcttcatgctggcact

SEQ ID NO: 321187 - DNA, 1745 bp, Homo Sapiens
  misc_feature (814)..(826): n is a, c, g, or t
  misc_feature (1047)..(1065): n is a, c, g, or t
ataagggtggggcaaaggccctttgaccccaggatccatgctctcccctctccagtacactgcctcacaagtacctagcaacttgcagggcttaggagggggtaataagagaggacaaagtccaaatacgattctccaaattgctcagttcattcgtataccgtgagagtcttgtgtcgttttcacattttgctcttttcgtgaataggaagaaaaaaagcaaagataaaaaggatggtagtttagggtaaaccaaaaacacaaagcagtgtgcaaaagttcatgggagtccaaagagtataaataaaacttacccttacgaagtagaataaagataagcatttcataccaatacaaatcattttcatctttatgacagtcaggtaacatcaaaaaaaccttgctttcattctgatactttagctgtcaatccagtcaataccggttgttgttaagtctgtatacaagtaaagtataaatctagctattttactcaaaacatgcttttacctatttgattactcagagttactctgaaatcaataatgacagcagtttatacctatggaagatgttactgaacatcataatctaatatttacattagatgagattaagttaaattacaagtcacaaagagtttgtaagcaaacatttatagccatgattccacagatgtggtgagtaaaccaacagccattcctaaataaaatacaagaatttccatcatgcatagtttacaggcttggtaagaagcggtctctttaggggctagatgcttaagaaatattcaacaaacaatgaaatcttggcnnnnnnnnnnnnnacacaaatgtttggttatttagccacactagtgataaaacatattcatattctaactgcaagtggaataaacattgcaacaaaaatgcaacccaatcaaaatcattagtaataactattactccctcttagcagtaagaaccattattcttggatttcaaacattttattttctgtgcatagcttatagcactgtattataggaatcagagtgtataagcnnnnnnnnnnnnnnnnnnncttcttggagaccatttccattatttatgattaaatcaatgaaactatacaatttccacattaaatacaaattagtagaagaattcctccaagtagtattgcatataagctacaactttaccccaactattttaatcactatgattcgagatttcctaggatttaacagcccaagattgggctgttactacctcagcaagaacaatcaccagtaaatacatgaactggggttatagctgaatttttagaaactctccagacaaaccacgtgttagaggaggtaagtagaaaaactaatgtttgagctgtgctattcctaccaggaactatatcaaatatgcaaagttcaaacattcttagtaaaataatatgaaaggatctatatatactgtaaatttagcaaaaacacttttatgtacagaagcctaaatatcttaggaggtttagaataccaatgaagagaattgttaattcttcaaggctggtttcttatgaggattaaaaaccagcccttagtctcagatgcattccacctagatgtgttcacgaactccatagaataagaaatataaaccatgaatacgtactcttaatttccattcttcaacttaatgttctatagtacttcagatcggacgcgtgggtcgacgatatcccggtaattccggaccggtaccgcc

SEQ ID NO: 321188 - DNA, 1415 bp, Homo Sapiens
  misc_feature (16)..(16): n is a, c, g, or t
ctaccagccaccatgnattcctcaaaatgtggctaatgccaattgaagaaatgaaatttttccataccattttactttaaaattttaaatagtccatatgtgaactagtggctccctgaatgaacaatgcagtttctaatgcttccatgggtcaaaaccagtggtttctttgggggacctctctaatcaatcagtgctaagggattgagggttgagtgttgaagaagaggaaagcactcagacttatttgggcacttacacaagattccaaattccccattgcttccagaggcaggggacagcacaacctgctctggaggcctcactacgagcctggctaatgtcggtgggactaaaagccttacaattttggtcattcaactagaaagaggcctacggtccacacgcaaaactggaggtcacccctagggccatctgtgcatggaaaccaccactctggagctgatagggagttggagggaggggtgctcacttccgggtggggtttccagagccagaggaggatttagaagtggaggaagtggagggaccggagggtcctgagggccctttctggccacctgcaggctgcacaggcccttttcttttttgggattacgatcttgttcttgctcttgaacactttgctgggatctagcttagttcacaaaggagtcggtctcttctgtgagcaggtttgtgttgtaggtgataggtttatacatgctgaaccattgcttggcctgtgggctaatgccatagctggtgaaggcatattgccactggggcaggcccaggtgggtgatgagcaggcggtaataggcagtaaaggtgtctgtgagaaaatgccagtataacgctctgtccaggaaccagatctcagtgtcttctgctaatgctggtttcccacttttgtagacaaggcaaactttcccactgccattgcatgaatccagctcaaatatcacactgcgagagtcaaagtgaggcttctctggctgatcatcactggcttcatgtgtatcgtcctccaggtctgccagagtgggtgcattaggaagtgaatacatggaagactgggtgagctgagtcagttttgagatgctgttaattgccatgcttcccagtggaatgatgtgctcatccagcttcacactccatgtcatgtggaagccattggtcatcaggtaaaagttcttcacatcttcaggcatcacacagttattcttttgttcccaggaagaaatcatatgacgttcagcaggaggcttttctatgatggtcacctcagtcacacctggggaagattctaggatgcgcgtgatgcccagggtcagcttctccaggtgcggcttgctgcagcccagccccggggacgatgcctcctcctccatggctcgcgaccgcgattcccc

SEQ ID NO: 321189 - DNA, 401 bp, Homo Sapiens
ggttggagagttttatttgtagttctcagaagcaacacctaacagtgaaaaatagcacattcttgccataactgaggaatgattgcgacactgttgttcccatgctgttggattggcgcctgctgcacacgctacagctccggggcttcatgctgctgactctttgcttgtggccagtccccatgcctgcagagacacagctcctcagctcccattggaggggctcaacagccagtttccagtgaacacattttcttctattcattttgatattataagttatcttggcctgtgggctaatgccatagctggtgaaggcatattgccactggggcaggcccaggtgggtgatgagcaggcggtaataggcagtaaaggtgtctgtgagaaaatgccagtat

SEQ ID NO: 321190 - DNA, 461 bp, Homo Sapiens
cacttggttggagagttttatttgtagttctcagaagcaacacctaacagtgaaaaatagcacattcttgccataactgaggaatgattgcgacactgttgttcccatgctgttggattgtcgcctgctgcacacgctacagctccggggcttcatgctgctgactctttgcttgtggccagtccccatgccttggcctgtgggctaatgccatagctggtgaaggcatattgccactggggcaggcccaggtgggtgatgagcaggcggtaataggcagtaaaggtgtctgtgagaaaatgccagtataacgctctgtccaggaaccagatctcagtgtcttctgctaatgctggtttcccacttttgtagacaaggcaaactttccactgccattgcatgaatccagctcaaatatcacactgcgagagtcaaagtgaggcttctctggctgatcatca

SEQ ID NO: 321191 - DNA, 509 bp, Homo Sapiens
  misc_feature (201)..(387): n is a, c, g, or t
gtttttttgatgaggaagacaaactttataggaagctgcaaaagaaatgagcagagcgcggatatttgtggtaagggatacaaagaacatacaattgtgtacttgagaggtttcatggaacattatgacccatccaatgaagacatcaacattaacaacaaaaattaattgaggaagagcagtatgaaaatattctaatgnnnnnnnnnnnnnnnnnnnnnnnnnnnnnnnnnnnnnnnnnnnnnnnnnnnnnnnnnnnnnnnnnnnnnnnnnnnnnnnnnnnnnnnnnnnnnnnnnnnnnnnnnnnnnnnnnnnnnnnnnnnnnnnnnnnnnnnnnnnnnnnnnnnnnnnnnnnnnnnnnnnnnnnnnnnnnnnnnnnnnnnnnnnttctaatgcttcatgggtcaaaaccagtggtttctttgggggacctctctaatcaatcagtgctaagggattgagggttgagtgttgaagaagaggaaagcactcagacttatttgggcact

SEQ ID NO: 321192 - DNA, 597 bp, Homo Sapiens
  misc_feature (157)..(157): n is a, c, g, or t
gctcgtgattccttttggtggagagatacaaaaatctctgaaagcagaactgacagtggtaacgcttttctccagtatggattctttcatggattttgagggtctcattcaaggtgaatgccttgttgcaatactgacagacgaactccttcaagcncaggtggatgcgttcatgtttctgtaagtttccttgcaccgaaaagcaccgtccgcaggtcttgcactggtatggcttctccccggtgtgacatctcatgtgcattttgagtgtggaagggctctggaactgcttggcgcagagctcgcaggcatatggccgagaagtaagatgtcggtggggccttccttggtttccagcccccactgctttgtctccatcacagagttcacactgcagcttgggcatctctttagtttcttcttcctcaaagggtttatcctgaggagccttccccacggcgcaatccagttctgctgggtatttacatttatggctcgggctcctgtttccgtgctccttcctccagttgactttcctcatttttttcaactgtctggatttctttttgggtttgtagttgtagtaagggcgccacg

SEQ ID NO: 321193 - DNA, 322 bp, Homo Sapiens
  misc_feature (144)..(194): n is a, c, g, or t
aaacgaaaagcaaacttctttattgtacacagtacagaatataacgcagcttggcaggatgcatacggccctgcgcaggggaaagtatttcaaatcagctggcaggttcaagcctttctgcactgtagactttccacactctgnnnnnnnnnnnnnnnnnnnnnnnnnnnnnnnnnnnnnnnnnnnnnnnnnnncatccgggaggtgcatgagtccaatgggaatgcaaccgtgatgccgctgtcctatgcccagtgacagcacaggtcacgtaagttacagcaggggaggggtagctcaagctacagaggattattgtccc

SEQ ID NO: 321194 - DNA, 430 bp, Homo Sapiens
tttttgaaggtcatggggcacaaggctgcaattcttttaatggtgatgacagtaacgtaagtctgatacacaagcattatgtattcaacacactgatacctgatagcatgtcaggaaaaaagaataggcaatgcagtttaaggggggaaaaactgagaagtcataactactccaaagatgtgcaggaaaccacaaaagacatggacctgcttctactataaaaagaaaatgaagcacttctctggggttgctataccaactgtttcagcccattgtagtcttgcctctttcagggctttagccactatttcatttcatggaaaagcagacatctcctaacaaacagagtgacatttaccaaaataaagagggcttctcagtgagaagcttaataaagaaaaatatttacctatgctttgcaccaattttc

SEQ ID NO: 321195 - DNA, 604 bp, Homo Sapiens
  misc_feature (97)..(97): n is a, c, g, or t
  misc_feature (101)..(101): n is a, c, g, or t
aagtgtttgctcttaaatacacaaaatgcactgaaccagcaaaaacaaagtcccaggtctgaggagctctgaggatgatgcctgtgatggcctctgnagcntctccaggatactgagagagcaggtcaggggaggccttctccaggctgggcagtgggaaggccctctggaccgggtgagtgagtattcaggggacaaaggcacttacccgggtctggagccgccacggagccagggcacagcctagtttgggggattcctctgtcactggggtaggatctcccaacaagaggcggctttatgttccactcacgaagaggccagagctctcagatcttccccaaaacctaatcaggcctctcaccagcgtgttggaggccactcctggccatcatctccaactctttaccccaacctggcacattgtagggggctagaagggtgaggggaggtgtctttcacttatgcttaggtcactcttagaggactatcctcaaacttgaggtgacagggaactcttcacgggggcaggatttgatgttttgtttttagccatgtttgtcaataacaatgtcaatttctagttccaatttgtacccttgtc

SEQ ID NO: 321196 - DNA, 807 bp, Homo Sapiens
gtttttgggaaaagttcaaaaatatatacatatatacagacatatgtacatccacatgtgcagacacaggcacgcccagagttgttgctggttctgcctccattcagaatggcaggggccacccagcagacaaggagctgacctcatccatgggggtttcagacttgatgggcagggagtctctgctcagaagccaaactggaggtgatggcaagcctagcccccatccctgcccaagaccatcctctgcaggacaggcctgatgggcgagtggtggggcagggcatgcctcagtcggagtcacaggtcttttgttcggtggcagcatccactgcagaggctaggctgtcttcctggcctttcagcctttcacggatcagctcggcaatggccctctgagtccgcttttttagtttctccagcttcttggccacatctctcttgaggtcccagtcaggcttccgaggagcgaggttggccaggtccacctcctcgatgacgggctcgggcttggcggcctccagctgctccttcaccttctcctccactgcaaccggtttggcctggggcaccctcctcttcttcaggtcctcatcctccgggacatagttccgcagcctaagttccctgtgcttctcgccttcttcctcctcttctctgagatgcttggtctttggctccccatcttccttgtccttgcgcccggttttctcccgtagggccttcagccgttcctttcgccgcaacgcctcttcctctagccggcccacaccagccgtagtcgcctccatcttgcccgcgtacccc

SEQ ID NO: 321197 - DNA, 871 bp, Homo Sapiens
tccaactgccatctatacaattttcttacagatgtcaaaagcagtctagtttatataagcattctgttacctgtgatattttttagactgaactgctccattcctagtcttaattaccatattcagggtacgaactggagggcttgtgtgttagcttctgaattggcaattggaggcggtagtggtcgtgcctgtgtgtatcagaagggataggtatcttgcctcctttctctcaggcagtgcaaatcaccctgtggaaaaccgatggacaggaaggagtgttacacactgcttaccctgatttattcagtggttttgttttcattctggaaccatactatcaaatggcgacagactgttccgttccacccccgtgaagtaatcatgcaccgtgtgaatagtatcaagcaggattgctttcattgtatggagcatgaccagcgtgtgactcattctgacatttcagatcctaagaattctaagaacactactagaagcatttgttccctcctagtcaatgcttcatactttttcttgggattcttttagccccttgacattcttgtcccccaaactgaagtaggtgaatcctaagataagggggattttccttcaggggaaaagaggatggccccagcactttatccggggatacctttaacccagggtggtttcctaaggggaaggccagttcccattctttgccttccccaaagggcctaaaaggtcccccttttaagggggttaattaaggcccaaataagggggatcccagaggggggtcttttctcccaaaggggcgcgaatccctttttagggagaacccccgggggaaattccttagggggtcctcccccccaagaggtggaga

SEQ ID NO: 321198 - DNA, 628 bp, Homo Sapiens
tacacagtgcccaaaagctttagaaatgccattatgaacaatagcttttgctagttgttaggaaagcaatttatgagttgggaattattgtggaagacttgatggatgattatagctctgggtcactaacttctttttatgaaaacatgaataatactagttataactcaaagtcaaaatagtgtaaaagctgtggagtgcttttgtagggggtatattaaattgccagaatattgcagaggctcatcttggaacaagaagtagaatgctgtttcagttaagaggactgggctgtttcaggcaacagactgatcatttcgcatcacagtggtggctgggttttccatcagtcattactaatggcaatgagaaaaagtcaggcggcttgtgtgactcccatgttaacagcaccataaaaaagttttgccctaggaatttgggggaaagggaagaatgcggactgcctttgttattacagaaatttcacaacttacttaatgacaacctcgaaagttcacctgtggcatactggctgggaagagaaacaactgaagcaagccaatgctaagtgcagattatggcactacctgaaaataacagatctctttaagaagtttatcaataacta

SEQ ID NO: 321199 - DNA, 826 bp, Homo Sapiens
ttttaatagagaagaaaaataaaccgtttttatatacactatttgtatgttaattataaaccgtggcagtaaaagctttccgaacattggcaagaaaagctgaaaaattgttggtcttccttacattctcttgaaattctgctaggccctcaagatgaggggcactatctgacacttcatagtcccttgcttcattgagatgtaaggaaaacataaatgggctctcaggattcttagggtcaatattagtgaaaataaactgcaatttctcaccataaatttttcgaatttctagtccaagtcgatctttatacaagtctgcagatttctgcagccttttcaacctctctgcattcgctttattagcagtagaaatagtttccttcttcctagaatattcttccttaagatcctggatatttgcagtcagtacttccaattcctgctttttgccttttacttcagcaatcaattttaacaagttatcctttttttcttgaatgagcttattttgcctgctgatctgattttgatattccagaaacatctcaaccattcgttcttcttcctttaatttcacagacagcttttctgcaaatgctttgatggaatccttgtaggtatctcttagtcccgccatctgacaggaggtgtccgtacttttgaatttattccaaaattcatttatgcttttatcgaaaagtgccagttcgtcctctaccattatgtaggacaatgcttcgcaggcaggcctgagtcccgccgccttccccacaccagatccgcgcccactctagccaacagccggactctaggctcagctccc

SEQ ID NO: 321200 - DNA, 568 bp, Homo Sapiens
tttgggattcttttgttttattgataacagaaactgtgcataattacagatttgatgaggaatctgcaaataataaagaatgtgtctattgccagcaaaatacaattattccatgccctctcaacatacaaatatagagttcttcacaccagatggctctggtgtaacaaagccattttagatgtttaattgtgcttctacaaaaccttcagagcatgaggtagtttcctttacctacgatattttccacatttccattattacacttttagtgagctaaaatccttttaacatagcctgcggatgatctttcacaaaagccaagcctcatttacaaagggtttatttctttctactcaatttttcttaaaaagaatttcaagaatcactacacagctaagatatctgagacttgcaatggctggagtctatcagtacaatagtaattgcaatcagattcagatacaagagaacaggttctaacaatttcataattaagttgatattctgtttctatctataagctcacatttaaaaactacttcctcgaactacttatttttcctca

SEQ ID NO: 321201 - DNA, 1169 bp, Homo Sapiens
  misc_feature (346)..(346): n is a, c, g, or t
  misc_feature (369)..(383): n is a, c, g, or t
  misc_feature (710)..(710): n is a, c, g, or t
  misc_feature (720)..(720): n is a, c, g, or t
  misc_feature (723)..(801): n is a, c, g, or t
gcccacatatctccacgctgtgtgggcggaagagtgttcccacaccccagcactgttctcgcgtgttaattataaaccggcggggcgcccacaataatatgtggacacacctctttgttttttcgcgccccccgccgttgttttttcctcccacgggggggcgaaaaaattatatattttccgccacaaggggcggcccacaaagggtgttctgtaatctcccccgctcggcgggagattctcaggggtttcacattcaaataccccgcttttgttgagaaaggggttttcccaatgttggggcccgagaaaagggttttaaaggaaaattttccccccacatttnttttcaaaattgaatgggcccannnnnnnnnnnnnnntaaaattttgatattttggagaccttcccctctggggcactccccgtttgtagtaaggtaccccagtaaaaacggccctccacggaactttctccttttgggaattttgttttcaaaaaccgctttccgggtttccccccccggggggctttttttattttgggtggggagaatcccaaacccctttagttcctgtgccccggagtttcttcttagggaacacagcttaagggcccagtgtctccttttccttctcggggcccggccgcccaaaagaaaaggtttatgaaaaggtttttcagggggcgaggggcgaccaacaagatntcatcttttncannnnnnnnnnnnnnnnnnnnnnnnnnnnnnnnnnnnnnnnnnnnnnnnnnnnnnnnnnnnnnnnnnnnnnnnnnnnnnnaccaccaaaatggttttatttttgtcattgacaaccaagcacaacactgcaattgtatcattattttgtttagtttcttaaatattacttaagtatgcattaaaaatatgtttacattttaaaaatgtgacactttaaagaagtcctctgtaaacacgatcccttctcaatatattttcctgctttgtttcatacataaataacttaatctacaaagtcataaataataccatcaactcttatggcctggaagtatatacaaattttggagtctgacaaaagtgttctttatgattttataaataacacatagtatttgtagtgttgattataaatcaaatgactttttacaaattcctactgtctcc

SEQ ID NO: 321202 - DNA, 809 bp, Homo Sapiens
  misc_feature (598)..(755): n is a, c, g, or t
tgttcttttttgcaacatacgtttttattactcaaggacaacctggacgtcaccaatgcccagcttcacgggggcatgtagtgtgactcacggctgaacacaaaatcactgtgaagcctgtgctacagccctgggctacttttggacacgcaagaggacactcggttacatgaaacctgacttgcttctgaagacatgtgatacatgtcttttccctgaaaatgtttcccttccctgtctgccatgctcccaacttttctgccttccaggggcttctcactgtctgggtaactaggtcttgggcctagctagaccttgggtagtggcccctctgccacaatcagtgcctgggcctgaggctgagcttgtggcctccgaagcctgacctggctcggagctcgtctgtggcgcccagggatggcctggcttgcaggccaccacattaggccagctcgcaggtccccagtaaagcctgaagacactggcccgaggttggaggtgggtgctgctcgactttctggaggatctcagaattctcgcttcttgctaggactgaaccatgagacttacagccatacttcacttttcccagggtttnnnnnnnnnnnnnnnnnnnnnnnnnnnnnnnnnnnnnnnnnnnnnnnnnnnnnnnnnnnnnnnnnnnnnnnnnnnnnnnnnnnnnnnnnnnnnnnnnnnnnnnnnnnnnnnnnnnnnnnnnnnnnnnnnnnnnnnnnnnnnnnnnnnnnnnnnnnnnnagtttaaaaaattttttggcagagacagggtctcatcatgttgcccggcggtct

SEQ ID NO: 321203 - DNA, 539 bp, Homo Sapiens
ggcataacatgaaaacctatggaactagaattattattaaagaaatattatatgatcatagcttcctgtgatagcattcttttgagtgttacctatcctttaggtaaaatgttttatctgtgatttctttaacttaggcaacattttcttgggtgaacttgattgtcaactaattttcataaatggactggattctcttgcaacattacatgtttataaaaagtattaaatctgattagaatagaaagaaaacattgttttaaagttggatttatatttttcttctatgtagttactataaaagtgtgctggatttgaccaatccttacccccactatatagagaacccgtgatgactttagtttaaaaattgtggaaattgtggagcaatttttctcaccatgtgagaaaaattctgaaccatattagataatgtggaagtcatattgtctatcatatatactgccatttaaaaataggtttttaaaatttagctcagtcttaagtaatttgccgttgctaataattttatctccttg

SEQ ID NO: 321204 - DNA, 589 bp, Homo Sapiens
ccaatgaaaaaccctctcgggtccttggctttggaaattgtggaactgtacccagcagatgggcccttgggaacccaacagggaacaattcaaggctggagagaaaaggccacctttgacccagcagaaggcagaggcgggagaggagggtgaggatgtacaaggagcatcgcaggcgaggaaacaatggccaggacctaactgtggtgggaactgcctttgtctccacacactcgcaatcaacatgcgtatttgctattctcaaacaactcccttccacccccttaggctgaaaggacaaactcatcagagttgaggagtacctacctgatgaagctgttcatgcttccagcatcaaactggacgtttactgtctgcccaaaagccagtttccaaaaggtttgcttccctctgttcagtggattcttgactacatataggtcatatatttcaaaaaataatgcctagctatttctactttgaaatcatgactaaagccaaaccacaaccacagcaaagataacctaaggatttgtttaccagaaatacctacaaaaaagtttgcaggccgggcgcgatggctcacact

SEQ ID NO: 321205 - DNA, 581 bp, Homo Sapiens
ctttaaaactctggctggacagagttttaagcactatgctgcaggaatcctgagaaaaaggggaaattaattctattaggaatggcccaaactgaattgtgacaggcagagggtgttcctgacagagggaagatgaatacacttgaccccaacatttctgcccatccctgatgaccaagacctcttcccagacccacagctgcaggggccaagtaataacagctcttaatagtttataatgcactgttttaatgctttacgactaaactcatctgatcctttcatcagccctagagggtagaaagttttcccaattctacacatggcaaaatggagacccagagtcacttgcccaaggtcgcacagctagtggtggagctggagtctgggcccaggctgtgagttccaggtctgtgctcatggccaccaggccctactgctcagggtgaatgcagctggtctctggccagtgcctggtgctctggcccctctcgtggagctactgcccatgatgctttcctagtgcctggttactctgcgagacttgagtctacctttggactgccttccttgggggtctg

SEQ ID NO: 321206 - DNA, 570 bp, Homo Sapiens
  misc_feature (65)..(65): n is a, c, g, or t
  misc_feature (455)..(455): n is a, c, g, or t
agattaagtcagaatatcttggacttgttaactaaattagttcaataatgatcaactgacatatntaggttaaaaggctattttcattcctcaatgttacagtcagaatatttacagaagtatttattttaaaagtagacttaaaaaagaaaagtaatttagattaaaagatccaaggtgtattgtttcatgtaggtgttactgctacctatactttcaccccatttattaagcccaaaacacttcaagcaacttcaggttcataaattaataaggaggtacagaagcccaaccaggatgggaaagaatgtgtttcaggttagaaggggacagcatggctcctcaatgatgtcttgtatggaacatttgtgctccactgttaatgaagattttcttcctgaaaatctgaatgtgacattttaggatcctctgggttgttgggtttagtctcccgnattgtaatgggtgtgctgaaggtcaggtgggttgactagaaggtcaatccaagctcctaggctcccctctcttgtagggcctcaattatccacctgtgagggctcagggaggggc

SEQ ID NO: 321207 - DNA, 810 bp, Homo Sapiens
tttaatcttctccttacaaaagaattttatttatactgcactgattcattccttcaaacacatagcttctaacaggtggagttagaaaagcgggtgccacaaactatggtttaatagtatgcaggccctgtacctgtttatctaactatacctgaaatttgctgataccccaagccagctacttacactaaaggcatctctggggggcatcatctagatgaagtctttaacctgatgggaatatctggttattctacagtttaaacaggatgtttggcttatgcttttgttcagctgactggtgcatgggaaggattaaagcccatatctaactacagcaggtcttcaagcttattatcctgtcatgagttcataaagatgacaaactcatcatttgggagctataaggttcaaagtgggccagaatgcaactgcgctgttacactgtgccaaaatcaagtcaactgtcttgtaggtccttggctgtctcttgttataacctcgaacacttaaaaaaggaaacctcaagtatgctgagataattatcagaatgttcaggtacctttgttcctgaatatcaagtaatagggctcatctctgtgactgcttgcgacaagcacatagggcaactcattaccaactgctcattataaatgctgagctcttgagttcctgaggagggggtgggctctagactatcgagggctgagtcaactaggtgaagggccaacctgtacagttctaagtcttattttggttctgggcacatttcagttctgctccaagtccgctttgctccaattcagcgat

SEQ ID NO: 321208 - DNA, 993 bp, Homo Sapiens
  misc_feature (176)..(176): n is a, c, g, or t
gcatgtccttccccaacggccactcaaggactcccatctgttatttggagttccatttctatccaggcttgtcaggttgagtcagacaaaactttcctttacccccttgtgtcaccaatttaaaagtggttttaacatacttctatgatgtagttgagggttttccctctctctcntacccatcaaagacttcattcccactggtaccaaccacttggccaaactgatggctgctgaggtttaaaactgaatctctggcctggtgaagatatggcctttgagtaacttagaccagggcacatttatctgtttttcattaacaattttaactaaatagaaatataattctgttagctcttctacaggtctacttaaactttgaaagatgagattgttcaaaaatgacacgagaaaatcacccatcaccactaagttaaagacttgaatatgtgagagttccagagcctcaaactcctactacagtcactgatccataacattttcctcttgcaatggactccacgccaaagtagctcagtcttgcggcatgtttgtgcaccaaaaagtaggtttcgaaagatccagcactagtcatcactgtcactgccagactcactcaactgcaagtcatttctgagggtgttcatgagctggttgcttccttgtggccggctggttccattggcaacggcaggcctactgttgtagggctgctggtgtgaaggctgcggaggagaggctgggccattgtcctcgcctccactgctggagctatcgtcatcacttcccgaagagctctcagagtctgaagagctgctcccactgctgctgctcatttgttcaataatgtcaacttcagccctcagctctcttttgatgtcatccaactgaggttcaggtgaggggttatctttcaagggagaagttttgggtccaactggaggcttcgttggagctctgaatggcataggtggtggaggtggtggagcggcg

SEQ ID NO: 321209 - DNA, 535 bp, Homo Sapiens
  misc_feature (343)..(343): n is a, c, g, or t
ccttaaactgcgcttctagtgacatggccttaaacgatggggtccccaaatgtacagtgctcctcgatggcaaggttgtatctggcgcccttcccatccttataggtgctggtcacgatcctcagccagcctctctcgccccatggttcaccccatgaattccggacaaatccagtactcagtcccatcactgatgccccacccagccacagaaacgacatggtttatatatgtggtgtcctggtatttggcatagatgcctccggtgtagttagccagtctttctgttgccattattccacagctgatgggaccatttgcgtagatttctgccatcatcttnctccctcccagagagggagccgtagtctcccaccctccagagggtgtagttccggatggcgtggcactctttgaattcattgcatgtcccacattggttaaacttgtcacactcctggtcattggcctggtagttgttgcaggtctcgtcagggatgccgtgctggtgggcgtagtcccacacggacaggtc

SEQ ID NO: 321210 - DNA, 529 bp, Homo Sapiens
cactcacacatttttcaaatcgtccttgaacatcattccaatctctcagaagcctttcattttctttctgcaggtgctcatttttggcttgattttctgcaatggtgtccaagcaataacaaataagttctctaatgacttcagctgggttttcaactttctctaggttgaaggaaccaagtctgaatgagacatctttcaggtttttctcaaagaagaaataacaagactctttagaaaaattaaacgtgtatacatcagctggtcctgctcctgacaacaatgcttttctcagttcaccaacatatttccctttttccattgccatgtcatcagcttcttgggaaatctctgattcagaaactgtcccagtccatgctgaatgaccatcagtaagtgtaataacaaaaccagattccagtgttttctcccaagatacttgtagaaaatgagttatactgggttcagaaacaaggtggattctgcttatttttctctccatttcttaatacctctccgtgactctact

SEQ ID NO: 321211 - DNA, 722 bp, Homo Sapiens
  misc_feature (27)..(27): n is a, c, g, or t
  misc_feature (34)..(34): n is a, c, g, or t
  misc_feature (82)..(82): n is a, c, g, or t
acccatatatccaagcttgcccaactncctgtgnagacattctcgttatatccctttactattgttcgatcaatgaaacagntccgcatgacgacgatcactttcaacacctttcccaaggtcaccagaagcattgctgatgttccattgggtctggataagtggatggacatttcaggaaacatcctgtcaatgcggctgatcacatcatcaacatattgaggtggtaggacaagagttgtgggctgagcctttggtctacgtttggcagatactcccatctgattagcggaacgcttcaatgactgctgatttaaaaggccagatgctagtcctgcatggtactgcaacttgtttgaccacttatatgcttgaaggagttgactatagagaggagttttgtcctgcacaggatccaggcttaacagcccactgttatgaagaggatggttctcagatggcttgcctaccagattgctcagacgttccagctcattgaggtcccggttgaccgaatgtaagttgtcctggaagtgcgcaataaaggccttctcccggccctccagcgtctccttgttccgcatcccatccttcaggcagtcgaacaccctgctcacgctggagcgcagcgcctggatggcactaatggcctgggaaaaggcctccaggttcacactgacatttatcacgtccgccatgttgccgccgccacagcagctctc

SEQ ID NO: 321212 - DNA, 438 bp, Homo Sapiens
  misc_feature (367)..(367): n is a, c, g, or t
  misc_feature (427)..(427): n is a, c, g, or t
cagatgggatcaaccaccaatggttccagaagtagtacaccatccccatcacctctaaacctttcctcatccagaaatacacagggttacttgtacacagctgagggtgcacaagaagagccacaagtagaacctcttgatctttcactaccaaagcaacagggagaattattagaaaggtcaactatcactagtgtttaccagaacagtgtttattctgtccggggagaacccttgaacttgtcttgcggcaaaaaaggagccacaaaagggacagttgtgttacagacttcaggaacccagttgttaaatgttattcccaccaagtggccaaccccttaattttcggtattaccttacagttcantggcccgttttaccccacattgtggggcctttggttggaccgggaacgtgtttccttgtnttagggggcgt

SEQ ID NO: 321213 - DNA, 751 bp, Homo Sapiens
  misc_feature (395)..(395): n is a, c, g, or t
gttccatactaaacagatttataataagtaactaatatttattattaatatttgctatgtgcctggcattagattaaatattttaaatcccatatataacttaccacaataattttacaaagtaggtatattaatatatttacactttagatgaggttacagatttaggaagtgtaaattgaccaagtggatttaaagccagatctgcccaacagaagggcttgtttattcactatagcacatcactttgctttttatatcacttatttatcagtgaattcaaatcctaccaactccatgaaatctttcttccttccccacagtaatctttttctttataaacaattcagtgattttagtatattcacagagttatgcatgctttaccacattcngattttagagtattttcgcagccccaaaaagaaaccccataccctttgggccccagcttctccctcctctccccagccctaggcaaccagtaatccactttccgtctgtatgcatttgtctatcttgaacatttcatataaatggaatcatgcaatgtgtggtcttttgtgactggcttctttcacttaacatgttttcaaagtcccttcatcggttgggttgtttcagctttttgaatattatgaataatgctcctgttgacattcatgtacaagttttcgtgtcaacatatgttctcatttctcttggatatatacctaagagtggaattgcggggtcatatggtaactctatg

SEQ ID NO: 321214 - DNA, 598 bp, Homo Sapiens
  misc_feature (200)..(200): n is a, c, g, or t
  misc_feature (227)..(227): n is a, c, g, or t
ccatacactagtttctattccataactagtactaaagtactgattcatgctacaacctaaatcttgaaaacatgttaattgaaagaagccagtcacaaaaagacccacatattctatgattccatttatatgaaatgttcagaatagacaaatcccaaacagacagaaattagattactgattgccctggggtagggggnccgttgaggaacgggaattgactgctnaatgggttctgcaatgggttgagtggtgtccccccaaaacttcatgtctacctgaaacctcagaatgtgactttagttggaaatagagtctttgcagatctagttagttaagatgaaatcagactggattagggcaggccctaaatccaattactggggtccttataagtaggccatggaaagacacagacacagggaagaaggccatgcgagacacagacacagaaggccatgtgaagacggagggagaaactgaagtgatgcagccacaagccaaggactgccaggagccatcagaagctaaggaggaagcatgaaagagtcttcttcagagcagcagtccccaaggcacgaaaaagtcttccttagag

SEQ ID NO: 321215 - DNA, 570 bp, Homo Sapiens
gttctcaacccggcaaaccgtttttttcccataaatcccggaatgtggggcaaaatttcaccttttgccttggccccccatgccccccaggttcccctttttaccgggggttttttcccctggcaaagtttccttgggatttaaagctggtactttgttggggaaggattttccaccttccacggaatccccccgttttttcccttgggggtattttcttatgtttaccaaggcaggccttatagaagtaagctttctcacactcatcacagccatagggtctctctcccgtgtgagttctgtgatgtacaatgagcattgtctttgtaaaggaaggctttcccacagtcactgcatttatagggtttctctcctgagtgaattttctgatgtctaatgagtcctgacttctgtgaacagggttgcccacattcaggacatacaaagggagtctttcctgtatgatatctctgatgtgctacaaggcaagacttctggctgaaggccttgccacagtcaatgcatccataaggtttctctccagtgtgagttcgttgatgtatgttgaga

SEQ ID NO: 321216 - DNA, 289 bp, Homo Sapiens
tgacacttgtggcccagcctcacagctgcatcttaaccttgcctttgcctctgcctctcaagctggtacctccttaatttacatcctaagagtggaaccatgtgacaaggactggagtgccattggctgtggacttttcaggcagggaagtacaagaccactcttgtattcaggggcaaccaaaggagagaattacgtacttgttgagtacaaactgcaccaagccctggagacccattaccaccgttaaccctcaatacagctctgctagtaagggattcgtctcccc

SEQ ID NO: 321217 - DNA, 819 bp, Homo Sapiens
  misc_feature (156)..(164): n is a, c, g, or t
  misc_feature (755)..(755): n is a, c, g, or t
attgtaaagtatctctgctttatccattgctgaattcgataggatgttgaaatgctggtcaccaaaaaaggaaactgagcaaattcatttcaacaacatcaaaacttcagcttctcatagtaaaaagctgaatgttactaatatttttcatatctnnnnnnnnnttcttagcaatgaaattgctgttaaaacacaaatttcaatcaaatacttttgtgtatagaaaatatgtatagtaggtagatagaaaagtataaaatgtttgttgaagtatcttattttagaatgaatggagaaatgccaaagatgaatccttcactgcattatgaaaatatttcacatgttctcttggactttatataaatctgtaatagattttagaattgaaaaattctttgtgaaggtcttctaaaagtgttccaatttatctcaaaatctccatatataggatcagcttaaaacataaagaaaaccttgaatttctcaaatgtttgagatgttcaagacagtctcttaatccgttaatgcttttggaaacaattgacaaaatagggcaggcagctcatctcatgtcctgaagttggaatttaaataattcctatttgccaattagaatgacagtgttggaatttggaggcagtagttgagcatattctctagtatatagctacccctttaataaaatgaaggaatgccctccatcatattttagtgggctatttataaatagtcctgaagccaatttaggtttattnatttaaaagataatgcctccggaaaagggatcctttatgaataaccaaccggaggccttttcct

SEQ ID NO: 321218 - DNA, 497 bp, Homo Sapiens
agaacataatgcaaatgatgatgaatattttgggtgataagagaaagctgaggacccatttctaggattctaagatgtaagatttcttaagttctttatcttagtctcatgcattctccacatcacgcgctgtaccatactgtgtagtcagaacagacagtgtgattgaaaagctttggaaaaagttaacacaaaggattatttagcactataggctgtagatacgtatgtgtgtatttgttcaacaattggagatggttgaatacccttgaacaaagtgtgtatcttctcaaatcagtggttgcactagtcaataattagaaggtgttgttatttttaaaactataagcaaaattatgaaggcctttaaaaaatctatcataataatgaaaacgaggttgtctcccaacagtgctgtccctcaaagaaaagactggttatgtggaaacagcacgtttggagagattattctagtgaataacagtgtatatttgtgg

SEQ ID NO: 321219 - DNA, 744 bp, Homo Sapiens
gactggtgaggaatttttattttcctttcatgttcactaattgcaagctttcttcatttcggtaatatctaaaatgatctcctcttgtcggaggtagattttcccagtagcttctaattcctgacccagaagcggtgtattgcgcctcagcatggaggaggacgtgaaggcgtacggagtctgggagtagtacaccacgtaggtaggtttgtactggtttggctttgtgtactgtgttccccaggcaattcgaatccagactgcattctcctcagtttctctgaagctgactgtcacattttttaatgctctctgaagaattttcttgaacgaatttttaaattgtttcatatcaaaaaggtcaacatcttcacctggtcctttactcatctgaaaaacatcccaaactttctggtgctgatgaaattgcatataaatgatgtctaacagggcagcatcactgatacttgcacgcttttcctcacacagatggatcaagtgctgaactacagattcctttctctgtcggaaatttacagtctgcagttgattttcagacaaaaaatcccaggccttcaggattgttgtcagttcattcatggggattttcaagatggtcctcttgatgaactcagcaacagtctcatccatctctttggcacggcccacatctcctgcagtctcactcctcaagagctgttcccgctcgccgcgccttcaaagccaccaattgcagttcccccc

SEQ ID NO: 321220 - DNA, 614 bp, Homo Sapiens
  misc_feature (122)..(131): n is a, c, g, or t
  misc_feature (312)..(321): n is a, c, g, or t
tttattatttaataaaacaagaaatatctttaatcatatattataaatagtgttagtacatgagaaatgtattcactacagacagaatatcttattttattgtgtcgcataatcctttcctnnnnnnnnnncactgcttctccccagttacaagagactaaaagcatactaaaaacactttatcgtcattactaaatgcattaaatacacatcctaaatggaatatgctgtatatccgatgaaatacatagaacgttccatcaaggcaaaagaaaagacgtagccaacaatggaaagatggcacacacaagnnnnnnnnnngaacagttctcaaatattgcagtaacttttcaatgtatcatagatattctatgacttttctatgaaacagaggaggaccaaacattatacacagtttgaagagactaaatgccagagaatctacagatattagcatccaggaataatttatattcctggcccattttctgcccactggaaaaaattgcattgtttttccttcccaagaggacacacaaaaaaattctttccattgttaggtccaatcttcaatacatgttttcatggtggagcggcggccgctccaacatcag

SEQ ID NO: 321221 - DNA, 270 bp, Homo Sapiens
aaacgttttattaatctttattttaaaacataaccagatgcaccttggttgtttacattctctggttgccattcagtctcaaagtaaacaccgggagcatatgataaatcgtagtttaaggaagccatagcacttacagagttctcgaatggttacaatataaaatctgtcataaaaatcagtaaaagatgcaatgtagaacacagtttaacactggtacaatggcagtagcagctttgcaaatgtttgtctatatgatttccacaggac

SEQ ID NO: 321222 - DNA, 1056 bp, Homo Sapiens
  misc_feature (56)..(56): n is a, c, g, or t
  misc_feature (209)..(209): n is a, c, g, or t
ctgggtcctggaatggactttttgtccgccgaacccattgtggtctctgtccctanaattcttgggatgggaccagcacaaatggcaagaagagacctccagtgtctgagagaaaaggatcggaagaggccacgtcctggcaggaagcagggccgacagagggcagacaccccagaacacccgccctcagcctgggagaaagtgcgttnacggctgcagcctggaaacgagggcaggctctctccaggacggttccgctcagaagggcctggcctcctgagaagcagcccccacacagcatgctttctgaatgcactgtgggtgggactccagttcccacttccaggatgaagagtgggactcaaatggtttaccagtgcaatgtggggtcaccatgcagacctgcccctagggtaaaatacaggctgcccccaacacctgtcttaactccaggatctcccttgctcaaaagtggcctcaatctgtggcaagaaagatggggccgtcctcaccacaagatccaagtgactatgcgcatgagaaggcagccttctaacacatccctttggcaggcatatgtcctgggtcacttgtgtgctgagttatttgtatggaatcattttcttagatgatgaaattttcggagtattaaaaaagacattcatccagaacaatcaagtgtgtgtacacagaaatctagaaggaaatctacaatggacacaggcccatgcgctttccatcccgtggaaacagaacagtgacactggagaacagaaagtgaacattcacctcctgcactccctgtgcaaaatggaagaggtctgatggagcagatgtctgtgctgctggcagagcacaggctaggagcagacacaagtgaaacgccaggcagaaaacagagtctgtaacatcgtccctgcaaacctggatgctcgctgctgtgaccaggcctcggtccaagcctcctgtccatgtggaacgcccctttgctccctttaattaaagcgtacgcgtgggtcgacgatatcccgtaattccggaccggtaccagcctgc

SEQ ID NO: 321223 - DNA, 738 bp, Homo Sapiens
  misc_feature (139)..(153): n is a, c, g, or t
  misc_feature (316)..(336): n is a, c, g, or t
tttgctttttaaaatttattttaaaacatgaaacccaagctgaatagaaaccacagaaattacattgacgagatttttagtatttgccaagaaaaaaagcccccaaagaaataaaaatcagcccccaaacccagttctnnnnnnnnnnnnnnncacagcgacagtacatacagccatggccctacagaggctggaggagggggaaatgcaaaatggttcaggcctcagttcctggatgttaaatcacactggggtgggggaggtcagatgcccaggccgggggggtaaaccaggaggctgagtcttaaggagatcnnnnnnnnnnnnnnnnnnnnntacaaatatgaagtggttcagtacacaaccattatggttaaacacaaaacaaagatcccacaggagaggccctggtcccccgcctgcccccttgtctggggttctggggtccagggggctgcctcaccacccctctcagggctggggcagagctggcccagggcaggagcaaatgttgcttggaactcgaattgcatagtgagatgggtgggtgggcaatgggccaggggctgctcccaaccaggcccattcactaccaaccttgccatgacatgtggggggcctggggtagtggatgcctgctggggagcactctcacgtgaggtaagccctgggctcctccctctttgtccccagcggacgcgtggtcgacgatatcccgtaattccgggaccggtacca

SEQ ID NO: 321224 - DNA, 537 bp, Homo Sapiens
ttcgattctacaaatatttattttgtcattactgagtgcaaagtatcagggaagtgtagctgtggaataccaatgcttaagagaccacagagttcttgaaacccacgattcttcttcaaatccagatgtgtgtgagccccacctcatcaactctgaaggctgaaggatcagctggaatttctgctgcagggtgtccctgataagctcaaaagcatcagaacggagggagctttctccccttctctcatctcattaaaatgagctttcttgttgtggggggttggggagggacctttaaaaccaaacaatggtgccctcttatcatcttatcctgtcctcctttctccaagtttccagaggggaaaaataaaaccaaacaaacccctcagcattgtgctctcctgacctctaagctcttctcatataaagtgtactgttagccttctgtatcccagcctaatcacacttccctttcccttccacacttgtggacttcacagatttctctggacgtttctctggagatttctcagttct

SEQ ID NO: 321225 - DNA, 949 bp, Homo Sapiens
  misc_feature (69)..(69): n is a, c, g, or t
  misc_feature (262)..(292): n is a, c, g, or t
cacttgctgacccggctccttctttgggagaattttcttctttttcttgggagccactttctgtggccntgctccctcaggggtcattaactgtttcttccttgggtgtagacttcttcctcttgggaatactggtgctgccagcggtctcttcaagatcgctactcatcaactcctccttggaaaaagatttctttttcttgggttggagaaagagatagatgggtcttccattccattctcctgaggaacctcctggggnnnnnnnnnnnnnnnnnnnnnnnnnnnnnnnctcgtctcactaccccagtttgaggcttcttgggaggcagccgaggacagaacacacattcccagggaacggggtgtgagctacaaccagctctctgggctcttgagcaagttcagcccctatctccttcctcacactcctctggagtactactgctgttttctgaagacgcgagggcaagtgcagccagccgtttcttttccttctttaagcgtttcttctcctgtttctccagcttcctagtaatctcagcagccgcttcctctgcctgaaccattgcttccttcatgacatccagattctttcgtggtatctctccagtctcatagaaggacagtcgctcttcaacttgttctcgaagcttctccccgaatacactcgtgggcacctcagagaagcaatcgattcgtgaggcaatactgcatttgtttgccaggtatcgggagatgcggcctttgttcttggcagctgctcggccaatgaaggtggagtggaaaatgagtccatattttggggtgttaccccttgtcttcagggctctggaaacttggtccctttgctgggccctgggaatcactcagacaccaggactggccatcacccccatagcagaggcctgtataggtcagggagccctggtcagccatcaccgtgacc

SEQ ID NO: 321226 - DNA, 889 bp, Homo Sapiens
  misc_feature (144)..(144): n is a, c, g, or t
  misc_feature (207)..(207): n is a, c, g, or t
  misc_feature (530)..(558): n is a, c, g, or t
acggaggggggccccgaagggggcggccccagaaacaaaggaggaccgaccgaattctccgtggtaatgtttgattgaattcgggggggaaatttggtttttaatttgggggaaccacgggccccaggggtgggaaaatgtcancctttgggctatggttatgcccccacctccccaggaggatgtcccatttgcattctaatcttncctgggatgctttatggaacttttttcttcttcttggagctgctcttgccaacccgcctcttcagggcccactgctgaccggctcctctttggagaatttcctctttttcttggagccacttctgtggcctgcctcctcagggtcattaactgtttcctccttgggtgtagacttcttcctcttgggaatactggtgctgccagcggtctcttcaagatcgctactcatcaactcctccttggaaaaagatttctttttcttgggtttggagaaagagatagatgggtcttccattccattctcctgaggaacctcctggggnnnnnnnnnnnnnnnnnnnnnnnnnnnnncactcatctcctcacactcctctggagtactactgctgttttctgaagacgcgagggcaagtgcagccagccgtttcttttccttctttaagcgtttcttctcctgtttctccagcttcctagtaatctcagcagccgcttcctctgcctgaaccattgcttccttcatgacatccagattctttcgtggtatctctccagtctcatagaaggacagtcgctcttcaacttgttctcgaagcttctccccgaatacactcgtgggcacctcagagaagcaatcgattcgtgaggcaatactgcatttgtttgccaggtatcgggagatgcc

SEQ ID NO: 321227 - DNA, 929 bp, Homo Sapiens
  misc_feature (447)..(457): n is a, c, g, or t
atatgggagggccacccgtctctctggagaatgtcagtggtgacaggcatccgactcccgtacagccccgcacgataacgaatccgtgtcatacggcgcgagggcggggcaccaaaagacgaaacaatcttctgggctgggcctagggcgcggtttgggttatgatgttagcacatgcatccctccgccgcccgcgggctggcacgatgcggtccgtggcggccgacctactctgcgcggggctgggtcaggttttcgtcttcggggacccactacaaaagagcgggggccgccacaccatgttcgtatcgaggcgcggcccctcaggaagaaggtgttgaacgccctaacccaggggtcgaggaagtccacccaggggcgggcacaggcccccgctcatctggacgcgggacacggcggagggttgtgcggcgccgcattcaacannnnnnnnnnnccccttctggggaatttgtttttattggggaacacggcacagggggtgggaaatgtcaccttgggctatggtatgccccacctcccagagaatgtccatttgcattctaatcttcctgggatgctttatggaactttttcttcttcttggagctgctcttgccaaccgcctcttcaggcccactgctgaccggctcctctttggagaatttcctctttttcttggagccacttctgtggcctgcctcctcagggtcattaactgtttcctccttgggtgtagacttcttcctcttgggaatactggtgctgccagcggtctcttcaagatcgctactcatcaactcctccttggaaaaagatttctttttcttgggtttggagaaagagatagatgggtcttccattccattctcctgaggaacctcctggggcttttgctttttcttctttttgggtttttcactcatctc

SEQ ID NO: 321228 - DNA, 462 bp, Homo Sapiens
aggaggcggttttgggagtcggctttttgaagctttaaatccagctgcttcagctggtttatacatcccaagaaagaagtaggtgcaagctaggttcacccagacttcagaattacaattttcctcttttgtagcattttcgtattcctccagagctctcttgtagtcacccaggtgaaaggcacaatatccaatccacaaattagtatcctcttcttcttccccaacatgacgtttgaactccaacagggtaatagctccagtgaaatctctttttgaaagtagctcctctagttttggaatcttcctacctttcttctttcttttgtcagtgtgctgtacgcctctgcctacagcaggtttggcccttgaaagcatcatcttgacgtcggtcttgtgagtccccaccacacagcgaaggccgcgcctcagcgtttcgccgcatccacacagcacgttctg

SEQ ID NO: 321229 - DNA, 281 bp, Homo Sapiens
gaacttacatacttaaacatcgaattgctttaagtgtttggcattcactgttcccgtgcatgccagcagcttcttactgcaaacacctgagacttgctatagagcagctggactatgttccgcccacacacaggacagggagctgacgcgtcaaggaggggggcgggatcaatactccagctttcccccctccatttccctgtatctcagcagtatggagcttgttatcaatgagaacctgctcgctgactttaaattgcttttcttaccttctcagttca

SEQ ID NO: 321230 - DNA, 866 bp, Homo Sapiens
  misc_feature (129)..(129): n is a, c, g, or t
  misc_feature (346)..(359): n is a, c, g, or t
ttcttttatgaaagtgggggcaagaatcagggtgaaaatgagtgtaaacaaagcccatcctgtggtcagcacccactggaggtggccagcagagtggcctcagatgttcctgcacctggcccaggagcncaggacagaggtcaaatctaggccccttggtctggctggattcatcaggcaagattcgaaaacaagaaaacctctagaacaagaaacaatcatgtctgcagcagatacggcactgtggccctatggccatggcaatcgtgagcaccaagagaatgagttacagaaatatctccaatacaaagacatgcatctcctggacagtggacagtcgctgggnnnnnnnnnnnnnnttcaaggctcacacaacctaacagccttaaatatctgaagaaacagaatcacgacattaagtcagcagagggagaggtaggctgaagcagcaggaggccaattttatatcccacagatttttttaaaaatgactcccaagcaaggggtggggagaaagccactgatttaggaagagttacttggctcagccaaccactgcggttatctacacgttttacaaaggcacagaagtagagaggggctgcactcacgaccctccccagggcccgcacagccagacacggtgggttcttcctttttcccttctggccttggtggaattcctaccacggtggcctctgcctttgggacaatgccttcatgctcatccccgggtcaaggatggagtctgttaccattttccaggggaaattccaaggaccagccccgcctcattacgttcaccccacaggaaggtgatctggaaagcctgtaaacacgtactctgggtggctgagtggtgtcac

SEQ ID NO: 321231 - DNA, 393 bp, Homo Sapiens
tatttgtattttgttttagtattgtgaagttgtgttaaatagtactagctagaaatacaaatttctggttatcatttctcttccctgtggcacttgacattttaattgtcttaaagtttttgaagtacatcttctggccccttgagtactgccagaggcaaaagatgtttgtttcttattcaaaccacttttgtctcctgggatcccttctgtagcctaaagtatggctgggaaatggacttgagaagattggcttgaattagatcataatcatgtgtgatcccatcatgaattcattggaatttgtgttgcatgtaaggcaatctttcctgttgtaaatcttccttttttaatgtacatatattttgaaaaatatgaataaacatgaatttt

SEQ ID NO: 321232 - DNA, 579 bp, Homo Sapiens
  misc_feature (11)..(11): n is a, c, g, or t
atccaagattnggttttaaccctattatttaccatatttgtaaactgctgttaaaatgcccctcaaaaatgttatttaggaaggcacaatttggtagcatcaattttttatttatagttttttctaaacaagatccgaagaaacttccactttaattttccccttggagtacttaaagtacttcaaggttcaatgtcaaatgcagataaaaccccttcattttcaaacttactaagtgttaacaatacatttgatagtgagcagaatatgaaagtacagatgttatcaaaagaggaaattcttatgatactaggttcagagattaaagaatttgaaacaagggctttcatgactggggaaaatcaaagcttttcttgaagggagtgggcttttaatactcgagctattaattaaatgcagaaatgagataacatagttatcctgaacatcaaaaaagcaacagctaatacagctaatgcattataaataatgtatttcataactgaattagtaaagcatggttaccactctaggctagacactaatcagtataaccatttgtagtttctcctcgtgccg

SEQ ID NO: 321233 - DNA, 1078 bp, Homo Sapiens; identical to SEQ ID NO: 176300

SEQ ID NO: 321234 - DNA, 462 bp, Homo Sapiens
tggattatttctaatttgggcactgtaagagagtaatcctgcagtgcgggcaaaaccaggaccagcccagcctgcagagagaggaagagggcacgatcttaggcaggctggccaagcccaagacagggctcctgccttgcacagccgggcctctgggaggagggatggtagagcctctggacccaaaggacccagccagaaggttctgggctggtagcaggttgcccttcaggggcagagtcaatctgtagagaggtcatcatctccagctagttcagcttgagtgtgagcagaagaaaaccatgtttgtaccacacaagggagtgggccaagagtttttggtacctgccaggctgggctttgttagttccactggggtggaaggatggggcagaaagatggacttcagactagagtagggatggccacctaccaagcccctttcttccttatcagaatctt

SEQ ID NO: 321235 - DNA, 1197 bp, Homo Sapiens
  misc_feature (245)..(245): n is a, c, g, or t
  misc_feature (259)..(259): n is a, c, g, or t
  misc_feature (287)..(287): n is a, c, g, or t
  misc_feature (329)..(329): n is a, c, g, or t
  misc_feature (332)..(332): n is a, c, g, or t
  misc_feature (455)..(455): n is a, c, g, or t
attgggcccaagaacccctttcccccatgggggccgtggtggaaatttggggtttagaatccatttttccccctttttttaaaaacccccctttattccaggggtggtaggaaatggagggttctcccagggattttttcccatagggtgcaggccttcacataagcgtgtttcaaacgagggcccttggacccccccgggaatttcatacatgcaggatcactgccggggacctgccggtactncaggtagtttcctngcacgaaatgttgggtgagcagcttctngggatccccccaggatactgtctcccctcccctcaaaacacnttntaacacactcagctcttcccagattttctcctcaggggcacagtcgccctcttttgcgattatggccaggatgattatcagggaggcctgtcttgggcatgatctgattgtcacccagcaggnccatcgtaggagaggcccaggcaggtggcaaagatgtacacgtggccgatggggtccacttccatcagctcgatgccaaagaccagctgcaaggaattggaagctttgctgaagatcacaggaaagaagtactgccaatttccgacgacactccccagcatttctgcctttgtgaccggctccctggctcgatacttgaggagcagaaaatgaaccaactcggccaccttcctactgagtgctgcttggaactcggtctccaggtcagggaaggtgcttggcccctcctcttcttggttgctggagtcctcataggattggctccagagagggtagttcatggtagtggggaggctggaggctccctgaggactctggggaggatctggtgactcggcagcaggcacctcccccagggtgacttcaactagagtagaagaggaggaggcagcctcctgctcctcagtagcaggagcctgcgcacccaccaggcccagggcctctcctcgggcctcaaggccttcttcaggcttgcagtgctgactcctctgctcaagaggcatgatgactctggtcagggcaacaggcgggagtgtgggcaggagctgggcaatggagacccactggcagatcttctccttcagtgctcctccgggggcctctggtcctccaggtcagcctgtcccctcagaaccttgcctcctcaccgagcctgggccggcttccctccgccgacgtcagg

SEQ ID NO: 321236 - DNA, 845 bp, Homo Sapiens
  misc_feature (71)..(74): n is a, c, g, or t
  misc_feature (78)..(78): n is a, c, g, or t
  misc_feature (82)..(82): n is a, c, g, or t
  misc_feature (90)..(93): n is a, c, g, or t
tcgccacaaccggagattggttctagaaaaggcttttttcgaggggccggaagggcggcccgacaaggggnnnntttnttgnttgggttnnnnttgggggggccaatataagagactttttattctatttgtgcaaaggagaggggtcatcttgcttcccccagaaggtttctcaacccccatcaaggactgtccattttacatctctagctccagttcttctcagagagtaaaagtgctccaaaggcctgtgatcatgggtactgattaagggctgcagactcttcagatcccagttaaattccctggtgtttgagctgtgtgggagctgtggttgcttgcttcctggctttgcctgaggtcctgccgcaaaccctgcagcagctggtttaggagtgtaaggtggctgtctctgcgaggcagaggcaggggtgggaggcaattccctttatactcgatcactgccatcttggcccgatccaaactccgatttgggatctgcagcattcttgtgtagcccccagtttgatctttgtaccgaggggccagtacttgaaacagctttgggatcaaatccttctctgtgagccagaagtcagccatgcgcatggctcgttcgttagtgtctcccagcttcccatagtcgatgagcttctccgcgtagcccctcatttcgtccacacgcgcccatggtgcctcgatgcgttcgtgccgcaccagccctgtgagcaagttccgcaacagatggatgcgggactcgggaccgaggcccatacggcgaaatacgcggccatgggagatcgctgcagcgaccgacagccgcatgtttccaacttctgcccccc

SEQ ID NO: 321237 - DNA, 1653 bp, Homo Sapiens
cctgtctgggagagctgccccaaagggtggggaagcggccgatagtcgccttgggtgcctgtgtgtgcgctgcaaaagggaatgggtggggtgcttctggtcccaaggctgttcgtcgcagcaagtggttgccttgggagaagcccctggggatgcgtttgcgcccttgtgtttggctcgcggggtgtttcctgccccaaggaggtaagggcccaaggatgggtggggacggtgaccgggaatgggtgtgaaagccttccgcctgaggggatgaagttcctcttaagggagggtctgttgagagttgttgggcgcgtgggagtcgctgttggtggcgtcggcatttgaggtgccctgtctgtgttggtgtttagcgccgcgttgtggcggctcagcgcgaaggagggaaatggaggctgtgatccttgggaggccctagcatctctctggctggggttgtggttgcacgcctcgtttttgtgccgaacttggttggacatgctggggtgtcttgggtcctctccgtcgccagggcccattcagggggtttgaaggggacacagttaaggtaatgtgtgatcctgcgctcgagacagaggactgattgcagtatccccttggaaggttcgcagggtactagattgtttaaggaagtttcacttgcagagttgtcactgccctacgccctgtcaggaagtaatctttctctagagaagatcccaagcactcatctctaggagaccagatgtcgaaacacaagccacctctggcaacatttggaattataggatgcattcccatgtaaactggcattaagaaaaacaaattgcactaaccaaaataacccaaatttaaggaccagaagcataagccatgaatttactatctcaggtagactgagcatttggataattctcattctccagaaatcccacaggaaggaaaaaataaattaatttatatatattcatataaagacttttatctattgtgcaaagagagggtcatctggctccccagaaggttctcaaccccatcaagactgtccattttacatctctagctccagttcttctcagagagtaaaagtgctccaaaggcctgtgatcatgggtactgattaagggctgcagactcttcagatccagttaaatccctggtgtttgagctgtgtgggagctgtggttgcttgcttcctggctttgcctgaggtcctgccgcaaaccctgcagcagctggtttaggagtgtaaggtggctgtctctgcgaggcagaggcaggggtgggaggcaattccctttatactcgatcactgccatcttggcccgatccaaactccgatttgggatctgcagcattcttgtgtagcccccagtttgatctttgtaccgaggggccagtacttgaaacagctttgggatcaaatccttctctgtgagccagaagtcagccatgcgcatggctcgttcgttagtgtctcccagcttcccatagtcgatgagcttctccgcgtagcccctcatttcgtccacacgcgcccatggtgcctcgatgcgttcgtgccgcaccagccctgtgagcaagttccgcaacagatggatgcgggactcgggaccgaggcccatacggcgaaatacgcggccatgggagacc

SEQ ID NO: 321238 - DNA, 523 bp, Homo Sapiens
taaaacttatctgtttattcaataaccaagtttcttgtttttaagttactttttttgtgtcagttccaccaatgaaaatcatttggcttgtactttaaaatctattcttccacataaagaatatgaaaatatgtttgtggaggacaatgatggaggctcagatcacactgcacctctttagtcttccaacttgtatatgcatcataccaaagtgtcttgatccacagcgcaccattttccaaaggagtatcagtgggcagctgacatgtcaccactatggaatatttattctaaactggagactgcagttgtcagcctgtggaccagggaacagggaaaaatagggtagttgagattgttaaggagagttctaaaacagtttaggaaatcatgcatatgcatttacagtccatgtgatagtgacttttggcaactgcaaagtgactgagacatggcttgctttagaagcatcaaaacaaagaggcatgtgtgttttggagccttttgttgctgttgttcttat

SEQ ID NO: 321239 - DNA, 542 bp, Homo Sapiens
cctggttgtttactaaaactttggcaccatccgtactgtctagttcttgatcattcatactatccattattgtcattaatttctttagccttgccattgactcctgttcatttcctttgctcataaaatctgtcccaaaaccagggatcatccccaagatctgactgaaggggcccattttcatgatattttgaaattgctcatacatgtctcgcaacgtaaactgaccatgtttcaacttctctataagtgcttcattgtcatccaacttcaactcgttgactttatctatcagtccttcaatgtcgcccataccaagaagtttgctaataaaaggctgtgttttgaaaggttcaaagtcatctatatgttcccctgtaccaatgaaaataatcggactttttgtggcagcgactgcactgagtgcaccacctccttttgcatggccatcaagttttgtcactattactgaggctacatctactttatctttaaaagccttagcctgggcttcacaagcctgcccaatggaggcatccatc

SEQ ID NO: 321240 - DNA, 1301 bp, Homo Sapiens
  misc_feature (130)..(130): n is a, c, g, or t
  misc_feature (150)..(150): n is a, c, g, or t
catacatttgcagttccctattccatcaaaatgctttgccgaaacaacatcttgtaactgcaatggggcatatgactgatgtgctgaatggtgcatttgcactgatgctcaccatctcgttgctcagcancgtcagcatctcggcttgancttctgaatggccgcgggaatcacgcggcagtgccatggggtgggtggactgttttagactgccagcagtcaaaacagttgtgatgggctcaatgtctctacactgtgagcctggggaacccattctcctatggaatggttttcaggggtccagcaatgtcactgcaggtggctgagatattctggcccctgccttaatgaggaactacatgaaagaagaaccctaatgttcctaaaaattaagacaatgcggcagggttggggaagaggctggggggttgctttcaatgaatctggaaatttctggttttagctctctgaagaaggctgggagactctgttgtaggcagctgtgggagaaggctagggttggaggtacacctggagatgtgtcagtttggtgttggcactgcagattcagcgcccgtggtccctgactaaggcactctgcctagatctattttcccctgactgtaccttttatgccccctggctttcccattctccctggaaactcctgtttgtttttgctttctaagatagagatagcaagtagggttcatttctctcatctgactgttgggttcatctgactgttgagtggcggctctttggaattgtaatttgagaaggattgtgaagaaatcagtgggcttaataggaaatagtgctgtgattgattagcaatgtctgccatggccacaaaaattggtattgataaaataaatgcatcccaggcccttatatctctgttctaagtaaagtgagtgaatgaagctggcttgatgtatttttgaaggatctttggagaccatagcccaagccactaaatgtatatttattttatattctgccttgttccagaaaagatctgagaatttgggtggcttgggacaggaattttaggatttgtggaaagctagagagagagataattttgaataggctgatgcaggaggtccaagacaatgatctctgtttttatccctgggtgatgaagcccagtgtttagcaagtgattatagggcttattgattaaacagatccagaaagacctggataaatggggtgagtcctaggcatggtggaaatttcaggcagagcatttctgtgttgcagatctgatgtatttccccttggttaacagctga

SEQ ID NO: 321241 - DNA, 621 bp, Homo Sapiens
  misc_feature (544)..(553): n is a, c, g, or t
taaataggaggacttttatttaattttttgctgacatactatgaggcaaaacaaaattgacaccatacaaaataactttataaaatatcattcacatcatattttatcagatttacagcattctgtgcatgttaggggttatgtaaggaggtgaaaaaacactatgccaaacttttagtattagtttatatacacacagtaagaaacaaaacaagtaactgttaggttttccatgaatttattgcaaaaatagtgcaaactacttcacctagtaagctgtaaaaacaaactagaaaggacccagctaagcttaaacacgacaatagatgctcagtttctcagcatttagctttcttcaccagttttatcttgacaatcaagaccactccccatctgttcagtttcgggtgagtgctgaggaatagagaaatgtgaagacgggctctctggagagaccagaggctcgggctgcctgatttcaaaaacacatttaggatcatgctacttcctcaatcgcaatttttctgaggtctgtgttgggggnnnnnnnnnnggtgacatgatttttgaccttgagcttagaaataagttatccaacctcttgatgacatggagaaatga

SEQ ID NO: 321242 - DNA, 1648 bp, Homo Sapiens
gaaaaaaaccagtttattttgagatcagtgaaaagagtctaggccacagaaaagaacagctctttaatgcaagttaaaatgtgtaaatgaatgaccgggacactgagcaacctcagatgcagacttccatccggacactggtgtggcttcagtaccgaggctgctaaagctgccagtcacaacccagcatgtcaactggttcctcatgctctgtttggtgtggaaattcacatgtgccctgacactgaggaagcaattgcttaaaatcactttccaataacagctgataaaatattttgcaggtttgtcatgcaaggtttatttattaggtggctattcaaagtttgtatagcaaccacttaagcagaactaaattaatattcactgagcactgtaacgatggaagagggcttttcctaagggttgggttgggagttgtgcttctgtgaaattaacatctctcactcattgccaagattctctgcttaaaaatattagttttctgtgctgttgccaaaatagcaatttaagcaaatgtagtgccagaatgacacatgagcctcggactcagggaacagttccactgactgtggagtacaactattgcattcttttccaaaattcagactgatgtaaaagactgaaatacaatgttcttaaggatctgataaacatggctgggatgaaaagaaaactgagagggaagagtgcttttcacagtgcaattcatagcagcgttcaaaaccttggttatgaattgacttgaaggtggacagagcttaagactggaaaaattatctataattggggtttaacaaagagcatgggaaaagaaacacttggtttcagcaccctggattctacatacagtagggaaactgtgtgaagggttgacttttaaattcatcttgaataatcttttaaaagtttaaatttgtccaagaacaaaactaagaaaataataaaaaatggatgcaatggatgcttcaacacatctgagagatgtgcattcataacacaatatgtcaatcccatactcttgagaaagccagtgattagaaacaaatattgttgcaaccttataatttctgctttaatggcaatcaagtttaaaaaatgtacaattccacttatccatactattcctttataaaaggcagatttcaggtaagcttctaaatgcatgcgtaatgtagaggctaatattttctggcagtccttggttcctgaaatttgaacttcatatgtgttttaaacttttgtcaaaatagtcatgaaagatatgttatttttgcataatgaggtaatatatcaggggcgggcactcataagacagtataaatccacttgtctaaacttgcatgaggctgtgtgcattgtaaaatgccataaagagttttgggtcagtgaatattttgctgaaggaataacacttacatttaactgagcacttttctgtaataaataccaaagtaggtttttgtagctgtaaactgtgtacacagataactacaggctggtctgtcatggagctaaaagtttcacctggaaaacagaacccacctctttgctaatgttgcattttcagtaacacaattgagaatactgcattgttaggaacagagtcaattctatgcctttcaacggt

SEQ ID NO: 321243 - DNA, 1888 bp, Homo Sapiens
  misc_feature (732)..(732): n is a, c, g, or t
  misc_feature (1752)..(1752): n is a, c, g, or t
  misc_feature (1850)..(1850): n is a, c, g, or t
  misc_feature (1853)..(1854): n is a, c, g, or t
tcagatcgcagcaaggtaatccttgatggctggatctttttgctggagaatgcttggactagtgagcaagggattcactcatgtttcgtgtgtaaagagagcaagacagatgttaagcgctgtgtggtaactcagtgtggaaaattttaccatgaggcttgtgtgaaaaaataccctctgactgtatttgagagccgaggtttccgctgccccctccacagctgtgtgagctgccatgcttccaacccttcaaacccaaggccgtcaaaaggtaaaatgatgcggtgtgtccgctgccccgttgcctatcacagcggggatgcttgtctggcagcaggatgctcagtgatcgcctccaacagcatcatctgcactgcccacttcactgctcggaaggggaagcgacaccacgcccacgtcaacgtgagctggtgcttcgtgtgctccaaaggggggagccttctgtgctgtgagtcctgcccagcggccttccaccctgactgcctgaacatcgagatgcctgacggcagctggttctgcaatgactgcagggctgggaagaagctgcacttccaggatatcatttgggtgaaacttgggaactacagatggtggccggcagaagtttgccatcccaaaaatgttcccccaaatattcagaaaatgaagcacgagattggagaattccctgtgtttttctttgggtctaaagattattactggacgcatcanggcgcgagtgttcccgtacatggagggggaccggggcagccgcctaccaggggggtcagaggggatcgggaagagtcttcaaaaacgcactgcaagaagctgaagctcgttttcgtgaaattaagcttcagagggaaagcccgagaaacacagggagagcgagcgcaagcccccaccatacaagcacatcaaggtgaataagccttactgttttttccagatctacacagcggatatttcagaaatccctaagtgcaactgcaagcccacagatgagaatccttgtggctttgattcggagtgtctgaacaggatgctgatgtttgagtgccacccgcaggtgtgtcccgcgggcgagttctgccagaaccagtgcttcaccaagcgccagtacccagagaccaagatcatcaagacagatggcaaagggtggggcctggtcgccaagagggacatcagaaagggagaatttgttaacgagtacgttggggagctgatcgacgaggaggagtgcatggcgagaatcaagcacgcacacgagaacgacatcacccacttctacatgctcactatagacaaggaccgtataatagacgctggccccaaaggaaactactctcgatttatgaatcacagctgccagcccaactgtgagaccctcaagtggacagtgaatggggacactcgtgtgggcctgtttgccgtctgtgacattcctgcagggacggagctgacttttaactacaacctcgattgtctgggcaatgaaaaaacggtctgccggtgtggagcctccaattgcagtggattcctcggggatagaccaaagacctcgacgaccctttcatcagaggaaaagggcaaaaagaccaagaagaaaacgaggcggcgcagagcaaaaggggaagggaagaggcagtcagaggacgagtgcttccgctgcggtgatggcgggcagctggtgctgtgtgaccgcaagttctgcaccaagcctaccacctgtcctgcctgggccttggncagcggccccttcgggaagtgggaatgtcctttggcatcatttgtgacgtgtggtggcaaacccttcgacttcattttgcccacctctgtccccattncgnntctgtaagggagcaccccaggacggggacaggct

SEQ ID NO: 321244 - DNA, 652 bp, Homo Sapiens
aacatgcaatttaaatttatttcaaatctgctacccacagtgtttgagccagggcctaactttgggtctttttgcatattgccttaaacctagaaatgctacccttcaaacagggaaggggaaagaggaaggtgttaatccgaagtaagtgggagacagaggaacttcatgcacagttacagaaggcaggtttgctgttttaacccagatagaggggtttctactcttatttctaggaacacgacgacactggttgtgggagggagagagaagggatctttggtttctcctaattctagaatcattaatgcactggcatccagagggtgggtaatagaaatgtctgtgggtagttggtatgcacaaatggcccatcagctaactcatcaagctggtaggaatctgagcgcacaggtgggctgcggcaggcagcagtcctgggctcctcacagctgtgtgctacctagcagggaacaaaaaagaaagtggactcacacagacctgcagaaatgcaaacagggtgtgaagagggtttaaatttctaatatggcggaccagaatgtcttgatctatttctaggccatctattctattccggtggtctatttgcttacttctaaacaaatgccatacaatgtggtggctttatagt

SEQ ID NO: 321245 - DNA, 746 bp, Homo Sapiens
tttcactagaaatgaattcgttggtgtttagtgaggcaagaccgccgcccaaacgccttgccacattccatacatttgtatggcttctctccagtatggtttctctgatggtaaaccaagtttgacctttcgataaaagctttaccacattcattacatttataaggtttctctccagtatgcatcatttgatgattaagcagaattgaacgtactctaaaggctttgccacactcattacatttgtaaggtttctctccagtatgaatactccaatgacgtgcgaggcctgagcgataacggaagaccttgccacattcattacatttgtaaggtttctctccagtatgaattctccgatgccttgccagggttgtagtggagttaaagactttcccacattcaatacatttgtatggcatctctccagtatgtcttctctgatggtacaccagacttgttttatgactaaaagttctaccacattcactacatttgtgtggtttctccccagtaggatttctgtgatatcttgcaagttttgaactttggataaaagcctcaccaaattcattacagtggtaagggttctctccagtatgaattaccagatgtttagtgaggcttgaacgctgagtataggctttgccacaatcattacatttataaggtttctctccggtatgaattttccgatgacgtgctaggcatgagtagtaactgaagaccttgccgccctcgtgccg

SEQ ID NO: 321246 - DNA, 3278 bp, Homo Sapiens
  misc_feature (199)..(199): n is a, c, g, or t
  misc_feature (214)..(214): n is a, c, g, or t
  misc_feature (295)..(295): n is a, c, g, or t
  misc_feature (398)..(398): n is a, c, g, or t
  misc_feature (559)..(622): n is a, c, g, or t
aggggtgagtggtaacaatgggcgtatcttttcgcgccgccgctggcgggaacgagagggcggcgggccgatctgatgtggatcatacatattcgtcgcgtctcagagcggcggcggggcggaagatctgatataatggtaaagctgctcaaaaaatataagctttgctgcgatggatcacgtttccgcggtttgtaanttcttatagttctanctgctccgcggctggcgcggcggcactcacgagcacatcttcatatagtagacgaggggggcgttaacaaacaacactctnctttttgtcggcggcgcgcccgcaatccgtcagcataacagaaagcggcgggatggcgaaacgtggtgtccgcgactggcggctgttatattcttctgtcgangcaccgggcgcgtgccgcgcataagagggggagtataattcaaaaacatgttctctggggcgggcgggagtaatctgcgcggcgaccaacccacaatcgcgcatactttcctggctggtgcggggtactcgcgtgcgacgccgagtatcaaccgcaacggnnnnnnnnnnnnnnnnnnnnnnnnnnnnnnnnnnnnnnnnnnnnnnnnnnnnnnnnnnnnnnnngcaatgcttaattgtgccgcgcccgggtcagctacgcacgggggggtgatatattggcgacgccgcgataggcggggggttttcatgcttagtgttttatttcctcaaaggagccacgccattggccttcccaaatacctcctggtatccttccaatttccaccactcccaaccgtcagattccattcagcttcctccaacctcagaccaaccactttcttttcacaagctcagaccttccaaatattttaaaaatgaataaatgttaaataccaactttcactattacagaaaggggcagctagaaaagtttactctgtgcacaagactgcgacaccccgctcgtagaagctgcgaggatcctcctttgtagcaatttcgaagtccacggtgaagatgaggtctgcacgggtgaagttcaggtagacaggtaaggttaccacactggccttcttctcggtgtttgtctgcttgacccagcgcagctgcgtcaggggaagggcggttgagatggcattggacagtgacagcttgttgttgttgcacgtggccccttgaagtttcaaacccgtgactccgaagctgcaagcgtcaagggtggcgccctgtgaggtggtgacgttgacttccaggcagagctcctccagggaccagctgttggcctgggccacatactgcctggtggcagtgatgtacgcctcaggcacgaacaggccacccaggcacacgtggatgttctttagctccttggcgccaccagatgcagctgccagtgagatgttctgcagctgtttgatcctctcgctgaagtcggacacccactggatgacggtcatgccggcaggcaccgtgtagtgggaccagctccgaggcaagatccctttcactagctcgttgatcagcgtgcgcaagtagttggtctgcttcttctttccttcgcacacctggacgacatctgcaaggtcctggcgaacgtcctgaagcagctttgcgcccatcttcacttctctctcaaagaacctgaacaaaggatccttgatattctccacggtgcgcttgaggtggctcagcgtctgggggatgaggtgcagccagttggacgcggtggtgtgcagtgtccgcatccaggcagggcgcccgtcggacgtggagtctgtcctcgtcttcttctcggtctctgcgtaggccaggtcgtcctcatcctccaacatctgcatcttcagcattttactgatcatgtccacaccctgtgtggtaaggaggactctctcggcgttgttgggcaggcccagccaggagggcgtctgggtgtcggggagcaactccaccccactgcacaaactcctcttcgcctgatgccatctggcatttgaatgtctttatgtccgtcgaccttgcatgccagcttaaactcactgtcgaaactcctggttgtgaacaggcgctccaggaaggtgttgagcagacgctggtcaaactcgttgtccacgcgcccgccataaatggactgggccattaaggtctttagtgcagaccacgggatcttatccggtgagatgttctgcctgcccttggccgtgtcatccagccacgtgtccaccgtatcgcaagctgaccgcaggtcagactctccaaattcatacttctttgaccaccccagtggtgcgtatcgtaagcgttcttggatgatcgcatgaaaccaggccagcaggaagtacaagcgggcacgctcgttgggagacttgcatatccgtgagacgggaatgctgctgaacgtcctcagcatgttggccttcacccctggcggtggctcgaacacaaagatgcggcccgcacggagcagattcacaggcaccttggggttgatctccatggtgaggaagagtcggaagcaggcatgcggctgcagggaatgcaacttcttctccagctgcatcagccaccctggggccagatgcacattcttcagcatcacccacctgcccgactttacagcggtgtttaattgccttatctgcttggttatagccttctgcagagccgattgcaattgaagtgatctgcgtgttctgctcggctgcaaggtcctcgacatgtccactggcatcataaccaggcacagagcacattaagacaggagtgttgggcttcacctctgtgcccacaatgtgggtcaggtcgagcggctgctccatgatggacatgaaagactccccaaggtttgttgaaacaaacatgtgggccatggccaacaggcgatcgggccggaaagcctggatcaggagcaggcggtggatggcctggccaatgggtgttgcaggtgtttcttcactccagaggtagggcaccagtctgctccggggagctgctgtccagccagatgccaaattgctcgtctgcctgaacctttgcaatcaagtccttatacgcgggaaggcagctcagcctcaccaccgcctccgcctgctccacagtcaggccctggatcctgggggtggagccagcactcaggacaatctcatttcctctcaagaagtgctggaattctgcatcgtaggtgggctcccccacggtgcccttcagtttgattcttgccagcagcatggcaaaggtaatgtggtcctgatgcagcatgcctcgagccactcggttaaac

SEQ ID NO: 321247 - DNA, 1330 bp, Homo Sapiens
  misc_feature (119)..(128): n is a, c, g, or t
  misc_feature (163)..(222): n is a, c, g, or t
  misc_feature (229)..(310): n is a, c, g, or t
  misc_feature (323)..(347): n is a, c, g, or t
  misc_feature (370)..(493): n is a, c, g, or t
ccaaggcggcccaggggttgtaatccccgggggtattcaggtttttcacacccgtttggaggggtttccacttcgcccgaagtcttaataaattccccccctttcccaaaaaaggccannnnnnnnnntaatttaatttggaatccccttggatcccctttgnnnnnnnnnnnnnnnnnnnnnnnnnnnnnnnnnnnnnnnnnnnnnnnnnnnnnnnnnnnncgggggnnnnnnnnnnnnnnnnnnnnnnnnnnnnnnnnnnnnnnnnnnnnnnnnnnnnnnnnnnnnnnnnnnnnnnnnnnnnnnnnnnggccccggccccnnnnnnnnnnnnnnnnnnnnnnnnngggggcggggggggccgcaaaannnnnnnnnnnnnnnnnnnnnnnnnnnnnnnnnnnnnnnnnnnnnnnnnnnnnnnnnnnnnnnnnnnnnnnnnnnnnnnnnnnnnnnnnnnnnnnnnnnnnnnnnnnnnnnnnnnnnnnnnnnngtcagaactgtatttgttattcatacatttgcgttgatttaaatacattacgtacaatttctacattggattagaagaatgacacagggggcagcaacactctcgcagcccagcctccattccctgacactggaggcagggcctatggctggcagagggacggtgttccatgagtgccactcagaagcctcccccggcattctgggcccctggctcttccagagtccacattcaaggcaacctgagcacaggcttgagggagagtggagaaaggccaggaaaggatgcccacactcttgcctgccaggcccaggaccagctctctcctacactgggacccaatttccttctgatcacagagctggtctggatcaagacaatgtggagatctggtgtggaggctgtggccaggtgaggcagccgggctccctgttagacccccaggctctcttgagcaccagatgggcactttaccaacaggtttgggtaaaaatgtctacagagagctatgcacaacctgggtccccttctggctcctacagtcaaggggcaagtgttctctcgaacattgttcccaaggccagtgtccgagtcagctgcatgtgattgtcggggctgggattggggcaggcaggcgagctgtaccttcgtccacagggcatgcacatccagctctcagaaattcttcctgtcagccaggtggaagcccgggacaagtggactcttggtggctggactggaaggggaccggcggggaccagcctggaccagctgaccagagggctgcacatctctgctctgcagcagggcaagcagaggacatgcagccatagtcct

SEQ ID NO: 321248 - DNA, 479 bp, Homo Sapiens
  misc_feature (47)..(47): n is a, c, g, or t
  misc_feature (95)..(95): n is a, c, g, or t
aagcaaaccgggctcccctgttaaaaccccccagctctctttgaacnacccagatgggcaacttttaccaaacaggtttgggtaaaaaatgtctnacagaagagcttatgccacaacctgggtccccttctggctcctacagtcaaggggcaagtgttctctcgaacattgttcccaaggccagtgtccgagtcagctgcatgtgattgtcggggctgggattggggcaggcaggcgagctgtaccttcgtccacagggcatgcacatccagctctcagaaattcttcctgtcagccaggtggaagcccgggacaagtggactcttggtggctggactggaaggggaccggcggggaccagcctggaccagctgaccagagggctgcacatcgtctgctctgcagccgggcaagcagaggacatgcagccatagtcctcactccctttctttggttgtttttcaaaccttcaagatagt

SEQ ID NO: 321249 - DNA, 1400 bp, Homo Sapiens
ttttttctagaaacaaagaatcaggctttatttttgttattttgaatacaggtattgtattgtagacatctgttagtctcataattcagtatggccaacacacagaaattaaaagtagaaacaaaatgagggcacacttgctcctgtccttggcttggcccctccaacctccaaaagaactgtcctccccattgtcatatcctttccctgctacaaaagacaaaacaaaatgatgccccaaagaaaagtcccagaggctctctcccagcagtcagtgggatgaagcaagacactgttaccttgggtaggatgggagaagccaccagggtccataccacagaggccacagtggggatggagaagccaccaggtccataccacggaggccacgtgtgccaccagtggagccaaaccctgggccatggctggcaaaactcaccaccaggcgagaccagagcatattatctaccagtaatccccgaggtccaacgccattcaagtcaggcagccctgaggcaagcaggaggagccctgtcctctgggggtgctgcttccagaggaggcccaaggacagtctcttcagagaggggctcacccgggaaagggggttcctgagaaggcgtgcaaaggtcaagggacccacccttgccacctgtcccagggcttactgctgactccactgtcctgggagtgctggaatctccacaccacttaaaatgaaaaaggaaatcagaaataaggcattagacgtttgattcttttatttccatatgcaatgtaatgtttaggcacgctgcttgggatgctacttctaaaaaaattgttggccatttttcagaatatccttttggttttaaatactggtcaggaaaaacaaatgatgtaaaaatacgtgaataattttctattacagaaatgaaaaactgatttgcatctaaaagtgcaagaggtgaagtaatttaaccctttcaccagacgatatggcaatatacaatatattgcttgagctgtttgagaaggctgtgatgtatttttgtattgacatagaaaattataaattacattgaattagtatccataatcactatatatatacacaaaccagttctaaaaaaatacactggtttaaatttatgagtgaaaacctcacaaggtacagtaaacaattagcatgcttcggtgccagattttgatttctatttttaaaatactagcctgtaaaatgaacgcactctaattccattagcagcacgagcattttcaactgacttgcctaataggatttattttaggtctgttaaatatgcagattgctctgaaatgttcattggtgatgcttgttaacaaggtaaattttggtgaatgggttaaaaggcagatgaactaccaaatgaaacaaa

SEQ ID NO: 321250 - DNA, 378 bp, Homo Sapiens
ggacaagatttaggttaagttggccgggggttgcgtggaaagtattttacttcagattgaaaaatgaacagcttccacactgttcactgcaagatacacagtattcacgaatacaatgctggtcatttgaggaaatgtatacacacctcaatttctccttcatgcttttttcttttagaaagatactgtttaccaaaaagaaacttcagcagtacaggaaaaactattttcccaataaatttacgaaaacctaagattcccaatggaatcagaattatcttcccgctaccaccaccttaatataatcacatgcttattggaacactaatattcgcaccctaagagtacatttactttcaacaatgagggtgattcttt

SEQ ID NO: 321251 - DNA, 530 bp, Homo Sapiens
ggttattttagtgcagttcccaaagataaggacagacagtgctttaaactacgccaaggaattgataagaagattgtcatctatgtgcagcaaacaactaataaagaacttgccattgaaaggtgttttggtcttttccttagtccaggaaaagatgtacgaaatagtgacatgcacttattagatttggaatctatgggcaaaagttcagatggaaagtcgtatgttattacggggagctggaatccaaaatccccacattttcaagttgtaaatgaagaaactcctaaagataaagtcctgtttatgaccacagctgtagatttggtaataacagaagtacaggagcctgttcgatttctcctggagacaaaagtccgcgtttgctcacctaatgaaagattattctggcccttcagcaaacgtagtactactgaaaatttctttttgaaactaaaacagataaagcaaagggagagacagaataatactgacactttatatgaagttgtatgcttggaaagtgaatc

SEQ ID NO: 321252 - DNA, 1260 bp, Homo Sapiens
  misc_feature (79)..(79): n is a, c, g, or t
aagggttggggatgtgccagaactgaatggtgccacgtcaggttgtttcctccttaaataaggtaataaaaaactatgnatatccatagtcttttgcactttattttctgagataaaaaagtataggcataggtgtttttaatagtcttcttgatgatatcctttagaataatctatcaaatggcttctttcatgtttcctgattatcagcattcatcagtgttactgtcagccttgattaagtggttgaaaatttcagagaagaataagcaacttctgtgaacctttccccaatccctgagaatcataatcattacagaaatattttatcctttcatcaaatatctctggaaagtagccgtgttcgttcattgttaataggggcaaggtgcagtgtcatagagggttaatccatgtaaattggcttccacccgtaaagaaattttctgaaaatcacgaatgtaagtcaggaaaaacccaaagaaaggaaaatgacatagaccattctgctgcagtagtgatcatgtgaagcacataacctttgtcctcgggggttccaatggagtttctgttctaaatcagtcccaaaattgccactgtgcaaaactgatgagcaagtcagcatgctaagtgcacttactccacaccagataaccaacaacagtctgatccagaagacttgtttgccatggattttgggctgcatttggtaggaaaggatggtctgaacaaacatatataatgagcccataccaaaggtaagcacagctccacttacatgtgcagcaaaaagggttgttttctggaagtttgccacaatagaaagtcctaaacaactcagtattccaagtacaaggccagccttgtttaatttgatgatagcgttctcttcaggactcagagcatgaacttgccttataacgaacataaatggtagcaatgcataaaactgcccgcaatatttagcattgccccaaataagcatttttctggagctactgtaccagtgtcactgatataaggtaaagccgggtctatatggtggagtgttactgcagtaatgtatgaaaatatgaaagcagcagatgtccaaattacaagggctgaaggaaggaaactgaggccttgctgaaaccaccacatttctaacaggttttctgttttacaacttcacaaaatgttagtcttcagacctgctcatacctgcaccttttgtaaatccttaccagaccgactagcgcctggcctggcgccgaagcc

SEQ ID NO: 321253 - DNA, 516 bp, Homo Sapiens
  misc_feature (28)..(28): n is a, c, g, or t
  misc_feature (48)..(48): n is a, c, g, or t
  misc_feature (54)..(54): n is a, c, g, or t
  misc_feature (59)..(59): n is a, c, g, or t
  misc_feature (90)..(90): n is a, c, g, or t
  misc_feature (109)..(109): n is a, c, g, or t
  misc_feature (122)..(122): n is a, c, g, or t
  misc_feature (127)..(127): n is a, c, g, or t
  misc_feature (146)..(146): n is a, c, g, or t
  misc_feature (486)..(486): n is a, c, g, or t
  misc_feature (488)..(488): n is a, c, g, or t
gcctaaaaaacgaaaccataaagggtanccaagccataaaaacggccngcaaanatttnagccatgccccccaaataaaccatttttccnggaagcctactgtaccccntgtccaccgaatntaagntaaaacccggatcctatanggtggagtgttactgcaagtaaatgtatgaaaaatatgaaaagccagccagatgtcccaaattacaagggctgaaggaaggaaactgaggccttgctgaaaccaccacatttctaacaggttttctgttttacaacttcacaaaatgttagtcttcagacctgactcatacctgcaccttttgtaaatcaacaggaacgtgtactcaacaggaacgtgtactcaattagcttttgtgggaaagggttgaagattcttggtaactgcttcaacaaaccagaggaattaattagaccgctgattttctccggaagcgcgaagcactaggccgtttgaggatncntccccctttgccttaccagaccgactta

SEQ ID NO: 321254 - DNA, 901 bp, Homo Sapiens
  misc_feature (149)..(158): n is a, c, g, or t
  misc_feature (256)..(275): n is a, c, g, or t
  misc_feature (405)..(405): n is a, c, g, or t
  misc_feature (408)..(409): n is a, c, g, or t
  misc_feature (413)..(489): n is a, c, g, or t
ggggaaaaattattgttgccaaagggtgtaccagagagggtgataaccggcggggaatttcaggtgtaatttcaaccttttttgaaggggttttcccttgggcggaaagtttttaagaatttctccactaatttccaaacatttccccnnnnnnnnnnaaaattgggaattaaattccctttggaacccccttggaaacccccggaagacccccggaacccccttcggattttttcagaaattttggtgacccccnnnnnnnnnnnnnnnnnnnnattccagggcgaattcaagccccggttttcttcggaaacaccttggaaacagtttttttccttttcgggcccccgcccgaaagaaaagtttaaaaaaattttttaaaaggctatgggggcgcccaagggnccnnccannnnnnnnnnnnnnnnnnnnnnnnnnnnnnnnnnnnnnnnnnnnnnnnnnnnnnnnnnnnnnnnnnnnnnnnnnnnntagtcataaaaccgattatttaattgaagctataaaaaaggtagtataagtgataaaataattaggaaagaatatttagcatgtttcaatacatttaaaataggagcagaacattttacaaaaagttgtacaggaaattaaattcttaaactatcagtacaaacatgacattacagagtatcttataaaatacaaagacaaatataaaaggactatgatgctttaagtctgaaaactattggccaaatatttaggtttaaatttacagttcctgggtatgagaatcatattactatatacatctcccaaaccagtaggtagtattttccaattaaccatgtgtggtatcatcttctacaaagtctttggccatctctgctgtgatcacatcaatatgactaaccttatttct

SEQ ID NO: 321255 - DNA, 648 bp, Homo Sapiens
gttttttggcttgaaaatttttatttaacctcagcaaatattggaaatagaaaaatgaattctgcagaatttcacaaataaattttccaatttccactaacaaatgttatcattcaatggctaagcagttataatgctatgaacattcaccacaatgaatgtgctgaaatagaaaacaggcaaagagacattaaaatattacttacaacagcattattacaacatattttctttaaaattccaacgttggatttcatcacttcaaaaggatatacagcatttccattatatttgcaaacttaaccttatacatcttttaaaatcttggaaatttttttaggctgtctaaaaagcacttagcaaagtcgataagtctacctaatggaatactatccaccccggtataaatttcgttttaggagaaggtggctgtaaacactcatcatcacacaacatgcatagcctctgctgaccttcccttcttctgaatgcgacgccactgcaattgtgaaaaatacaggtaagacaggtaagagaagctgcagagattcagggactggcagaaagagcatcgcacaggaccactaggtttaggtgacctggctacctggagtccatctgaggaaagtttcacttgacaatagaagc

SEQ ID NO: 321256 - DNA, 620 bp, Homo Sapiens
ctattccattttcagacattgtcatggtctcttatacctttatataaggtatggtcctagaccagagactttagtatcattccaaagaatatagagatatttatatacatatttcttttaaaataatatttaaaagttttactacagaaaatctggcttcaacatggaagcatttttccttttcaagattatacacctgcatgaaagtaggtgatttcctttacatttagtttttcacaatagcaaaataaactttttatacattgcatttaaattgacaaagaaagttaagatgtaaagctccatgtaactttttgtattgcgaactgttctctttaaacttactccagatacactgctgattatctaatacagtacaacttgataaacttaattagaagtgttatgctgaacaatttgttaaatcaaatgtatgttaaaacagtaagtagagttaactattatgattaaaagggaattttaatgtatcattaaaatatacatcaattttcttgctattacttgtttctataacgcatttctttctaaagctaaaaccacatgcataaaaaataagtgataccttcaaactcattcaacagtttgctaccttatgtagt

SEQ ID NO: 321257 - DNA, 1226 bp, Homo Sapiens
tcaattccacttttatttcttcaaggattagctaaagacactgtcaggaccgagtatttaaaatgtgtttggaacagagacacacaattgggacagaggaaaaaaggattcatcttgtgagtcatcaaaagtgctttatttgtaaagcccggctcatgactggagtgtattgttagcactaggagataacagggcaaacgtcctcactctgtccaaatggtttatcaacagaaataaatgacagactgtttgttatagacaaaaataaaagcattctgtaaacttctaaaagcatacacagattggcccccaaggaaacagttactcaaataatgtatgtgtaccttatctttacttcagggtctcatgggttgtggtcttgggtcaaaccacagtaggaacttcacaacacaaaaactgatctgatgccagaattaatggtgcagggaaaaaccaaatcatagtatggattactttaaatacataaaagatgaatctgtacactacgtgacagtggtgttaacactggctgctgaggataccaaatctacataaaatgagtggacagtatacggagggcacgactgctggcttccaaagactctgtgaactagatccacatacacggggcacagctgcaatctggacagccctgaagtaaagttcctggaaaaggcagtacggcagggagatctgttgagttgcaagtaataattaaagggtcgatttttgtttgtttgttttcttttctgaaactgcccacaaaaatcatatcatgttttaaacaaggagtttcaaaggcatggctttagcgcagcatgtaagtggataacctactctaagcaagactaatatttaagctcaatgccttttggaaaatgcaggagagttggtagatacatgatctaggttggaaatttataacttgattaaaaacaatcagcacagtttagggcaatgaactttcataaaccagactggggcgaaatctctttttaaaaaaatcaatcattaggttgataaatgtacatttggaggaaaaaaatccttttccttttattgtgaaagactgtctaccatgtactttgactaaaacactcacgtaaaaacatggctgcaggatacgtctcaaaatatgacaaacgttatttcacctatactgtgactttacatgtaaacttcaaaaatcacatgctgtacatcaaatttttagattcaaaagatat

SEQ ID NO: 321258 - DNA, 1036 bp, Homo Sapiens
  misc_feature (61)..(61): n is a, c, g, or t
gactaataattttaagcctcaaatgcccttttggaaaaatgccaggaagagttgggtagantacatggatcctaggttgggaatttaataaacttggattaaaaaacaatcagccacagtttagggcaatgaactttcataaaccagactggggcgaaatctctttttaaaaaaatcaatcattaggttgataaatgtacatttggaggaaaaaaaatccttttccttttattgtgaaagactgtctaccatgtactttgactaaaacactcacgtaaaaacatggctgcaggatacgtctcaaaatatgacaaacgttatttcacctatactgtgactttacatgtaaacttcaaaaatcacatgctgtacatcaaatttttagattcaaaagatatccctgttttcctaataatgtaaacagtaaaactgagggtttcagttaaagggataattcgtaacaaaatcccattgttgaaacaatggtcaaacataaacatcttataattcagatctgcattcggtaacaggagaattgagagttttgatgctttgctggttttcccacagtgggagatgtagataccattgccccaaactatgcacttttcaggtaagctttacttttattttgtagcattaattcctatattgcaacgtaagggtgaacaatgaagctccaggcaagaaaagagaagtaagcagttttcctggacatattggccgaggtgaaaaatgtatagagaatcactggggcatcagctgcttgttgcgggaggggtgggggcctctggacacccagggggtcctgacaaggctggggccagaaccctgaaccagtacacacggagacgccagcattcttccgtccagtgctggggtctcaggttatcagtgttagggagagtgtctgcgtgcggggtagaaatggaacattcgctgtaggttttttccttggaatcatcatcattattataataatcatcattattatcttcattattctgaatactgtctcacatctttcaactctaat

SEQ ID NO: 321259 - DNA, 1153 bp, Homo Sapiens
  misc_feature (78)..(88): n is a, c, g, or t
gacacactatttttcgttagtttattacaaaactacagatacaatacacaaaattctaattccgaaatccttctacannnnnnnnnnnctgagactaaatgccctcaaagcccgtctgcttggcctgtattacaacctgactcctcggctcctggatgcacaggtcagatgttccaacaaccctgaccatggccagtgctatggagtcactccaaaggtggttgagccctctgtgaaaatttaaatggctgctaaagtcattctaaataaatagtgaacggattgtttctgcccctaagatgaaatcccacagatcttatgctcaagctcaggtcttcctactgccgccttcggacatctagaaagtatggtgggatcttcactgattttgttaaccctgggagtgccccttgtgatccagatgagtcaaaacaaacggccaggatctcttctaaaaagcccatgatggcccttctggctgtgtctccagttggtgcctggatgctgcccatgtgtttaagggccattctgaccatctggtctctttcctgtgggctgtggggtgctccagtgtcatctccctctgctcctgattttaaaaactgtagaatataggactggaccatattcccactcagttcaagggtttctttcatacaagggaggtccgaggcactggccaagctcaagaggtgaatcagtgccttggcagatttgggtccgtaggcttgacacagtacttgaattccaaaaagtctatggtgtcttcactcttctgtaaagcggtgaccaatgcattccagatccgagcatactggtcaacagacccgtactgctctctcttccccgggacggaaagggcagctgcagatctgatgcgcactttgaagttcttgcatgatgtcacgaccgatgtcagggcattgtaggcctgggaggtccatggggctgtccctaaaggaagggcaggatttttaaatacatttcccattgcataacaagcattccatcggactttcatggcagcttctgttagaacagtagaaattagggcctggatagactcctcaatgatttctgcaaatgtgggtttttctatatgagagggttgcagaaaatgaagcaaatttccaagggcccggactgcattgct

SEQ ID NO: 321260 - DNA, 678 bp, Homo Sapiens
  misc_feature (87)..(99): n is a, c, g, or t
ttcagaagccaatgttggcgaaattttcagcttcattccacagctttacagaatcataatctcttgaatatatttccaatgttattnnnnnnnnnnnnntcatacaagatatatttagcacattaaaacttaagaggttacagtataactgtccagacctccaggtaccactgaatacttttccagtacaaagaggccaatatgttagaataattaattctctgtatttacttttattaaaaagaggtttttggtagtaagaacaaataatctctcatttgttgcctgaaatcctaaaataggatcattggtttctaggcttgctacttgctgcttagcaacctgtcctacttgcctgccttcctttctgttgtaaagtacagtggacatgggagcaggctgacgatagatgaatactcgacgaaggcactcacaaagggctgcatacgagtaatttggagcacaggcaaaaaattttttgtctctctttgatgcttggacatagcctaaagcattgaaagttgcgatgtgctcccacatatcatcttgtttgctggagtgtggttgccagagtagggcatcaacatcatggcgcaaacagaagcagggcatttttttaggatccactatgacagagaaaaggtactggttgcttccaagattcaccacatgagtagt

SEQ ID NO: 321261 - DNA, 957 bp, Homo Sapiens
ttcaatttggaaacttttctctctcatttatagtgaaaatacttggaagttactttaagaaaaccagtgtggcctttttccctctagctttaaaagggccgcttttgctggaatgctctaggttatagataaacaattaggtataatagcaaaaatgaaaattggaagaatgcaaaatggatcagaatcatgccttccaataaaggcctttacacatgttttatcaatatgattatcaaatcacagcatatacagaaaagacttggacttattgtatgtttttattttatggctctcggcctaagcacttctttctaaatgtatcggagaaaaaatcaaatggactacaagcacgtgtttgctgtgcttgcaccccaggtaaacctgcattgtagcaatttgtaaggatattcagatggagcactgtcacttagacattctctgggggattttctgcttgtctttcttgagctttttggaaggataattctgataaggcactcaagaaacgtacaaccacagtgctttcttcaaatcatatgagaaatactatgcatagcaaggagatgcagagccgccaggaaaattctgagttccagcacaattttctttggaatctaacaggaatctagcctgaggaagaagggaggtctccatttctatgtctggtatttgggggttttgtttgtttttgctttagcttggtgaaaaaaagttcactgaacaccaagaccagaatggatttttttaaaaaaatagatgttccttttgtgaagcaccttgattccttgattttgattttttgcaaagttagacaatggcacaaagtcaaaatgaaatcaatgtttagttcacaagtagatgtaatttactaaagaatgatacacccatatgctatatacagcttaactcacagaactgtaaaagaaaattataaaataattcaacatgtccatc

SEQ ID NO: 321262 - DNA, 644 bp, Homo Sapiens
atgcactctaacggcacatctggccaaagacatttacactcatgcatagctaatgccgaagggttattcagaagcaaacctccatcttgatgaagatcatttcccaatgcatattctgcaaagtagcctggagcagcagatgaggctctaatggcctgccacattttatactgacagcctcccaaataatgagagttgattccaggaaaatgaccatagtttctgaacacaaaagctttgggtgttatccctctatttactatggtacttacagcagctaccttaggacatgtggggtttcttgctgtttcaatcatcagtgcagatcccatcctatccttaagaatgttttcccatgtttgactgtcataaaatgcatggctccaactcatttttactgttccaacaatgacattttgtgaaaatacatctgatcctaattttcgataaagttcctcacattcatccaagggcatatgaaacaaccccaacatgaaagctaatatggcacctgtgcttacaccacaaatgtaatcaaagagctgatgaactggcttctgagtaagttcaactaattttcgtagggtctggagagcaaccacgccccttgttcctccaccatcaattgagagaattcggattcc

SEQ ID NO: 321263 - DNA, 851 bp, Homo Sapiens
  misc_feature (271)..(290): n is a, c, g, or t
ggtattcgggcaaacaaagctcgggatgactacaagactctcatcaatgctgaggatcctcctatggttgtggtccgaaaatttgtccacctgctggaccaaagtgaccaggattttcaggaggagcttgaccttatgaagatgcgggaagaggttatcaccctcattcgttctaaccagcagctggagaatgacctcaatctcatggatatcaaaattggactgctagtgaaaaataagattacgttgcaggatgtggtttcccacagtnnnnnnnnnnnnnnnnnnnntaaggaacagttgtctgatatgatgatgataaataaacagaagggaggtctcaaggctttgagcaaggagaagagagagaagttggaagcttaccagcacctgttttatttattgcaaaccaatcccacctatctggccaagctcatttttcagatgccccagaacaagtccaccaagttcatggactctgtaatcttcacactctacaactacgcgtccaaccagcgagaggagtacctgctcctgcggctctttaagacagcactccaagaggaaatcaagtcgaaggtagatcagattcaagagattgtgacaggaaatcctacggttattaaaatggttgtaagtttcaaccgtggtgcccgtggccagaatgccctgagacagatcttggccccagtcgtgaagggaattatggatgaccaatctctcaacatcaaaactgaccctgtggatatttacaaatcttggggttaatcagatggagtctcagacaggagaggcaagcaaactgccctatgatgtgacccctgagcaggcgctagctcatgaagaagtga

SEQ ID NO: 321264 - DNA, 430 bp, Homo Sapiens
  misc_feature (24)..(24): n is a, c, g, or t
  misc_feature (81)..(81): n is a, c, g, or t
aagttccacgaagtttagtggctncttctccagcaagcgaaggaacagccccctccaggtccccctgctggaaagaaggtnctccggtaacatctccaatgaaggcgggccagcctccacgctggccggaacagcagagcaccgtgggtggtggaatagtacttgcggtgggtggcctcaccggaaaacagcacctgcatgggcgctgtctttgagctctccgtgtacggcaggggcttggccagcttctccacatgccgccccgctggagcccacctgcgtgtatgaataggagccgcggaagtaagggttgctgccccaggccgagcgcaagattcgccgaggttttggaatgttggggttccttttcctatctatctgaaaacacatgacacataatcatgtttccccgcctaatatcgggggttct

SEQ ID NO: 321265 - DNA, 683 bp, Homo Sapiens
ttttggcaggggagggagccttttttattatcccaaaatgcaaagtattgaaggcacttacaataacaaggcaggacagagggtaggcaagtgggggcacgggatccagcacagaggtaactcaacggcccacctgctcacggcccagcctggagaaaaagaaaagctacagggccaggtctgaaggcagtcagggcggctagctctacagaagataaaaatcctttctacagaggatcaggaaggcaggagcacacggcagcaaggggcaggctggaggtcacgagttagtggctcttctcagcagcgaggacagccctcaggtcccctgctggaagaggtctcggtacatctcaatgaggcgggcagcctcacgctggccggacagcagagcaccgtgggtggtggaatagtacttgcggtgggtggcctcaccggaaaacagcacctgcatgggcgctgtctttgagctctccgtgtacggcaggggcttggccagcttctccacatccgccccgctggagcccacctgcgtgtatgaataggagccgcggaagtaagggttgctgccccaggccgagcgcaagattcgccgaggttttggaatgttggggttccttttcctatctatctgaaaacacatgacacataatcatgtttccccgcctaatatcgggggttct

SEQ ID NO: 321266 - DNA, 1754 bp, Homo Sapiens
aatatgaccagcagaaggaatgtaaaaatgtaaagtggtcttctaattcttatgtaagctttgtcatagttattaaaaagacggtatcatattagaaagcccccacccactttcccaatgctgtatacattatacaaatccgtgacaaatgtattaccatttccaaatacctctctgttcattaatttacacttgcatagaaagggaagaagaaaacaataatatatggttattataaaaacaaaatatccatttctctttggatagtcagtgttttactctttcagtagaacacacagtcagcactcaacatcgtgggccaaggagccatggagcttctgatttaatggaacttggaattggcatttgctgaaaagggcaacactgtacgtcaggaaacattggttggccggatgaatacttcacattgcctgtggcctgctgggaacatttgggcagcaagatggaaacgtgctgtgaatctgctccatgacctccgtgagatccgtgctggtgtcgtgcggtggggccagcaggtcctctcccgctgcctggtggaactgtgggccggaggcatctggatcaagcgagtagctcagtgcagaatgctgaggagaagcccatggggaaacaccattgattcgggaatcagattcaggctgctccagcagctgtcggaggcggtggagctgagactccagctgtttattgtgatcttctaaaatctgcatcctagcctccagccgacctttgtgctgcctgaggagttttgcttctgctataagttctgaatcctcagacgtgtgatggggagatataatcgactctggcggtgaaccgacagggagcccccttcggaggtgctggtccttcagctgctcatactccacctgtagatttctttgttcttcctccaggtcagcaatgatcctctccagttctccacgttcttccctctctactgacttcaggatctgagctgggctctgcggctggctcactggggactctcctccgagtgtttggcaatactgctggatgagggcgtgctcgtcttccacacttcctgtggtggagctgctatcagtgagaaaagacccattagtcctttccatctgggccagtcgtgtggcatattgttctattcttgaatgggtgtcatcatgaaacagttgaggagattgtgagggggtctctaagttgtcaccttcaagaactgtctggacaggcaggtaaccaagtcgagggtgtttggcaaagtacttcttcgacctgaacttgttcttaagtacctttgtgaagtctcgtacatcttccccagatgttgtaggtatacaatattccaccattgggtaatgtaatttgtgaccttttgctgttcgacccgaaaagaaacaactctggcagacatcatagttaaaatgcttaaggcttctatacctgaacccgacaattggacattctttacagatgttgcatttggcctgatgttttgcagtctccgctgctgccactcgatgtaaaactgggagccaaaccatggactgtggttccaaatgcatccaatctataaactctttcacacttatttctggtttattgttattctgttggaagcagctgcgaacactaggctcaatattactgcctccaaaagctgctacttcacctagctgccgggggatctggatggcatcatgaagtacaggcccagctgcctctggtcacacatttctgttggccctgcaacttcc

SEQ ID NO: 321267 - DNA, 1171 bp, Homo Sapiens
caggatattaagaagataagtaatattgtgggccttttcaaacacttaaactatgattggaacattctgggaacatataatttagccccaaaagtttgaagtgaccattgttaccatcttcccttttgtggaaaaaaatgcagcttctttttgccatagacttgtttcaattcgaggagaaaaagtcactccagagattgttgaaagtttcaattatcaggctaaagcaaaaaatgcaacatcatttctgggttactcctaaagtttgcttcatattgttcataaaccacataactgatgcctacagcagggagcaccttcatgaagtttggggtgatgcctctgtaaagtcctggtattccttctttggaaataattcgtcgaaagaggccaaccatattcagctgtggggaaccttctaacatggcttgagcctgcatgcgagttctcaccaaagccaatgggtagctggccagctgacccacaggtgctgggataaggcaccgcatcccagcaacaccatgactccagggtttacagaatcttttgcaaaattttccagccaataggacttcaagagctcatacacagcaagatctatgcctgcataaggtatgatacctaataaattgggaacatagcctttgtaaaaagctcccaagccttcatgtttcaaaatcttcttggcacaatcatatattccagagtactgcccagttttgcctacagccagcctggttttcataacctccattggatatataaaagtctgtgcagttgctccagccatggaaccagaaataaatctctcaaatgttcctattttttgtccttcttcagtaagtaacttcttgtactgttcatatgcccagaatttaacagctgtctcaggagcaattttgatgacgtttgtaccatttcccctccaaagcgagcggatacctccttcttttaccatctgtcgaaagccaccaaatatgttcattttgtctgattttgaaccgtgaacctgcatcatgattttcagacggtccaaaggggcagtgcttgttcgagagacagcaccagcaatgcctcctgccaaaagctgcctccaccattgtccggattttttttcgtcttccgtgaattcatctggaatagttaagctatcccctatgtcaattcctgt

SEQ ID NO: 321268 - DNA, 499 bp, Homo Sapiens
  misc_feature (44)..(58): n is a, c, g, or t
cctggaatgataagtgagaattatttagaaaaagacatgctccnnnnnnnnnnnnnnnctgataaaacagtttttcggaaacttacttttaaaagcatacgtgctatgactctctccagtttgaatatgcaattgttttcacaggcaggatgtctgttttctgcctgtatttcccagtgatttactctagggtaaggtagtacacatttggttcagaaattaatttttatttctcctatatcttgttttatcaagattttgttgtggcatttcaatgtaaattataacaccatcatttgagtatacataattcaaaagaactacttgatgcagtatagtcttaagggttctgcatacattttagaaacatcttagccgtaagttaggtcctgtgttaaactgtttagtgctctgtttttaagaaaacaaatgttgaacctcacacttttatgtggtgacagtgtaatttaattaaaaggtgtaaatgttttcatctctt

SEQ ID NO: 321269 - DNA, 1374 bp, Homo Sapiens
tgcccccggttctctccccctttttgccttagcgcccggctttccgtttatcgcgttcgttcagcctctttgctgctctccctgcgcttggttctgtccgcagcggaatgttccaacgtcccccagtcccgggcttccacaacttcgtccaggcctcgcctatcccgggagtgatactgacaccctcgaatctcttaggcccagatgtgtttccctcggtctgaagccatcaccacaaggggcttcttgcctagtggccgaacccactctccacatgttgtggtccgaccacaagctactgacttctggattctcctctgtgaactctccaacagacttctgtagagagacccagatcgttgggtggtccttctgatggtctggataacccctgtacagctgacttaaccaagaagggaagtacatgttggagccacacgatggcgaaaaacatcacgaaatcccacgctgccggtagttaaaagtcagttttggaaatacacagaaatcccttaaaattccaggagttcccactctcttctcgaatatttaaggcctcctccgcacaacattggagtacacgtgtctagaaacagacaaatctccaaggtctctggggtgcttgctggggtggagataagggaaagacctctccctgagtcttaaagcatcagtctgcacttctactcaacaagtcggcagccaaagtgacgacgagagagcgactccacgtagcggcgccaggcgcgagcccaagacaaccagaggcggtcacaaggtatacgcccttctcctctttccacgcttctcgagaggctcccgcggccagaaccggaaaacaaggagtaacagtcgcgtttcaaatctcgcagacctgctggccgatttcgagtcttctgaaagaggaaggcgagcaaagccaaaattctcccagagcgcgaacccaaacacagatcgccgctggggtccaagcgcccttcaactccgcccgctagtgcccaagattaccgggaaggaattcaacgaatcagtggtgaggtgccgccgccatgcctactacgggcggaaatttgagagaaagcttcgcaccggtaggaaaactgaggagcaaccgagcacgattggaaaggttgacgatagtggttaagtggctcggccttgccctcagttaaaatggcaattttagttgcttcactgatacggaatcggcgaggcgccaaggaggcttcctgcgtggggccgcagagcgagtcgggaaacgattttaaactgaagaggcggcggagggccgaattcccttttctcaacggcttgatttcagagctgggctggtctctgacaggctcagctggagagggacgggttgggacgcac

SEQ ID NO: 321270 - DNA, 608 bp, Homo Sapiens
gccaagagataacacaatttatttaaatatattccaactcaagatgaaggcaagcggtttacttagaaaggtttacatattttagctatagtttttcactgaaccatcttttttgaagtgccattcttttcattcatgcttcttttattctctctctttagaagttcacagtgttatataagtcaaaaaacaagacagaaaccacccctaaacatatggctttatgtacataaaaaattcaataatgttgccataaccccctaatacagtgctggatcaacctgctttaagaagcaggtggcggcaggtctcagcattgtagaaccccagtatttaggtccgtgtacccgattcacagtaaggcaaacattgacacatcagcgcttaggagcagagaaagatacattcaatttggccaaagcaagaaggcgggagacctgaactctcacaaccgactgacttgaactctcacataactgggggctttcatgagtgaggtgggtatccgggaggtgacatccccaatgatcaacactgtctgcacccctcggtgaaacttctggatgccatcagggaggtctgcatgacctaaagattgttgttcttta

SEQ ID NO: 321271 - DNA, 571 bp, Homo Sapiens
  misc_feature (58)..(66): n is a, c, g, or t
gcatataaagaatctggctcctttgagtcatctccaactttgtcaccttaagcattcnnnnnnnnncttctccccttttcttttgaaaaatgctagaggcaaagaagaagattgaacaacagggaggcttcacctttgaaaacaaaggagtcctctccgcatttaattttgggactgtgcccagcaacaactgaaggaaagaacatcagctgaccaaatgtcatcgctggcattttattttcacaagaggagtgtgaggggtcaaggggatgaaatgaggggctgcttttaggggccctcctgctgtgcccagttcccatctggcattagggcagcacttttatcctactctttccccctttgacctttgtcaccctgaaatttatattttaaacagctactgtaagtatgaaatgaaagaaaaacaatcattggacggaaaaggacaaaccatatgttccaaaggctgaatgcccaaggttgttttagaggattggatagacttgcacgtctcaggtttttgccatgcagaatcaatggatttatgcggataacagtgccttctgttgta

SEQ ID NO: 321272 - DNA, 1003 bp, Homo Sapiens
  misc_feature (44)..(44): n is a, c, g, or t
gctggtacggtccggaatcctgggatatcgtcgacccacgcgtncgaatcctgtgcgtcctccacgagctcttccacctgtgccaaggtcaagatgatattccacttagtcgtcctaagaaaaagaagcccagaacaaaaaacacaccagcaagtgcttctttggaaggccttgctcagactgctggtcgaaggccctctgagggcaatgagccatcaactaaagaactcaaagagcacccagaggctcctgttcaaagaagacagaaaaagacaaggctacctcttgaattggagacttcctccacccaaaagaagtcatctagttcatctttattacgaaatgaaaatggtattgatgcggagccagctgaggaggcagttattcaaaaacctcggaggaagacaaagaaaacccagccagcagaattacagtatgccaatgagctaggagtagaagatgaagacataatcactgatgagcaaactactgtggaacagcagtctgtattcactgcacccactggcattagccagcctgtaggcaaagtatttgtggaaaaaagccggagattccaggctgctgatcgttcagagttgataaagaccacagaaaacatagatgtgtcaatggacgtgaagccttcctggaccaccagagatgtggcacttacagtgcaccgggctttcaggatgattggtctcttttctcatggattcttggctggctgtgctgtgtgaatatgtgtgatatatgtctaagcaggagataggtatcaacctttaaacgtttgcaaaattacaagagcctaggttcattcagagttttggatggttggctgagaaattcaggttgagggtggttggtaattttgggaccgaatttgggcggacttaagtaggatggggaaggtaatattggggagagaggggaaccttactttgagggggggaggaggaaacccggggtggggattatattagcgaaggggggggagaaatat

SEQ ID NO: 321273 - DNA, 532 bp, Homo Sapiens
agagcaatactcaagggaaaaggtgtttatttagaacaatgaaaacaatgagacattaacttccagcttaaataaagttgattgtgtgcataaaaatggtgaaaatattggactttcttggcaaaagaagaaaggggaagactttatattttctgacgtaatattcatcatttgtctttggtttgtgtattatgtgtatgattttgaaaaaaatgcatcaaagatataactttctggtgtttgctttgatattatccttgcaaacagaaaagttggcacatgtttctgtataaaactggtcaaagttggcctagggaatgatcttacattgtactttcactttacatcatactgtaagggtttaataatagcctaagggcatcagcattggatgtgggcttattatacctattcaagaggtggtgtgaggtttaagagagttatgtgccctttatcataaaacaaatctatgaagcatttatataaaaacccagtatttctggtttcaaattcagtactgtgccgtctgctt

SEQ ID NO: 321274 - DNA, 877 bp, Homo Sapiens
ggaaatccaaagtataagaaccaaaattatgagactgacccttggaactaactagtgaaaaagacattttaaggagagcaaagaagcatgaagaatcttatcagtaaaatatttcatttggtttatatttcaaatgtaatttaaaaagtttataagccaggaaattcgataatatgaaagcaaggagaaactaagttgcaccatttagctaagttcagggacaacattcatttataataaatcaaaaatttgatttttttcatgccatcagttgtacttaagcatatccatcatatttcagttgcaaaagatggtgaagaactcaagctgaagaggtgtctgctgaattttgttgcttcggtaagagcttttcaccatcagtttttagaaagtacgcatggctctccttctgttgatatctctcttgatttggcaaagagtacaatgaggacagcaaagagttgccatatagtcatcacaaatagatccagggatgccatatcgggtcctgtagagagtcctcattgcgacgcttgttccacacagacagcattcattcatatcagctgcaacttgacacccaaggcacgggaaacaaaatgtgccacagagacagactccgcagtcgctgaaacagtcacacatgcctgtctgccagttggagttctggggggccggaccgggaccgactccaggttgggtcacaacgaccaccggcgcctgagcttgcattttcagtgcagggccttaaaagcagtggaaattagtaaacaaggttccgagcaggaaatgtcttgtggcctgggagagaatctcaccacaaatgaaaactacgtgaaaggggagaggtaactgtgtttctatcgcagggcatccc

SEQ ID NO: 321275 - DNA, 1620 bp, Homo Sapiens
agattttaaaacatttatttgccattcactactttgcaacaattctcccaatttggtttgaaaagagacaacagttgacttttgttcaaagtccaagtaaagagagaggccatgtttggagtgagaatcctttaataactatatttatttccagagaacaataaatacagaaattgcaagcagtatatgtaacagtaatattttctttaaatacagaatcacctacttttatacaacttaacaggcaaacatgttattttgttgttgttgtttggaaattagcattgggaaaagctatataacagaggaaattccaagtaaaatcaaacagtgttcactcttaactctaaacacagtgctcccactactggttctgcattgaggcggaggggaaggccagaggcaggcttagcttcgggcggcagtggtctggggctgctcggactggagctgcttgccaaggtattcccagttgtgcaccatgagcttctgcacggccagcagagcattatagcggacctgctggtcttcatgatgcatgtggttcatgaccagctgcttcccaccgagctgctcgatgacccgtttgcctcgtggataatgccgcacatattctccaacatcgtgagcagcaacagctaagagttggggatcatctgacacttccaaaagttttgtcaagattttcaagagttcataattcttctcatttaacctcacagcattctctctccaaaatttctcagatttgtgcacaggactccattccaaccttccagatttaagttctgaactgtattcatcaaatgaactaaggtcctggacactctctccaagtttttccaaaagaaatttgatatcttcgctgatatcttcatcatcgtacttctgctgttccaagttctccaactgtttcagaactttgcactgaatcatagccagggcatattcttggcgagtttctctttcagttgatttttctaaaaagttacgaaatgctgcaagaatgattcttgttactttctctttgacagactcctgaaggatatcagacagaactggaatgatattatagcgccgcaggtgttcacacatttgaggactgaatgccaggagccatattgaaaaaatcatttgatactgggagctgaaagccacacttgttactcaacactcccattatgcaatttaccccatctgcttccacccaagcaaagcggtactcattgacccggagcatcagctgcaaacacccggccacgcactgcacatactgcgaactatcacttgaagagactgttcctgtttcaacagcaacaccgctaccacgcagtttctgtgaactcagctgagtttttatccaattgaaatagtaatttaagtcactgccttccatcagttcttttccccaagctgctaacttggcaataattcttgctgccatatgaacagtgaagggatcctggcgattcaacattggcagaaagtagggccacgcagtgttcttgctacatcttgcatagtcaaagaaaatgctaacacgctgatgattttcctgcagcatatcatccaccatagttagtatatactgaacggtctgttctttgcagatatgagtcc

SEQ ID NO: 321276 - DNA, 422 bp, Homo Sapiens
  misc_feature (307)..(307): n is a, c, g, or t
tgagaatcctttaataactatatttatttccagagaacaataaatacagaaattgcaagcagtatatgtaacagtaatattttctttaaatacagaatcacctacttttatacaacttaacaggcaaacatgttattttgttgttgttgtttggaaattagcattgggaaaagctatataacagaggaaattccaagtaaaatcaaacagtgttcactcttaactctaaacacagtgctcccactactgggttctgcattgagggcggaggggaaggccagaggagggcttagcttcgggcggacangggtactgggggctgctcgggactgggagctgcttgccaagggtattcccagttgtggcaccatgaggcttctgcacgggccaggcagggcatttataggcggacccgctgggct

SEQ ID NO: 321277 - DNA, 1016 bp, Homo Sapiens
  misc_feature (85)..(93): n is a, c, g, or t
  misc_feature (395)..(403): n is a, c, g, or t
ggcaccgcgcggttattatggagggcgttacgcgcacaagccagggtaagggaggcgcgctgggttgaggggaccatagagggcnnnnnnnnnctgcccgcggttactgtacgcgctatcgcggagcgtgtggggtggtgtagtcaggggggtggggtttggcaggcaaaggtgtcttatattcgtggcaccggtgttttcggccactcctgctccgggcgtgtctgaaggggggctacctcgagggcaccaagacaggggcgcgcgctggttttgtggtgcgagcggtttgcctgttcacggtcacggggaagagtccaaggggtaccactgactcagtcggggggggtggttttcacgaaagtgggcccgaaattcctatttacctcattagnnnnnnnnnccttttatcacgggggggtgtagttggatttgccgaggaagtgagggagcctcgggccattgtgaccagagagcaggtgtgaagtgggcttttaaaaaatttcggggttccacctggagggggtgggttgggaccaagggaaaagtgcttggtccccgcgcgccagtcggatcgtaaatgggaaatgtgtgggagccagtcctgaagtacttcacttccccggggtatgaagaatttcatcagcacggagcttatagagccattcatgcaaaaagtgagacagaagagacggtaagtcatctccgggggtttgtacttctactgtttggaggggctccactgtcccagtatctgtcatgtaaccaaacatggccattgcacattgctcgaatgcttcctccagagtatctccccatgcgtgtaacctaaagaagtatattcatgctctgtgtaatacaatccatggacatctgctgtatgatccaaattcacactcgtacttcctattgactggcggatacttggctttgatcgccttctgttcttcagtcaaattgtaatctctaacatcttcctcttcctgcgccatgactgcaggattagacactctccc

SEQ ID NO: 321278 - DNA, 799 bp, Homo Sapiens
  misc_feature (63)..(83): n is a, c, g, or t
  misc_feature (85)..(90): n is a, c, g, or t
  misc_feature (92)..(94): n is a, c, g, or t
  misc_feature (96)..(287): n is a, c, g, or t
tttttttcgtaggggtggccccgcccgcgccgcaaagagaaaagtttgttaaaaatttttttnnnnnnnnnnnnnnnnnnnnngnnnnnnannntnnnnnnnnnnnnnnnnnnnnnnnnnnnnnnnnnnnnnnnnnnnnnnnnnnnnnnnnnnnnnnnnnnnnnnnnnnnnnnnnnnnnnnnnnnnnnnnnnnnnnnnnnnnnnnnnnnnnnnnnnnnnnnnnnnnnnnnnnnnnnnnnnnnnnnnnnnnnnnnnnnnnnnnnnnnnnnnnnnnnnnnnnnnnnnnntcttcgtaggagtcttttattttttggtgtcttaaatgtcaatgatcacaaaaacttccgggttctcttcattatagacctgcattgctgaatatgttattgctttgacttctgttccctgagggtgcttggacaatgaaaattcttctccccacccggggtatgaagaattcatcagcactgaacttataaagccattcatccaaaaagtgaaacagaagagactgtaagtcatctccttgggtttctacttctactgtttggaggggctccactgtcccagtatctgtcatgtaaccaaacatggccattgcacattgctcaaatgcttcctccagagtatctccccatgcgtgtaactggacatctgctgtatgatccaaatactcgtacttcctattgactggcggatacttggccttgatcgccttctgttcttcagtcaaattgtaatctctaacatcttcctcttcctgcgccatgactgcaggattagacactctacttccccc

SEQ ID NO: 321279 - DNA, 768 bp, Homo Sapiens
  misc_feature (107)..(107): n is a, c, g, or t
  misc_feature (117)..(117): n is a, c, g, or t
  misc_feature (628)..(638): n is a, c, g, or t
aaaaaatatttaactttattaacagaatatttacatttcttttaagaccttatttaaccatagtgagtgttccaagtttaaaaagcattaagcaataaccacacacnaagatgaaanccagtgtaaactatacagttctttatatacaatttttacaaagtaacacttttttaaataatataactggacacaaaaatatacactatagagaaattcacatcggtaattgtataaagctctcctctagggtcctgaaaatttaggacaaacattagctctgtaaataaagtgttactgtgacagtcctgaaaggccactatatatatttatctacataatagatatcacactgacattttcaaggctaccagctttactatataatttttagattatgtattcaagtgttgaggtgcttatgattatgcaaacattaaaagaatagtggtataagaagtagctggggaataaatttgagccagcatttagattacaggctctaaataccccaacttaaatgctaaatggctgatactttctcacttcaaaaacagtagtgaataatgtttaaaagtactgcaaacaagctcaaaacatgattcagatttagtacagttttcttaagagnnnnnnnnnnnaaatgcaaacaattcatttaccatttctttgttttagtgcatctgcattaaggctttgaattatttgacccaagattacaatattaaaatctgactcaaaattttacaatgttaaaacaaataggtcccc

SEQ ID NO: 321280 - DNA, 544 bp, Homo Sapiens
cacgaggatttcttacagcagcacactcacttacaaaaagaccaaaaaaattttattgctttacaacaagccagcaacaaacacaactgaatagttataaacatgacacttctaaatcctcaaatggaattccaagaccagagtgtgcttctccactttaatagcatttgttaaaactgaaatccacaacttctggcaagtacttcaatattctcaagcagaatcaatacttaaagaggttaaaagaaaaaactattatcaaacgtattgtctgtgggatgatctaatttaaaagcctttcatgcttgatcctggcagtgctattactgcacattttaagtgaccatcatgggcacttttaagaacctaacttcacaaaaagagctgtcacaagaaaattgttctaaaatcccaatgcacagtaactcatgcctcatttcaactgctttcctcatgatgaaaaaatgtagtcagcctttaacttggcctgataaaagctgtgaaaggtatgccaaatggccccttgtacaaacaggaagccccc

SEQ ID NO: 321281 - DNA, 673 bp, Homo Sapiens
  misc_feature (211)..(236): n is a, c, g, or t
gttaccattctgatgttgttattgtttgtttgtttccaaagaagttggagttaaggacacaatatatttgtacccctagactgaatgggtgagtattccatatgaggatctgggtaatcctctttgcaacccacatttggtcttcagagacactggcattttgaagaaacatatgatatagctgtttggaaataaattcatctatgttacnnnnnnnnnnnnnnnnnnnnnnnnnnatgagcaggagatcttaattgacagaaactcattggtggttggagtggccaatgggcacgggaaaaagtatccagtaatcagaagaattgtatctgggttatgtaatcttatgcacattccattgtctttgccaagcccagaagccatgttgtgttcattgttaagaaatttgatagatttacccagcttttctatgtattttgacttattgaaaatatgtaacaactgagtcgggttgcagcactggtggggtagaatcgactttccctgaaggtgacacagatgtcagaattgtgtccagggatttaatttagacccatactgtccaggagactgtctctagttggatctctgtgctgactgactgacagacagactttagtgtctgtgtgctgactgacagactctagtagtgtctatatgttgaccaactggt

SEQ ID NO: 321282 - DNA, 1003 bp, Homo Sapiens
gggtggtggcacggagaatagcccctgttaccgtggagaaaaaggggtttttacagattcggttccgggggtatttatttttcgggtcaaagttttcgggaaacttgccgtggggggggataagggcatctttccattttgcaactcgctttccataaggcaacgtggctttcaaatggctgtccccaagttcaggcccctgttcggtgggttcaaaaaagtctttcttgattttgctgggaattaggattttttcaggctccctccattggcttcttgtcccatttttttccttcgggtaggcatttggtcttcaaccagaatgtttttcagcactttgttttgcctcatctgccctccagtttttggcttcagagaccatcttggagagctgttcccacttcagccagggcactcaggacatcttggtccaagtccatggctttctgccaggcgttgtgtgcaacagtaaccagaccaccacagccaggccccccacacttcctctctccttcgtcagttctgcagtttggcccgccacattcagtctcggaacaggaggcccctgggggtgttccacaggtcatttcggcagcggctgaaaggtctaggctttgtagcttgcctgccagttcatcaaggaggcgagcctgctcctcttgtttttccttgaactgggattctcgctccatcatcacgtcttctactctgtctctcatgagggctgactgctccacagtgctgttgggttctgtggtggaggcattcaccctctcctctgcctcaagagacatctggaaatacttggtaatgctatccaaggcaccccgaatatctgagtttttgataaattccagttgttcagcaagttctttcacagtgttgtctaggctttcggcttctgtctgtagagaatccagttctttggctgtgctgttgctttgggaagttgtgtcagataatttcacttctaccctcgtgccgaattcgccacccagacccc

SEQ ID NO: 321283 - DNA, 709 bp, Homo Sapiens
aaccaagagaaatttattgcctcacagttctggagcctggaagtgcaatatcaaggtggagacagggttggtttcctctggaggccataatgaaagcatctgttccaggtctctgtccttggcttgtagatggccatcttctggtggatccacacagtcttctccatgtgtatcctttcttcagtttcccttatagggacaccagtgatgtcagattagggatcgaacccaacaacctcatttgaagttactcacctgtttgaaaaccctatgtccaaatacagttatagtgtaaggaactaggacttagggcttacaaatatggagtggggcatcatccagaccataccatttaaattgcagggtttctctccaatgtgagttcacatacacacattaaggtttgtgggattcagaaaggtattcccagattctctacattcatacggtttctctccagtgagatttctgatgtgtttggtaaggcttgagaattcagcaaagtcatttccacattccctgatgcagggtcttctccactgtgaattcatatgtgttcattaagacctgagatacaaagttgcttccacatttttacattcatagggtttctccccagtgagttttcatgtcttcagagagaacagggacacctttaggttttcccacattccttatgctgacagtctctcatccgcatgccttcttt

SEQ ID NO: 321284 - DNA, 1026 bp, Homo Sapiens
aggttattggcacttttaggagtcctcatggccaaacccgacccccagcttctcttaagcatattcacctaatgcctctttctcagattaagaaggtattggacataagagagacagaagattgccataatgcttttgccttgcttgtgaggccaccaacagagcaggcaaatgtgctactcagtttccagatgacgtcagatgagcttccaaaggagagctggctgaagatgctgtgtcgacatgtagctaacaccatttgtaaagcagatgctgagaatcttatttatactgctgatccagaatcctttgaagtaaatacaaaagatatggacagtacattgagtagagcatctagagcaataaagaagacttcaaaaaaggttacaagggcattctctttttccaaaactcccaagagagctcttcggatggctcttatgatcatcccatggctcagtggagggaaggagtccttcgagcagtggtaagcttgttgtgagtcgtctttctagcacatcatccttagcaggtattccttctccctcccttgtcagccttccttctttctttgaacggagaagtcatacgttaagtcgatctacaactcatttgatatgaaacttaagtcccgtgggacctatgcttcaacaagacgctgactttaagtggtactttgaattagcacctggtaaagttggtaaagaagattagctacccttaacccacgccgttttatttttcttggaacacaattttccaagaaggccctcagggaaaccaccccatccgtgtcattaccccaaacccccttggtggtccttcaggcgtgtctatccaaggttatgtcccgtataccgcccgcgttgcctctcccccggtttcctatttccccccttattcgtgttcctgcccacccctttctcttggcctccccgtgccccccctggcgatgctccttccttgcgctagccccacatttcccctcccaattgtcctgcctccattataccccagtcgccacct

SEQ ID NO: 321285 - DNA, 597 bp, Homo Sapiens
  misc_feature (478)..(478): n is a, c, g, or t
  misc_feature (488)..(488): n is a, c, g, or t
  misc_feature (556)..(556): n is a, c, g, or t
  misc_feature (581)..(581): n is a, c, g, or t
cttcaccgggaggctgaggtcggagtcccgattttctcctgctgctgtggcccggacatggcgactcccggccctgtgattccggagtcccctttgaaccatcgaagcctccagtcattgaggggctgagccacttgtttacaggaatccagagagtttcaaggaaaagttcgttcgcaagacccgcgagaacccggtggtacccataggttgcctggccacggcggccgcccttcacctacggcctctactccttccaccggggcaacagccaggcgctctcagctcatgatgcgcacccggatcgccgcccagggtttcacggtcgcagccatcttgctgggtctggctgtcactgctatgaagtctcgaccctaagcccagggttctggccttggaaagctccgcagaaatgatttccaaaacccaggggaggcaaccattgggccttaccgtggggaattaattccttcttttntttgagaagncctgtgttggttggggaagaagtgaactttgtgttaatttaaacgaaatttttttaaaaatcttagantgtttttgtttgatgttaaatattntatttttggcaaattt

SEQ ID NO: 321286 - DNA, 501 bp, Homo Sapiens
  misc_feature (347)..(347): n is a, c, g, or t
  misc_feature (361)..(361): n is a, c, g, or t
  misc_feature (444)..(444): n is a, c, g, or t
  misc_feature (473)..(473): n is a, c, g, or t
aatacaagtggatttttagagtttattaagcaggggagtggaggggagatgtggcacaaatagaagtatgtaacattcaaacaacagcatctaggatttttgaaaaaactttcggttacagttacacaaagggtcacttcctccccagcgacacatgggcctctcaaaggagaggagggagtaagtcccacggtagggccagtggttgctccctgggttttggaatcatttctgcggctttttcaaggccagaccctggggcttagggtcgagacttcatagcagtgacagccagaccccagcaagatgggctgcgacccgtggaaaccctgggggcggcgatcccnggttgcgcatcatngagcttaggagcgctggcctgtttgccccggtgggaagggattaggggccctaggtttaggggccgccccctgggccaggggnaacctattgggtacccacccggtttttcncgggttttttccgaacgaacttttttct

SEQ ID NO: 321287 - DNA, 551 bp, Homo Sapiens
  misc_feature (422)..(422): n is a, c, g, or t
  misc_feature (512)..(512): n is a, c, g, or t
  misc_feature (529)..(529): n is a, c, g, or t
tttttttaaatacaagtggatttttagagtttattaagcaggggagtggaggggagatgtggcacaaatagaagtatgtaacattcaaacaacagcatctaggatttttgaaaaaactttcggttacagttacacaaagggtcacttcctccccagcgacacatgggcctctcaaaggagaggagggagtaagtcccacggtagggccagtggttgctccctgggttttggaatcatttctgcggacttttcaaggccagaccctgggcttagggtcgagacttcatagcagtgacagccagacccagcaagatggctgcgaccgtgaaacccttgggcggcgatccgggtgcgcatcatgagctgagagcgctggctgttgccccggtggaaggagtagaggccgtagtgaagggccgccnccttggccaggcaacctatgggtaccaccgggttctccccgggttttgcgaaacgaacttttccctgaaatccctggattcccgtaaaantggggctcacccccaantgattgggggctttcaagggtt

SEQ ID NO: 321288 - DNA, 778 bp, Homo Sapiens
  misc_feature (14)..(14): n is a, c, g, or t
agaactgtttaaanctgtcactgttagaatttatctctgatgtatctgctgagaagtcaccttcagatgatgattcagaagcgagtgtgctggtcactaaagagttgctttgggactcacacgtagtagcaaaagaaccagaggacaggtagtcagatttcactgaggtttcttctgataatatctgaagatatgcaagtttagcggccaattgttttgcttcctgtttagtagaacctgtaccaatactatattctttctgtcccattttgcatttataatgaaatccttctggcccatgcacccccgatgcacactgttcataatttacagttagtcttttcttctgggcaattctattgataaggcctatgtaattccccatggataatccttctgaagaattcgttgttgtcaataataaaggactaactgccttcttttccttattaagtatctcaacagctaatttggctgcggcattttttgcttccttctttgatctaccttcaccttctggaaattctcttccatctattataacttgaaatgtaaacctcctatcatgtggaggtcctgaattaggcagttcttgatatttaagtactactccctgcttctgacggtatgtattaagttcctccatgaagaaacctgctgaaagatcaccagccatttcttcttcccgtatcctggttggaagctttgtccaaaatgcacgcagataatcacggaagtgtggatgttgattctgaagaccgccagagaagcaaacctg

SEQ ID NO: 321289 - DNA, 858 bp, Homo Sapiens
gcactttcttgggtcacattcggttggaacctcacaagcctcagcaaattcccatcgattccacggtctcatttggcgcatccacaagggcatacactctgcgcgagaagcctcagacattgccatcggctgtgaaaggagatgagaagatgggtggagaggatgatgaactcaagggcttactggggcttccagaggaggaaactgagcttgataacctgacagagttcaacactgcccacaacaagcggatttctacccttaccattgaggagggaaatctggacattcaaagaccaaagaggaagaggaagacttcacgggtgacattcagtgaggatgatgagatcatcaacccaagaggatgtggatccctcagttggtcgattcaggaacatggtgcaaactgcagtggtcccagttcagaagaagcgtgtggagggccctggctccctgggcctggaggaatcagggagcaggcgcatgcagaactttgccttcagcggaggactctacgggggcctgccccccacacacagtgaagcaggctcccagccacatggcatccatgggacagcactcatcggtggcttgcccatgccatacccaaaccttgcccctgatgtggacttgactcctgttgtgccgtcagcagtgaacatgaaccctgcaccaaaccctgcagtctataaccctgaagctgtaaatgaacccaagaagaagaaatatgcaaaagaggcttggccaggcaagaagcccacaccttccttgctgatttgatatttttggtcatggagaagggtgggattgggtgggaatggggtggaagggtgatggggagctaatgcaactagggag

SEQ ID NO: 321290 - DNA, 200 bp, Homo Sapiens
catcaagcaacagaggaccaatgcaacaagaacacaaatgtgaaatcatgggctgactgagacaattctgtccatgtaaagatcctctggaaaaagactccgagagttataactactgtagtataaatataggaactaagttaaacttgtacatttctgttgatcacgccgttatgttgcctcaaatagttttagaagag

SEQ ID NO: 321291 - DNA, 1086 bp, Homo Sapiens
  misc_feature (1003)..(1045): n is a, c, g, or t
aaatccccaggccccttagttctttaccccgggtttctccctagggaaacccagcttatgggccaagggtcgctgttccttattgggaccccgcggcgccaaaggaaatggtttaggaaaggattctcggaagggccgaagggggcccgccaagggtattttttcagaaacctttggtttccccagggatttcccagttggaagagctccctctcccttttctttatcatcatctgagaccttttgatcatcaggaattggttcctgggactttagaagtgaagctctttcttcgtctacgcaattgctccactcttctgctggtgcattccaatcagagttgggatcagcagaagacagaccatttaacccagaccattcatcatcgatatagggttgattacggctaacatctctctgataatcagaagtggtagtctgagaaactggctcagcagtagactcaatgccagaaaatattgaacggtcactccaactccttccccagtcttttccatttgtattagcatctccagtgtcttgactccaggcagatggctcagttttcctctttcctgcagaagcaggtgaaacggagttccacttctcctcacctgcactgatctgtgaggagagttttacagacttttcattccagcctcctccattgacagtgaggttttcattcaatcctgaagaaacctgaagtgtagaatctccttttccagatttaaagttgctaacttgaacatttagatgagaatcacctttattcttcttggaaccaacaggaaatgatgcggttgtaagttgctcggtggtaactgtgatggtattttctatcccagggatagttgaatccaatgaaccagaatcagtcagcaccttatcacgtttacgctgctgtcgtttctctctgtgactaattttagtttcccaggctccttcatcaacttcctttccatcatggcgtgaactgttttgcactgctttagcatctgannnnnnnnnnnnnnnnnnnnnnnnnnnnnnnnnnnnnnnnnnntcaatctctggtggctgctttgctgttacactttgaggtgt
